United States Patent Application Publication US 2006/0107345 A1 - sequence listing, part 7

SEQ ID NO: 25560 - protein, 120 aa, Triticum aestivum
THMCYSNFNDIIQSIINMDADVITIENSRSDEKLLSVFREGVVYGAGIDPGVYDIHSPRIPSKEEIADRVNKMLAVLDTNILWVNPDCGLKTRKYAEVKPALTNMVEAAKQIRAELAKAQ

SEQ ID NO: 25561 - protein, 118 aa, Triticum aestivum
MCYSNFNDIIQSIINMDADVITIENSRSDEKLLSVFREGVVYGAGIDPGVYDIHSPRIPSKEEIADRVNKMLAVLDTNILWVNPDCGLKTRKYAEVKPALTNMVEAAKQIRAELAKAQ

SEQ ID NO: 25562 - protein, 103 aa, Triticum aestivum
MDADVITIENSRSDEKLLSVFREGVVYGAGIDPGVYDIHSPRIPSKEEIADRVNKMLAVLDTNILWVNPDCGLKTRKYAEVKPALTNMVEAAKQIRAELAKAQ

SEQ ID NO: 25563 - DNA, 504 bp, Triticum aestivum
  misc_feature (50)..(50): n is a, c, g, or t
  misc_feature (56)..(56): n is a, c, g, or t
  misc_feature (77)..(77): n is a, c, g, or t
  misc_feature (88)..(88): n is a, c, g, or t
ctctctccatacttccgctctccagggttcgtttcccctcggagccgaanccctanccgccgccgccgacgaccgcnagcaggctcanatgggaggcaagtgcccgcaccgcaaggtcaaaaagcgccgtctcaactgcaagcaggtgcgccgcggcaagttcctcgtcaaagccgacgacgccgtctacgacgagctcgtcaagctggccgaccagggcaaggattccgagggcaaggcgcttcccgtcgacgaggacctccccggcatgggccagttctactgcctccactgcgatcggtacttcgcggatgagaccgtgaaggaggatcactaccgctcaaagcgccacaagaaaagggtcaagcagttgtctggaccagccccacacacgcaaatagatgccgatctcgctggtggaatgggaatgccggacaacggcttgaagctcatgtcttcctgaactttgtgatcgttgtttgatgtttttattgctgttgctat

SEQ ID NO: 25564 - protein, 153 aa, Triticum aestivum
  misc_feature (17)..(17): Xaa can be any naturally occurring amino acid
  misc_feature (19)..(19): Xaa can be any naturally occurring amino acid
  misc_feature (26)..(26): Xaa can be any naturally occurring amino acid
  misc_feature (29)..(29): Xaa can be any naturally occurring amino acid
SLHTSALQGSFPLGAEXLXAAADDRXQAXMGGKCPHRKVKKRRLNCKQVRRGKFLVKADDAVYDELVKLADQGKDSEGKALPVDEDLPGMGQFYCLHCDRYFADETVKEDHYRSKRHKKRVKQLSGPAPHTQIDADLAGGMGMPDNGLKLMSS

SEQ ID NO: 25565 - protein, 124 aa, Triticum aestivum
MGGKCPHRKVKKRRLNCKQVRRGKFLVKADDAVYDELVKLADQGKDSEGKALPVDEDLPGMGQFYCLHCDRYFADETVKEDHYRSKRHKKRVKQLSGPAPHTQIDADLAGGMGMPDNGLKLMSS

SEQ ID NO: 25566 - protein, 106 aa, Triticum aestivum
  misc_feature (16)..(16): Xaa can be any naturally occurring amino acid
  misc_feature (18)..(18): Xaa can be any naturally occurring amino acid
  misc_feature (25)..(25): Xaa can be any naturally occurring amino acid
  misc_feature (29)..(29): Xaa can be any naturally occurring amino acid
LSILPLSRVRFPSEPXPXPPPPTTXSRLXWEASARTARSKSAVSTASRCAAASSSSKPTTPSTTSSSSWPTRARIPRARRFPSTRTSPAWASSTASTAIGTSRMRP

SEQ ID NO: 25567 - DNA, 937 bp, Triticum aestivum
cccatcccacctcttctcttctcccaagtcccaactcaaaggcaagcgcagacccagctcagctcaggcaacaacaatcagatcacacacaggctgcctaatcctgctcttcgttggcggtttctgtgcagcccgccgagctcttgcgagaatattgcaatggcgtccacgtcgagctcgacggcggtggacgagagggagcggaagcggaagagggcagccgggggtgattccacagcgtccgccggcccggggacggaggcgcagccttccaagtggcggacgcagcgcgagcacgagatctactcgtccaagctcttcgaggcgctccgccttgtccgaggcgggtcatcgtccgcgtcgacggcgccggcgcgtggccgggccgtgcgggaggcggccgaccgcgcgctcgcggtggcggcccgggggcgctcgcgctgtagccgcgccatactcgcctctcgccgccgccgcctccaggccgcccaccgcgcgcgcctccgtgccccagccacaccgcccgcgcgccacccctccgtcgctgccgccgcacagccgcagccggggaaggcaccggcgctggcgaagaaggccaaggtgctcgggcggctggttcccggctgccacaagctgccgttcccggcgctgctcagcgaggcctccgactacatcagggcgctggagatgcaggtgcgcgccatgaccgctctagccgaggtcctggcgagcgtctcctcgtcggcagcctccggcagctcctcctcgccggcatgacccacgcttcgtgcatgattcgtgtattcgttgtaaatttcaccccatcttcctcgtgggttggattagttagcctctcctctctagttgtcctcttgtttctcaggttggttgagcggttagtggtgtgttggtgataatgatggcactctggtgatct

SEQ ID NO: 25568 - protein, 258 aa, Triticum aestivum
PIPPLLFSQVPTQRQAQTQLSSGNNNQITHRLPNPALRWRFLCSPPSSCENIAMASTSSSTAVDERERKRKRAAGGDSTASAGPGTEAQPSKWRTQREHEIYSSKLFEALRLVRGGSSSASTAPARGRAVREAADRALAVAARGRSRCSRAILASRRRRLQAAHRARLRAPATPPARHPSVAAAAQPQPGKAPALAKKAKVLGRLVPGCHKLPFPALLSEASDYIRALEMQVRAMTALAEVLASVSSSAASGSSSSPA

SEQ ID NO: 25569 - protein, 234 aa, Triticum aestivum
PSHLFSSPKSQLKGKRRPSSAQATTIRSHTGCLILLFVGGFCAARRALARILQWRPRRARRRWTRGSGSGRGQPGVIPQRPPARGRRRSLPSGGRSASTRSTRPSSSRRSALSEAGHRPRRRRRRVAGPCGRRPTARSRWRPGGARAVAAPYSPLAAAASRPPTARASVPQPHRPRATPPSLPPHSRSRGRHRRWRRRPRCSGGWFPAATSCRSRRCSARPPTTSGRWRCRCAP

SEQ ID NO: 25570 - protein, 205 aa, Triticum aestivum
MASTSSSTAVDERERKRKRAAGGDSTASAGPGTEAQPSKWRTQREHEIYSSKLFEALRLVRGGSSSASTAPARGRAVREAADRALAVAARGRSRCSRAILASRRRRLQAAHRARLRAPATPPARHPSVAAAAQPQPGKAPALAKKAKVLGRLVPGCHKLPFPALLSEASDYIRALEMQVRAMTALAEVLASVSSSAASGSSSSPA

SEQ ID NO: 25571 - DNA, 1610 bp, Triticum aestivum
  misc_feature (1495)..(1495): n is a, c, g, or t
atttcgcttctcgacttccccaatcggccaccccccacctccgccttccttcctggccagcgcggcggcttatggcctccatgaccacacctcggctccccttcctccccgcccgaacccgctccgccgtcgccgccacctcctcttcgtccccctcctccccgctaccacgccgctccatcaaatgcagcagctccaccaacgctaactcggcccccctcccttccacatcgcggcagccccgggcgcccgtggcggacggcgtagggtccgccgacctcaacggcctccgggccccgcctatacctgtcgcggactcccctctacccgcgtaccgcgatccgcacgggctgcctcggcctctcactagtgcggatctgatggagtcgagcggggaggggctcaaggttgcctaccagggcttccctggagcgtacagcgaggctgcagcaaagaaggcctatccaaattgccagacagtgccctgtgagcactttgatactgcatttcaggctgttcaaaactggatagttgatagggcggtactgccacttgagaatactctgggtggtagtatacatcggaactatgaccttttacttcggcatgagctgcacatagttggagaggttcgccttgcagttcggcattgcttggtagccaatcgtggagtgaagatcggaaacctaagaaatgtcatcagtcatccccaggctcttgcgcaatgtgagcatacgctgacagagttaggaattgaacatagacaggctgttgatgacactgctggtgcagcaaagttagtcgcagaacaaatgctccaagatactggtgctgttgccagttcattagctgctgaactttatggactcgatattcttgctgaaaatattcaggacgaaaaagtcaatgtcacccgttttatgatgcttgcttgggaacctattatacctcgggttgataaaccattcaagactagtattgtgttttcacttgaagaaggacctggacagctcttcaaggcacttgcagtttttgcactgagggaaatcaacctcaccaagatagaaagccgtccacacaagaaaaggccttttcgtgtagctgatgatgctttctccacgcgagtcaagtacttcgactacctgttttatgtcgaccttgaggcgtctatggctgatccaaaaactcagaatgctctcagaaatttggaggagtttgcaacttttttaagagtcctggggagctatcctacagacgtgagcgaagcttgaatagcaagtgcttgctgcagatcacatgttagtgattaatcaattgtgtgcctttctcttaatcggataaacatccgcctttgatagctgctgtttggtgtaatgaaataaacatagttctccattatagagtcagaaacatgtagctctcagagcatatttcctagtacttggattgggacttgagcagtcttattactcataaaatgtacgtgggtagtccncagcagaatagtggatatactcccggggattgttcaggttgagtacaatgtagaatcagaatactgaactatgcgttgtgggggtcaacaaagtggatataaagtgattgggggg

SEQ ID NO: 25572 - protein, 422 aa, Triticum aestivum
FASRLPQSATPHLRLPSWPARRLMASMTTPRLPFLPARTRSAVAATSSSSPSSPLPRRSIKCSSSTNANSAPLPSTSRQPRAPVADGVGSADLNGLRAPPIPVADSPLPAYRDPHGLPRPLTSADLMESSGEGLKVAYQGFPGAYSEAAAKKAYPNCQTVPCEHFDTAFQAVQNWIVDRAVLPLENTLGGSIHRNYDLLLRHELHIVGEVRLAVRHCLVANRGVKIGNLRNVISHPQALAQCEHTLTELGIEHRQAVDDTAGAAKLVAEQMLQDTGAVASSLAAELYGLDILAENIQDEKVNVTRFMMLAWEPIIPRVDKPFKTSIVFSLEEGPGQLFKALAVFALREINLTKIESRPHKKRPFRVADDAFSTRVKYFDYLFYVDLEASMADPKTQNALRNLEEFATFLRVLGSYPTDVSEA

SEQ ID NO: 25573 - protein, 399 aa, Triticum aestivum
MASMTTPRLPFLPARTRSAVAATSSSSPSSPLPRRSIKCSSSTNANSAPLPSTSRQPRAPVADGVGSADLNGLRAPPIPVADSPLPAYRDPHGLPRPLTSADLMESSGEGLKVAYQGFPGAYSEAAAKKAYPNCQTVPCEHFDTAFQAVQNWIVDRAVLPLENTLGGSIHRNYDLLLRHELHIVGEVRLAVRHCLVANRGVKIGNLRNVISHPQALAQCEHTLTELGIEHRQAVDDTAGAAKLVAEQMLQDTGAVASSLAAELYGLDILAENIQDEKVNVTRFMMLAWEPIIPRVDKPFKTSIVFSLEEGPGQLFKALAVFALREINLTKIESRPHKKRPFRVADDAFSTRVKYFDYLFYVDLEASMADPKTQNALRNLEEFATFLRVLGSYPTDVSEA

SEQ ID NO: 25574 - protein, 396 aa, Triticum aestivum
MTTPRLPFLPARTRSAVAATSSSSPSSPLPRRSIKCSSSTNANSAPLPSTSRQPRAPVADGVGSADLNGLRAPPIPVADSPLPAYRDPHGLPRPLTSADLMESSGEGLKVAYQGFPGAYSEAAAKKAYPNCQTVPCEHFDTAFQAVQNWIVDRAVLPLENTLGGSIHRNYDLLLRHELHIVGEVRLAVRHCLVANRGVKIGNLRNVISHPQALAQCEHTLTELGIEHRQAVDDTAGAAKLVAEQMLQDTGAVASSLAAELYGLDILAENIQDEKVNVTRFMMLAWEPIIPRVDKPFKTSIVFSLEEGPGQLFKALAVFALREINLTKIESRPHKKRPFRVADDAFSTRVKYFDYLFYVDLEASMADPKTQNALRNLEEFATFLRVLGSYPTDVSEA

SEQ ID NO: 25575 - DNA, 1783 bp, Triticum aestivum
ctagaacatcctaatcgaaaagaacaaaagcaagaagtctgctacccaatcccatctactaccccccatctctcttcctgctccgtggtgtacttgtggtctcgaggatgaggagctccatggccctcttggcggcggcgctgctgctgctggtgtcgctggcggcggcggcggacatgtcgatcgtgtcgtacggggagcggagcgaggaggaggtgcggcggatgtacgccgagtggatgtccgagcaccgcaggacgtacaacgccatcggcgaggaggagcgccgcttcgaggtcttcagggacaacctccgctacatcgaccagcacaacgccgccgccgacgccgggctccactccttccgcctcggcctcaaccgcttcgccgacctcaccaacgaggagtaccgcagcacgtacctgggcgcccggaccaagccggaccgggagcggaagctcagcgccaggtaccaggccgacgacaacgaggagctgccggagaccgtcgactggaggaagaagggggccgttgctgccatcaaggaccagggcggctgcgggagctgctgggctttctcagcaatagcagctgttgaaggcatcaaccagattgttacgggcgacatgatccctctgtccgagcaagagcttgttgactgtgacacttcatacaacgagggatgcaatggaggtctgatggactatgcgtttgagttcatcattaacaatggcggtatcgactctgaggaggactacccctacaaggagagggacaaccgttgcgatgctaacaagaaaaatgcgaaggttgttaccattgatgggtacgaggatgtgcccgtgaacagtgagaagagtctgcagaaggcagttgcaaaccagcccatcagtgttgcgattgaggctggtggcagggcattccagctctacaaatcgggtatcttcactggaacctgtggaacagcacttgaccatggtgtcgccgccgttggttatggtacagagaacggcaaggactactggctcgtcaggaactcctggggtaccgtctggggagaggatggttacatccggatggagcgtaacatcaaggcatccagtggcaaatgtggtattgccgttgagccttcctacccgacgaagacgggcgagaacccccctaaccccggcccaactccaccatctcccgccccaccgtcttccgtctgtgacagctacaacgagtgccccgcgagcacgacctgctgctgcatctacgagtacggcaaggagtgcttcgcctggggctgttgcccactcgagggtgctacctgctgcgatgatcactacagctgctgccctcataactatcccatctgcaacacccagcagggaacctgccttgcggccaaggacagtccactgtcagtgaaggctcagaggcgtaccctggccaagcctatcggtgctttctctgtcattgcaactgacggcaagaaaagtagcgcgtaaacatttgcatcaccacaatcctacagccaacggccatggtggttaacttctgcaaatgatcacctggtgacccacgatagaaggcgcagcatggcaatagctgtgctctcaagtatcttctttatagtagatgctcctgtacataatcctaaaatcgggttcggttgttcacagaaccgccacatttgcttttgcatatgtatatgtaaattcagcacattcccaggcagtttggggctgctattgttatatggaattcatcaagaaacaagataagcagatttcttgtc

SEQ ID NO: 25576 - protein, 461 aa, Triticum aestivum
MRSSMALLAAALLLLVSLAAAADMSIVSYGERSEEEVRRMYAEWMSEHRRTYNAIGEEERRFEVFRDNLRYIDQHNAAADAGLHSFRLGLNRFADLTNEEYRSTYLGARTKPDRERKLSARYQADDNEELPETVDWRKKGAVAAIKDQGGCGSCWAFSAIAAVEGINQIVTGDMIPLSEQELVDCDTSYNEGCNGGLMDYAFEFIINNGGIDSEEDYPYKERDNRCDANKKNAKVVTIDGYEDVPVNSEKSLQKAVANQPISVAIEAGGRAFQLYKSGIFTGTCGTALDHGVAAVGYGTENGKDYWLVRNSWGTVWGEDGYIRMERNIKASSGKCGIAVEPSYPTKTGENPPNPGPTPPSPAPPSSVCDSYNECPASTTCCCIYEYGKECFAWGCCPLEGATCCDDHYSCCPHNYPICNTQQGTCLAAKDSPLSVKAQRRTLAKPIGAFSVIATDGKKSSA

SEQ ID NO: 25577 - protein, 457 aa, Triticum aestivum
MALLAAALLLLVSLAAAADMSIVSYGERSEEEVRRMYAEWMSEHRRTYNAIGEEERRFEVFRDNLRYIDQHNAAADAGLHSFRLGLNRFADLTNEEYRSTYLGARTKPDRERKLSARYQADDNEELPETVDWRKKGAVAAIKDQGGCGSCWAFSAIAAVEGINQIVTGDMIPLSEQELVDCDTSYNEGCNGGLMDYAFEFIINNGGIDSEEDYPYKERDNRCDANKKNAKVVTIDGYEDVPVNSEKSLQKAVANQPISVAIEAGGRAFQLYKSGIFTGTCGTALDHGVAAVGYGTENGKDYWLVRNSWGTVWGEDGYIRMERNIKASSGKCGIAVEPSYPTKTGENPPNPGPTPPSPAPPSSVCDSYNECPASTTCCCIYEYGKECFAWGCCPLEGATCCDDHYSCCPHNYPICNTQQGTCLAAKDSPLSVKAQRRTLAKPIGAFSVIATDGKKSSA

SEQ ID NO: 25578 - protein, 438 aa, Triticum aestivum
MSIVSYGERSEEEVRRMYAEWMSEHRRTYNAIGEEERRFEVFRDNLRYIDQHNAAADAGLHSFRLGLNRFADLTNEEYRSTYLGARTKPDRERKLSARYQADDNEELPETVDWRKKGAVAAIKDQGGCGSCWAFSAIAAVEGINQIVTGDMIPLSEQELVDCDTSYNEGCNGGLMDYAFEFIINNGGIDSEEDYPYKERDNRCDANKKNAKVVTIDGYEDVPVNSEKSLQKAVANQPISVAIEAGGRAFQLYKSGIFTGTCGTALDHGVAAVGYGTENGKDYWLVRNSWGTVWGEDGYIRMERNIKASSGKCGIAVEPSYPTKTGENPPNPGPTPPSPAPPSSVCDSYNECPASTTCCCIYEYGKECFAWGCCPLEGATCCDDHYSCCPHNYPICNTQQGTCLAAKDSPLSVKAQRRTLAKPIGAFSVIATDGKKSSA

SEQ ID NO: 25579 - DNA, 1233 bp, Triticum aestivum
ccacttagaccgcctccgcccacgcatcatcgacggtgaagcgtaggtagcgagcgcctccacagatcgggatcaggcggcgatcgacttctccggcgatgtcaagcaggcgatcccccgcccggccgtcgctttcggcggcgtcggcagcgctggcgatcacggcggtgcacaaggtcgcccagggtccccggtgcagggctttccagcagcagggacagctccctggccgctgcgcgcggcgccgacgggggcaatgccaagttcgcgtggtacggcgcgccgtcggcggacgtggccgcggcggtggagcacgggttcgggaggaccaacagccgggtcctcggccatcgcgcgcacggcgacagcgtccacctctcgccgcctcagtctccttacgccagcgcaatgctagcaaatgcagatgagaacggcgaggcgcacatcgtgctgtgccgtgttctgatgggccggccagaggccatcccagccgggtcctcccagctccaccccagcagtgacgattacgacagcgccgtcgacaacatgcagaatccccagtggtacgttgtttggagcaaggatatgaacacgaggatcctcccagagtacgtcgtcagcttcaagtgccccagcctccatcagatgcaaggatcatcgggagcgacctccgccctaaagaagccttcgccggtggctcgtgacatgtttccgacgcttctagcagagatccagcggttcgtgccatcctccaagctggagacattgcaggggacctacaatcgcttcaagaaagggcagatgaagaaggatcagttcatccggttcttgcgcgccttcatcggcgacagggtgttgacagcagttgccaagaaactccgaggatactgatggacagtgcaagggtgttcttctgctagttctgttgtcgtcaaagtggtgtgctggtggtgaggtggtagctcattcggctgactccatagaaccggaagggtgtgcgtgtcgggtatcaaccagatagttcttcatttcttatgtcgccgtagtttagccgagaatcgttgttgatctcaagaacatagaggggttacgggcaatcttccattaaccaacacaaagttagattttattcttggtttctgctatattttacttggtattttgttacctgcaatctgtacagactgaaagttttaccaatttatgcctgaaagcaatcatttgttcgacgcc

SEQ ID NO: 25580 - protein, 160 aa, Triticum aestivum
MLANADENGEAHIVLCRVLMGRPEAIPAGSSQLHPSSDDYDSAVDNMQNPQWYVVWSKDMNTRILPEYVVSFKCPSLHQMQGSSGATSALKKPSPVARDMFPTLLAEIQRFVPSSKLETLQGTYNRFKKGQMKKDQFIRFLRAFIGDRVLTAVAKKLRGY

SEQ ID NO: 25581 - protein, 141 aa, Triticum aestivum
MGRPEAIPAGSSQLHPSSDDYDSAVDNMQNPQWYVVWSKDMNTRILPEYVVSFKCPSLHQMQGSSGATSALKKPSPVARDMFPTLLAEIQRFVPSSKLETLQGTYNRFKKGQMKKDQFIRFLRAFIGDRVLTAVAKKLRGY

SEQ ID NO: 25582 - protein, 114 aa, Triticum aestivum
MQNPQWYVVWSKDMNTRILPEYVVSFKCPSLHQMQGSSGATSALKKPSPVARDMFPTLLAEIQRFVPSSKLETLQGTYNRFKKGQMKKDQFIRFLRAFIGDRVLTAVAKKLRGY

SEQ ID NO: 25583 - DNA, 1216 bp, Triticum aestivum
acgcaggcacgcggctgtccccgtccgcgtggcctccaactcgactcgttccctttccttccttcttcccctcgtctccccaaccagaaacctaaacagaatcccaacccacccccgcagccaatcccaccggacgccagtcagccaaccccaatctcgactcctccgccgcctgaatccggttccgagtccatatttgaggtgccaccatgttcaacaggttatttgggaagcccaaggagcaggccaacgccggcgcgttggccactttggataagttaaacgagactcttgatatgctggagaagaaagagaaagtgttagagaaaaaagcaggcgctgagcttgagagggccaaggaattctcaaaagcaaagaataaaagagcggctatccaatcattgaagaggaaaaaactttatgagcagcaaattgagcagcttgggaatttccagttgagaatccatgatcagatgatcatgttagaagctgctaaagctacaacagagactgttgatgcattgaggactggagctaaagctatgaaagcgatgcaaaaagcaacaaatatcgatgatgtcgacaagactatggacgaaattaatgaacagacagaaaacatgaaacaaatacaagatgctctgtcagctcctcttggagcttctgctgattttgacgaggatgaactggaagcggagctggaagagttggagggagcagagttggaatcccaactactggagcctgttgtaactattcctattcatacgacgcccgtcccaggcaaggcgcaaccaactcgccctgctccacagaaagcatcggctgaggaggatgagcttgctgcactgcaagctgaaatggcattgtgatcaggcccccagtgaatgaagaggtgaaatgtacaaatgattggctggacggtacgctgtcgcaggcgagtcctggctacacatatatttgcccgtgtgtataatctttggtgggagacatttggcgaacagaggcaggaaaggctgctccagtccagtgtttatctagttgtttgattgaaggtctgtttcccggacataatttttggcacggtcagctccattccaggtcgtgtgcaatgctcattgttgtggcacactatttactgttgacccgtattatctcttgccatgtaaaccaagttatctcattccagtgtttgctaatttggtgtgttgacggg

SEQ ID NO: 25584 - protein, 220 aa, Triticum aestivum
MFNRLFGKPKEQANAGALATLDKLNETLDMLEKKEKVLEKKAGAELERAKEFSKAKNKRAAIQSLKRKKLYEQQIEQLGNFQLRIHDQMIMLEAAKATTETVDALRTGAKAMKAMQKATNIDDVDKTMDEINEQTENMKQIQDALSAPLGASADFDEDELEAELEELEGAELESQLLEPVVTIPIHTTPVPGKAQPTRPAPQKASAEEDELAALQAEMAL

SEQ ID NO: 25585 - protein, 191 aa, Triticum aestivum
MLEKKEKVLEKKAGAELERAKEFSKAKNKRAAIQSLKRKKLYEQQIEQLGNFQLRIHDQMIMLEAAKATTETVDALRTGAKAMKAMQKATNIDDVDKTMDEINEQTENMKQIQDALSAPLGASADFDEDELEAELEELEGAELESQLLEPVVTIPIHTTPVPGKAQPTRPAPQKASAEEDELAALQAEMAL

SEQ ID NO: 25586 - protein, 132 aa, Triticum aestivum
MIMLEAAKATTETVDALRTGAKAMKAMQKATNIDDVDKTMDEINEQTENMKQIQDALSAPLGASADFDEDELEAELEELEGAELESQLLEPVVTIPIHTTPVPGKAQPTRPAPQKASAEEDELAALQAEMAL

SEQ ID NO: 25587 - DNA, 1490 bp, Triticum aestivum
gtgctctgctgccacccccaaatctcctccccactcccgaatcaaatcccccgtcacctccgccaccaccccaccccacctatccccaccgccggcgcgagcacgggagcgcgagcgcgagcggagcgatggccggcgcgggatcctcgtcgggcggctcgggcggcggcggggggagggagggcgactgggactgcggcggctgcggcaaccgcaactacgccttccgctccctctgcaaccgctgcaagcagccgcgcctcctcgtcgaccccaacaccccgcgcgactccaagtggctcccccgcgccggcgactggatctgcaacggttgcagtaacaataattatgcatccagaaagaactgcaagaagtgcaacctgcccaaggaggaagcagcgatgccgcagttatcaatgggaggaatgatgccagcctatgcagattatatggccagggtacaggagattgccaatgctgggtataagatgaactttggcaatccagctatgcagcagcagctactcgcaaacgcaaactggccctatgggatggctggtagatatggtatgcaatcgtctgcttggccgttcgccggcaacagcacaaatcagtttcaaggtgttccaaaggactggcgtagtggtgactggctctgcagctgtggattccataactattcatctcgtgctcagtgcaaagagtgtaatgcacctgtcccatcaggcatggcctctacaaccatgaaatccacaggagcagatagttcttcaacattaggtaataagcgtttggcatcagaggagcttgctaatgactgggataataaaaggctaaatccaggaaatgctaattatccactttcagcagcaggctcagataatttatttatgggtcaaggtgctggaaacaataatggccagacaacttattctgcatatgacaatggaaactcaatggcatctggacaaattccagggatgtctggtgtagttggtaaaggagcaaaatggcgtgaaggagactggttgtgcaccaactgcagcaatcataactacgcatctcgtgcattttgtaacagatgcaaaactgcgaaagagtcttcggttcatccgggtgcgctataataatagctttgcttgtacttttgcgaccaagttattgaagcgggtgtggagtctcctggttctgccacggctgatcggtcgctgccgtcgccaggattgttgttatgtttgtggtttggccctgcagtacttatgctgctgttaaaattgttctgtctgaatctaatattgtttgtgggagtttgcatttgtctacgccgagcactagaataaaacgtttcctgtatgtcgaagtgtaccatctgttttttgtttttgtgtgtgcgtgtgcaacgatttgatttgttcttcagtacctcaacagctatgatgtaatgtaatgctggatctatttcatgtggcaatgctggattttattgtttt

SEQ ID NO: 25588 - protein, 374 aa, Triticum aestivum
ALLPPPNLLPTPESNPPSPPPPPHPTYPHRRREHGSASASGAMAGAGSSSGGSGGGGGREGDWDCGGCGNRNYAFRSLCNRCKQPRLLVDPNTPRDSKWLPRAGDWICNGCSNNNYASRKNCKKCNLPKEEAAMPQLSMGGMMPAYADYMARVQEIANAGYKMNFGNPAMQQQLLANANWPYGMAGRYGMQSSAWPFAGNSTNQFQGVPKDWRSGDWLCSCGFHNYSSRAQCKECNAPVPSGMASTTMKSTGADSSSTLGNKRLASEELANDWDNKRLNPGNANYPLSAAGSDNLFMGQGAGNNNGQTTYSAYDNGNSMASGQIPGMSGVVGKGAKWREGDWLCTNCSNHNYASRAFCNRCKTAKESSVHPGAL

SEQ ID NO: 25589 - protein, 332 aa, Triticum aestivum
MAGAGSSSGGSGGGGGREGDWDCGGCGNRNYAFRSLCNRCKQPRLLVDPNTPRDSKWLPRAGDWICNGCSNNNYASRKNCKKCNLPKEEAAMPQLSMGGMMPAYADYMARVQEIANAGYKMNFGNPAMQQQLLANANWPYGMAGRYGMQSSAWPFAGNSTNQFQGVPKDWRSGDWLCSCGFHNYSSRAQCKECNAPVPSGMASTTMKSTGADSSSTLGNKRLASEELANDWDNKRLNPGNANYPLSAAGSDNLFMGQGAGNNNGQTTYSAYDNGNSMASGQIPGMSGVVGKGAKWREGDWLCTNCSNHNYASRAFCNRCKTAKESSVHPGAL

SEQ ID NO: 25590 - protein, 241 aa, Triticum aestivum
MPQLSMGGMMPAYADYMARVQEIANAGYKMNFGNPAMQQQLLANANWPYGMAGRYGMQSSAWPFAGNSTNQFQGVPKDWRSGDWLCSCGFHNYSSRAQCKECNAPVPSGMASTTMKSTGADSSSTLGNKRLASEELANDWDNKRLNPGNANYPLSAAGSDNLFMGQGAGNNNGQTTYSAYDNGNSMASGQIPGMSGVVGKGAKWREGDWLCTNCSNHNYASRAFCNRCKTAKESSVHPGAL

SEQ ID NO: 25591 - DNA, 920 bp, Triticum aestivum
attttgactgattagcctcatgtgagcttacacttgcacgtttccaaaattggtctacgctttcacgtggtttactttcttcgtttcaaattgcttaaattttcgcaaagttaactacagacagtgctagtgtagagtagcatcatcagttcactgcgcaccgacagccaaactagcaccggggtccgaggcagacgccatggccgacgacgaggtggtcgtcgcgtccgcggaggagtcgctgaccactccgctgctcgagccagccgcgagcccccgcgacccgtcggtggaggtgagtctgtaccggcggggcgccggcccgcccaaggtcttccggtcgggcctgaggggccctcgccgcgaccgcctcgacgtgcgcggcatccaggcagagcacgagctccgcgccctcttcgccttcaagccgggggtctcccgccgcggcctccggatccggcccgacccggcgaccggccactccgccgtgcccttccgcgacggcgccgccatcgccctcgacggcgagcccaaggtgcaggtgtcgtggaccaagcctgcctcgatgatcgtcgtcggtctgctggtgctggcgttgatggcggtggtggctttcaacggggtgccggagtcgctactgtcgtcgagcgtagtcaaagccctcttctcgccgtggatcctcgccagcgcggttatcgtcttcgtccgtctcaggatgcggccacaagctcctccccgtctcaggatgcggccacaagctcctccatgaacggaaccgagctatggtactgtaataactctcctttgtgatatccagagaagcccttcttctctggtttctcttcaggaattatgtgcaatggagacaaaattccagaataaatgtgtgtgcagtttgcttcaacgcgaataatcatctc

SEQ ID NO: 25592 - protein, 189 aa, Triticum aestivum
MADDEVVVASAEESLTTPLLEPAASPRDPSVEVSLYRRGAGPPKVFRSGLRGPRRDRLDVRGIQAEHELRALFAFKPGVSRRGLRIRPDPATGHSAVPFRDGAAIALDGEPKVQVSWTKPASMIVVGLLVLALMAVVAFNGVPESLLSSSVVKALFSPWILASAVIVFVRLRMRPQAPPRLRMRPQAPP

SEQ ID NO: 25593 - DNA, 516 bp, Triticum aestivum
cggtgctggcggcggacgacccccgggcggagaacaaggtgctgtacatcaagccgccggccaacacgctgtcgcacaacgagctggcgtcgctgtgggagaagaagaccggcaagacgttccagagggtgtacgtccccgaggacgccgtcctcaagcagatccaagaggcgccaatcccgatgaacatcatcttctcgatcggccacgcgtcgtacatcaagggggaccagaccaacatcgagatcgcgccgtcgttcggcgtggaggcgagcgagctgtaccctgacgtcaagtacaccaccgtcgacgacttactcaacaggttgctgtgaagatatgcctgctgatctatctgtctttgaggccagtgatggtcagtatatgaacggactgtgtgtgtttgggactgatgatgtccgatgagtcgacacttgtatgcttctggttacttttgttggtttgtatgtcctccctcatggatgaataaattactcgggatgtcctttagatttc

SEQ ID NO: 25594 - protein, 110 aa, Triticum aestivum
VLAADDPRAENKVLYIKPPANTLSHNELASLWEKKTGKTFQRVYVPEDAVLKQIQEAPIPMNIIFSIGHASYIKGDQTNIEIAPSFGVEASELYPDVKYTTVDDLLNRLL

SEQ ID NO: 25595 - protein, 95 aa, Triticum aestivum
GAGGGRPPGGEQGAVHQAAGQHAVAQRAGVAVGEEDRQDVPEGVRPRGRRPQADPRGANPDEHHLLDRPRVVHQGGPDQHRDRAVVRRGGERAVP

SEQ ID NO: 25596 - protein, 61 aa, Triticum aestivum
RCWRRTTPGRRTRCCTSSRRPTRCRTTSWRRCGRRRPARRSRGCTSPRTPSSSRSKRRQSR

SEQ ID NO: 25597 - DNA, 899 bp, Triticum aestivum
  misc_feature (585)..(585): n is a, c, g, or t
  misc_feature (888)..(888): n is a, c, g, or t
accacacccgccgcctacctccccccttcccgccgccgtggaaggagaccggcggctggctcccaccgcttccgcgagggttcggaggcagtaggctccgctgctgccatgctctccaggatctctcaactcggggcgcggctcgtgcgcgagaccagagctgcaggaaacttgtcaagccatagcagcaattactaccgaggtcaagtcagccggcattcagccccagcgaagagcatcctcttctccaccgcaacaacaagtagtcatcatgatgaaggcggtgacgacaaggagaaaatctctgtaacatttgtgaacaaggatggcactgagaaaacgataagtgttcctgtcggaatgtccatgttagaagctgctcatgaaaatgacatagaacttgaaggagcatgtgaagggtcgctcgcatgttccacttgtcatgtcatagttatggatgtaaaggactataacaagctagaggatccaacagatgaggaaaatgatatgcttgaccttgcatttgggctgacagaaacgtcccgtcttggctgccaagtaatagcgaagcccgaacttgacggngtccgactggcgttacctgccgctacacgaaacttcgcggtagatgggttcgtgccaaagccacactgaagacagccatcagttttgtaccttagcatcatcatgtaacttcactacggtatcgtccctgagagcccccgtgccctcggacttggatctgttctcattttatgagctccttggtcagtgcaagatcatcagtgttgtacactggcagtgggtgaatactgaataaacaagttgtgtttgtgacaccccatgggcgatattatttggaggacagggaataaaagcttgttccanaggttttgggg

SEQ ID NO: 25598 - protein, 217 aa, Triticum aestivum
  misc_feature (195)..(195): Xaa can be any naturally occurring amino acid
TTPAAYLPPSRRRGRRPAAGSHRFREGSEAVGSAAAMLSRISQLGARLVRETRAAGNLSSHSSNYYRGQVSRHSAPAKSILFSTATTSSHHDEGGDDKEKISVTFVNKDGTEKTISVPVGMSMLEAAHENDIELEGACEGSLACSTCHVIVMDVKDYNKLEDPTDEENDMLDLAFGLTETSRLGCQVIAKPELDXVRLALPAATRNFAVDGFVPKPH

SEQ ID NO: 25599 - protein, 181 aa, Triticum aestivum
  misc_feature (159)..(159): Xaa can be any naturally occurring amino acid
MLSRISQLGARLVRETRAAGNLSSHSSNYYRGQVSRHSAPAKSILFSTATTSSHHDEGGDDKEKISVTFVNKDGTEKTISVPVGMSMLEAAHENDIELEGACEGSLACSTCHVIVMDVKDYNKLEDPTDEENDMLDLAFGLTETSRLGCQVIAKPELDXVRLALPAATRNFAVDGFVPKPH

SEQ ID NO: 25600 - DNA, 538 bp, Triticum aestivum
taatatttcaatatgcactagaatatggaaggcatggtggtgttgtcgagatgatggggaaagcagcagtggccatgtcgcggtatacaaaggcaatatgcttgctgcgttttctcctgatcgaggcaccatcgctcgccctcaacccgcctttgtccctgactagatctgaccgacaccgactgcgctcatacattgaagccctcaacgcaaggctcagccagttgtaatgcccgagtcactgaccgctgccggtgggccttcttgggggctgacttgtacaatattctttcatttgtacatatatttgttggcccaaacgagggcgtgtaagatagccacgctagagattgtgagattagcgagtgtagcggaaatccagtgtaattgcccaaactactatcgtaacgtgaggtgtgtgtgcgtggctgcgtgtgttctcaacttgcgcatgctttattctgtaccaatgaaggctgcagccatggtcatgatgtaaacagactgcttacttgttatttatttcttgggctgttac

SEQ ID NO: 25601 - protein, 89 aa, Triticum aestivum
MPESLTAAGGPSWGLTCTIFFHLYIYLLAQTRACKIATLEIVRLASVAEIQCNCPNYYRNVRCVCVAACVLNLRMLYSVPMKAAAMVMM

SEQ ID NO: 25602 - protein, 75 aa, Triticum aestivum
IFQYALEYGRHGGVVEMMGKAAVAMSRYTKAICLLRFLLIEAPSLALNPPLSLTRSDRHRLRSYIEALNARLSQL

SEQ ID NO: 25603 - protein, 59 aa, Triticum aestivum
MMGKAAVAMSRYTKAICLLRFLLIEAPSLALNPPLSLTRSDRHRLRSYIEALNARLSQL

SEQ ID NO: 25604 - DNA, 562 bp, Triticum aestivum
  misc_feature (237)..(237): n is a, c, g, or t
  misc_feature (273)..(273): n is a, c, g, or t
  misc_feature (276)..(276): n is a, c, g, or t
  misc_feature (302)..(302): n is a, c, g, or t
  misc_feature (315)..(315): n is a, c, g, or t
  misc_feature (337)..(337): n is a, c, g, or t
  misc_feature (360)..(360): n is a, c, g, or t
  misc_feature (445)..(445): n is a, c, g, or t
  misc_feature (557)..(557): n is a, c, g, or t
aaaattcccctttcaaaacaaggaaggccaaaatttctcccccccgaaataaagcatccaatggccatggagagcggcgctgaggcggcggcggcggcggcggcgggctactacggcggcaactgcgggtgggagacgccgaagcgggaggagtgccgcatcccggcgacgctgccctgccccgcggcgccgaggaaggcggcagcggacttcggcacgccccggcgcccgcccaanaacggctacttccagccaccggacctcgaggccctnttngcgctcgccccgcgccggcaggcgtnttgcgcgtgattntgcccgcttcggcggcggcacncggcggccggccgcggagggctntgttttgggtcgattttgggaagtgtagatacttagccagtttctcctctgttgtactagtagcggtagcggattaggtgtgttntagggagtggtagtatgtagctaggtaggtgggcagaggaactgatatgagcggggagctgatgagcatatggtttttgtatcggctggaatgagaaatccttatttgtttnttggc

SEQ ID NO: 25605 - protein, 103 aa, Triticum aestivum
  misc_feature (79)..(79): Xaa can be any naturally occurring amino acid
  misc_feature (91)..(92): Xaa can be any naturally occurring amino acid
  misc_feature (101)..(101): Xaa can be any naturally occurring amino acid
KIPLSKQGRPKFLPPEIKHPMAMESGAEAAAAAAAGYYGGNCGWETPKREECRIPATLPCPAAPRKAAADFGTPRRPPXNGYFQPPDLEAXXALAPRRQAXCA

SEQ ID NO: 25606 - protein, 83 aa, Triticum aestivum
  misc_feature (59)..(59): Xaa can be any naturally occurring amino acid
  misc_feature (71)..(72): Xaa can be any naturally occurring amino acid
  misc_feature (81)..(81): Xaa can be any naturally occurring amino acid
MAMESGAEAAAAAAAGYYGGNCGWETPKREECRIPATLPCPAAPRKAAADFGTPRRPPXNGYFQPPDLEAXXALAPRRQAXCA

SEQ ID NO: 25607 - protein, 81 aa, Triticum aestivum
  misc_feature (57)..(57): Xaa can be any naturally occurring amino acid
  misc_feature (69)..(70): Xaa can be any naturally occurring amino acid
  misc_feature (79)..(79): Xaa can be any naturally occurring amino acid
MESGAEAAAAAAAGYYGGNCGWETPKREECRIPATLPCPAAPRKAAADFGTPRRPPXNGYFQPPDLEAXXALAPRRQAXCA

SEQ ID NO: 25608 - DNA, 889 bp, Triticum aestivum
atacccattaccgtcttcttggaccctgcttctctgccgtcctcgccgctgcgagctccgatcggcaatcttttctccgttcaagatgaccatcatcatcgagcagcctcagtttgatgcggcggcggagaggaaggtcgccggcgaccagggggagctcgtgctcgacggcggcttcaccgtgccggactccaacgccttcggccacaccttcagggactacgacgcggagtcggagcggaagaagacggtggaggagttctaccgcgtgaaccacatcaaccagacgtacgagtttgtgcagcggatgcgggatgcatatgggcggctggacaagacggagatgagcatctgggagtgcatcgagctgctcaacgagttcatagacgacagcgaccctgacctggacatgccacagattgagcacctcctccagaccgccgaggccatccgcaaggactaccccgatgaggactggcttcacctcactggcctcatccatgatctgggcaaggtgctgctgcatcccagcttcggggagctacctcagtgggcagtcgtaggtgacaccttccccgtcggctgcgcgttcgacgaatgcaacgtccacttcaagtacttaaaggagaaccctgaccaccacaacccggagttcaacaccaagttcggggcctactccgaggggtgcgggctggacaacgtgctcatgtcatggggccatgacgactacatgtacctggttgccaaggagaacaagaccacccttccttctgcagggctgttcatcatcagataccactccttctaccccctgcacaagcatggagcctacatgcacctgatgaacgaggacgacaaggagaacctcaaatggttgcacgtcttcaac

SEQ ID NO: 25609 - protein, 296 aa, Triticum aestivum
YPLPSSWTLLLCRPRRCELRSAIFSPFKMTIIIEQPQFDAAAERKVAGDQGELVLDGGFTVPDSNAFGHTFRDYDAESERKKTVEEFYRVNHINQTYEFVQRMRDAYGRLDKTEMSIWECIELLNEFIDDSDPDLDMPQIEHLLQTAEAIRKDYPDEDWLHLTGLIHDLGKVLLHPSFGELPQWAVVGDTFPVGCAFDECNVHFKYLKENPDHHNPEFNTKFGAYSEGCGLDNVLMSWGHDDYMYLVAKENKTTLPSAGLFIIRYHSFYPLHKHGAYMHLMNEDDKENLKWLHVFN

SEQ ID NO: 25610 - protein, 268 aa, Triticum aestivum
MTIIIEQPQFDAAAERKVAGDQGELVLDGGFTVPDSNAFGHTFRDYDAESERKKTVEEFYRVNHINQTYEFVQRMRDAYGRLDKTEMSIWECIELLNEFIDDSDPDLDMPQIEHLLQTAEAIRKDYPDEDWLHLTGLIHDLGKVLLHPSFGELPQWAVVGDTFPVGCAFDECNVHFKYLKENPDHHNPEFNTKFGAYSEGCGLDNVLMSWGHDDYMYLVAKENKTTLPSAGLFIIRYHSFYPLHKHGAYMHLMNEDDKENLKWLHVFN

SEQ ID NO: 25611 - protein, 194 aa, Triticum aestivum
MRDAYGRLDKTEMSIWECIELLNEFIDDSDPDLDMPQIEHLLQTAEAIRKDYPDEDWLHLTGLIHDLGKVLLHPSFGELPQWAVVGDTFPVGCAFDECNVHFKYLKENPDHHNPEFNTKFGAYSEGCGLDNVLMSWGHDDYMYLVAKENKTTLPSAGLFIIRYHSFYPLHKHGAYMHLMNEDDKENLKWLHVFN

SEQ ID NO: 25612 - DNA, 967 bp, Triticum aestivum
atttcaacaaagatactgatgtgcattgtgtcaagcatgccattgttggccttcatgcttacatggagttcaccattgacccctccaaggctcctcacaactacaccatggtggatttcaacagattcatgcgcaggacgtatgagttgcctagggaggccgtgtctgcgctcggcgagatccccaaggccaagccgagactgctcatcatctcaaggcagagaacaagaatgttcctcaacctcccggagatcatcgcaatggccgaggggctgggtttcgaggtcgtggtcgaggaagccaatgtgagctccgacctctcccagttctccaaggtggtgaactctgtggatgtgatgatgggtgtccatggtgccgggctcacaaactgtgtgttcctgccacacaatgccaccttgatccagatcgtgccgtggggtggcataaagggcgtgtgccggatcgatttcggcgacccggcggagcagatgggcctgcggtacaaacagtacagcatcgccgtgcacgagagcagcctcaccgaccagtacccgctggaccatgagatcttcaagaacccgctggctttccacaaggggttcgagttcatcaaggagaccttcatggacaagcagaatgtcaggcttgactgcaaccggttcaggcctgtgctgctgcagacccttgatctgctaaaccaataagataagaactactgatccgccattggccattgtattagatggttctccatacaccttttttctttttggctcaccgttcttctcttctcttttcttcttctctagtaaaaatttgttgatcgccttctagtacatgagcaaggaacagacttatctgtctagaattgtacacatggatatgaagctgggatgtccatgatttgtcgtttatagcatatttattgtctggaaatagaagaaaaacaatacatttttttctttgt

SEQ ID NO: 25613 - protein, 233 aa, Triticum aestivum
FNKDTDVHCVKHAIVGLHAYMEFTIDPSKAPHNYTMVDFNRFMRRTYELPREAVSALGEIPKAKPRLLIISRQRTRMFLNLPEIIAMAEGLGFEVVVEEANVSSDLSQFSKVVNSVDVMMGVHGAGLTNCVFLPHNATLIQIVPWGGIKGVCRIDFGDPAEQMGLRYKQYSIAVHESSLTDQYPLDHEIFKNPLAFHKGFEFIKETFMDKQNVRLDCNRFRPVLLQTLDLLNQ

SEQ ID NO: 25614 - protein, 213 aa, Triticum aestivum
MEFTIDPSKAPHNYTMVDFNRFMRRTYELPREAVSALGEIPKAKPRLLIISRQRTRMFLNLPEIIAMAEGLGFEVVVEEANVSSDLSQFSKVVNSVDVMMGVHGAGLTNCVFLPHNATLIQIVPWGGIKGVCRIDFGDPAEQMGLRYKQYSIAVHESSLTDQYPLDHEIFKNPLAFHKGFEFIKETFMDKQNVRLDCNRFRPVLLQTLDLLNQ

SEQ ID NO: 25615 - protein, 198 aa, Triticum aestivum
MVDFNRFMRRTYELPREAVSALGEIPKAKPRLLIISRQRTRMFLNLPEIIAMAEGLGFEVVVEEANVSSDLSQFSKVVNSVDVMMGVHGAGLTNCVFLPHNATLIQIVPWGGIKGVCRIDFGDPAEQMGLRYKQYSIAVHESSLTDQYPLDHEIFKNPLAFHKGFEFIKETFMDKQNVRLDCNRFRPVLLQTLDLLNQ

SEQ ID NO: 25616 - DNA, 616 bp, Triticum aestivum
  misc_feature (451)..(451): n is a, c, g, or t
  misc_feature (475)..(477): n is a, c, g, or t
  misc_feature (499)..(499): n is a, c, g, or t
  misc_feature (505)..(505): n is a, c, g, or t
  misc_feature (540)..(540): n is a, c, g, or t
  misc_feature (543)..(543): n is a, c, g, or t
  misc_feature (564)..(564): n is a, c, g, or t
  misc_feature (568)..(568): n is a, c, g, or t
ttcttcttcgatttttccatcaccagaaacgaatagcagagaatttcctgactacagcacaaagaaacagaaaaatttctgacttttttccccagtggattagctttctccggttgttaattccgtgacgagatgcctgcgctcgctgtcgacgccgccgcccccgtggcccacgccttcgccgcgtcctgcgacgcgtcgccgcgcttcgccgcgccgctgctgggccccgccgccgccgtcgtcgctgccacggccgccgagaagcccgagatggccgcgtggtcggccgacctctcgtcggcgctctacaacgtggacggctggggcgcgccctacttcttcgtcaacgacgacggcgacgtcgcggtgcgcccgcacggcgccgccacgctgcccggccaggagatcgacctcgccaaggtggtcgcccgggccgccggcgcgcgcnccggcggcgggctcggcctggccnnnccgctgctcgtgcgcttccccnacgtgntgcgccaccgcgtcgagaccctcaacgccgccttngcntacgccgtgcgctcgacgggntacnccgggcggtaccagggcgtctaccccgtcaagtgcaaccaggaccggt

SEQ ID NO: 25617 - protein, 161 aa, Triticum aestivum
  misc_feature (107)..(107): Xaa can be any naturally occurring amino acid
  misc_feature (115)..(115): Xaa can be any naturally occurring amino acid
  misc_feature (123)..(123): Xaa can be any naturally occurring amino acid
  misc_feature (125)..(125): Xaa can be any naturally occurring amino acid
  misc_feature (136)..(137): Xaa can be any naturally occurring amino acid
  misc_feature (144)..(144): Xaa can be any naturally occurring amino acid
  misc_feature (146)..(146): Xaa can be any naturally occurring amino acid
MPALAVDAAAPVAHAFAASCDASPRFAAPLLGPAAAVVAATAAEKPEMAAWSADLSSALYNVDGWGAPYFFVNDDGDVAVRPHGAATLPGQEIDLAKVVARAAGARXGGGLGLAXPLLVRFPXVXRHRVETLNAAXXYAVRSTXYXGRYQGVYPVKCNQDR

SEQ ID NO: 25618 - protein, 114 aa, Triticum aestivum
  misc_feature (60)..(60): Xaa can be any naturally occurring amino acid
  misc_feature (68)..(68): Xaa can be any naturally occurring amino acid
  misc_feature (76)..(76): Xaa can be any naturally occurring amino acid
  misc_feature (78)..(78): Xaa can be any naturally occurring amino acid
  misc_feature (89)..(90): Xaa can be any naturally occurring amino acid
  misc_feature (97)..(97): Xaa can be any naturally occurring amino acid
  misc_feature (99)..(99): Xaa can be any naturally occurring amino acid
MAAWSADLSSALYNVDGWGAPYFFVNDDGDVAVRPHGAATLPGQEIDLAKVVARAAGARXGGGLGLAXPLLVRFPXVXRHRVETLNAAXXYAVRSTXYXGRYQGVYPVKCNQDR

SEQ ID NO: 25619 - DNA, 762 bp, Triticum aestivum
  misc_feature (515)..(515): n is a, c, g, or t
  misc_feature (632)..(632): n is a, c, g, or t
cacacagcttactcatcctcatcaagcagcacagcgtcagtgctaagcagcatcagtgatctagctcggacagacacagtgcaggtgaaatggctcggttgatcggtgcttccggcgcctgcgcgctgctggtcgtcctgctcgcggcgtgcgccgcgtccgccgcgcgcaccgagccgggtgccgcgcggcagctgtgggacgacgggaggaaggtggggggaaggacggaggtgagggacgtggaggacgacaaggaggtacaggagctgggccgttactccgtcgaagaacacaaccggcgacgggaggagggctgcgagggcggcggcgtctgcgggcggctggagttcgcccgcgtggtgtcggcgcagcgccaggtggtctccgggatcaagtactacctccgcgtcgcggccgccgaggagaacggcgcggggagcaacgtcgtcagcgacggccgcgtgttcgacgccgtggtggtcgtcaagccctggctccagtcccgcgcgctngtcagattcgcgccggccgacgccaaatgagcagctgcacaagcgatcggaggagaaccgctgcgtgtcttttttgcgcgacagagtacgtaatgtaagctcgaataacggtgtgtnaggtactgaggtagggttgagcgccagagtatgtaggctgtacgatgcggcggtcgaagttttgtaagtctaccggataaaaagttttgcaagaaagatgagagtgtcgaaataaatacttactagtatg

SEQ ID NO: 25620 - protein, 151 aa, Triticum aestivum
  misc_feature (142)..(142): Xaa can be any naturally occurring amino acid
MARLIGASGACALLVVLLAACAASAARTEPGAARQLWDDGRKVGGRTEVRDVEDDKEVQELGRYSVEEHNRRREEGCEGGGVCGRLEFARVVSAQRQVVSGIKYYLRVAAAEENGAGSNVVSDGRVFDAVVVVKPWLQSRAXVRFAPADAK

SEQ ID NO: 25621 - DNA, 482 bp, Triticum aestivum
atgctgggccttttcaccagaggacttccccttcgcatcgtcatgatcggtactcttaccggtgctcagtggggaatctatgacgccttcaaggtcatggtcggactcccgaccaccggcggtgctccaccagttgctccggtagaggaagcagcgaaagccatcgcttgattgatttttcctgctacgacgatgacgatgtattcccggatgatggggtattggtggatggggactctatcaattacttgagtttagcaaccgaaatcttttgttattgtagcagatggttattgtgtcatcattttgatgagaggaactcattaagcaggcgaaataggccttttttgtccccgggaagtttgatgcttgacataataagttttaggacagcaaggctgttagagcgcaggttttgccatcacctgtactgaggaattcccatatactactgtttacctccaattctctatgctgttggc

SEQ ID NO: 25622 - protein, 56 aa, Triticum aestivum
MLGLFTRGLPLRIVMIGTLTGAQWGIYDAFKVMVGLPTTGGAPPVAPVEEAAKAIA

SEQ ID NO: 25623 - protein, 42 aa, Triticum aestivum
MIGTLTGAQWGIYDAFKVMVGLPTTGGAPPVAPVEEAAKAIA

SEQ ID NO: 25624 - DNA, 925 bp, Triticum aestivum
cttcctcgtcaacaaggaatcgtccagcagcaaggcatggtcattcggtggccggattgcttaccccaaggacagcaggttgatgacccgggaggtggctccggacaacgtctacaactcggcgaggtcggtgaggtccgacggcaatttgacatgggatttccctgtgcccgctcgcaaccggtaccttgtgcgcatgcacttctgtgatattgtgagcaaggcattgtatcagctctacttcagtatctatgtcaatggtcatctcgcagcgaaggattttgacatttccagcaccactggatacttggcctatccgtattacatcgactatgttgtggacgttgacgatgaagggatgctgaaactggccatcggtggctcgaagatgagccgacctggagaggcgagcggtttcctgaatgggctggagataatgaggatgaacaaaacgggtggcggcatggacggggatttccctgttgttctggacatggggtacctggtcagtaaggggtttggggaattcgctcgctcactgctgtgtggtttagtcttcgccgggctgtttttggttttggtcatgctggtgctgaggttgaggaccgagctgaaaaacaatggaacgctttggttcagccagtcagtggattctggtgaggggaagttggctaaagcatatcagcttgtgcccaccaagacagactattaagcagcatgagatctgagaagcttcaacttgtgtctgttatctgtatcccatggcctaatcttgtgcttcgtttgtaagtattgtagttttctagttctacatttctatgcctttcatggttgaagtttcaattgtttgagcttggccagtgcagagcacaactattgtgtgtacttaagaattaagacgtgtttgtattgctactacttcgct

SEQ ID NO: 25625 - protein, 236 aa, Triticum aestivum
FLVNKESSSSKAWSFGGRIAYPKDSRLMTREVAPDNVYNSARSVRSDGNLTWDFPVPARNRYLVRMHFCDIVSKALYQLYFSIYVNGHLAAKDFDISSTTGYLAYPYYIDYVVDVDDEGMLKLAIGGSKMSRPGEASGFLNGLEIMRMNKTGGGMDGDFPVVLDMGYLVSKGFGEFARSLLCGLVFAGLFLVLVMLVLRLRTELKNNGTLWFSQSVDSGEGKLAKAYQLVPTKTDY

SEQ ID NO: 25626 - protein, 209 aa, Triticum aestivum
MTREVAPDNVYNSARSVRSDGNLTWDFPVPARNRYLVRMHFCDIVSKALYQLYFSIYVNGHLAAKDFDISSTTGYLAYPYYIDYVVDVDDEGMLKLAIGGSKMSRPGEASGFLNGLEIMRMNKTGGGMDGDFPVVLDMGYLVSKGFGEFARSLLCGLVFAGLFLVLVMLVLRLRTELKNNGTLWFSQSVDSGEGKLAKAYQLVPTKTDY

SEQ ID NO: 25627 - protein, 171 aa, Triticum aestivum
MHFCDIVSKALYQLYFSIYVNGHLAAKDFDISSTTGYLAYPYYIDYVVDVDDEGMLKLAIGGSKMSRPGEASGFLNGLEIMRMNKTGGGMDGDFPVVLDMGYLVSKGFGEFARSLLCGLVFAGLFLVLVMLVLRLRTELKNNGTLWFSQSVDSGEGKLAKAYQLVPTKTDY

SEQ ID NO: 25628 - DNA, 676 bp, Triticum aestivum
aggaacgccaaccaccgcgccccgtttattcccctccggcgcagccgcccccgtgtcctgtgcgcaccttctcgaagcctcttccctccctcatggcggaccagctgaccgacgagcagatcgccgagttcaaggaggccttcagcctcttcgacaaggatggcgacggttgcatcaccaccaaggagctcggaaccgtgatgcggtccctcgggcagaaccccacggaggcggagctgcaggacatgatcaacgaggtcgacgcggacggcaacggcaccatcgacttcccggagttcctgaacctgatggcgaggaagatgaaggacactgactcggaggaggagctcaaggaggcgttccgcgtgtttgacaaggaccagaacggcttcatctcggcggcggagctgcgccacgtgatgaccaacctcggggagaagctgacggacgaggaggtggacgagatgatccgggaggcggacgtggacggcgacggccagatcaactacgaggagttcgtcaaggtcatgatggccaagtgaggtggcgggacagggggtgtcctcccacgaaataagcttaaaatttgctctcaagtggattggaatggaatgccagacagactcgcaaggttgtattttgtgctatgttttttaagtactgttgcctgttgggc

SEQ ID NO: 25629 - protein, 179 aa, Triticum aestivum
ERQPPRPVYSPPAQPPPCPVRTFSKPLPSLMADQLTDEQIAEFKEAFSLFDKDGDGCITTKELGTVMRSLGQNPTEAELQDMINEVDADGNGTIDFPEFLNLMARKMKDTDSEEELKEAFRVFDKDQNGFISAAELRHVMTNLGEKLTDEEVDEMIREADVDGDGQINYEEFVKVMMAK

SEQ ID NO: 25630 - protein, 149 aa, Triticum aestivum
MADQLTDEQIAEFKEAFSLFDKDGDGCITTKELGTVMRSLGQNPTEAELQDMINEVDADGNGTIDFPEFLNLMARKMKDTDSEEELKEAFRVFDKDQNGFISAAELRHVMTNLGEKLTDEEVDEMIREADVDGDGQINYEEFVKVMMAK

SEQ ID NO: 25631 - protein, 113 aa, Triticum aestivum; identical to SEQ ID NO: 18979

SEQ ID NO: 25632 - DNA, 1054 bp, Triticum aestivum
ctctgcactgccaagctccagaacccaatctcccccgccccctgttagggttcgtgccgtctccatggcaggcgccggcatccacccgtttcaccagcagtggccgccccaagcggcggtgcccgcgcctcccgccgtcccaccgcctccccccgtaccaggcgcacccgatgccgccgcccgccccggctctgacgaggtctcaccatcttcatcatggggctccccgttccttataatccttatgctggctatcctgtgccggcggtaccaatggcttcaccttctcctttgccaggcccaacagcatatgctcctgtgcagaacatgaaagataaccctccctgtaatacccttttcattggaaatcttggtgaaactgttgttgaagaggaattgcggggcctcttcagtgtacaacctggtttcaaacaaatgaaagtgttgcgtcaagacaggaacaccgtctgttttattgagttcgatgatgtgagcgctgcttctgctgtgcaccatactttacagggtgctattgttcctagttctggccgcggtgggatgcgaatccagttttcaaaaaatcccttcgggcgaaggaaggacttagttggtggcatggtcggcactctgaatggtgctcctgtttgaggggatgtatcttgaactttagcatgacatcttgaattatcatctgcattgttttagccaaatctgttcctgtcatgtgcgacatcagcatcttcattgggtggagtttctggggcatgatcatcatcttcattaagtggagtttctgggatatcatcatcatctgatagacattgcattgtcactattttcattgttggcggtttcaacttctttaaattagctattgtggtttgacaaggccactatgaatgtctcctaacatgcatttggcatctgtcatgaatattttgtagtgttatgtagtttttccagtgtgcagttgcaacatttcatgtggtaatggcattgccacattatgatctggacatgctgtaatagtataaccgatttatttggcttgctg

SEQ ID NO: 25633 - protein, 143 aa, Triticum aestivum
MGLPVPYNPYAGYPVPAVPMASPSPLPGPTAYAPVQNMKDNPPCNTLFIGNLGETVVEEELRGLFSVQPGFKQMKVLRQDRNTVCFIEFDDVSAASAVHHTLQGAIVPSSGRGGMRIQFSKNPFGRRKDLVGGMVGTLNGAPV

SEQ ID NO: 25634 - protein, 124 aa, Triticum aestivum
MASPSPLPGPTAYAPVQNMKDNPPCNTLFIGNLGETVVEEELRGLFSVQPGFKQMKVLRQDRNTVCFIEFDDVSAASAVHHTLQGAIVPSSGRGGMRIQFSKNPFGRRKDLVGGMVGTLNGAPV

SEQ ID NO: 25635 - protein, 109 aa, Triticum aestivum
SALPSSRTQSPPPPVRVRAVSMAGAGIHPFHQQWPPQAAVPAPPAVPPPPPVPGAPDAAARPGSDEVSPSSSWGSPFLIILMLAILCRRYQWLHLLLCQAQQHMLLCRT

SEQ ID NO: 25636 - DNA, 632 bp, Triticum aestivum
atgcttcaactatttcgactccatttgcttcgttttcattcagcgcaactgcttcttttgaagtccaaactccatcaaggatagaggtccaattcaaagaggggagcttccagcctcctgagatatcatcatcggtaaatctacctgaacagatcgccatattcgggcagaagttcagcctggggactgttaaggagctgctggagcctttgcagcgagcatttgctagcattgcagggtccatctctgggcagccacccctcaaggtaccgattcctggggacaacaaggccaagtcgtggcttttgacaacctacctggacaaagacttgaggatttcaaaaggcgatggaggcggcgtgtttattcttgccaaagaggggagccctttactagattaactgtacatgtgtaataggtgtcattattcatatctgcaaggttgaaaaccacagctacaagcctacaacggggcattcttctccctctttgatacacaattttctggtggttttctagagtctggcagaatcaactaaatattgtcagtatgcagtctccatacacttttttctccctggtaactagtgtacatcttttgtattattaaaaaggaatgtgcacattacttc

SEQ ID NO: 25637 - protein, 132 aa, Triticum aestivum
ASTISTPFASFSFSATASFEVQTPSRIEVQFKEGSFQPPEISSSVNLPEQIAIFGQKFSLGTVKELLEPLQRAFASIAGSISGQPPLKVPIPGDNKAKSWLLTTYLDKDLRISKGDGGGVFILAKEGSPLLD

SEQ ID NO: 25638 - DNA, 1745 bp, Triticum aestivum
  misc_feature (1469)..(1469): n is a, c, g, or t
  misc_feature (1529)..(1529): n is a, c, g, or t
  misc_feature (1647)..(1647): n is a, c, g, or t
agtttgataccttcactcctgctgctgacagagggctcccggtcacaagggtcattagccgcatgacgctgcagcagattcttgcccgtgcagtcggcgacgacgctataatgaacgattgccacgtgtcgactttactgatgatggcaacaaggtcaccgcgatattggaggatgggcggaaatttgaaggtgatctcttggttggagcagatggcatatggtcaaaggtgaggaagtcgctttttggcgaaacggatgcatcttattcagaatacacttgctacaccggaattgcagactttgtgcctcctgatattgacacagtcgggtaccgagtgtttcttggtcacaaacaatatttcgtctccccagacgttggtggtggtaaaatgcagtggtatgcatttcacaaggaacctgctggtggtactgatcctgagaatggcaaaaagaaaagactgctcgagatatttagcggttggtgtgataatgtcattgatctgctaaatgcaactgaggaggaagcaattcttcgccgggatatatacgatcggccacctactatcaactgggggaaaggtcgtgtcaccttgcttggtgactctgtccatgctatgcagccaaatctgggacagggtggctgcatggctattgaggatggttaccagctggctgtagagcttgagaaggcctgggaagagagtgtcaagtctagaactcctgtggacgttatttcctccttgaggagttatgagaaggagagaaagctacgtgttgctatcatacatggattggctagaatggcggcaatcatggctaccacttacagaccatatctaggtgtgggtctgggacctttgtcgtttttgacaaagttgaggataccgcatcctggaagagttggtggcagatttttcatcaaggttggaatgcctttgatgctgagctggattttaggtggcaacagctcaaagctagaaggaagaccgttgagttgccggctttctgacaaggcaaacaaccagcttggtcgatggttcgaggacgatgatgcattggaacaagctatgggtggagagtggtacctcttccctatgagctctggaggcgactctgccttgcagcccattcgtttgatcagggatgaacagaggacactctctattggaagcaaaccagatccgagcaattctgattcttcgttgtcgttccccttgccacaagtatcagagatccatgctactatcacatgcaagaataagggtttctatttgaccgatctgggaagcgagcatggtacatggtttaacgacaacgaaggcagacgctaccggttacctccaaacttcccagttcgtttccacccttctgatgccatcgaatttggttcagacaagaaggccatgttccgggtgaaggtgctgagcacgcttccatacgactccgcgagaggtggagaagaagttntgcaggcagcatgagtggggacttcagtgatcccttgtcaccagccactgtacagcattnttcagtaaacagccgacactgcatcacggaaagaaaaagaattgtaatttttgtactcatccagatatccaaagcaggattttgaatagtttctgacagaattactacgttgcagttntacgaaaagaactcagggtgtaaaataggggtaggcaattttagctgttgccactgtaatacgtacattgttgtgctattaacacgtgttcacattgc

SEQ ID NO: 25639 - protein, 363 aa, Triticum aestivum
  misc_feature (360)..(360): Xaa can be any naturally occurring amino acid
MQWYAFHKEPAGGTDPENGKKKRLLEIFSGWCDNVIDLLNATEEEAILRRDIYDRPPTINWGKGRVTLLGDSVHAMQPNLGQGGCMAIEDGYQLAVELEKAWEESVKSRTPVDVISSLRSYEKERKLRVAIIHGLARMAAIMATTYRPYLGVGLGPLSFLTKLRIPHPGRVGGRFFIKVGMPLMLSWILGGNSSKLEGRPLSCRLSDKANNQLGRWFEDDDALEQAMGGEWYLFPMSSGGDSALQPIRLIRDEQRTLSIGSKPDPSNSDSSLSFPLPQVSEIHATITCKNKGFYLTDLGSEHGTWFNDNEGRRYRLPPNFPVRFHPSDAIEFGSDKKAMFRVKVLSTLPYDSARGGEEVXQAA

SEQ ID NO: 25640 - protein, 288 aa, Triticum aestivum
  misc_feature (285)..(285): Xaa can be any naturally occurring amino acid
MQPNLGQGGCMAIEDGYQLAVELEKAWEESVKSRTPVDVISSLRSYEKERKLRVAIIHGLARMAAIMATTYRPYLGVGLGPLSFLTKLRIPHPGRVGGRFFIKVGMPLMLSWILGGNSSKLEGRPLSCRLSDKANNQLGRWFEDDDALEQAMGGEWYLFPMSSGGDSALQPIRLIRDEQRTLSIGSKPDPSNSDSSLSFPLPQVSEIHATITCKNKGFYLTDLGSEHGTWFNDNEGRRYRLPPNFPVRFHPSDAIEFGSDKKAMFRVKVLSTLPYDSARGGEEVXQAA

SEQ ID NO: 25641 - protein, 278 aa, Triticum aestivum
  misc_feature (275)..(275): Xaa can be any naturally occurring amino acid
MAIEDGYQLAVELEKAWEESVKSRTPVDVISSLRSYEKERKLRVAIIHGLARMAAIMATTYRPYLGVGLGPLSFLTKLRIPHPGRVGGRFFIKVGMPLMLSWILGGNSSKLEGRPLSCRLSDKANNQLGRWFEDDDALEQAMGGEWYLFPMSSGGDSALQPIRLIRDEQRTLSIGSKPDPSNSDSSLSFPLPQVSEIHATITCKNKGFYLTDLGSEHGTWFNDNEGRRYRLPPNFPVRFHPSDAIEFGSDKKAMFRVKVLSTLPYDSARGGEEVXQAA

SEQ ID NO: 25642 - DNA, 717 bp, Triticum aestivum
tcatccgcaactccaagatctccgacatcgacttcgcctccgtccacctttacccggacacctggctgctgcacgcggatctggaagagaagctcaagttcgtgacgcagtgggtgagctcccacttcgaggacggcgacacggagctcggcggcaagcccgtggtgctgacggagttcgggctgtcgcatttggtcaagggcttcgagcagtcgcagcgcgacgccttttacaagtcggtgtacgacatcgtccacgcgtcggccaagaggggcggcgccggcgccggcgcgatagtgtggcagctcgccgccgaggacatggaggagtaccacgacggcttcgccatcgtgcccagcgagacgccgtcgatgcagaagctgctgacggagcagtcgtgccggctggccgcgctgaggcacggggaggaggaggccaagaggatcctcaaggcggtgtgcggctgacccgtgatctgtcttgcgaggtgtggcttttttgcgtgctcatgtcatgtactgttactgtgtgtccgtaggaaatcgacacgaaatggaccgaagggatccatgaaaggtggcgtgctcggcgccgacgtcggcagatctgcctctgtattttccttgctgtgttgttgtactcgtacgtgcccttgacctttggtgtttaagtcattgtcgagtggcagcggaggctagttatattctatagtcctcg

SEQ ID NO: 25643 - protein, 178 aa, Triticum aestivum
HPQLQDLRHRLRLRPPLPGHLAAARGSGREAQVRDAVGELPLRGRRHGARRQARGADGVRAVAFGQGLRAVAARRLLQVGVRHRPRVGQEGRRRRRRDSVAARRRGHGGVPRRLRHRAQRDAVDAEAADGAVVPAGRAEARGGGGQEDPQGGVRLTRDLSCEVWLFCVLMSCTVTVCP

SEQ ID NO: 25644 - protein, 154 aa, Triticum aestivum
IRNSKISDIDFASVHLYPDTWLLHADLEEKLKFVTQWVSSHFEDGDTELGGKPVVLTEFGLSHLVKGFEQSQRDAFYKSVYDIVHASAKRGGAGAGAIVWQLAAEDMEEYHDGFAIVPSETPSMQKLLTEQSCRLAALRHGEEEAKRILKAVCG

SEQ ID NO: 25645 - DNA, 1585 bp, Triticum aestivum
gactgcaagtagttttaggagagcgccgaggacgcacccgcgtactgccaaatacaagccgcggtgcacccgtgccgccgttcgtccgctcccgtcgtccgcacacgcgcacgctcggctcgataatcctcaccggcgagcgcgcagctcacgatctatcatcccgatgtcgccggtgaggattaccgactcgacctatgtcggcgtgccggagaccgccgcgccaccgccggggccgatcaggttcaccgcgatggaggcgctctgggtcgtcttcccggtgctgcagcacgtgctgctctacgagggcgacgacgacatgccgcccttcgacgccattctcgagtccctccgctcctccctcgcggccactctgggcagcttcgcgccgctcgccggcaagctggtccacctcgaggagacgggggacgtgggcatcagctgctccgcctccgacggcgtcaggttcgtcgtcgccgagtgcgacgccgacatccgccgcctcgccggcgacgaggagcacgacctgcgcgtcctcgaggcgctcgtgccggaggtggacatgggccggctgccgaccgccctgctggccgtgcaggccacgcgtttcgagggcggcgtggcgctcgggctgacggtgcaccacggcgccgccgacgggcgggcgctgtggacgttcgtcgaggcgtgggcgacggcgtgccggggcgagacgccggccaccacgccgtgcttcgaccgctcgctcgtcaagatgcccgccggcgacgagctggccaggagtgttctgcggaagttcgctcccaatttgccctcggcggcactagcgtcatcagtcttcgaagaccgaaagcggctcactcgccgaaccttcaccttggaccaaggagacatccaacgcctgaagctgcgcattgtccacctcaatgagtcgggcggcacgcccctgcctcgcccgccgtctgctttcgccgccgtggtcgcgctcgcgtggacgtgcttcgcccggtgcaagtcgttctccttggacgacgacgtgtggctcttcttcttcgccgacatccgcgagcgccttgaccctcccgtcggcgcggggtacatcggctcgtgcctcaccaagtgtttggcaaggctccctgcccgggagcttcatggtgagcgtgccctggcggctgcggcgtcggcggtccaggacgagatcaacaagatgaaggaagaccctatcgctggttggaacttcttctcattcgatcccatgcccgccatggaccggttgatgaacatatcaggctcgtcgggctttagtgcatacaagatcgccgacttcgggtggggaaagccgacacggacagagccgattaggatgaacacagacggtcaggtggcattgatgggcagcagggacgaccggggtgtgcaggtctcagtggcactgctccaagcggcacaaatggacgagttcaaatctaactttctggcgctacttgagtgacaatttttgttctcaaagagacctagttaggtcaattcaaaacagtacacccagatgttttataaagattaatacattataattgaattgttt

SEQ ID NO: 25646 - protein, 496 aa, Triticum aestivum
TASSFRRAPRTHPRTAKYKPRCTRAAVRPLPSSAHAHARLDNPHRRARSSRSIIPMSPVRITDSTYVGVPETAAPPPGPIRFTAMEALWVVFPVLQHVLLYEGDDDMPPFDAILESLRSSLAATLGSFAPLAGKLVHLEETGDVGISCSASDGVRFVVAECDADIRRLAGDEEHDLRVLEALVPEVDMGRLPTALLAVQATRFEGGVALGLTVHHGAADGRALWTFVEAWATACRGETPATTPCFDRSLVKMPAGDELARSVLRKFAPNLPSAALASSVFEDRKRLTRRTFTLDQGDIQRLKLRIVHLNESGGTPLPRPPSAFAAVVALAWTCFARCKSFSLDDDVWLFFFADIRERLDPPVGAGYIGSCLTKCLARLPARELHGERALAAAASAVQDEINKMKEDPIAGWNFFSFDPMPAMDRLMNISGSSGFSAYKIADFGWGKPTRTEPIRMNTDGQVALMGSRDDRGVQVSVALLQAAQMDEFKSNFLALLE

SEQ ID NO: 25647 - protein, 441 aa, Triticum aestivum
MSPVRITDSTYVGVPETAAPPPGPIRFTAMEALWVVFPVLQHVLLYEGDDDMPPFDAILESLRSSLAATLGSFAPLAGKLVHLEETGDVGISCSASDGVRFVVAECDADIRRLAGDEEHDLRVLEALVPEVDMGRLPTALLAVQATRFEGGVALGLTVHHGAADGRALWTFVEAWATACRGETPATTPCFDRSLVKMPAGDELARSVLRKFAPNLPSAALASSVFEDRKRLTRRTFTLDQGDIQRLKLRIVHLNESGGTPLPRPPSAFAAVVALAWTCFARCKSFSLDDDVWLFFFADIRERLDPPVGAGYIGSCLTKCLARLPARELHGERALAAAASAVQDEINKMKEDPIAGWNFFSFDPMPAMDRLMNISGSSGFSAYKIADFGWGKPTRTEPIRMNTDGQVALMGSRDDRGVQVSVALLQAAQMDEFKSNFLALLE

SEQ ID NO: 25648 - protein, 412 aa, Triticum aestivum
MEALWVVFPVLQHVLLYEGDDDMPPFDAILESLRSSLAATLGSFAPLAGKLVHLEETGDVGISCSASDGVRFVVAECDADIRRLAGDEEHDLRVLEALVPEVDMGRLPTALLAVQATRFEGGVALGLTVHHGAADGRALWTFVEAWATACRGETPATTPCFDRSLVKMPAGDELARSVLRKFAPNLPSAALASSVFEDRKRLTRRTFTLDQGDIQRLKLRIVHLNESGGTPLPRPPSAFAAVVALAWTCFARCKSFSLDDDVWLFFFADIRERLDPPVGAGYIGSCLTKCLARLPARELHGERALAAAASAVQDEINKMKEDPIAGWNFFSFDPMPAMDRLMNISGSSGFSAYKIADFGWGKPTRTEPIRMNTDGQVALMGSRDDRGVQVSVALLQAAQMDEFKSNFLALLE

SEQ ID NO: 25649 - DNA, 1391 bp, Triticum aestivum
accaaagcattagcacgctcctccacagcccactgctctgcctgtttgtggctttgccgtttcctgttccccactcatcgtcggcgatacaatcttctcgtggattgtctcgtggaggcgggagcgatggggcgtccgtgcgtcggcgctctcctggcgtgcgccgccgttgcagcttcttgctgcggctgcttccagttccagggtgctgctgcggcggcgaccccgtcgttcggggacaacttcgacatcaccggcgccgaggaccacgtcaagacctcccccgacggccagacctggtacctctccctcgacaacaagacgggcgttgggttccagacgaagcagaagtacctgttcgggtggttcagcatgaagctcaagctcgtcgggaacgactccgccggcgtcgtcaccgcctactacatgtgctcggacctggacgcggcgccggagcgcgacgagctggacttcgagttcctgggcaaccgcaccggcgagccgtacatcatccagacgaacgtgtaccgcagcggcgtaggcgggcgggagatgcggcactcgctgtggttcgaccccaccgccgagttccacagctactccatcctctggaaccccaagcagatcgtgtttttcgtggacaaggtgccgatcagggagtaccgcaactcggacaagcccaacaggttcttcccgatcatgaagcccatgtacgtcttctccagcatctggaacgccgacgactgggccacgcgcggggggctggagaagacggactggaccaaggggcccttcgtctcctcctacagcgacttcaccgccgacgcctgcgcctgggccaccggcccggccccgccggcgtgcgcggccgccacggggaacagctggtgggaccagccgccggcgtgggcgctcgacgacggccagcgccgggactcgggctgggtggccaggaacctcgtgatatacgactactgcgacgaccgcaagaggttcccggccgtgccggaggagtgcgcgctcaggaccaagactagctagtagctcctcatggatgggccgccctaggtctcgcttcacatgcatcgttcttttttgggggttcgatcgagtacgtggtgtggtgtagctatcaattggtggatggatttttttttcttttctcttctcttgttttgtgatgatgagatgcacatgcggacgtgcatgtgcacggtgatgcggcattgattgcccggggtggctgtgctctcatgtgagtgatagccctttcggaggaaaatgatgacatttttgttccgatgccttccatgctgcacgacacgagcatggatgggccaaaacttcatagaaatggtcccacgtatacgcatgataatcggcttcgactt

SEQ ID NO: 25650 - protein, 346 aa, Triticum aestivum
TKALARSSTAHCSACLWLCRFLFPTHRRRYNLLVDCLVEAGAMGRPCVGALLACAAVAASCCGCFQFQGAAAAATPSFGDNFDITGAEDHVKTSPDGQTWYLSLDNKTGVGFQTKQKYLFGWFSMKLKLVGNDSAGVVTAYYMCSDLDAAPERDELDFEFLGNRTGEPYIIQTNVYRSGVGGREMRHSLWFDPTAEFHSYSILWNPKQIVFFVDKVPIREYRNSDKPNRFFPIMKPMYVFSSIWNADDWATRGGLEKTDWTKGPFVSSYSDFTADACAWATGPAPPACAAATGNSWWDQPPAWALDDGQRRDSGWVARNLVIYDYCDDRKRFPAVPEECALRTKTS

SEQ ID NO: 25651 - protein, 344 aa, Triticum aestivum
QSISTLLHSPLLCLFVALPFPVPHSSSAIQSSRGLSRGGGSDGASVRRRSPGVRRRCSFLLRLLPVPGCCCGGDPVVRGQLRHHRRRGPRQDLPRRPDLVPLPRQQDGRWVPDEAEVPVRVVQHEAQARRERLRRRRHRLLHVLGPGRGAGARRAGLRVPGQPHRRAVHHPDERVPQRRRRAGDAALAVVRPHRRVPQLLHPLEPQADRVFRGQGADQGVPQLGQAQQVLPDHEAHVRLLQHLERRRLGHARGAGEDGLDQGALRLLLQRLHRRRLRLGHRPGPAGVRGRHGEQLVGPAAGVGARRRPAPGLGLGGQEPRDIRLLRRPQEVPGRAGGVRAQDQD

SEQ ID NO: 25652 - protein, 304 aa, Triticum aestivum
MGRPCVGALLACAAVAASCCGCFQFQGAAAAATPSFGDNFDITGAEDHVKTSPDGQTWYLSLDNKTGVGFQTKQKYLFGWFSMKLKLVGNDSAGVVTAYYMCSDLDAAPERDELDFEFLGNRTGEPYIIQTNVYRSGVGGREMRHSLWFDPTAEFHSYSILWNPKQIVFFVDKVPIREYRNSDKPNRFFPIMKPMYVFSSIWNADDWATRGGLEKTDWTKGPFVSSYSDFTADACAWATGPAPPACAAATGNSWWDQPPAWALDDGQRRDSGWVARNLVIYDYCDDRKRFPAVPEECALRTKTS

SEQ ID NO: 25653 - DNA, 1296 bp, Triticum aestivum
aaggtaacgcgtctctgttcatctcacctcaccacgcgcgtacactttctctctcccctccctccctttattagatctctctcgctcaacaaaattcctcaactcgagctccctgaccgcaaccactcaaccacccagcaggcccagcaccaccgcgtctaagcaggtgccgcctccgcctccgcgtccttgtctgcggcggctgcaatggccgaccgcgtctaccccgccgccaagcccactccgccgcccccaatggccaacggaggcggcggcccggcggcgcccaagccgcagatgtaccagcgccccatctacaggccgcaggggcaggcgaagagcaggcgcgggcggtcctgccggtgcagcttgtgctgctgcttctgctgggcactgctggtggtcgtcctcctcgcgctagtcgccgcggccgcgggcggcgccttctacgtgctctaccggccgcaacgccccagcttcaccgtctcctctgtccgcctcagcacgttcaacctctcctcctccaccaccgcgcccgtcctcaccgactccatccagctcaccgtcaccgccaagaaccccaacaagaagctcgtctatttctacgacgacttctcattctcggccgccaccgccgccaacgcagtcccgctcggggacgccaccgtgcccgggttcgcgcatgatgccggcaacaccaccgttttcactgcgaccatcaccgccgctggtgtcaccgtagaccccagcggcgccggctctgaccttaagatgtccggcgctttctccgtcgctatagatgccgacacgcgggccggcgtcaaggtcggcagcctcaagaccaagaagatgggcatccaggtgcactgcgagggcatcaaggtgacgccacccagtccacctccgccagcgccgaagaaggtaaaggggaagaatggcaccgccctggcgcctgcgcctgcgttggacaacgccgagacgaccgcgatggtgagcaccgccgcgcactcgtgcaaggtcagagtccgtgtgaagatctggaagtggaccttctaggtataatgccaactttagggactgccatgcaaaacattcaggaaacatatatttttcactttatattggaaagtagagaccatgaatatcgtcggtgtaaattccctcaaagttgattctatttttgttcttgtttggaattttcttaaacatatttttggtggatgtataacttggtgatttgttatttgtaagattacggttcgaatgaaaaaaaaaaaaaaaaaagcttatcgatac

SEQ ID NO: 25654 - protein, 282 aa, Triticum aestivum
MADRVYPAAKPTPPPPMANGGGGPAAPKPQMYQRPIYRPQGQAKSRRGRSCRCSLCCCFCWALLVVVLLALVAAAAGGAFYVLYRPQRPSFTVSSVRLSTFNLSSSTTAPVLTDSIQLTVTAKNPNKKLVYFYDDFSFSAATAANAVPLGDATVPGFAHDAGNTTVFTATITAAGVTVDPSGAGSDLKMSGAFSVAIDADTRAGVKVGSLKTKKMGIQVHCEGIKVTPPSPPPPAPKKVKGKNGTALAPAPALDNAETTAMVSTAAHSCKVRVRVKIWKWTF

SEQ ID NO: 25655 - protein, 266 aa, Triticum aestivum
MANGGGGPAAPKPQMYQRPIYRPQGQAKSRRGRSCRCSLCCCFCWALLVVVLLALVAAAAGGAFYVLYRPQRPSFTVSSVRLSTFNLSSSTTAPVLTDSIQLTVTAKNPNKKLVYFYDDFSFSAATAANAVPLGDATVPGFAHDAGNTTVFTATITAAGVTVDPSGAGSDLKMSGAFSVAIDADTRAGVKVGSLKTKKMGIQVHCEGIKVTPPSPPPPAPKKVKGKNGTALAPAPALDNAETTAMVSTAAHSCKVRVRVKIWKWTF

SEQ ID NO: 25656 - protein, 252 aa, Triticum aestivum
MYQRPIYRPQGQAKSRRGRSCRCSLCCCFCWALLVVVLLALVAAAAGGAFYVLYRPQRPSFTVSSVRLSTFNLSSSTTAPVLTDSIQLTVTAKNPNKKLVYFYDDFSFSAATAANAVPLGDATVPGFAHDAGNTTVFTATITAAGVTVDPSGAGSDLKMSGAFSVAIDADTRAGVKVGSLKTKKMGIQVHCEGIKVTPPSPPPPAPKKVKGKNGTALAPAPALDNAETTAMVSTAAHSCKVRVRVKIWKWTF

SEQ ID NO: 25657 - DNA, 1399 bp, Triticum aestivum
acttcgcttccttcatcttcccgggcggtgcggtgcgtacggcgcaaccagatctcacggcgaggccgagctaaccgcctccggatccgcacaaacccccaacagccgtacgcaccgcagcagcggcggcggaggagcatggagagctcgtcgccttcggtgccgttcccgctgctgcaggcgccagtggagagcacgtaccgtgcctgcaccataccctaccgcttcccctccgacaacccccacaaggccacccccgtcgagatccagtggatcgacctcttcctgaaatccgtgccatccttcaggcagcgggcggagaatgaccccacggtgccggatgcccccgccaaggccgagaagtttgctcagaggtacactgatatgcttgaggagttgaagaagaacccagagagccatggaggacctcctgattgcatacttctttgtaggcttcgtgagctaatccttagagaattggggtttcatgacatcttcaagaaggtcaaggatgaggagaacgctaaggctatgtcactgtttgagggagttgttcagcggaatgatgaaatagaagatggtgagaaacgagcagagaacttgatccgtggaatcttagcaggaaacatatttgacttagggtctgcacagcttgcagaagtttttgctaaagatggcatgtccttcttggcgagttgccagaatcttttatctcgaccttgggttattgatgacctagatgcatttaaaagcaaatggaccaagaaatcttgggaaaaggcagttatttttgttgataattctggtgctgatatcatattgggcatattaccatttgcgagggagttgctccgacgtggcactaaggtgatacttgccgccaatgacatgccttccatcaacgatatcacttacctagagttagttgagattgtaaacaagctcaaggacgaaaatggaaagcttgctggtgtggatgtatctgacctcattgttgccaactccgggaacgatctgccagtaatagatttgtctagcgtcgcaccggaactagcctatatggcaagtgatgctgacttggtcatcctagaaggcatgggaagaggaatcgaaaccaacctatacgcacaaatgagatgtgactcgatcaagattggaatggtcaagcatcctgaagtggcgcagtttttgggtggaaggctttatgattgtgtcttcaagttcaacgaggcctgaaaaacactgaagcccctgcatggcaccagccatattgcattcattttaatcattgattactgatgcaatcgtacactgaatgtatgcgtccacgatgatagcaagtggaagaaattacaattcgcttgttgtactgtgaggaaggacaatttttattgcaaat

SEQ ID NO: 25658 - protein, 411 aa, Triticum aestivum
TSLPSSSRAVRCVRRNQISRRGRANRLRIRTNPQQPYAPQQRRRRSMESSSPSVPFPLLQAPVESTYRACTIPYRFPSDNPHKATPVEIQWIDLFLKSVPSFRQRAENDPTVPDAPAKAEKFAQRYTDMLEELKKNPESHGGPPDCILLCRLRELILRELGFHDIFKKVKDEENAKAMSLFEGVVQRNDEIEDGEKRAENLIRGILAGNIFDLGSAQLAEVFAKDGMSFLASCQNLLSRPWVIDDLDAFKSKWTKKSWEKAVIFVDNSGADIILGILPFARELLRRGTKVILAANDMPSINDITYLELVEIVNKLKDENGKLAGVDVSDLIVANSGNDLPVIDLSSVAPELAYMASDADLVILEGMGRGIETNLYAQMRCDSIKIGMVKHPEVAQFLGGRLYDCVFKFNEA

SEQ ID NO: 25659 - protein, 365 aa, Triticum aestivum
MESSSPSVPFPLLQAPVESTYRACTIPYRFPSDNPHKATPVEIQWIDLFLKSVPSFRQRAENDPTVPDAPAKAEKFAQRYTDMLEELKKNPESHGGPPDCILLCRLRELILRELGFHDIFKKVKDEENAKAMSLFEGVVQRNDEIEDGEKRAENLIRGILAGNIFDLGSAQLAEVFAKDGMSFLASCQNLLSRPWVIDDLDAFKSKWTKKSWEKAVIFVDNSGADIILGILPFARELLRRGTKVILAANDMPSINDITYLELVEIVNKLKDENGKLAGVDVSDLIVANSGNDLPVIDLSSVAPELAYMASDADLVILEGMGRGIETNLYAQMRCDSIKIGMVKHPEVAQFLGGRLYDCVFKFNEA

SEQ ID NO: 25660 - protein, 283 aa, Triticum aestivum
MLEELKKNPESHGGPPDCILLCRLRELILRELGFHDIFKKVKDEENAKAMSLFEGVVQRNDEIEDGEKRAENLIRGILAGNIFDLGSAQLAEVFAKDGMSFLASCQNLLSRPWVIDDLDAFKSKWTKKSWEKAVIFVDNSGADIILGILPFARELLRRGTKVILAANDMPSINDITYLELVEIVNKLKDENGKLAGVDVSDLIVANSGNDLPVIDLSSVAPELAYMASDADLVILEGMGRGIETNLYAQMRCDSIKIGMVKHPEVAQFLGGRLYDCVFKFNEA

SEQ ID NO: 25661 - DNA, 1505 bp, Triticum aestivum
accggcgggcgcaagaactccaacgaacaaaccacgcggggcggccggtcaaatctacgccaccacgcgtgcgaggccctcgccgcagttcgattcgactcccccctcccccgattctcaccgcggaagcgaaaatgagcgacaatctgatggagaaagtgaacgccctcggcgagcgcctcaagatcaccgggtcggaggtgggcaagcagatgcaggccggcatgagctccatgagcttcaagatgaaggagctcttccaggcgcagaccccggcggacaagatcgtcgaggacgccaccgccgagaacctcgaggggcccgactgggccgccaacctcgaaatctgcgacctgatcaacaccgagaaggtgaacagcgtcgacctgatccgcgggatcaagaagcggatcatgctcaaggaggccagggttcagttcctcgccctcttcctcctcgagaccatcgtcaagaactgcgagaaggccttctccgaggttgcggccgagaggattctcgatgagatggtcaggctgattgatgacccccagacggtggtcaataacaggaacaaggcccttacgctcattgaggcatggggagagtctggtgatgagctccgctacttgccggtctatgagcaaacctacaagagcctgaaatcaagaggaattcggtttcctggacgtgacaatgagagcctggctcccatatttactccaccacgctctgttgctgaagctgaagttgctgcaaatttctcccagcatattcgaagatgtacatgtgcatacatatactgctgaagaaacaaaggaagctttcgatgtggcccgtaacagcatggaacttctttcaactgttctttcatcctcccctcagcaggatgctttgcaggatgacttgacaaccactcttgtgcaacaatgctaccaatctcaacatactatccagagattcatcgagacggctggagacaatgaggccttgctctttgaggccttgagtgtgaacgatgaggtcctgaaagtgctatccaaatacgaagagatgaagaagcccatggcgtcggcgcgtgcagaacagccagtggtcataccaattgccacagagcatgaagattccgtgactgttggcaatgaggatgccctggtaagaaaaccagctgctgctcgagcaatgtcgggcggcgatgatgatatcctcgatgatcttgatgagatgatatttggcaagaagggaggaagcagttcccaggacgtgtccaaaaggcaggacccaaagaaggatgacctaatcaacttctaaataccgtcccagcaagttccagagttcctctagggatacacagcatgtctgctgcttttatactgctgaacgatgtctgtattcatccagtagaagactgcactgcacgtacattcagttagggatttgggtcgcttgtttatttgcatacgatgataccttgtcctccagagtttgttcagttgataagttgctgc

SEQ ID NO: 25662 - protein, 267 aa, Triticum aestivum
RRAQELQRTNHAGRPVKSTPPRVRGPRRSSIRLPPPPILTAEAKMSDNLMEKVNALGERLKITGSEVGKQMQAGMSSMSFKMKELFQAQTPADKIVEDATAENLEGPDWAANLEICDLINTEKVNSVDLIRGIKKRIMLKEARVQFLALFLLETIVKNCEKAFSEVAAERILDEMVRLIDDPQTVVNNRNKALTLIEAWGESGDELRYLPVYEQTYKSLKSRGIRFPGRDNESLAPIFTPPRSVAEAEVAANFSQHIRRCTCAYIYC

SEQ ID NO: 25663 - protein, 223 aa, Triticum aestivum
MSDNLMEKVNALGERLKITGSEVGKQMQAGMSSMSFKMKELFQAQTPADKIVEDATAENLEGPDWAANLEICDLINTEKVNSVDLIRGIKKRIMLKEARVQFLALFLLETIVKNCEKAFSEVAAERILDEMVRLIDDPQTVVNNRNKALTLIEAWGESGDELRYLPVYEQTYKSLKSRGIRFPGRDNESLAPIFTPPRSVAEAEVAANFSQHIRRCTCAYIYC

SEQ ID NO: 25664 - protein, 218 aa, Triticum aestivum
MEKVNALGERLKITGSEVGKQMQAGMSSMSFKMKELFQAQTPADKIVEDATAENLEGPDWAANLEICDLINTEKVNSVDLIRGIKKRIMLKEARVQFLALFLLETIVKNCEKAFSEVAAERILDEMVRLIDDPQTVVNNRNKALTLIEAWGESGDELRYLPVYEQTYKSLKSRGIRFPGRDNESLAPIFTPPRSVAEAEVAANFSQHIRRCTCAYIYC

SEQ ID NO: 25665 - DNA, 1361 bp, Triticum aestivum
acaggggaaaaacctcttcctagcgagatttccccacccgtcttcttcctccgaaaccctaatccccaaatcggagaatcggacccagcccggcgccgcggagagcatccccccgtcgaccggcatggcaattgctcgcactggcgtgtacgtggacgactacttggagtattcgagcaccctggccggcgacctgcagaggatcctctccaccatgcacgagctcgacgagagggcccatggcattttgggtcagacaaaagggcagatcaaatatctcctgggggtgccatcccatgggttcgacaggccaaacgtggtgcatgatgaaaatgcctcggagaagatgacgagggatattgaaaatagccaggacaacgcgcttagtctctgcacggagaaagtgttgctcgcacgccaagcttatgacctgatagagagccatatcaaacgtcttgatgaagacctaggccagtttgcagaagatttaaagcaagaaggaaaaatacctccagatgaaccgcatatccttcctccaatgccggtgggtggcagggatgaaagacggaggtccagttttagtacaccccaagcagcaaggaagtttgtcagagagaaggaatgggatagggatagggagagaggtatggacttcgacttaatgccccctccaggtagcagcaacaagaaggccgttgcatctatggatgtggatcaaatgattgatccaaatgaaccaacatattgtatatgccaccaggtttcatatggtgatatgattgcttgtgacaatgagaattgtgaaggaggcgaatggttccattactcgtgcgttggtctgacaccagaaacaagattcaaagggaaatggttttgcccaacttgcaggaatcttcaatgagaggttctcctaaattgtgttgacgaggcgagcggttccggtcggcccagactttccgcaacatgcaggactcttcaacacgaggctctcagaagcttttcttggacaggaggataccaaatggtacatgtttcaatttgtaaggaggcgtttgcttacagtgtggtcttattttggtaataatgtatatgctggagaggacgcgactgttctagagaaggataaaaaagcttggcgtgttctgttgttgtatcttgtcgccgcaaacaatctatcatagtttcaggtgttggtaacctggtaactattttactttggtcgtgatgtctattaagcgtcatcgcaacctttgctcgcatgattctgcccctgagcaccattatctgctgcatcttggttgagctggaggtgcagcatatgcacttctacagcacacattgtattaaattattgtgtaact

SEQ ID NO: 25666 - protein, 299 aa, Triticum aestivum
QGKNLFLARFPHPSSSSETLIPKSENRTQPGAAESIPPSTGMAIARTGVYVDDYLEYSSTLAGDLQRILSTMHELDERAHGILGQTKGQIKYLLGVPSHGFDRPNVVHDENASEKMTRDIENSQDNALSLCTEKVLLARQAYDLIESHIKRLDEDLGQFAEDLKQEGKIPPDEPHILPPMPVGGRDERRRSSFSTPQAARKFVREKEWDRDRERGMDFDLMPPPGSSNKKAVASMDVDQMIDPNEPTYCICHQVSYGDMIACDNENCEGGEWFHYSCVGLTPETRFKGKWFCPTCRNLQ

SEQ ID NO: 25667 - protein, 258 aa, Triticum aestivum
MAIARTGVYVDDYLEYSSTLAGDLQRILSTMHELDERAHGILGQTKGQIKYLLGVPSHGFDRPNVVHDENASEKMTRDIENSQDNALSLCTEKVLLARQAYDLIESHIKRLDEDLGQFAEDLKQEGKIPPDEPHILPPMPVGGRDERRRSSFSTPQAARKFVREKEWDRDRERGMDFDLMPPPGSSNKKAVASMDVDQMIDPNEPTYCICHQVSYGDMIACDNENCEGGEWFHYSCVGLTPETRFKGKWFCPTCRNLQ

SEQ ID NO: 25668 - protein, 228 aa, Triticum aestivum
MHELDERAHGILGQTKGQIKYLLGVPSHGFDRPNVVHDENASEKMTRDIENSQDNALSLCTEKVLLARQAYDLIESHIKRLDEDLGQFAEDLKQEGKIPPDEPHILPPMPVGGRDERRRSSFSTPQAARKFVREKEWDRDRERGMDFDLMPPPGSSNKKAVASMDVDQMIDPNEPTYCICHQVSYGDMIACDNENCEGGEWFHYSCVGLTPETRFKGKWFCPTCRNLQ

SEQ ID NO: 25669 - DNA, 1345 bp, Triticum aestivum
ttttccggtaccaaacgtcaccttcttcccagcttcctcctccgtccacccacgccgccgacgcgcctccgccggtccggtctacatataccagcgccctcgccatcccccatttccttcctccccaacccgccattttccgtcctcaccgagacggttcccatccccgcgcatctgcctctgccgtctccgcccggtgccatcttcttcgctcactccgcgcaggccaactaatctttctgatcggccggccggtcgaaatgggccacgagggagccaagtacggcgacgacggccgccccacctgcgactgcctcctcttcgaccttgatgacacgctctacccggtgggatcaggcatcggcctcgacgtcatgaagaacatccaagaatacatggtcgagaagctcggcatcgacaagagcatcagccacgagctctgcatcctgctgtacaagcagtacggaaccaccatggccggtctgcgggctgtcgggtaccagttcgactacgatgatttccacggctttgttcatggaaggttggcctacgaaaagctcaagcctgaccctgtgctcaggaacatccttctgagcctaccaatccgcaaactcgtgttcacgaatggtgacaggctccatgcttcgagggccatgaagaggcttgggatcgaggactgctttgagggagttctgtgctttgagacattgaacccgccatcgcccactcctgcgccagccagcaaagttgagatctttgatataatgaagcacctggctcatccggagcctggggttgagctgccaaggtcaccaatcctgtgcaaaccgaatatagatgcaatgctgcatgccctcaagcttgccgacatcaatcctcagactactatattttttgatgacagcgtcaggaacatccaggccgggaagcaaatcggaatgcacactgtcctggttggaacttctgaaaagattaaaggtgctgaccatgccttggaaagcctccacaacatgaaggaagcgtttccagaactgtgggaggaggctgtgaaggatgaggacgtcaggaaatcgagcaaagttggaatcgagacatcggtgatcgcttaaaatccctcatgaactgactcatggttttgggcaaagggcacatgagacgaccagatccagtatctgtttgtctgacagtagacatgctgattagaccaagagaaaattgttgtaatcgttaagggaactgatgccactttcgttatgtttgtcccttgtaataagaaataaaatgttctgaacctcgctgtaactccgttcacggggcaatagacctgctatgctagtactatttg

SEQ ID NO: 25670 - protein, 368 aa, Triticum aestivum
FRYQTSPSSQLPPPSTHAADAPPPVRSTYTSALAIPHFLPPQPAIFRPHRDGSHPRASASAVSARCHLLRSLRAGQLIFLIGRPVEMGHEGAKYGDDGRPTCDCLLFDLDDTLYPVGSGIGLDVMKNIQEYMVEKLGIDKSISHELCILLYKQYGTTMAGLRAVGYQFDYDDFHGFVHGRLAYEKLKPDPVLRNILLSLPIRKLVFTNGDRLHASRAMKRLGIEDCFEGVLCFETLNPPSPTPAPASKVEIFDIMKHLAHPEPGVELPRSPILCKPNIDAMLHALKLADINPQTTIFFDDSVRNIQAGKQIGMHTVLVGTSEKIKGADHALESLHNMKEAFPELWEEAVKDEDVRKSSKVGIETSVIA

SEQ ID NO: 25671 - protein, 282 aa, Triticum aestivum
MGHEGAKYGDDGRPTCDCLLFDLDDTLYPVGSGIGLDVMKNIQEYMVEKLGIDKSISHELCILLYKQYGTTMAGLRAVGYQFDYDDFHGFVHGRLAYEKLKPDPVLRNILLSLPIRKLVFTNGDRLHASRAMKRLGIEDCFEGVLCFETLNPPSPTPAPASKVEIFDIMKHLAHPEPGVELPRSPILCKPNIDAMLHALKLADINPQTTIFFDDSVRNIQAGKQIGMHTVLVGTSEKIKGADHALESLHNMKEAFPELWEEAVKDEDVRKSSKVGIETSVIA

SEQ ID NO: 25672 - protein, 244 aa, Triticum aestivum
MKNIQEYMVEKLGIDKSISHELCILLYKQYGTTMAGLRAVGYQFDYDDFHGFVHGRLAYEKLKPDPVLRNILLSLPIRKLVFTNGDRLHASRAMKRLGIEDCFEGVLCFETLNPPSPTPAPASKVEIFDIMKHLAHPEPGVELPRSPILCKPNIDAMLHALKLADINPQTTIFFDDSVRNIQAGKQIGMHTVLVGTSEKIKGADHALESLHNMKEAFPELWEEAVKDEDVRKSSKVGIETSVIA

SEQ ID NO: 25673 - DNA, 1250 bp, Triticum aestivum
aaacccgctcgagatctatcccaattctcgacctcacatcccctgctcgactcgacttcgtttaaacccaaaccctaatctcgacagagcctaaaccctagctcgggcggcggcggcggcggtcatggacggcggcggaggcatggggcccgtcggcggcggggtgggaggcatggtgggacccgtcggcgtcggcggcgggggcggcgggagcgacgtggagctcgtcagcaaaacgctgcagttcgagcacaagctcttctacttcgatctgaaggagaacccgcgggggaggtacctcaagatctccgagaagacgtccaccacgcgctccaccatcatcgtgcccatcgccggcgtcgcctggttcctcgacctcttcgactattacatccgcaccgacgagcgcgacgtcttcagcaaggagctacgcctcgacactaaggtgttctacttcgatattggggagaacaagagaggccgctaccttaaggtttcggaggcatctgtcaatagaaaccgtagcacgataattgttccggctggtagctctggcgaagaaggttgggaagcatttaggaatgtactgttagaaatcaatgacgaagcttcccgactctatgttcttccaaatcatccaagtcagcaacacctggaacctccagagcgccttcctggcctttctgacgatgttggtgctggatttatagctgggcatggcagccaatctgcatctgtacccgaggtagacgttgatgggcctcctattgaagaatttagtggcatggggctgtctaaggtgataagggcagatcagaaaaggtttttctttgacctgggcagcaacaacaggggccattatttgaggatttccgaggtcgctggagctgatcgttcgtcgataatcttgccactttctggtttgaagcagttccatgagatggtgggacactttgtagatataatgaaggacagacttgaaggaatgacgggcgcgaacgtgcgcactgtcgagcccagccagagatgattagctcgaccttgtggcacttactgctgttatgcctcctctaggatttgtgtaagtgatgtggtgtgtggttgcgtagatcacgcagtattaattcgtctgatggggataataatgtttgatgtttagttttttctttcttctgaattccgtggcgaggattgatttgcttgggaccttttctgttgaggaataataagcagtataatgttcgtgggtg

SEQ ID NO: 25674 - protein, 301 aa, Triticum aestivum
MDGGGGMGPVGGGVGGMVGPVGVGGGGGGSDVELVSKTLQFEHKLFYFDLKENPRGRYLKISEKTSTTRSTIIVPIAGVAWFLDLFDYYIRTDERDVFSKELRLDTKVFYFDIGENKRGRYLKVSEASVNRNRSTIIVPAGSSGEEGWEAFRNVLLEINDEASRLYVLPNHPSQQHLEPPERLPGLSDDVGAGFIAGHGSQSASVPEVDVDGPPIEEFSGMGLSKVIRADQKRFFFDLGSNNRGHYLRISEVAGADRSSIILPLSGLKQFHEMVGHFVDIMKDRLEGMTGANVRTVEPSQR

SEQ ID NO: 25675 - protein, 295 aa, Triticum aestivum
MGPVGGGVGGMVGPVGVGGGGGGSDVELVSKTLQFEHKLFYFDLKENPRGRYLKISEKTSTTRSTIIVPIAGVAWFLDLFDYYIRTDERDVFSKELRLDTKVFYFDIGENKRGRYLKVSEASVNRNRSTIIVPAGSSGEEGWEAFRNVLLEINDEASRLYVLPNHPSQQHLEPPERLPGLSDDVGAGFIAGHGSQSASVPEVDVDGPPIEEFSGMGLSKVIRADQKRFFFDLGSNNRGHYLRISEVAGADRSSIILPLSGLKQFHEMVGHFVDIMKDRLEGMTGANVRTVEPSQR

SEQ ID NO: 25676 - protein, 285 aa, Triticum aestivum
MVGPVGVGGGGGGSDVELVSKTLQFEHKLFYFDLKENPRGRYLKISEKTSTTRSTIIVPIAGVAWFLDLFDYYIRTDERDVFSKELRLDTKVFYFDIGENKRGRYLKVSEASVNRNRSTIIVPAGSSGEEGWEAFRNVLLEINDEASRLYVLPNHPSQQHLEPPERLPGLSDDVGAGFIAGHGSQSASVPEVDVDGPPIEEFSGMGLSKVIRADQKRFFFDLGSNNRGHYLRISEVAGADRSSIILPLSGLKQFHEMVGHFVDIMKDRLEGMTGANVRTVEPSQR

SEQ ID NO: 25677 - DNA, 1392 bp, Triticum aestivum
cctaataacccccggtcgcctttccacggcgaaaggcatcccggcggcgatggcggcggctgcggcaaggtccggatcccggcgcttgttctccatatccgccctggtgccaccgaagccgccgacccctcccccgaaggcagaccccttcgccagcctcttcgcccccgggttaagcaagcgaacaacaactgatggacttagggaagcttttgcaaagtctggtgaagttgtgcatgcatcatctgtaaaaaattcaaggtggtatatgatcaatgcaaaccgttcaagtcctttgacagtgcgtaaagaataccgcaaagtgcttccttctttcataaggccatctgcatcttactccacagaagcctcagaaaaaagaccaaaacaggagagaacagacttgacgactgttgaagatccctttaatgcccctacctacaatatacctgagaagccagtgacatttgtcgagggcgcctcttacagtgttgtaatacttgctgggcttggagttgctgcattggctggatatgctgttttcaaagagcttatatttgaaccaaaagagtacaagatttttgggaaagctctagtaagagttcagagtgatagtcaggttacagccaaaattggttaccctataactggttatggtacggaatccagaaaccgcgcagctcggcagcgcatccaaaacagggtttggacagatgaggatggtgttgaacatgtggaggtaggctttcacatccgagggccgcatggagctggaaaggtctttgcggagatgttcaaagatagctccgacaggacatggaagttcacgtttcttctcgtcgagattacgtcaccgcgacctgcacaaatcatgttagaatcttacctaccagcatagggatgcaagagaccagatcagccagcagtggcacatccatgcgacacttcattttacatcccatctccaatggcctgcatctgatgttaaatacccgtcctcggattaaagaagttgtgaattttgaacttccccgaaagcataagtaggaggaagatgaaccatcagagctgctgaccagagtatcttagacatggtgtaccgtgcaaggaccttgatgttgttgctttgtttagctgaaaggcgtgcaggcacatgtgtacaacccttctttcccggtgctcctcaaacatgggagggagcaagtgatccttcatctatcgagttttggtcccatttcaggcagttttaatgatgcacatggatttcgtgcaagcctccaatgatgtccaaatagcaataatatctggttacattacgactttcaagcctgggtttccaggcatgtatgaagtgatcttcaatacaagggtgcatgtttctttagcattgcc

SEQ ID NO: 25678 - protein, 298 aa, Triticum aestivum
LITPGRLSTAKGIPAAMAAAAARSGSRRLFSISALVPPKPPTPPPKADPFASLFAPGLSKRTTTDGLREAFAKSGEVVHASSVKNSRWYMINANRSSPLTVRKEYRKVLPSFIRPSASYSTEASEKRPKQERTDLTTVEDPFNAPTYNIPEKPVTFVEGASYSVVILAGLGVAALAGYAVFKELIFEPKEYKIFGKALVRVQSDSQVTAKIGYPITGYGTESRNRAARQRIQNRVWTDEDGVEHVEVGFHIRGPHGAGKVFAEMFKDSSDRTWKFTFLLVEITSPRPAQIMLESYLPA

SEQ ID NO: 25679 - protein, 282 aa, Triticum aestivum
MAAAAARSGSRRLFSISALVPPKPPTPPPKADPFASLFAPGLSKRTTTDGLREAFAKSGEVVHASSVKNSRWYMINANRSSPLTVRKEYRKVLPSFIRPSASYSTEASEKRPKQERTDLTTVEDPFNAPTYNIPEKPVTFVEGASYSVVILAGLGVAALAGYAVFKELIFEPKEYKIFGKALVRVQSDSQVTAKIGYPITGYGTESRNRAARQRIQNRVWTDEDGVEHVEVGFHIRGPHGAGKVFAEMFKDSSDRTWKFTFLLVEITSPRPAQIMLESYLPA

SEQ ID NO: 25680 - protein, 209 aa, Triticum aestivum
MINANRSSPLTVRKEYRKVLPSFIRPSASYSTEASEKRPKQERTDLTTVEDPFNAPTYNIPEKPVTFVEGASYSVVILAGLGVAALAGYAVFKELIFEPKEYKIFGKALVRVQSDSQVTAKIGYPITGYGTESRNRAARQRIQNRVWTDEDGVEHVEVGFHIRGPHGAGKVFAEMFKDSSDRTWKFTFLLVEITSPRPAQIMLESYLPA

SEQ ID NO: 25681 - DNA, 996 bp, Triticum aestivum
  misc_feature (850)..(851): n is a, c, g, or t
gcactccattcacggttcgccaaggtcaacaagagtagtgatagatagaagaggccaccatcaccatggatcggcagctgctgaggacggtgaagcaggcgaccaagaaccacgccggcctcatgtaccaccgtctcgtgggccacatcccccacctcctcgtggtcacgctgctcgtcgtcgtggcgccgcagctctcgacgctgacgccggagaaggtgcgcgccctttggaacacagcagtgaacgcgccggcgctggccatggcgtgctgggcggcggcgctggcggcgtacacgtacgcgtcgtcccgccctcagccagtgtatctagtggacctcgccgggtacaagccgccggtggagctggaggcgtcgcgcgccaagaccatcgtgcacttctcgcggtgcgggcggttcagcgagcagagcatggcgttccagaagcggatgctggagcggtcggggctgggcgaggcgacgcacttccccatgtcgctgatccgcctccccgtggacatgtgcgaccggacggccatggaggagtcccacgccgtgatcttcggcgtcgtcgacgaggtcctccgcaagaccggcgtggacgccggcgacgtgggcgtgctcatcttcaactccagcctgctcagcccgacgccgtccttcacgtcgctcatcgtgaaccgctacaagttccgcgacgacatcgtcacgcacaacctcagcggcatggggtgcagcgccggcatcatcgccatcgacctcgccaagcgcctgctccaggtacaccggaacacgtacgcgctggtggtgagcacggagaacatcaccctcaacgcctacatgggcaacannccgtccgatgctggtgaccaacacgctcttccgtgtcggcggcgcggcgatcctcctcaccaaccgggccggcgaccgggcgcggtccaagtaccagctgatccacaccgtgcgcacccaccgcggggcgcacgaccagagctac

SEQ ID NO: 25682 - protein, 310 aa, Triticum aestivum
  misc_feature (262)..(262): Xaa can be any naturally occurring amino acid
MDRQLLRTVKQATKNHAGLMYHRLVGHIPHLLVVTLLVVVAPQLSTLTPEKVRALWNTAVNAPALAMACWAAALAAYTYASSRPQPVYLVDLAGYKPPVELEASRAKTIVHFSRCGRFSEQSMAFQKRMLERSGLGEATHFPMSLIRLPVDMCDRTAMEESHAVIFGVVDEVLRKTGVDAGDVGVLIFNSSLLSPTPSFTSLIVNRYKFRDDIVTHNLSGMGCSAGIIAIDLAKRLLQVHRNTYALVVSTENITLNAYMGNXPSDAGDQHALPCRRRGDPPHQPGRRPGAVQVPADPHRAHPPRGARPEL

SEQ ID NO: 25683 - protein, 291 aa, Triticum aestivum
  misc_feature (243)..(243): Xaa can be any naturally occurring amino acid
MYHRLVGHIPHLLVVTLLVVVAPQLSTLTPEKVRALWNTAVNAPALAMACWAAALAAYTYASSRPQPVYLVDLAGYKPPVELEASRAKTIVHFSRCGRFSEQSMAFQKRMLERSGLGEATHFPMSLIRLPVDMCDRTAMEESHAVIFGVVDEVLRKTGVDAGDVGVLIFNSSLLSPTPSFTSLIVNRYKFRDDIVTHNLSGMGCSAGIIAIDLAKRLLQVHRNTYALVVSTENITLNAYMGNXPSDAGDQHALPCRRRGDPPHQPGRRPGAVQVPADPHRAHPPRGARPEL

SEQ ID NO: 25684 - protein, 288 aa, Triticum aestivum
  misc_feature (283)..(284): Xaa can be any naturally occurring amino acid
HSIHGSPRSTRVVIDRRGHHHHGSAAAEDGEAGDQEPRRPHVPPSRGPHPPPPRGHAARRRGAAALDADAGEGARPLEHSSERAGAGHGVLGGGAGGVHVRVVPPSASVSSGPRRVQAAGGAGGVARQDHRALLAVRAVQRAEHGVPEADAGAVGAGRGDALPHVADPPPRGHVRPDGHGGVPRRDLRRRRRGPPQDRRGRRRRGRAHLQLQPAQPDAVLHVAHREPLQVPRRHRHAQPQRHGVQRRHHRHRPRQAPAPGTPEHVRAGGEHGEHHPQRLHGQXXVRCW

SEQ ID NO: 25685 - DNA, 631 bp, Triticum aestivum
ctggaagatcgtccgtgctctttccgaggttgccggggctccactgccttacgacagcgtcgcagctgtgaggagccggatcagcatggtggccccaaatcttgtgcgcgtcgacgagagggagccatcggtgatctctgccgaggtgaagcctccagtaaagcagcaagtgagcccggcgccattcaaagctgccgtggagaacttctacatgaccgacgcgatcacacgggcttccaagatcatggctcagtgcagcgcaaccttgttgaagaagtgagaccctgctctatgtacgtccccttgaagaagttaaatcatcggcatacgagattttagttgcttttccatttcactcaccagttgttgttgcttggttggttgggagcataaaatttggactgcctctaccctagctagatccgaggagcagcgaaacttgaaagcagtgcatttttctgtaacgtgtgagaagcggagcatacttaataagcttgttttgtccttttgaattagacggcagccgcaagcaaataattttgttgtattttgggttttcgcctgctcgtttcccggttccaggatgcaggcaaatgtagctgtatgtgcaaattaaggtatacccccattt

SEQ ID NO: 25686 - protein, 112 aa, Triticum aestivum
LEDRPCSFRGCRGSTALRQRRSCEEPDQHGGPKSCARRREGAIGDLCRGEASSKAASEPGAIQSCRGELLHDRRDHTGFQDHGSVQRNLVEEVRPCSMYVPLKKLNHRHTRF

SEQ ID NO: 25687 - protein, 92 aa, Triticum aestivum
WKIVRALSEVAGAPLPYDSVAAVRSRISMVAPNLVRVDEREPSVISAEVKPPVKQQVSPAPFKAAVENFYMTDAITRASKIMAQCSATLLKK

SEQ ID NO: 25688 - protein, 64 aa, Triticum aestivum
MVAPNLVRVDEREPSVISAEVKPPVKQQVSPAPFKAAVENFYMTDAITRASKIMAQCSATLLKK

SEQ ID NO: 25689 - DNA, 598 bp, Triticum aestivum
  misc_feature (533)..(533): n is a, c, g, or t
caaaacccttatccatcagcatggtggtgagaggcaggaatcatttgaacaacatggaaggcagtttggaatgtaccatcaatctgttcctccccaaactaatggtattgatgctatgaacggtgcttctatggtgaacagagatacgaaaacgaggccaacaagaccatgtgcctacttcaacggcccgagagggtgtcgcaacggagctaattgcacgtttctacatgactcatctgccacttcaaggcagcaggagcaacagaacggctcgaaaaggataaagttagacagcagaataactggtcgaaattgagctgttggctgctattcatgtttttgactgttctttggttcaatatcttttcacatgcatggttcagtaaatatgtcagacgccagctccctgtcctgttgactccctcccagtagcttgccttctctcctttttatagccaaaaagatgttctggaagaaaagggaaatacttccatcttatattggagctcagatttttactgaaccattatacnccgttattgaagcacttaaatcgtggctagtttcatgctgcgttagtggagactgttctggtttt

SEQ ID NO: 25690 - protein, 104 aa, Triticum aestivum
KTLIHQHGGERQESFEQHGRQFGMYHQSVPPQTNGIDAMNGASMVNRDTKTRPTRPCAYFNGPRGCRNGANCTFLHDSSATSRQQEQQNGSKRIKLDSRITGRN

SEQ ID NO: 25691 - protein, 81 aa, Triticum aestivum
MYHQSVPPQTNGIDAMNGASMVNRDTKTRPTRPCAYFNGPRGCRNGANCTFLHDSSATSRQQEQQNGSKRIKLDSRITGRN

SEQ ID NO: 25692 - protein, 66 aa, Triticum aestivum
MNGASMVNRDTKTRPTRPCAYFNGPRGCRNGANCTFLHDSSATSRQQEQQNGSKRIKLDSRITGRN

SEQ ID NO: 25693 - DNA, 1384 bp, Triticum aestivum
  misc_feature (208)..(208): n is a, c, g, or t
ttattctgaggaagaaaataagtttaacctcgacatagttactggactaattcgttccgagattcttaatcttggggattatgatgttcatctagcaaagatcattgatagtggaagaaacaagactgcaacagagttcgctatatcacttgtccagacattgattacccaagaacccagtggcgtttctgagctttgtaatgttgtngatgcattatcgaagcttgcaatcaggcctggttcacctgaatcattgcagcagttgattgagattgcaaagagtaatttcaagaacgctgctagctttgccgccatgaaggatgaaaaggttttatctggccgtccttcatcagtatataaagaagaaaatgattctgcttttgcagatgctgttagttttcaagaccaggttgcagttttattctcggactggtgtcacatatgtgatcatccaactatgggtgattcagcatatagtcattacattgtgcagttgcaacaacatggcttgcttaagggagatgatttgactgaccgcttcttccatactctcacggaacttgccatcacacatgctgttgtctctgagcaagttattgctcctggtgggatgtctcagcagccggcccagcaactccagatttcatatttctcaattgattcatactcgaagcttgtgactttaatgttcaagtatggcgtggatttaggaccaaacaaaggcagccttcttctgaagattctctccataaccactaggatcattcagaaagatgctgaagaaaagaaagtttctttcaatcctcggccatattttagattatttataaatttgctaagtgagcttagcactgctgaccttcatgatggtgctagttttcaggttttgactgcatttgcaaatgcttttcatgtgcttcaacccttgagagttcctgcatggagttttgcttggcttgaattggtaagccatagaagcttcatgccgaggttgttgctgtgcaattcacaaaaaggttggccattcttccagaggctgcttggtgatttgttcaaatttatggaaccatatctaagaaacgctgagctgggacagcctgtaagttctatccctgcaccttcggttgcagttgtcttatactccctccgttcggaattacttgtcgcggaaattgatgtatctagatgtattttagttctagatacatccatttccgagacaagtaattctgaacggagggagtatacagtatgtgttgcacttttatgtactttgtaccttttctttttgtagattcagcttttatacaaaggaactttgagagtgctgcttgttctactccatgactttcctgagttcctctgtgactaccacttcagtttc

SEQ ID NO: 25694 - protein, 430 aa, Triticum aestivum
  misc_feature (69)..(69): Xaa can be any naturally occurring amino acid
YSEEENKFNLDIVTGLIRSEILNLGDYDVHLAKIIDSGRNKTATEFAISLVQTLITQEPSGVSELCNVXDALSKLAIRPGSPESLQQLIEIAKSNFKNAASFAAMKDEKVLSGRPSSVYKEENDSAFADAVSFQDQVAVLFSDWCHICDHPTMGDSAYSHYIVQLQQHGLLKGDDLTDRFFHTLTELAITHAVVSEQVIAPGGMSQQPAQQLQISYFSIDSYSKLVTLMFKYGVDLGPNKGSLLLKILSITTRIIQKDAEEKKVSFNPRPYFRLFINLLSELSTADLHDGASFQVLTAFANAFHVLQPLRVPAWSFAWLELVSHRSFMPRLLLCNSQKGWPFFQRLLGDLFKFMEPYLRNAELGQPVSSIPAPSVAVVLYSLRSELLVAEIDVSRCILVLDTSISETSNSERREYTVCVALLCTLYLFFL

SEQ ID NO: 25695 - protein, 326 aa, Triticum aestivum
MKDEKVLSGRPSSVYKEENDSAFADAVSFQDQVAVLFSDWCHICDHPTMGDSAYSHYIVQLQQHGLLKGDDLTDRFFHTLTELAITHAVVSEQVIAPGGMSQQPAQQLQISYFSIDSYSKLVTLMFKYGVDLGPNKGSLLLKILSITTRIIQKDAEEKKVSFNPRPYFRLFINLLSELSTADLHDGASFQVLTAFANAFHVLQPLRVPAWSFAWLELVSHRSFMPRLLLCNSQKGWPFFQRLLGDLFKFMEPYLRNAELGQPVSSIPAPSVAVVLYSLRSELLVAEIDVSRCILVLDTSISETSNSERREYTVCVALLCTLYLFFL

SEQ ID NO: 25696 - protein, 278 aa, Triticum aestivum
MGDSAYSHYIVQLQQHGLLKGDDLTDRFFHTLTELAITHAVVSEQVIAPGGMSQQPAQQLQISYFSIDSYSKLVTLMFKYGVDLGPNKGSLLLKILSITTRIIQKDAEEKKVSFNPRPYFRLFINLLSELSTADLHDGASFQVLTAFANAFHVLQPLRVPAWSFAWLELVSHRSFMPRLLLCNSQKGWPFFQRLLGDLFKFMEPYLRNAELGQPVSSIPAPSVAVVLYSLRSELLVAEIDVSRCILVLDTSISETSNSERREYTVCVALLCTLYLFFL

SEQ ID NO: 25697 - DNA, 1699 bp, Triticum aestivum
  misc_feature (1291)..(1291): n is a, c, g, or t
cccctctctccctctgtatcctgcacacaccgccaccgatcactcgccggagcccctcccccaatggccgccgccgccgccgcgatcgcgtgatggccgacccagccgctcgccgaagatggacgaagccggaagggcctccgctcccgcggtggtgacggtcacggcctccgccgccgccccctcgcctcctcctcccccgccccccgccacggccaccgccgcggccgccgacccgccatcgcccgacccggacgctctctatgaagagggaatgtggcagcagatggccatgagcagcggcgccactatgcaatctgggccatatcctgtgcggccaggggaaccggactgcacctactacctcaggactggattgtgcaggttcggcatgagctgcaggttcaatcaccctcaggacaggaatacggctattgcctctgccagaatgaaaggagaatatcctgagagggtgggacaacctgaatgtcagtactatctgaagactggaacatgcaagtttgggcctacgtgcaaattccatcaccctagagaaaaggctggaatcgcaggaatggtgcagctaaacacattgggatatccacttcgaccgaatgaaagggagtgtgcatactacttaaaaacgggacagtgtaaatatgggaatacatgtaaatttaaccatccagaaattttcaatgcggtggcttcttcacgtggttcccctatttatcctcctgtacataactctggaagcaccggtccacattcctatactggaacaatggcaagctggacttatccaagaggttctttcattccaagccctagatggcaaagtccttcaaactatacaccgatgattgtaccacagggtcttgttcaagtaccaaactggaactcatatcctggccaaatggtacctgtttcatctcctgagagtcgactacagtctccaggggctcaacaatactatggaacttctcgacaaggtgaagccagtgcaggaaatcagggaatgcaatcaccctacagatccagttcgtttcctgcacctcagtatgcactgcagagagagaatgtatttcctgagagacctgatcagccagaatgcatatactacataaagactggagattgtaaatttggtgcggtttgcaaattccatcatccccgggtgcgctcacagcctcccccagactgtatcttgagcccaatgggtcttccattacgcccaggcgaagagctctgcaagttctactctcgctatggcatctgcaagtttggcgtnaactgcaagttcgaccatccgatggcggctccgatgggggtgtacgcgtacggctactctgcctccgcgtcgcccaatgctcccatggctcggcgtctcctggagtccccctccgggtctgcgtacgcctcctaaggcaaggctccctggcatttgaccctaccttgattgatctcgatgatgtataaaagccatcgcgcgccgtccttcccagggcttgcgccgcgaatgtcctcccccctaactccccggaatcaagttctgtaaaaatcgagtttgctaccagagatgtacagttgttatttttgttaatgcgggtcagtcagtctttggatggatggatggagaagccatttgctaccgaatgaaataatgcttgaatgcagtgtgaaaaatgttggcattgcc

SEQ ID NO: 25698 - protein, 474 aa, Triticum aestivum
  misc_feature (430)..(430): Xaa can be any naturally occurring amino acid
PSLPLYPAHTATDHSPEPLPQWPPPPPRSRDGRPSRSPKMDEAGRASAPAVVTVTASAAAPSPPPPPPPATATAAAADPPSPDPDALYEEGMWQQMAMSSGATMQSGPYPVRPGEPDCTYYLRTGLCRFGMSCRFNHPQDRNTAIASARMKGEYPERVGQPECQYYLKTGTCKFGPTCKFHHPREKAGIAGMVQLNTLGYPLRPNERECAYYLKTGQCKYGNTCKFNHPEIFNAVASSRGSPIYPPVHNSGSTGPHSYTGTMASWTYPRGSFIPSPRWQSPSNYTPMIVPQGLVQVPNWNSYPGQMVPVSSPESRLQSPGAQQYYGTSRQGEASAGNQGMQSPYRSSSFPAPQYALQRENVFPERPDQPECIYYIKTGDCKFGAVCKFHHPRVRSQPPPDCILSPMGLPLRPGEELCKFYSRYGICKFGXNCKFDHPMAAPMGVYAYGYSASASPNAPMARRLLESPSGSAYAS

SEQ ID NO: 25699 - protein, 435 aa, Triticum aestivum
  misc_feature (391)..(391): Xaa can be any naturally occurring amino acid
MDEAGRASAPAVVTVTASAAAPSPPPPPPPATATAAAADPPSPDPDALYEEGMWQQMAMSSGATMQSGPYPVRPGEPDCTYYLRTGLCRFGMSCRFNHPQDRNTAIASARMKGEYPERVGQPECQYYLKTGTCKFGPTCKFHHPREKAGIAGMVQLNTLGYPLRPNERECAYYLKTGQCKYGNTCKFNHPEIFNAVASSRGSPIYPPVHNSGSTGPHSYTGTMASWTYPRGSFIPSPRWQSPSNYTPMIVPQGLVQVPNWNSYPGQMVPVSSPESRLQSPGAQQYYGTSRQGEASAGNQGMQSPYRSSSFPAPQYALQRENVFPERPDQPECIYYIKTGDCKFGAVCKFHHPRVRSQPPPDCILSPMGLPLRPGEELCKFYSRYGICKFGXNCKFDHPMAAPMGVYAYGYSASASPNAPMARRLLESPSGSAYAS

SEQ ID NO: 25700 - protein, 383 aa, Triticum aestivum
  misc_feature (339)..(339): Xaa can be any naturally occurring amino acid
MWQQMAMSSGATMQSGPYPVRPGEPDCTYYLRTGLCRFGMSCRFNHPQDRNTAIASARMKGEYPERVGQPECQYYLKTGTCKFGPTCKFHHPREKAGIAGMVQLNTLGYPLRPNERECAYYLKTGQCKYGNTCKFNHPEIFNAVASSRGSPIYPPVHNSGSTGPHSYTGTMASWTYPRGSFIPSPRWQSPSNYTPMIVPQGLVQVPNWNSYPGQMVPVSSPESRLQSPGAQQYYGTSRQGEASAGNQGMQSPYRSSSFPAPQYALQRENVFPERPDQPECIYYIKTGDCKFGAVCKFHHPRVRSQPPPDCILSPMGLPLRPGEELCKFYSRYGICKFGXNCKFDHPMAAPMGVYAYGYSASASPNAPMARRLLESPSGSAYAS

SEQ ID NO: 25701 - DNA, 1231 bp, Triticum aestivum
agatcccgcaacccgcgaaacaaaccaccagccaagccggcaagcaatccgcgcgcccccattgttctcctctccctctctctctcagcatccgctccgagtcagctccgacggcatggacgcgcccgcacctgccaagaggagacgcggcggcggtggcggaagcggggagaagaaggatctgttccacgtcgtccacaaggtgcccgccggcgacagcccctacgtccgggccaagcacctccagctcgtggagaaggacgcggaggcgtcgatcgtgtggttctggaaggcgatcaactccggggacagggtagacagcgcgctcaaggacatggccgtggtgatgaagcagcaggaccgcgccgaggaggcgatagaggccatcagatccttcaggcacctctgctccaggcaggcccaggagtccctcgacaacctgctcatcgacctctacaagaaatgcggaaaagtcgacgagcagatagagctgctgaaacagaagctcaagatgatatgcctcggcgaggccttcaacgggaagatcaccaagacggcgcgatcccacggcaagaagttccaggtctcgatccagcaggagatgtcacgcattctgggtaaccttggctgggcttacatgcagcagaacaactatgaagccgctgaattggtttatcgaaaggcccagactatcgtacctgatgccaacagggcgtgcaacctcgggctgtgcctcattaagcagagcagacatgaggaggcagtgcaagtgcttgaggatgtcctacttcgcagaatctccgggttggatgacgacaaggcggttgcccgagctgagcagctcctccgtgagctcggtccgacaacacacatttcatcgccctttgatattggcttgagtttcaccgaagagatcatggagagactagaccttgtgatgaatgattggacaccgttcaggtcgaggcggctgcccgtatttgaggagttagatgcattcagggaccaaatggcttgttgattcattacttcgttggtttttaaactttaacgtgcatttgcgtgtggtaaatagaagttgatgtgcatgtatgtaggaggttttgtggatgttacaggtgtgaatgagagatttgataggttgtagatatcataagcagctagggttgatgcaaagcgttcccttgcggaataatgtggtttcagttttgaatgcagttggtctttgccc

SEQ ID NO: 25702 - protein, 339 aa, Triticum aestivum
DPATRETNHQPSRQAIRAPPLFSSPSLSQHPLRVSSDGMDAPAPAKRRRGGGGGSGEKKDLFHVVHKVPAGDSPYVRAKHLQLVEKDAEASIVWFWKAINSGDRVDSALKDMAVVMKQQDRAEEAIEAIRSFRHLCSRQAQESLDNLLIDLYKKCGKVDEQIELLKQKLKMICLGEAFNGKITKTARSHGKKFQVSIQQEMSRILGNLGWAYMQQNNYEAAELVYRKAQTIVPDANRACNLGLCLIKQSRHEEAVQVLEDVLLRRISGLDDDKAVARAEQLLRELGPTTHISSPFDIGLSFTEEIMERLDLVMNDWTPFRSRRLPVFEELDAFRDQMAC

SEQ ID NO: 25703 - protein, 301 aa, Triticum aestivum
MDAPAPAKRRRGGGGGSGEKKDLFHVVHKVPAGDSPYVRAKHLQLVEKDAEASIVWFWKAINSGDRVDSALKDMAVVMKQQDRAEEAIEAIRSFRHLCSRQAQESLDNLLIDLYKKCGKVDEQIELLKQKLKMICLGEAFNGKITKTARSHGKKFQVSIQQEMSRILGNLGWAYMQQNNYEAAELVYRKAQTIVPDANRACNLGLCLIKQSRHEEAVQVLEDVLLRRISGLDDDKAVARAEQLLRELGPTTHISSPFDIGLSFTEEIMERLDLVMNDWTPFRSRRLPVFEELDAFRDQMAC

SEQ ID NO: 25704 - protein, 228 aa, Triticum aestivum
MAVVMKQQDRAEEAIEAIRSFRHLCSRQAQESLDNLLIDLYKKCGKVDEQIELLKQKLKMICLGEAFNGKITKTARSHGKKFQVSIQQEMSRILGNLGWAYMQQNNYEAAELVYRKAQTIVPDANRACNLGLCLIKQSRHEEAVQVLEDVLLRRISGLDDDKAVARAEQLLRELGPTTHISSPFDIGLSFTEEIMERLDLVMNDWTPFRSRRLPVFEELDAFRDQMAC

SEQ ID NO: 25705 - DNA, 598 bp, Triticum aestivum
  misc_feature (573)..(573): n is a, c, g, or t
  misc_feature (580)..(580): n is a, c, g, or t
gagatctgtgccgcacatcgaccaagaccgactcgaccgaatagccttgccacaccaaaaaccctagcccgcacatcctcccctccccttcctcctcctcgcgccgtccctccaatctctcttcgtgcccccgcgccgccgaccaccgagcagccatggcgaatccaccggcgacgggagggaagtcgttcctgcaggccatgtcgacggtcaccgaagaggcggcggtgcagctccgcgtcgtccagatggagggactggctgtcctgaagatcattaagcactgtgaggagtttgcgcctgctctggttacaggccaactgcttggtttggatgttggtagtgttctgaaagtgaccaactgttttcctttccctataagagaggatgacgaggaagcagatgcagatggtgcgaactatcagcttgagatgatgaggtgcttgagggaggttaatgtcgacaataacactgttggatggtatcagtcctgcttgcttggatcttttcaaaccgttgagctgattgaaacatttatgaattatcaggagaacatccggagatgcgtgtgtntcgtgtntgacccatctaggtctag

SEQ ID NO: 25706 - protein, 147 aa, Triticum aestivum
  misc_feature (140)..(140): Xaa can be any naturally occurring amino acid
  misc_feature (142)..(142): Xaa can be any naturally occurring amino acid
MANPPATGGKSFLQAMSTVTEEAAVQLRVVQMEGLAVLKIIKHCEEFAPALVTGQLLGLDVGSVLKVTNCFPFPIREDDEEADADGANYQLEMMRCLREVNVDNNTVGWYQSCLLGSFQTVELIETFMNYQENIRRCVCXVXDPSRS

SEQ ID NO: 25707 - protein, 132 aa, Triticum aestivum
  misc_feature (125)..(125): Xaa can be any naturally occurring amino acid
  misc_feature (127)..(127): Xaa can be any naturally occurring amino acid
MSTVTEEAAVQLRVVQMEGLAVLKIIKHCEEFAPALVTGQLLGLDVGSVLKVTNCFPFPIREDDEEADADGANYQLEMMRCLREVNVDNNTVGWYQSCLLGSFQTVELIETFMNYQENIRRCVCXVXDPSRS

SEQ ID NO: 25708 - protein, 116 aa, Triticum aestivum
  misc_feature (109)..(109): Xaa can be any naturally occurring amino acid
  misc_feature (111)..(111): Xaa can be any naturally occurring amino acid
MEGLAVLKIIKHCEEFAPALVTGQLLGLDVGSVLKVTNCFPFPIREDDEEADADGANYQLEMMRCLREVNVDNNTVGWYQSCLLGSFQTVELIETFMNYQENIRRCVCXVXDPSRS

SEQ ID NO: 25709 - DNA, 2172 bp, Triticum aestivum
acgagcaccgacgagagtcaacaacaactaataagccgatcgaggctgagcttccctgctcctcttgccttctccgtctccctcttcctcgtcgatcaccaccagctcgaggtccggctctccgtcccggggaccgatctccgcacacggtaggtgcccatggagacgaggaagggaatcctggagctgcgcgaccgtctggacaagacactggcctgctctgatctcgccgacgagggctctctgaaatctctggtcaagaaccagattttggagtcgtctctgcccggctctgaccaaggcaacatcgatttgattgctgaagcacgagccaaagaagtctcgaattttcttgaaatgctagacacttcaggaaatgaacggccttcagagattcgtgggccgcaacagaaggagtggaaggtgaagcaggatacagaccaattacgggtcatgtaccgcgaaggtccagatgggaccccatttcatactcttcttgctgaaggctttgctgatggtcctatcgatgtttgtacatgtgtgtcatgggaatcaggtctatacacaaaatggtttccgcagtacaatctgccaacatttaaaattgctcagtcaggctgcttgaaaaagattcggattggcgaagaaatttctttgatcagggtgaaggtcccctggccagtttcagagagagaagctcttctacactactttcagtttgagtatcttaaagaagaccttgtcattgtaatcatgaaaactgtgcgtagatatccaatttggataatctcagtatgcagacacatggatttactatagatggaatccctgaagctggtgacacgattcggatggatgtagttggaggctttgtcttacagaggattaccaaggaaagaagttttttcagggcagtagctaatatggacattaagctagactttgttcccccatggctgatcaactttatgtcaagacagctaatcggcagtgggcataagctataccagaaggctgtcagtactgtggccgcttgtgatgaagactacaagcaagctttacgagcaccgctctatgcaagaatacgcgagtaccagcattctgctgacaaggcgaaggtgacttcagttgaggaaagcgctaatgaagtgctccccgagaatcccactgtacataatcctctggcagtcactaatctcacaccatgcagtgagattatcgaagaggagagtgaacagaacacatcttttaaggtggataatcttgcagccggcttttctaaccaaccagccgggcaagtgcagcaagttgaaaataagtctttcactagtcctgacagaacagtcaagcaagcacagcaagtcgaaaataaacagttgattagtcctgaggtgcagaaggctttgggcatactggacacagccattgcagttcttcaaggcaacagatctgcaaacatcagtactctcagaaagctcctcagttatgatgcggcgtcggaagaaggcagtgccatcactacaagaaattcacataccctcgacgttctcgatacagataatctcccaaatggatatcctcttgccacaccacctcatgattcaagagagatccgccaaacttatttcttgcccgataaggagatgcgcgacagggaggaaggtgctagcgaaagtgattctcctaaaaacatgaccgcttctaccacaacgactacaaaatccatgacattaaggagcacaatgaaggtgcatgaagaagagaccctgaatagcgatggcctctatcagaacggtttccacagtggcaaagagcccaagagaccaaggaagaccaaaaggtggctttgctgcttaacgcctagcaccataggatgacgagaacccattgtaggggctctcatggttaacgcttgatttttggttgtacatcagaaaatagacgagctacacaagatgggacatggggatcaaatggcaattccggaggtagcttgtgagaagttacaaagattagattatgtctttggtaaatgtatagaagttatgttgttgtaacatcatgtaaaacattattagagcatctccaacaaataatgtaaaacttggtgctcaaaaaacgtttttagggcatgagagagaaggttttgggctccgcagtggttgtcacttt

SEQ ID NO: 25710 - protein, 360 aa, Triticum aestivum
MQTHGFTIDGIPEAGDTIRMDVVGGFVLQRITKERSFFRAVANMDIKLDFVPPWLINFMSRQLIGSGHKLYQKAVSTVAACDEDYKQALRAPLYARIREYQHSADKAKVTSVEESANEVLPENPTVHNPLAVTNLTPCSEIIEEESEQNTSFKVDNLAAGFSNQPAGQVQQVENKSFTSPDRTVKQAQQVENKQLISPEVQKALGILDTAIAVLQGNRSANISTLRKLLSYDAASEEGSAITTRNSHTLDVLDTDNLPNGYPLATPPHDSREIRQTYFLPDKEMRDREEGASESDSPKNMTASTTTTTKSMTLRSTMKVHEEETLNSDGLYQNGFHSGKEPKRPRKTKRWLCCLTPSTIG

SEQ ID NO: 25711 - protein, 341 aa, Triticum aestivum
MDVVGGFVLQRITKERSFFRAVANMDIKLDFVPPWLINFMSRQLIGSGHKLYQKAVSTVAACDEDYKQALRAPLYARIREYQHSADKAKVTSVEESANEVLPENPTVHNPLAVTNLTPCSEIIEEESEQNTSFKVDNLAAGFSNQPAGQVQQVENKSFTSPDRTVKQAQQVENKQLISPEVQKALGILDTAIAVLQGNRSANISTLRKLLSYDAASEEGSAITTRNSHTLDVLDTDNLPNGYPLATPPHDSREIRQTYFLPDKEMRDREEGASESDSPKNMTASTTTTTKSMTLRSTMKVHEEETLNSDGLYQNGFHSGKEPKRPRKTKRWLCCLTPSTIG

SEQ ID NO: 25712 - protein, 317 aa, Triticum aestivum
MDIKLDFVPPWLINFMSRQLIGSGHKLYQKAVSTVAACDEDYKQALRAPLYARIREYQHSADKAKVTSVEESANEVLPENPTVHNPLAVTNLTPCSEIIEEESEQNTSFKVDNLAAGFSNQPAGQVQQVENKSFTSPDRTVKQAQQVENKQLISPEVQKALGILDTAIAVLQGNRSANISTLRKLLSYDAASEEGSAITTRNSHTLDVLDTDNLPNGYPLATPPHDSREIRQTYFLPDKEMRDREEGASESDSPKNMTASTTTTTKSMTLRSTMKVHEEETLNSDGLYQNGFHSGKEPKRPRKTKRWLCCLTPSTIG

SEQ ID NO: 25713 - DNA, 843 bp, Triticum aestivum
atcgaccatctccggctcgctcgtcgcccacccccaccctctcatcctccctccctcccccgaccgattttgacgactcctttgacctctcgcgctgtccctcccccgccccgccccgcctgcgtcgccgcgccaagctccaggcgcccccgccccctggtcggtggattccatggccaacagcaacctcccccgccggatcatcaaggagacgcagcggctgctcagcgaaccagcgccggggatcagcgcctcgccgtcggaggagaacatgcgctacttcaatgtcatggtccttggccccgcgcagtcgccctacgaaggtggagtcttcaagcttgaacttttcttacccgaggaatatccgatggctgctcctaaagttaggtttctcacaaaaatataccatcccaacattgacaagcttggtagaatatgcctcgacatcctaaaggacaagtggagtccagctcttcagatacgcactgttcttcttagcattcaggcactgctgagcgccccaaacccagatgatcccctctcagaaaacgtcgcaaaacactggaaatccaatgaagctgaagctgttgagacagcgaaggaatggactcgtatgtatgccagtggcgcatgacaagctaacgctgttatggatgtaataacaccgtgtcatagttgggcctaatcgaaaaccatttgcttgataaaaacacacttgaaatgatttgcgatggacgaatgtatccagagtggcatcatttctagttggtggttgtatttgtggtgcgtgttctggcacgcttcataacttgctgcttatagaacatgctctgtttctcgttc

SEQ ID NO: 25714 - protein, 153 aa, Triticum aestivum
MANSNLPRRIIKETQRLLSEPAPGISASPSEENMRYFNVMVLGPAQSPYEGGVFKLELFLPEEYPMAAPKVRFLTKIYHPNIDKLGRICLDILKDKWSPALQIRTVLLSIQALLSAPNPDDPLSENVAKHWKSNEAEAVETAKEWTRMYASGA

SEQ ID NO: 25715 - protein, 149 aa, Triticum aestivum
RPSPARSSPTPTLSSSLPPPTDFDDSFDLSRCPSPAPPRLRRRAKLQAPPPPGRWIPWPTATSPAGSSRRRSGCSANQRRGSAPRRRRRTCATSMSWSLAPRSRPTKVESSSLNFSYPRNIRWLLLKLGFSQKYTIPTLTSLVEYASTS

SEQ ID NO: 25716 - protein, 120 aa, Triticum aestivum
MRYFNVMVLGPAQSPYEGGVFKLELFLPEEYPMAAPKVRFLTKIYHPNIDKLGRICLDILKDKWSPALQIRTVLLSIQALLSAPNPDDPLSENVAKHWKSNEAEAVETAKEWTRMYASGA

SEQ ID NO: 25717 - DNA, 981 bp, Triticum aestivum
tatctcataatatggcactgttcaatggcaatcacatccgtgttgacatggcgtgtccacctcgtaaaaagctaagaggagaaggacctctttatgacagaaagaggacagtgtttgttggtaaccttccattcgatgtaaaggatgaggagctctaccagctgttctgcggtcccagtggaccacaaggtgatgttgaagctatacgagttgtcagagatccagattcaagcctaggaaagggtatcgcctatgttctattcaaaacaagggaaggcgctaactctgttgtcaaaaaacgtggccttaagatcagagatcgcgttttgaggctcacccatgcaaaggcagccgatgcgacgccgaagaaggcagattctgggaaaaagcgcggcactccaaaacagacacctttcacgccaggcagcaagtcccgcgaaggcagcgacagcaacaaacgcaaggcgccggcaagcctgtcttaccaaggcctgaagtcgaccaaatctggcgtcgtgaagaaggtgaaggtggcccggcgccccgtcaaccaaggcaagcagcaaggcaggcctagcgagacgggacaaagcgagagcgcccgcaaagccaagcggcccgccgtggcagccaggaaggcgaagcagctgaacaagaaacgcaagcaggacggctcgacgcccgagaacacgcaccggagcaagaaggcgaggaagtagccgtccgtccctgtcgtggatcgttcgcttcactttgtaatgggagtgttgagagttttggacaagatgaggtcctggtgatagctgccttgggttgaacgaggaagaaaatacgaggttgatgttgctgatgtaatgctgggaagtgtcgagtgtagtcatttggtacttgcctttggagtcgtagcccctgtactaatgtcaaaatgatgctcatctatgcaacatcatgtactgacaccatttttgcgttgcttgttct

SEQ ID NO: 25718 - protein, 238 aa, Triticum aestivum
SHNMALFNGNHIRVDMACPPRKKLRGEGPLYDRKRTVFVGNLPFDVKDEELYQLFCGPSGPQGDVEAIRVVRDPDSSLGKGIAYVLFKTREGANSVVKKRGLKIRDRVLRLTHAKAADATPKKADSGKKRGTPKQTPFTPGSKSREGSDSNKRKAPASLSYQGLKSTKSGVVKKVKVARRPVNQGKQQGRPSETGQSESARKAKRPAVAARKAKQLNKKRKQDGSTPENTHRSKKARK

SEQ ID NO: 25719 - protein, 235 aa, Triticum aestivum
MALFNGNHIRVDMACPPRKKLRGEGPLYDRKRTVFVGNLPFDVKDEELYQLFCGPSGPQGDVEAIRVVRDPDSSLGKGIAYVLFKTREGANSVVKKRGLKIRDRVLRLTHAKAADATPKKADSGKKRGTPKQTPFTPGSKSREGSDSNKRKAPASLSYQGLKSTKSGVVKKVKVARRPVNQGKQQGRPSETGQSESARKAKRPAVAARKAKQLNKKRKQDGSTPENTHRSKKARK

SEQ ID NO: 25720 - protein, 223 aa, Triticum aestivum
MACPPRKKLRGEGPLYDRKRTVFVGNLPFDVKDEELYQLFCGPSGPQGDVEAIRVVRDPDSSLGKGIAYVLFKTREGANSVVKKRGLKIRDRVLRLTHAKAADATPKKADSGKKRGTPKQTPFTPGSKSREGSDSNKRKAPASLSYQGLKSTKSGVVKKVKVARRPVNQGKQQGRPSETGQSESARKAKRPAVAARKAKQLNKKRKQDGSTPENTHRSKKARK

SEQ ID NO: 25721 - DNA, 1290 bp, Triticum aestivum
cttatacgcatcctgggagaccgatttccatggcaagttaagtcagctatcctatcaaccctgactattatcatcgcaaaaggtggtcttgcacttaagcccttccttccacaacttcagacaacatttgttaaatgtctacaagatagcaacagatctgtccgcacgagggccgcatcagctcttggaaagcttagcgcattaagcacaagaattgatcctttagttagcgatcttttgtccatgttgcagtcaggagatgacgctgttaaggaaagtgtgctgtctgcacttaaaggtgttgttaggcatgctggcaaaagtgttagctctgcaatcagatcacgtgggtgtactcttctcaaagatttgctgcaggctgatgctgatgatgtccgcagttctgctgcaaaagcaattggtacattatctcagtacatggatgagaccgagaccaccgatctggtgcagaccctgttgagcatgggcacattaccagactggtgtaccagacatggtgctttgttaacattctcttccatatcaaggcattgtccaacaaaactgtgccattcaacatcatttccatctattgttgatcttctgaaagattcgctaaaagatgacaagttccctgttcgtgaagcctctacgaaaactctggggaggctactttgttaccagttacaatttgggggcagcacgttgcaacttgttcaattgctcatcttggccttgcgtgatagttcaaccgaagttaggagaagatcgttgtcctgtatcaaagctgctgcgaagataaatcattcagctcttgccacacatatctcgatattgggcccggcaattggtgatactttgaaggatagtagttcgccagtacgcatagctgcagagcgctgtgccgttcatgttttccagttgaccaaaggggcagattacgttactactgcgcaaaagcatctcaccaacatgacaggcttagaagtaagaagacttgcaaagcttcctgtggagagtgacgacagtgaaagcagtgacgatgacaggagagcatagacactgcccagccacagcggcctcgaaggacgttttctgtgcctgtccattcatacatcttataggtaaaccggtaatggaacagcgtggtcaatttttgcctgtgacccttgatgtaaacaccgtttttgacaagttacagtactagaggaaggggtcggtgttgtttctatttcttactacaaatgaacaatgttcatatccgtatattattattgaatgaggctaatc

SEQ ID NO: 25722 - protein, 352 aa, Triticum aestivum
LIRILGDRFPWQVKSAILSTLTIIIAKGGLALKPFLPQLQTTFVKCLQDSNRSVRTRAASALGKLSALSTRIDPLVSDLLSMLQSGDDAVKESVLSALKGVVRHAGKSVSSAIRSRGCTLLKDLLQADADDVRSSAAKAIGTLSQYMDETETTDLVQTLLSMGTLPDWCTRHGALLTFSSISRHCPTKLCHSTSFPSIVDLLKDSLKDDKFPVREASTKTLGRLLCYQLQFGGSTLQLVQLLILALRDSSTEVRRRSLSCIKAAAKINHSALATHISILGPAIGDTLKDSSSPVRIAAERCAVHVFQLTKGADYVTTAQKHLTNMTGLEVRRLAKLPVESDDSESSDDDRRA

SEQ ID NO: 25723 - protein, 271 aa, Triticum aestivum
MLQSGDDAVKESVLSALKGVVRHAGKSVSSAIRSRGCTLLKDLLQADADDVRSSAAKAIGTLSQYMDETETTDLVQTLLSMGTLPDWCTRHGALLTFSSISRHCPTKLCHSTSFPSIVDLLKDSLKDDKFPVREASTKTLGRLLCYQLQFGGSTLQLVQLLILALRDSSTEVRRRSLSCIKAAAKINHSALATHISILGPAIGDTLKDSSSPVRIAAERCAVHVFQLTKGADYVTTAQKHLTNMTGLEVRRLAKLPVESDDSESSDDDRRA

SEQ ID NO: 25724 - protein, 206 aa, Triticum aestivum
MDETETTDLVQTLLSMGTLPDWCTRHGALLTFSSISRHCPTKLCHSTSFPSIVDLLKDSLKDDKFPVREASTKTLGRLLCYQLQFGGSTLQLVQLLILALRDSSTEVRRRSLSCIKAAAKINHSALATHISILGPAIGDTLKDSSSPVRIAAERCAVHVFQLTKGADYVTTAQKHLTNMTGLEVRRLAKLPVESDDSESSDDDRRA

SEQ ID NO: 25725 - DNA, 1116 bp, Triticum aestivum
ccaaaccctatccctccccagatccatcgccgccgcccccttctccccagatccaatctcccccctcatcctctcccgctcacgcatgctcaagccgctcgccgcccccacgctcctccacctccaggcgacgccgagcccgcggtctccctccccaagatcgcgccggagcccgcggtccttctccacctacaggtcggctctcctcctccccttccagatcgcgccgccacctccctcccccatcacctcccgcatcacccaccgtcgacctcgtctcccccatccccctcctctcgccttccccatatccactggtccaggagaacctctcatgtgcgcgcggctccatcgccccaccccgcaccccgcactccgtcagagaaaactacctcgccccgccccacccgattcggagccgtgccgcgggagagggagggagatggggctccgcaggagagggccgctgctgttgctcctcggcctcgtggctacggccttggctgctgctgctgcggcggccgacatctatgcggcttgtcgtgctgaagccgtcggccggaggcgccaggggctcctcctccagtggcgggcagggctccaaggcaccgtcgcccagcgcagcctgcctggccagcgccagtccgtccagcacgaaggcaacatggtgactctaatgcaggcagcactggccatccagtatatgggatgtatatcccattctggaatttcatgtgctccttgagctatctaagaacaagcagaccatcatttcaccatcttcggccccctaggatgctggcctttagtcttcagaagttggagctctaggaagaagaatcctgaagaaaacccacacccagcaatgcgttttagctcactggactagttatctgtttatctagttgtattttagctaaataccagatttgtactattatctcactgttaccagatttgtattttacgtgaaaaccagatttgtactgtaaccagcaatgcgttttagctcactggaatagttatctgtatatctgtatcactgtaatttctttgcttggctgttgtatgaaatattatgccttattggctctttttgaatcaaatattatgcac

SEQ ID NO: 25726 - protein, 247 aa, Triticum aestivum
QTLSLPRSIAAAPFSPDPISPLILSRSRMLKPLAAPTLLHLQATPSPRSPSPRSRRSPRSFSTYRSALLLPFQIAPPPPSPITSRITHRRPRLPHPPPLAFPISTGPGEPLMCARLHRPTPHPALRQRKLPRPAPPDSEPCRGRGREMGLRRRGPLLLLLGLVATALAAAAAAADIYAACRAEAVGRRRQGLLLQWRAGLQGTVAQRSLPGQRQSVQHEGNMVTLMQAALAIQYMGCISHSGISCAP

SEQ ID NO: 25727 - protein, 222 aa, Triticum aestivum
KPYPSPDPSPPPPSPQIQSPPSSSPAHACSSRSPPPRSSTSRRRRARGLPPQDRAGARGPSPPTGRLSSSPSRSRRHLPPPSPPASPTVDLVSPIPLLSPSPYPLVQENLSCARGSIAPPRTPHSVRENYLAPPHPIRSRAAGEGGRWGSAGEGRCCCSSASWLRPWLLLLRRPTSMRLVVLKPSAGGARGSSSSGGQGSKAPSPSAACLASASPSSTKATW

SEQ ID NO: 25728 - protein, 219 aa, Triticum aestivum
MLKPLAAPTLLHLQATPSPRSPSPRSRRSPRSFSTYRSALLLPFQIAPPPPSPITSRITHRRPRLPHPPPLAFPISTGPGEPLMCARLHRPTPHPALRQRKLPRPAPPDSEPCRGRGREMGLRRRGPLLLLLGLVATALAAAAAAADIYAACRAEAVGRRRQGLLLQWRAGLQGTVAQRSLPGQRQSVQHEGNMVTLMQAALAIQYMGCISHSGISCAP

SEQ ID NO: 25729 - DNA, 1417 bp, Triticum aestivum
  misc_feature (1045)..(1045): n is a, c, g, or t
actaccgccgaagttcccctttcaccacccccatcgtccccaaatgtcccaaccaagccaacaccaccacttcccgccgtttgccgtcgccgtcgccgtcgcggccgtgctagtcctgctctcaccgccgtctgccgccgacccaaacgacgagctgtgcctgtcgagcctccagcagtccctctccctccgcaactggaccaagtccttcttcaccgacccctgtgacggcttcatctccaagctccagggcgtcacctgcaacaacggccgcgtctacaagctctccctccccgggctctccctcgccggctccatcccgccggagctctccaactgcaccaacctccagtcgctggacctgtcctccaacgcgctgtccggcgccatcccgacggagctatccaagctgctcaacctggccgtgctcaacctctccgccaacgccctctccggtgccatcccgcgggagctcgcgagctgcgcctacctcaacgtcatagatctccacggcaaccagctctccgggcccatccccgacgagctcggcctcctcgtccgtctctccaccttcgacgtctcgtacaaccggctgtccggccccatccccgtgctcctcgcgaaccgcagcatcgccggtggcggcggggcggtggcctcggggacgacggcgaggttcaatgccagctcgttcgccgggaacaaggacctgtacgggtaccctctgccgccaatgcgaggccacggactgtccgtgctcgccatcgtcggcatcggcctcggcagcggactgctcagtctcgtgctcagcttctccgccgtctgcatctggctccgctccaccgaccgcacggccgccacgcccggcgaggagggcaagatctcacacctcatgccggcctactgaactgcaactaggcaacatgctgatgccggtggtactctacagatgcagctccttgcatcgagttggagtacggatttgatttaatttaactccagacgatagattcgggcctggtaatccgggcgtggttggattctntgagccaagattgggccctggggctggctggaaaaggctggatcgatcagagcatggctagctagcagagcagccgtcatcagtgtcagaagctaatccaattggagttaattggtgcattgttttctcttctctttcagcttggggtaagtattaaataacttgtttttggcttttttagaacgaccctctggagttagtgcgtgagggagagggacagagttaggcgttggtgacatccacctgtgcttgtatattggtacagtagagaatttattccacttcactggtgtgagtgctgactgctgccgatctttccgccagcttaagccatttgttttctccgggatttgtttacgataatgctactct

SEQ ID NO: 25730 - protein, 301 aa, Triticum aestivum
LPPKFPFHHPHRPQMSQPSQHHHFPPFAVAVAVAAVLVLLSPPSAADPNDELCLSSLQQSLSLRNWTKSFFTDPCDGFISKLQGVTCNNGRVYKLSLPGLSLAGSIPPELSNCTNLQSLDLSSNALSGAIPTELSKLLNLAVLNLSANALSGAIPRELASCAYLNVIDLHGNQLSGPIPDELGLLVRLSTFDVSYNRLSGPIPVLLANRSIAGGGGAVASGTTARFNASSFAGNKDLYGYPLPPMRGHGLSVLAIVGIGLGSGLLSLVLSFSAVCIWLRSTDRTAATPGEEGKISHLMPAY

SEQ ID NO: 25731 - protein, 287 aa, Triticum aestivum
MSQPSQHHHFPPFAVAVAVAAVLVLLSPPSAADPNDELCLSSLQQSLSLRNWTKSFFTDPCDGFISKLQGVTCNNGRVYKLSLPGLSLAGSIPPELSNCTNLQSLDLSSNALSGAIPTELSKLLNLAVLNLSANALSGAIPRELASCAYLNVIDLHGNQLSGPIPDELGLLVRLSTFDVSYNRLSGPIPVLLANRSIAGGGGAVASGTTARFNASSFAGNKDLYGYPLPPMRGHGLSVLAIVGIGLGSGLLSLVLSFSAVCIWLRSTDRTAATPGEEGKISHLMPAY

SEQ ID NO: 25732 - DNA, 1646 bp, Triticum aestivum
aagtttccaacacaggctgtgccggattgagctttggcagtttcggatctggtgcattttctgggctcctcccgccgccaaagagcactgaaaacaatgtggagttgcctattgtggaggaatctgaacctatagatcatactgatacgagggatcaagatttctatgaaattcctccgaattcgccaccaaatgagaaccttgaggaaattatgggagctaacactgagaatcttgatgtaccttctgttcaacagcctgatgtcctgagacaagaaatactggatgacccttcaggtgttcaatataatctgccatcagtctcgagccacgcgtatgcgaacccagcacagccaaatgcaatggatgccatgcaaggaagtaaccaagcgcacactctttcacacctgtcaagcttgctgcaatcaaatacgttacaacaacacaacctgttgggctcaaatatggcacctcttcgggacttggacttcggtttatcacctttgttggcagcacaagcacaatcaatgggtgcaagatataactcagctgcaccaactactactggcatgcaggagccaatgaagccaggagttttctcgaacactcaatccacacaaaatcttccgagtaccagcattcagatggccccctctcttcctcagcaattagtccatccttactcacagcccactttacctattgcacctttcgcaaatatgattggcgcaaatatgattggctataatccatacttggcacaaaactaccctgcttacctaccatcaacagccttccagcaagcgtactcgagtaatggacagttccatcagtctgccgctgctgtacctggagctggcatgaagtactcgatgccacaatacaagaacaacatgtcagccgcaaacttacaacaacaacaacaaccttcgtcggttatatctggttatgcaggctttggtagctcaagtaaccttccaggaaattttgccctcaaccagaatgctgcccctccgtcggctaatcttgggtttgatgaagcattgagcgctcagtacaaagaggccaatcaatacatggctctccagcagcagggcgacaactctgcgatgtggcttcatggggctggttcaagaaccgcgtcagcaattcctcctacccagttctatggctaccagggacagagccagcagcagggcgccttccggcaggcgcagcagccccagcagccttctcaatacgggggccatggatacccggcgttctaccattcccagggcggcggcatggcgcaggagcaccacccccagaacccggccgacggagccctgaatggctaccaggcggcgcagcagcagcagcagcagccatctcaccagagctggcagcagcacgccaactactgagcccccccgcactcttgttgtggtgctggctcactgtggcgggactcgctgcggagtaaagcagctcagagtagctgagcttgtggctcgctgaggagaggcagagcgttttaacgtgttgcgtgtgtcatgtcggtgttgtcggactgatgtttgtttttcggtcgagttatatgcgcggagcacaacagtcttgtaactctttggagacatagtttacctaacaggtgcctttttctg

SEQ ID NO: 25733 - protein, 467 aa, Triticum aestivum
VSNTGCAGLSFGSFGSGAFSGLLPPPKSTENNVELPIVEESEPIDHTDTRDQDFYEIPPNSPPNENLEEIMGANTENLDVPSVQQPDVLRQEILDDPSGVQYNLPSVSSHAYANPAQPNAMDAMQGSNQAHTLSHLSSLLQSNTLQQHNLLGSNMAPLRDLDFGLSPLLAAQAQSMGARYNSAAPTTTGMQEPMKPGVFSNTQSTQNLPSTSIQMAPSLPQQLVHPYSQPTLPIAPFANMIGANMIGYNPYLAQNYPAYLPSTAFQQAYSSNGQFHQSAAAVPGAGMKYSMPQYKNNMSAANLQQQQQPSSVISGYAGFGSSSNLPGNFALNQNAAPPSANLGFDEALSAQYKEANQYMALQQQGDNSAMWLHGAGSRTASAIPPTQFYGYQGQSQQQGAFRQAQQPQQPSQYGGHGYPAFYHSQGGGMAQEHHPQNPADGALNGYQAAQQQQQQPSHQSWQQHANY

SEQ ID NO: 25734 - protein, 397 aa, Triticum aestivum
MGANTENLDVPSVQQPDVLRQEILDDPSGVQYNLPSVSSHAYANPAQPNAMDAMQGSNQAHTLSHLSSLLQSNTLQQHNLLGSNMAPLRDLDFGLSPLLAAQAQSMGARYNSAAPTTTGMQEPMKPGVFSNTQSTQNLPSTSIQMAPSLPQQLVHPYSQPTLPIAPFANMIGANMIGYNPYLAQNYPAYLPSTAFQQAYSSNGQFHQSAAAVPGAGMKYSMPQYKNNMSAANLQQQQQPSSVISGYAGFGSSSNLPGNFALNQNAAPPSANLGFDEALSAQYKEANQYMALQQQGDNSAMWLHGAGSRTASAIPPTQFYGYQGQSQQQGAFRQAQQPQQPSQYGGHGYPAFYHSQGGGMAQEHHPQNPADGALNGYQAAQQQQQQPSHQSWQQHANY

SEQ ID NO: 25735 - protein, 347 aa, Triticum aestivum
MDAMQGSNQAHTLSHLSSLLQSNTLQQHNLLGSNMAPLRDLDFGLSPLLAAQAQSMGARYNSAAPTTTGMQEPMKPGVFSNTQSTQNLPSTSIQMAPSLPQQLVHPYSQPTLPIAPFANMIGANMIGYNPYLAQNYPAYLPSTAFQQAYSSNGQFHQSAAAVPGAGMKYSMPQYKNNMSAANLQQQQQPSSVISGYAGFGSSSNLPGNFALNQNAAPPSANLGFDEALSAQYKEANQYMALQQQGDNSAMWLHGAGSRTASAIPPTQFYGYQGQSQQQGAFRQAQQPQQPSQYGGHGYPAFYHSQGGGMAQEHHPQNPADGALNGYQAAQQQQQQPSHQSWQQHANY

SEQ ID NO: 25736 - DNA, 581 bp, Triticum aestivum
  misc_feature (535)..(535): n is a, c, g, or t
  misc_feature (568)..(568): n is a, c, g, or t
acccagtcagtcctcgcccacacccacgaccgcaggtccatggtcgtcggcatcctctgcgtcctcttcggcaccggcatgtacgccgcgccgctctccgtcatgaaaatggtgatccagaccaagagcgtggagtacatgcccctgttcttgtccgtggcctcgctcgtcaatggcatctgctggactgcctacgccctcatcaagttcgacctctacatcaccatccccaacgggctgggcgtgatgttctctgtggggcagatcatcctgtacggcatctactacaagtcgacgcagcagatcctggaggcccgtaagcgcaaggccgaccaggtgcccatgaccgaggtcgtcgtcgacggcaagagcggcagcgccaccaactcaggcgccgccaacggccactactagaagcaataccactactattaactcccgattgaagcgccttcataaatcaccttagctaattctcccatgaatcatgtacgtacgctgcgcgcccagggctcctgtgcactgtcgcgtcttnttgtgcgctctactacccttgaaagacctgttnttcatcttgtctc

SEQ ID NO: 25737 - protein, 137 aa, Triticum aestivum
TQSVLAHTHDRRSMVVGILCVLFGTGMYAAPLSVMKMVIQTKSVEYMPLFLSVASLVNGICWTAYALIKFDLYITIPNGLGVMFSVGQIILYGIYYKSTQQILEARKRKADQVPMTEVVVDGKSGSATNSGAANGHY

SEQ ID NO: 25738 - protein, 124 aa, Triticum aestivum
MVVGILCVLFGTGMYAAPLSVMKMVIQTKSVEYMPLFLSVASLVNGICWTAYALIKFDLYITIPNGLGVMFSVGQIILYGIYYKSTQQILEARKRKADQVPMTEVVVDGKSGSATNSGAANGHY

SEQ ID NO: 25739 - protein, 111 aa, Triticum aestivum
MYAAPLSVMKMVIQTKSVEYMPLFLSVASLVNGICWTAYALIKFDLYITIPNGLGVMFSVGQIILYGIYYKSTQQILEARKRKADQVPMTEVVVDGKSGSATNSGAANGHY

SEQ ID NO: 25740 - DNA, 585 bp, Triticum aestivum
agtaggtacactgaaaagtgtggaccctgaccagattattctcaaaaaaattgttttgactgggtatccccagagagtctcgaaactcaaagcaatggtgcggtacatgttccaccacccagaagacgtcagatggttcaagcctgtcgagctgtggacgaaacatggcaaacgcggccggatcaaggagactgtcggcactcacggttccatgaagtgcatattcaacagcagcgtccagcagcatgataccgtgtgcatgagcttgttcaaacgagctttccccaaatggccagaacagttctatcatcagatataagaatactcgtatactttgcataccggctataaaggttgcgaacgagcttctggctctcggtggattgtatcccgtagcccatggaagtggagtggtggcgcgtgcttgtttgatgcagctcatataggtcttgtaccaagatggagggagatgcagctttgctgtgtgttgtattgccttgactgttttgtctgtttatgttaccaacatggctggattttgggcatactgataatacctctcaatttagtgtgttgttttcttgc

SEQ ID NO: 25741 - protein, 105 aa, Triticum aestivum
VGTLKSVDPDQIILKKIVLTGYPQRVSKLKAMVRYMFHHPEDVRWFKPVELWTKHGKRGRIKETVGTHGSMKCIFNSSVQQHDTVCMSLFKRAFPKWPEQFYHQI

SEQ ID NO: 25742 - protein, 74 aa, Triticum aestivum
MVRYMFHHPEDVRWFKPVELWTKHGKRGRIKETVGTHGSMKCIFNSSVQQHDTVCMSLFKRAFPKWPEQFYHQI

SEQ ID NO: 25743 - protein, 70 aa, Triticum aestivum
MFHHPEDVRWFKPVELWTKHGKRGRIKETVGTHGSMKCIFNSSVQQHDTVCMSLFKRAFPKWPEQFYHQI

SEQ ID NO: 25744 - DNA, 1211 bp, Triticum aestivum
  misc_feature (202)..(202): n is a, c, g, or t
aaatctgcaaacagtaaggataaaagttccaataagaaacttaaggaaattgatgggtctgcagtatctaccggcagtggtaacagtaaaaaaacatcatccagtggggattatagtggagaaggctccagtgatgttaatgatctgaaggtgagcgggactcctaggaaacggagcttggatggtggatttgacgcagaancaaccgcggcagcaaggaataaagatgttgtagcttctagtcctataattcgaaatggcgcaattttgtcaaatcagtgctttccagctccagtcattaaacccagtgttacgaatgttgctaattcaagggcaataggcacaccagtgtctccattgccaggtgttatgggtccaattcataccggaatatcaactgaattatcatctaaggatgagagggaagtaaagcgtgaaaagagaaagcaatcaaatagggaatctgctagacggtcgaggctgagaaagcaggctgagacagaggaattggccacacaagtagaatcgcttacagctgagaacacgtctctaaaatctgaaatcggcaagctaacgaaaagctccgagaagctcagaatagagaattctgctctagtgatgaaacttaagggcaccgcagcaccgaccagcgcagaaatgcctctggacaaatcagcagttgctgcaccctcctcctctcctcgtgtcgtggagaatttcttgtcgatgatcgacgacacaagcaagtcaggtgtaaaaaaccacatggagcacagcgagcccaagctccgccagctcctcggctccagcgcgacaacggatgtcgtggctgcaaactgattgatcagcctctctctgacgcagactaataccttgcatgtggcctggggtttcagcaagctcatgctgctcacataacatatcggcgtgacagtgtaggtatttttatttggtgagtatattcaggaactccggcggtcatatgtactccgtgttccggttcctgacggctactgtactttaggcactgatgctgaagtctcattgtgtccatgttttcactgtaattttattgagcagtgttgtaatataggggcgttgcgcttcatgccaacctttctaaaaaccttttgagacctctgaacgtgtggtgccatataaactaaaactgtgaagacagtatatgcaagaggttgtgtgaacatataccg

SEQ ID NO: 25745 - protein, 279 aa, Triticum aestivum
  misc_feature (68)..(68): Xaa can be any naturally occurring amino acid
KSANSKDKSSNKKLKEIDGSAVSTGSGNSKKTSSSGDYSGEGSSDVNDLKVSGTPRKRSLDGGFDAEXTAAARNKDVVASSPIIRNGAILSNQCFPAPVIKPSVTNVANSRAIGTPVSPLPGVMGPIHTGISTELSSKDEREVKREKRKQSNRESARRSRLRKQAETEELATQVESLTAENTSLKSEIGKLTKSSEKLRIENSALVMKLKGTAAPTSAEMPLDKSAVAAPSSSPRVVENFLSMIDDTSKSGVKNHMEHSEPKLRQLLGSSATTDVVAAN

SEQ ID NO: 25746 - protein, 156 aa, Triticum aestivum
MGPIHTGISTELSSKDEREVKREKRKQSNRESARRSRLRKQAETEELATQVESLTAENTSLKSEIGKLTKSSEKLRIENSALVMKLKGTAAPTSAEMPLDKSAVAAPSSSPRVVENFLSMIDDTSKSGVKNHMEHSEPKLRQLLGSSATTDVVAAN

SEQ ID NO: 25747 - DNA, 505 bp, Triticum aestivum
accgaaagagagagagaagagaagaggagccctccaccccgccgtcgcagcgccaaccaaaccctcgtcgtcgtcccggatcccgccgtagccgccgccgccgcagccatgccgttcaccccgggaccctactccggcaagagcaccctcgccctcgtggccagggtctccgcggtcggcgtcggcgtcgtctacggctccatcaagctcggcatcctcaagatgaccaagcccaaggaggaggcagcagctcatcactgaggacaagtagctccagcgggttgacgccgtagattcacaatgtaccttccatatgtgcattcggttctgtgatttgtgtcttgaaacccaaaaaaccccagacccgtgtgggagctgaaccttagttttttgcttgtggaaaataatatcctcggctgaatcgacttgaaatcaggaaagagtgaaacttaaaatcctttggtgtggttctttcgattcagatccagtttttgttatgccatct

SEQ ID NO: 25748 - protein, 96 aa, Triticum aestivum
RKRERREEEPSTPPSQRQPNPRRRPGSRRSRRRRSHAVHPGTLLRQEHPRPRGQGLRGRRRRRLRLHQARHPQDDQAQGGGSSSSLRTSSSSGLTP

SEQ ID NO: 25749 - protein, 86 aa, Triticum aestivum
TEREREEKRSPPPRRRSANQTLVVVPDPAVAAAAAAMPFTPGPYSGKSTLALVARVSAVGVGVVYGSIKLGILKMTKPKEEAAAHH

SEQ ID NO: 25750 - protein, 50 aa, Triticum aestivum
MPFTPGPYSGKSTLALVARVSAVGVGVVYGSIKLGILKMTKPKEEAAAHH

SEQ ID NO: 25751 - DNA, 538 bp, Triticum aestivum
tgacaggcaccaaagatggtaaccttgttaacatattccttaggttgtttgggaagtgctcagagaagtccctttgcataaggcttcttatatttcaggctgtgtcatgcctattctgcttttggctgagatacatgcttactggatggtacaaatgaatgatcacctgaaacagaacatcgcgtcggtttccatgatacagtcgaaatctgttcatctgacggctgctgctctctcagatatccgtatactagcagcaaccctgaaaaaaggggtataataccaacacgagtaactgatccaagatactattcagaatgttacatgcgttgctgctcccccattcatctagtttatctgtagcctttgatttttttggtccaccttttctcgtgtgctaacaacagaagatttggttacgaggttttgcctttttcgtaccagagttctagagatttgtgatcatagaaaagcgatatactgtatttgtaaccatgtacaacgacttgtatggaagttcgcttgcattagttgtgtg

SEQ ID NO: 25752 - protein, 57 aa, Triticum aestivum
MPILLLAEIHAYWMVQMNDHLKQNIASVSMIQSKSVHLTAAALSDIRILAATLKKGV

SEQ ID NO: 25753 - protein, 51 aa, Triticum aestivum
TGTKDGNLVNIFLRLFGKCSEKSLCIRLLIFQAVSCLFCFWLRYMLTGWYK

SEQ ID NO: 25754 - protein, 44 aa, Triticum aestivum
MVQMNDHLKQNIASVSMIQSKSVHLTAAALSDIRILAATLKKGV

SEQ ID NO: 25755 - DNA, 1077 bp, Triticum aestivum
  misc_feature (579)..(579): n is a, c, g, or t
  misc_feature (591)..(591): n is a, c, g, or t
aaaaaaaccgctcactcactctctcgccaacgctgccaccgccacctcgtaccgcacgctcgcaacctaccgaccggccgaccaacgccgcgacagctctccgttcaccgccgatgtccggcggcgtgggcccgacggcggggggcggcatcatgctgccgtcgatggggcagccgccgccgccgctgcacccggagcccacctcgccgacggcgcgcccgcaccaccactactacctcttctccatcaagcagctcaacacgctgggcgccgccgccgtgctggccttctccaccaccgtgccgctctcggagatcgccttcgccgtgctgctcctcccctacctcctcctcctcgcgtcgctcgccttcccgcagcgccccgggaagcccaacccgtccacgcccgtcttcctcggccccgcgcgcctcctcctcgccgcgcacaccgtgggcggcttcctcgtcggcgccgcgctcccggcgctctacatcctcgacggcctccgctccggggacaccacggggatcgccgccgcggccccgcacgcgttcttgctctccgcgcaggtcttcaccnaggggctcaccnccgccttcccgtggcggttctcgctccccgtccgggccgccgtcccggtcatgtacagcgtccgcaggatgttcgcggccggggagtggctccggcaggagatggaggagaagcgcggcggccccggcgtggcgcaacggcgcgtggtggccgggagggtgctcgcgctggccaacatggccttctggggcgccaacctgttcgccttcctcctgcccttctacctgcccagggcgctccagaggtactactgcgacgacggcgtcgaccgcacggcgcgcaccaacggcgatggccacgccgacgaagataagaaggattcctagatgatacgccgtcgcagtgttcctgtgatggctgcgtacgccgcgttgcatgttttattactccagtagtttgttgcttttctcccttccctaatattttggccatgtaaaatttctcagtagtagtgatgtcagcgaatgcaactggtaccatgtatgc

SEQ ID NO: 25756 - protein, 306 aa, Triticum aestivum
  misc_feature (193)..(193): Xaa can be any naturally occurring amino acid
  misc_feature (197)..(197): Xaa can be any naturally occurring amino acid
KKTAHSLSRQRCHRHLVPHARNLPTGRPTPRQLSVHRRCPAAWARRRGAASCCRRWGSRRRRCTRSPPRRRRARTTTTTSSPSSSSTRWAPPPCWPSPPPCRSRRSPSPCCSSPTSSSSRRSPSRSAPGSPTRPRPSSSAPRASSSPRTPWAASSSAPRSRRSTSSTASAPGTPRGSPPRPRTRSCSPRRSSXRGSXPPSRGGSRSPSGPPSRSCTASAGCSRPGSGSGRRWRRSAAAPAWRNGAWWPGGCSRWPTWPSGAPTCSPSSCPSTCPGRSRGTTATTASTARRAPTAMATPTKIRRIPR

SEQ ID NO: 25757 - protein, 304 aa, Triticum aestivum
  misc_feature (193)..(193): Xaa can be any naturally occurring amino acid
  misc_feature (197)..(197): Xaa can be any naturally occurring amino acid
KNRSLTLSPTLPPPPRTARSQPTDRPTNAATALRSPPMSGGVGPTAGGGIMLPSMGQPPPPLHPEPTSPTARPHHHYYLFSIKQLNTLGAAAVLAFSTTVPLSEIAFAVLLLPYLLLLASLAFPQRPGKPNPSTPVFLGPARLLLAAHTVGGFLVGAALPALYILDGLRSGDTTGIAAAAPHAFLLSAQVFTXGLTXAFPWRFSLPVRAAVPVMYSVRRMFAAGEWLRQEMEEKRGGPGVAQRRVVAGRVLALANMAFWGANLFAFLLPFYLPRALQRYYCDDGVDRTARTNGDGHADEDKKDS

SEQ ID NO: 25758 - protein, 300 aa, Triticum aestivum
  misc_feature (193)..(193): Xaa can be any naturally occurring amino acid
  misc_feature (197)..(197): Xaa can be any naturally occurring amino acid
KKPLTHSLANAATATSYRTLATYRPADQRRDSSPFTADVRRRGPDGGGRHHAAVDGAAAAAAAPGAHLADGAPAPPLLPLLHQAAQHAGRRRRAGLLHHRAALGDRLRRAAPPLPPPPRVARLPAAPREAQPVHARLPRPRAPPPRRAHRGRLPRRRRAPGALHPRRPPLRGHHGDRRRGPARVLALRAGLHXGAHXRLPVAVLAPRPGRRPGHVQRPQDVRGRGVAPAGDGGEARRPRRGATARGGREGARAGQHGLLGRQPVRLPPALLPAQGAPEVLLRRRRRPHGAHQRRWPRRRR

SEQ ID NO: 25759 - protein, 267 aa, Triticum aestivum
  misc_feature (156)..(156): Xaa can be any naturally occurring amino acid
  misc_feature (160)..(160): Xaa can be any naturally occurring amino acid
MSGGVGPTAGGGIMLPSMGQPPPPLHPEPTSPTARPHHHYYLFSIKQLNTLGAAAVLAFSTTVPLSEIAFAVLLLPYLLLLASLAFPQRPGKPNPSTPVFLGPARLLLAAHTVGGFLVGAALPALYILDGLRSGDTTGIAAAAPHAFLLSAQVFTXGLTXAFPWRFSLPVRAAVPVMYSVRRMFAAGEWLRQEMEEKRGGPGVAQRRVVAGRVLALANMAFWGANLFAFLLPFYLPRALQRYYCDDGVDRTARTNGDGHADEDKKDS

SEQ ID NO: 25760 - DNA, 2175 bp, Triticum aestivum
  misc_feature (2120)..(2120): n is a, c, g, or t
  misc_feature (2141)..(2141): n is a, c, g, or t
  misc_feature (2155)..(2155): n is a, c, g, or t
  misc_feature (2160)..(2160): n is a, c, g, or t
  misc_feature (2172)..(2172): n is a, c, g, or t
gcgcagtttatacacggaaaagcaatggaagtgcaaataagtactacggtttttttttctagacaagttgtgtggctggagtgaatacctcgcccagccggcctgtcgcaaaaactgcaccagcagtgacattctgatgattacgtagacataattgatgaagagctcgaggccgggcatgtttatttatatagagagagatgcatgagtaggaacccaacccattggagccattgcaggcctcgctagcttcctggtcagttgtggacgccatagatggctcttgaagcagcccagcactacctgcagctcgccgtcggccatggcatgtcctcgccggcggcactgctccttgtcgttgttcccttactgctgttactgctagcatcagtaagaacctcagcgtccacaagaaagctgcggctcccgccttcgcctccgggcagccttcccatcatcggtcacctccaccacatcggcgtccagacccacatctccctccagcacctggtcgacaagtacggccacaacggcctcctcttcctccgcgccggcgccgtgcccaccgtcatcgtctcctcgcccagcgccgccgaggctgtcatgcgcacgcacgaccacatcctcgcgtcccgcccgtggtccatggcctcgcacatcctgcgctacaacaccaccgacgtcgctttctcacccttgggcgagtattggcagcacaccaggaagctcgtcaacacccatctcctcagcgccaagaaggtgcactccttccgccatggccgtcaagaagaggtgtgcctcgtcgtcaacaagattcacgaggcggccaccaacgctccatccacggcggtggacatgagcgagttcctggccgcctacaccaacgatgtcgtaagccgctcggtgctgggagcaacccaccggaagaaaggccgcaacacgctcttcagagagatgaccgagaccaacgttgaccttctcgtgggattcaaccttgagaacttcatccctaggtggccattgacggaggtgctcttcaggctggtctgctggaaggttcagcgacacctcaacaagtgggacgccttgctggaagaggtcatcaaggaacacataaacttgaagcaagataattctgccgacttcatccatgttttcctctctctacagcaagagtacggtctcaccgacgataacgtcaagtccctcttgatgaacatatttgaggcagccatagaaacatcgtatttggtgctggaatacgccatggctgagcttatcaacaacagacatgttatgaagaaacttcaaaccgaggtaaggacgtttgcatcatccaagggcaaaaggttggacatgattacggaggaggacctcagcagcctgccctacctaaaggcaaccatgaaagaggccctgcgcttgcacccaccagggcctttactcctcccacactactccaccgctgactgcaacatcgacggatacgacatacccgccaaaacacgtatccttgtgaacggttgggccatcgggagagacccaaaagcttgggagagaccagaggatttcatgccggagaggttcctacaagatggtcaggagaaatctagcaacctgggtcaagattttaagtatctgccatttggatccggacgcaggatttgccccggggcaaatttcgcacttgcaacaatggagatcatgctagtaaatctcatgtaccattttgattgggaggttcccaatgagagagagggtactggtggaaaggttagtatggccgagacgttcgggctgatgcttcgccgaaatgagaaactctaccttgttccaaagattgtctaataactagtagtgcccctgattccaagtgtaagcctatttagatttgcgcgcaataattaaggtggggcctaaaataagcatgttgtccatgtattgttgttgtcgatcgagaaggtggacgagaagttcaatgcactggttatagtgcagttatgttgtagtagtcatggaaaataatccatttgagttgtgatggacttatattatgtgcttttgaggtaaggccatatggacttgtctttttgtagtcaaaattttccgtttcatataantgaaagcattgttgttgtganatttgttgtaaaancaaanccgtgttggatnttc

SEQ ID NO: 25761 - protein, 523 aa, Triticum aestivum
MALEAAQHYLQLAVGHGMSSPAALLLVVVPLLLLLLASVRTSASTRKLRLPPSPPGSLPIIGHLHHIGVQTHISLQHLVDKYGHNGLLFLRAGAVPTVIVSSPSAAEAVMRTHDHILASRPWSMASHILRYNTTDVAFSPLGEYWQHTRKLVNTHLLSAKKVHSFRHGRQEEVCLVVNKIHEAATNAPSTAVDMSEFLAAYTNDVVSRSVLGATHRKKGRNTLFREMTETNVDLLVGFNLENFIPRWPLTEVLFRLVCWKVQRHLNKWDALLEEVIKEHINLKQDNSADFIHVFLSLQQEYGLTDDNVKSLLMNIFEAAIETSYLVLEYAMAELINNRHVMKKLQTEVRTFASSKGKRLDMITEEDLSSLPYLKATMKEALRLHPPGPLLLPHYSTADCNIDGYDIPAKTRILVNGWAIGRDPKAWERPEDFMPERFLQDGQEKSSNLGQDFKYLPFGSGRRICPGANFALATMEIMLVNLMYHFDWEVPNEREGTGGKVSMAETFGLMLRRNEKLYLVPKIV

SEQ ID NO: 25762 - protein, 506 aa, Triticum aestivum
MSSPAALLLVVVPLLLLLLASVRTSASTRKLRLPPSPPGSLPIIGHLHHIGVQTHISLQHLVDKYGHNGLLFLRAGAVPTVIVSSPSAAEAVMRTHDHILASRPWSMASHILRYNTTDVAFSPLGEYWQHTRKLVNTHLLSAKKVHSFRHGRQEEVCLVVNKIHEAATNAPSTAVDMSEFLAAYTNDVVSRSVLGATHRKKGRNTLFREMTETNVDLLVGFNLENFIPRWPLTEVLFRLVCWKVQRHLNKWDALLEEVIKEHINLKQDNSADFIHVFLSLQQEYGLTDDNVKSLLMNIFEAAIETSYLVLEYAMAELINNRHVMKKLQTEVRTFASSKGKRLDMITEEDLSSLPYLKATMKEALRLHPPGPLLLPHYSTADCNIDGYDIPAKTRILVNGWAIGRDPKAWERPEDFMPERFLQDGQEKSSNLGQDFKYLPFGSGRRICPGANFALATMEIMLVNLMYHFDWEVPNEREGTGGKVSMAETFGLMLRRNEKLYLVPKIV

SEQ ID NO: 25763 - protein, 414 aa, Triticum aestivum
MRTHDHILASRPWSMASHILRYNTTDVAFSPLGEYWQHTRKLVNTHLLSAKKVHSFRHGRQEEVCLVVNKIHEAATNAPSTAVDMSEFLAAYTNDVVSRSVLGATHRKKGRNTLFREMTETNVDLLVGFNLENFIPRWPLTEVLFRLVCWKVQRHLNKWDALLEEVIKEHINLKQDNSADFIHVFLSLQQEYGLTDDNVKSLLMNIFEAAIETSYLVLEYAMAELINNRHVMKKLQTEVRTFASSKGKRLDMITEEDLSSLPYLKATMKEALRLHPPGPLLLPHYSTADCNIDGYDIPAKTRILVNGWAIGRDPKAWERPEDFMPERFLQDGQEKSSNLGQDFKYLPFGSGRRICPGANFALATMEIMLVNLMYHFDWEVPNEREGTGGKVSMAETFGLMLRRNEKLYLVPKIV

SEQ ID NO: 25764 - DNA, 518 bp, Triticum aestivum
aaggaccacaacagttctccgccgcgacgactagccggcaggcgacgacgacgacgagcagcgtcagccagatccgacgagatggcggccaaggcgatctccagccccgtgccggtggaatggtacccgacgctggccgtcgtcatggtctccgtcggcctcatgctcaccgcatccttcttcatttatgaagccacgacttcaaggcggaaccgtagtttaaccaaggagattgtcacagcgtccattgcttctgtcttcctgggctttggttctctgttcgtgctccttgcaagcggtgtttatgtctgatgatcggctgtgcaagctttttgtttgtgtagctaggatatgccaagttctaaaagcattaatattgtgctgttcctggagaatatgcagtagtactatggagatgttttagttaaaagggcgagtgtggtgaaaactctctgattattaccatgccatcagatcacaatgtcacttgctgcttcttctacataacatttttcccc

SEQ ID NO: 25765 - protein, 103 aa, Triticum aestivum
KDHNSSPPRRLAGRRRRRRAASARSDEMAAKAISSPVPVEWYPTLAVVMVSVGLMLTASFFIYEATTSRRNRSLTKEIVTASIASVFLGFGSLFVLLASGVYV

SEQ ID NO: 25766 - protein, 76 aa, Triticum aestivum
MAAKAISSPVPVEWYPTLAVVMVSVGLMLTASFFIYEATTSRRNRSLTKEIVTASIASVFLGFGSLFVLLASGVYV

SEQ ID NO: 25767 - protein, 62 aa, Triticum aestivum
GPQQFSAATTSRQATTTTSSVSQIRRDGGQGDLQPRAGGMVPDAGRRHGLRRPHAHRILLHL

SEQ ID NO: 25768 - DNA, 455 bp, Triticum aestivum
  misc_feature (432)..(432): n is a, c, g, or t
gctaacagagtaaagtcacaatctgaattttcagaagacgaactcctatctgtggtggtaatgaagaatggccaaaaagttgtttgcggaactccaagtggagctctattgttgtattcgtggggacattttaaggactgcagtgaccgttttctggggcacgcacagtctgttgataacttgctgaagctggatgaagaaactctgatatctgctgcagcagacggtgtgatcaggttagtgggtatcttaccgaatcagataatacagccgctagctgagcattcagaatttccaatcgaggcgcttggtttctcgcacgataggaagtacctaggcagcatttcacatgacaaaatgataaagctctgggacatggaggaactcctgggcggtccacagttaaatcaccagaacgacatgcccgaagcnaacgcagccgtccatgacgacga

SEQ ID NO: 25769 - protein, 151 aa, Triticum aestivum
  misc_feature (144)..(144): Xaa can be any naturally occurring amino acid
ANRVKSQSEFSEDELLSVVVMKNGQKVVCGTPSGALLLYSWGHFKDCSDRFLGHAQSVDNLLKLDEETLISAAADGVIRLVGILPNQIIQPLAEHSEFPIEALGFSHDRKYLGSISHDKMIKLWDMEELLGGPQLNHQNDMPEXNAAVHDD

SEQ ID NO: 25770 - protein, 131 aa, Triticum aestivum
  misc_feature (124)..(124): Xaa can be any naturally occurring amino acid
MKNGQKVVCGTPSGALLLYSWGHFKDCSDRFLGHAQSVDNLLKLDEETLISAAADGVIRLVGILPNQIIQPLAEHSEFPIEALGFSHDRKYLGSISHDKMIKLWDMEELLGGPQLNHQNDMPEXNAAVHDD

SEQ ID NO: 25771 - DNA, 541 bp, Triticum aestivum
aaaaaggccctcgtcccccgaagccagatttcttctccagccttcatcgcacgagaggcggcatccatggcggcggcgggcccagccaagacggaggtgctgtccctcttccgcgccttcctccgcacggcgaggcagttctccgactacaacatccgcgagtacacgcggcgccgcgcggcggacgccttccgcgagaaccgcgccctcgccgacgcgccggccgcggcggcggccttcgcggacgggaagcagcagctggaggtggccaagaggcaggtgctggtctactctctgtacgcgcccaaggccaagagcgttgtggagatgaagattcagtgagcgacaccagagagaggtttcacgcactcctttttcccctttagggtctgtgctcttttatgtactgttagtagggttatggcgatctgacgctgatagaaattctgccgttactatgtttgctggataattgccatgatacggtggttgctattgttcaataagttcgcaaattaatgatcatgatactttgtgtttc

SEQ ID NO: 25772 - protein, 127 aa, Triticum aestivum
KGPRPPKPDFFSSLHRTRGGIHGGGGPSQDGGAVPLPRLPPHGEAVLRLQHPRVHAAPRGGRLPREPRPRRRAGRGGGLRGREAAAGGGQEAGAGLLSVRAQGQERCGDEDSVSDTRERFHALLFPL

SEQ ID NO: 25773 - protein, 113 aa, Triticum aestivum
KKALVPRSQISSPAFIAREAASMAAAGPAKTEVLSLFRAFLRTARQFSDYNIREYTRRRAADAFRENRALADAPAAAAAFADGKQQLEVAKRQVLVYSLYAPKAKSVVEMKIQ

SEQ ID NO: 25774 - protein, 109 aa, Triticum aestivum
KRPSSPEARFLLQPSSHERRHPWRRRAQPRRRCCPSSAPSSARRGSSPTTTSASTRGAARRTPSARTAPSPTRRPRRRPSRTGSSSWRWPRGRCWSTLCTRPRPRALWR

SEQ ID NO: 25775 - protein, 91 aa, Triticum aestivum
MAAAGPAKTEVLSLFRAFLRTARQFSDYNIREYTRRRAADAFRENRALADAPAAAAAFADGKQQLEVAKRQVLVYSLYAPKAKSVVEMKIQ

SEQ ID NO: 25776 - DNA, 680 bp, Triticum aestivum
acacgagtcggccgccgcaggtagcccacgggaaacgcgagagcggtccggccccggcgcgcataataaaaggccgaccggccggtctcggacgcccctcgctttcagacccagccgtcgccgtctcccaattcctccgcagggcccccctccactcctctgaccctctccccgtcttcagccgcgtcccggctgtcggcgacccgccgacgttcccgtcgtcgccgtcgccatgactacctcaagacgtgttgctgataggaaaattgcagtatttgagaagaatatcacgaagaggggttctgttcccgagacagtcaagaaagcaaatgattatcctgttggacctatcgtgcttggattttttgtctttgttgttgttgggtcatctctgttccagatcatcaggacagcctcaaacgccggtctcttctgagtagattggtgctatgcttatagtgaccatgaacagggctgtcatatgcagttggttgtcggtttaaaattagaactgaatgagatagctggtactcttgtgatgcttgttatacctcttaccattgtacttggtggagtttaagttatatggaggtcatgccattggactgctaatctgtgtttctcagggcctcaggccattggaattattccattttatatccggttataatttgctttcc

SEQ ID NO: 25777 - protein, 77 aa, Triticum aestivum
TSRPPQVAHGKRESGPAPARIIKGRPAGLGRPSLSDPAVAVSQFLRRAPLHSSDPLPVFSRVPAVGDPPTFPSSPSP

SEQ ID NO: 25778 - protein, 67 aa, Triticum aestivum
MTTSRRVADRKIAVFEKNITKRGSVPETVKKANDYPVGPIVLGFFVFVVVGSSLFQIIRTASNAGLF

SEQ ID NO: 25779 - protein, 53 aa, Triticum aestivum
HESAAAGSPRETRERSGPGAHNKRPTGRSRTPLAFRPSRRRLPIPPQGPPPLL

SEQ ID NO: 25780 - DNA, 928 bp, Triticum aestivum
gacggcatccatcccggaacggaaaacaccaacctgctttccacctataaaatccgcccttccccaccccaaatcccacaacagcaaaccaaatccccaagaccaaaaaaggccccagcaacccgagcgcgtcgaccccatccacaacagttgaatctgagtttacttccaggaaagatttgagtcgagatggcgcaggcgatcgaggctcagagggagggcgcggaggtgtaccacggcgcggcgctgtgcgcggagaaggcggtggagctgctggcggagaccaacatgccgctgggcctgctgccgctggcggatatcgaggaggtgggctacaaccgcgccaccggcttcgtctggctgcgccagaagaaggcgctcacgcacaccttcaagcagatcgggcggcaggtctcgtacggcaccgaggtgacggccttcgtcgaggaccgcaagatgaagcgcatgaccggggtcaagagcaaggagctcctcatctggatcaccctctgcgacatgtacatcgacaaggacgacccctccaagatcaccttcaagacgcccaccgggctcgggaggaccttccccgtctccgccttcgagaaggaggactgcggcaaggccaaggccgcagccggcggcggcaaggaggccctcgtggccaagtaagtgacgacggccggcatactacagagcttggatgaaaagtactcaaaagtccaacgttaactacgactactatttgctttcacctgttttaataaactacagtgctatatatactctgctccggtgttctgccgagggttgtatcgttcatatgatcgtgcgatgatatgatcttatagtactatactgtgtgctgttcgctgcataatggtgtgaacctttttgtggcagtgtcacgaggtgtacgtgactacgtagt

SEQ ID NO: 25781 - protein, 159 aa, Triticum aestivum
MAQAIEAQREGAEVYHGAALCAEKAVELLAETNMPLGLLPLADIEEVGYNRATGFVWLRQKKALTHTFKQIGRQVSYGTEVTAFVEDRKMKRMTGVKSKELLIWITLCDMYIDKDDPSKITFKTPTGLGRTFPVSAFEKEDCGKAKAAAGGGKEALVAK

SEQ ID NO: 25782 - protein, 126 aa, Triticum aestivum
MPLGLLPLADIEEVGYNRATGFVWLRQKKALTHTFKQIGRQVSYGTEVTAFVEDRKMKRMTGVKSKELLIWITLCDMYIDKDDPSKITFKTPTGLGRTFPVSAFEKEDCGKAKAAAGGGKEALVAK

SEQ ID NO: 25783 - DNA, 1283 bp, Triticum aestivum
tatctccctgcagtagacatcgcattcaggcacacataatcagcaattcagcagagtcgccaccatgggcgccaccaatcataccttgcaagcgctgctcccatggctcctcctgttcgtgcagcaggccgccgcggccagcggcgggtgcgagtgcacgaccgccacggacggggcggacaagcagggcgcgatgaagctgaagctggtcgccatcgcgtccatcctcaccgccggggcggctggcgtgctggtgccggtgctcggccgctccatggccgcgctgcgccccgacggcgacatcttcttcgcggtcaaggcgtttgccgctggcgtcatacttgccaccggcatggtgcacatcctgccggcggcgttcgacgggctcacctccccgtgcatccacaaaggcggcggggacaggaacggcttcccttttgccggccttgtggccatgtctgcagccatggccacaatggtgatagactcgctggctgctgggtactaccgccggtctcacttcagcaaggcgcgcccacttgacaacattgacatgcccggagatgaggaagggagggccgatcatccacatatgcacgcgcatggccattcacatggtgaggcaattgttgtcagctcaccggaggaggcggcgatagctgacacaatccggcacagggtggtatctcaggttctagagctgggaatcttggtgcattcagtgataattggtgtgtcattaggagcatctgtgaggccatccaccatcaagcctctggtcggtgccctcagcttccatcaattctttgaaggcataggcttgggtggttgcattgtacaggctaatttcaaggtaagggcaaccatcatcatggcaacgtttttctccctgaccgcacccgtgggcatcgtgctagggattgcgatttcatctagctataatgtgcatagctctactgccttcattattgagggagtcttcaactcagcctcggcagggattttgatctacatgtccctggtggaccttctagcaacagatttcaataacccaaagctacagacaaatacaaagcttcagctgatgacatatcttgcacttttcctaggtgcagggatgatgtccatgcttgccatatgggcatagagatcttcaaagcaattgctaaatttgcacttgtatttcctgctaaagttgaagtatgcattgtattcatccaggggttgtccatttccccaaaataatacacccttggtgaaaaattaaccatattcatccattg

SEQ ID NO: 25784 - protein, 360 aa, Triticum aestivum
MGATNHTLQALLPWLLLFVQQAAAASGGCECTTATDGADKQGAMKLKLVAIASILTAGAAGVLVPVLGRSMAALRPDGDIFFAVKAFAAGVILATGMVHILPAAFDGLTSPCIHKGGGDRNGFPFAGLVAMSAAMATMVIDSLAAGYYRRSHFSKARPLDNIDMPGDEEGRADHPHMHAHGHSHGEAIVVSSPEEAAIADTIRHRVVSQVLELGILVHSVIIGVSLGASVRPSTIKPLVGALSFHQFFEGIGLGGCIVQANFKVRATIIMATFFSLTAPVGIVLGIAISSSYNVHSSTAFIIEGVFNSASAGILIYMSLVDLLATDFNNPKLQTNTKLQLMTYLALFLGAGMMSMLAIWA

SEQ ID NO: 25785 - protein, 317 aa, Triticum aestivum
MKLKLVAIASILTAGAAGVLVPVLGRSMAALRPDGDIFFAVKAFAAGVILATGMVHILPAAFDGLTSPCIHKGGGDRNGFPFAGLVAMSAAMATMVIDSLAAGYYRRSHFSKARPLDNIDMPGDEEGRADHPHMHAHGHSHGEAIVVSSPEEAAIADTIRHRVVSQVLELGILVHSVIIGVSLGASVRPSTIKPLVGALSFHQFFEGIGLGGCIVQANFKVRATIIMATFFSLTAPVGIVLGIAISSSYNVHSSTAFIIEGVFNSASAGILIYMSLVDLLATDFNNPKLQTNTKLQLMTYLALFLGAGMMSMLAIWA

SEQ ID NO: 25786 - protein, 290 aa, Triticum aestivum
MAALRPDGDIFFAVKAFAAGVILATGMVHILPAAFDGLTSPCIHKGGGDRNGFPFAGLVAMSAAMATMVIDSLAAGYYRRSHFSKARPLDNIDMPGDEEGRADHPHMHAHGHSHGEAIVVSSPEEAAIADTIRHRVVSQVLELGILVHSVIIGVSLGASVRPSTIKPLVGALSFHQFFEGIGLGGCIVQANFKVRATIIMATFFSLTAPVGIVLGIAISSSYNVHSSTAFIIEGVFNSASAGILIYMSLVDLLATDFNNPKLQTNTKLQLMTYLALFLGAGMMSMLAIWA

SEQ ID NO: 25787 - DNA, 1729 bp, Triticum aestivum
gtccatcacccatcagttcctcccccctttgtctcatcccagttcctccccccaccaagaacctagggttagggttagggaggcggcggctgctttattcccgatcccgcccgatcgccatggtcatcgcaggcgagccagagccggaggaggtggccgtcatgttctccgataggttgagggcggaggaggagaccgtcgtcttccccggctgggtgatgctggatcgcatcggccgcacccactgcgacggcgacctaggagctgctcgtgaggctgtcaacgggaacaagaccgccgttcaagtcgagatggacagcggccactccttctacgtgtccttcaccctcgcgcctcctccacaaggggcctcttaccttgatctccactggccgctggaaggctcagccaaatccgtgcccccctacaagcagcctgcctatcccttcgtccgggcaatcgacaaggacctcgtcctcttccacatctccatcccgagcctgcctcaccgcaacttcgtcccgccagatctgttcgtctacaatgccgctggtcaccccccctcggtgcagcagctccctctgtacaggagaaggtcattcctcagggttaacttcaccacaggcatcctgcggcgccaaaacggcagctacatcgtttccgacctcaatgtctacccaaaaaaggagggcactggtaataattccatgtgcgccgaactctgcgtcttcaactccaatacacgggcgtggagcttcttcagcaaggatgctccgcagccccaggaccagagcaatggccagttccccaccctctggtcaaccgaccatgtgcttgcttttgacggccgtttcctgtgctgggttgactacttcagcggtgtcctgctatccgacttctccaatctgcgctcccgggtgctccacttcgtccctttccctggagaaggagagtaccctgctaaggtacgggttcaaaggtgcttcccagacagattccgaagcgtgtccatcagcaacggcaagatgtgcttcgtccacattgacaatgacttccatgagagaatccacactggctcgcaagggcagcagcctcgcaaaaaaatcaccatttggactttgaacatgatggatggtaactccaggttcaagtgggagccacatcatgtgatcgacctggatcgtctttggctgacacctagtgtacctcggcgtcttcctgagtatccaatcatcgcccccaataacccggatgttctgtactgcctgttaaggaagcaggaatttcatggtgaggcctccatgatcatggttgacatgaaccctgcatctccgtggttgtgtactccatatatcaatcggcggtctgtgcatgtgaaagatcacaaaagcgagtttcctaatatgcccctccttccaactgtcttcttcaaataccttgaaagttcaacagggatgccatgggacaatgacaagtttgcaactcgtccttcaaagaaattaaggtctgcaacgtgtgaagacctggagtctggtgactggtgttgaacatttcgggtatgctcatattgaaaatgatgtttgtcagtggtctggtacagttagaaccaagtcaggcaaaatatggcattgatgtgatgaagatgatgcactgatgttatctatttgagtgaacgatgcatgttcctgtaatcgtatgtttaattaagagccagtatgttttaagatcc

SEQ ID NO: 25788 - protein, 514 aa, Triticum aestivum
PSPISSSPLCLIPVPPPTKNLGLGLGRRRLLYSRSRPIAMVIAGEPEPEEVAVMFSDRLRAEEETVVFPGWVMLDRIGRTHCDGDLGAAREAVNGNKTAVQVEMDSGHSFYVSFTLAPPPQGASYLDLHWPLEGSAKSVPPYKQPAYPFVRAIDKDLVLFHISIPSLPHRNFVPPDLFVYNAAGHPPSVQQLPLYRRRSFLRVNFTTGILRRQNGSYIVSDLNVYPKKEGTGNNSMCAELCVFNSNTRAWSFFSKDAPQPQDQSNGQFPTLWSTDHVLAFDGRFLCWVDYFSGVLLSDFSNLRSRVLHFVPFPGEGEYPAKVRVQRCFPDRFRSVSISNGKMCFVHIDNDFHERIHTGSQGQQPRKKITIWTLNMMDGNSRFKWEPHHVIDLDRLWLTPSVPRRLPEYPIIAPNNPDVLYCLLRKQEFHGEASMIMVDMNPASPWLCTPYINRRSVHVKDHKSEFPNMPLLPTVFFKYLESSTGMPWDNDKFATRPSKKLRSATCEDLESGDWC

SEQ ID NO: 25789 - protein, 475 aa, Triticum aestivum
MVIAGEPEPEEVAVMFSDRLRAEEETVVFPGWVMLDRIGRTHCDGDLGAAREAVNGNKTAVQVEMDSGHSFYVSFTLAPPPQGASYLDLHWPLEGSAKSVPPYKQPAYPFVRAIDKDLVLFHISIPSLPHRNFVPPDLFVYNAAGHPPSVQQLPLYRRRSFLRVNFTTGILRRQNGSYIVSDLNVYPKKEGTGNNSMCAELCVFNSNTRAWSFFSKDAPQPQDQSNGQFPTLWSTDHVLAFDGRFLCWVDYFSGVLLSDFSNLRSRVLHFVPFPGEGEYPAKVRVQRCFPDRFRSVSISNGKMCFVHIDNDFHERIHTGSQGQQPRKKITIWTLNMMDGNSRFKWEPHHVIDLDRLWLTPSVPRRLPEYPIIAPNNPDVLYCLLRKQEFHGEASMIMVDMNPASPWLCTPYINRRSVHVKDHKSEFPNMPLLPTVFFKYLESSTGMPWDNDKFATRPSKKLRSATCEDLESGDWC

SEQ ID NO: 25790 - protein, 461 aa, Triticum aestivum
MFSDRLRAEEETVVFPGWVMLDRIGRTHCDGDLGAAREAVNGNKTAVQVEMDSGHSFYVSFTLAPPPQGASYLDLHWPLEGSAKSVPPYKQPAYPFVRAIDKDLVLFHISIPSLPHRNFVPPDLFVYNAAGHPPSVQQLPLYRRRSFLRVNFTTGILRRQNGSYIVSDLNVYPKKEGTGNNSMCAELCVFNSNTRAWSFFSKDAPQPQDQSNGQFPTLWSTDHVLAFDGRFLCWVDYFSGVLLSDFSNLRSRVLHFVPFPGEGEYPAKVRVQRCFPDRFRSVSISNGKMCFVHIDNDFHERIHTGSQGQQPRKKITIWTLNMMDGNSRFKWEPHHVIDLDRLWLTPSVPRRLPEYPIIAPNNPDVLYCLLRKQEFHGEASMIMVDMNPASPWLCTPYINRRSVHVKDHKSEFPNMPLLPTVFFKYLESSTGMPWDNDKFATRPSKKLRSATCEDLESGDWC

SEQ ID NO: 25791 - DNA, 1157 bp, Triticum aestivum
aggattggagaaaagcagagtgggccgacgtcgtcgccctccgcaggtcaagctcggcagctccagctccacctcgaaaccgaagccgccgccgccgccgccggcagcggaggaggaggaggaggaggagggagatggcgtcgggcctggtgacggaggacgtgacggtggggcggctggtccggatccggcgcacggtgatgcacatgctgcgcgaccggggctacctggtggtggagcacgagctgtccatgacccgccgcgacttccagcgcaagtacggcgagtccttccaccgcgaggacatgctcatcaacaagtgcaagaagaacgaccccaacgaccagatatacgtgttcttcccgaacgacgagaaggtggggatgaagcacatcaagaagtacgtcgaaatgatgaacgccgagaaagtctccagggctatattggtcgtgcagcagaacctcaccccatttgcaaaatcgtttctccaagaactggagccaaagatccacttggaggttttccaggacgcggaaatgcttataaatatcaaggaacatgttcttgttccggagcatcaagtgcttgctaatgaggaaaagaagacgttattggcgcggtacactttaaaggaaactcagctaccaagaatacagattacagatcccattgcgaggtactacggcctcaaacgagggcaggtggtgaagatcatcaggcccagcgagacagccggcagatacgtcacatatcgctatgttgtatgacagtacacaagtgaggtgaaggtcaaggaacctaaaacatggtgatttttgcagttacacacgacacacatacccattcgcttggagaaaaacggcatcgcttcaagcaaccattcttaaggatcgcatgcctgttacgtaaaaggattcttaataagctgagtgtatggagcataagcaaaatcctcatgttgtaccattgtttcgtgaactttatagaacatacagaaccgaaactagtgtgctgagagcaatgaaaggctctgcagttctggctgctacatcatttgaacgaaccattcttgaaactccatgattctggtcctgacgttgtgtgagtgtgtgtgtgtggtggtgatatgcgtgatgaacttgtttgcaatatacccc

SEQ ID NO: 25792 - protein, 254 aa, Triticum aestivum
DWRKAEWADVVALRRSSSAAPAPPRNRSRRRRRRQRRRRRRRREMASGLVTEDVTVGRLVRIRRTVMHMLRDRGYLVVEHELSMTRRDFQRKYGESFHREDMLINKCKKNDPNDQIYVFFPNDEKVGMKHIKKYVEMMNAEKVSRAILVVQQNLTPFAKSFLQELEPKIHLEVFQDAEMLINIKEHVLVPEHQVLANEEKKTLLARYTLKETQLPRIQITDPIARYYGLKRGQVVKIIRPSETAGRYVTYRYVV

SEQ ID NO: 25793 - protein, 210 aa, Triticum aestivum
MASGLVTEDVTVGRLVRIRRTVMHMLRDRGYLVVEHELSMTRRDFQRKYGESFHREDMLINKCKKNDPNDQIYVFFPNDEKVGMKHIKKYVEMMNAEKVSRAILVVQQNLTPFAKSFLQELEPKIHLEVFQDAEMLINIKEHVLVPEHQVLANEEKKTLLARYTLKETQLPRIQITDPIARYYGLKRGQVVKIIRPSETAGRYVTYRYVV

SEQ ID NO: 25794 - protein, 196 aa, Triticum aestivum
GLEKSRVGRRRRPPQVKLGSSSSTSKPKPPPPPPAAEEEEEEEGDGVGPGDGGRDGGAAGPDPAHGDAHAARPGLPGGGARAVHDPPRLPAQVRRVLPPRGHAHQQVQEERPQRPDIRVLPERREGGDEAHQEVRRNDERRESLQGYIGRAAEPHPICKIVSPRTGAKDPLGGFPGRGNAYKYQGTCSCSGASSAC

SEQ ID NO: 25795 - DNA, 1576 bp, Triticum aestivum
caaatactggtttcttccaccgtcggtgacctccaagcccaagcccaaaccccaacacccgcgcggctcccgccgccgccgcaccggagatggcggcgtacctgagcatgggcgaggcgcaccgccgcatcgctgactacctctcccgcttggacgacgctatctctcagtccgacggcgccgacctcgcctctctcctcgccatctcctcggcgcccgcctccaccccgctctccgacgcgctcgccgcttttccggattttccccgcctcgcctccgaccgcttcccccacctctccgacttcctccccccgctcctccgcgccatccactcccactccctccgccgcttcggggacgcctactcctccttcgagaaggctgctagcgcgttcctgcaggagttccggaactgggagactccttgggcgatggaggcgatgcacatggtggcgcttgagatcaggctgctagctgagaaggcagacagggagcttgtgatgagcgggaagaacccagacaagctgcaggctgctgggtccttcctgatgaaggtttttggggcacttgcggttaaaggacctaagcgcgttggggcactgtatgttacctgccagctgtttaaaatttatttcaggcttggtactgttaacctttgccgtagtgtcataaggagtatcgaaacagctaggaattttgattttgaagattttccagtgaaagataaggtcacttatatgtattatacaggtcgcttggaggtgtttaatgagaattttcttgttgctgatcagaaactaacttatgctttgatgcattgtaatcctcaaagcgaatcaaatttgaggaaaattttgaagttcctaatccctgtaaagctgtcaattggtgttttgccaaggaggaccctcctggagaagtacaatctgcttgagtatgcagatattgtgacctcacttaggagaggggatctcaggctccttaagcaagcccttgatagacatgaagaccagttactaaaatgtggtgtctaccttgtgttggagaaacttgaactccaggtctaccgaagattagtgaagaaaatccatatcatacagagggagaaggaaccatcgaaggcgcatcaaatcaagctagaggtcttggtaaagactctgcaatggcttggaatcaccatggatgtggatgaggtggaatgcatcatggcgtgcctaatatacaagaatctcataaaaggatactttgcccacaagagcaaagttcttgtccttagcaaacaagaccccttcccaaagttgaatgggaagcccgtttagttcgcagcgatacctcataagcttgtacacctaatggaagtttctcttatctttgatgtacggaacatgacaggtttatgtaaaattaccgcgactctgattgtaacaacatttgtattctagctgcaatgtttgtaaacatttatggttggtagcctccacttaaacggtggttttcatagcttcagtgaggtacaatattgtattctggataaactaaatttgcagactgcaattaaggccatagtaaaaaaccg

SEQ ID NO: 25796 - protein, 409 aa, Triticum aestivum
MAAYLSMGEAHRRIADYLSRLDDAISQSDGADLASLLAISSAPASTPLSDALAAFPDFPRLASDRFPHLSDFLPPLLRAIHSHSLRRFGDAYSSFEKAASAFLQEFRNWETPWAMEAMHMVALEIRLLAEKADRELVMSGKNPDKLQAAGSFLMKVFGALAVKGPKRVGALYVTCQLFKIYFRLGTVNLCRSVIRSIETARNFDFEDFPVKDKVTYMYYTGRLEVFNENFLVADQKLTYALMHCNPQSESNLRKILKFLIPVKLSIGVLPRRTLLEKYNLLEYADIVTSLRRGDLRLLKQALDRHEDQLLKCGVYLVLEKLELQVYRRLVKKIHIIQREKEPSKAHQIKLEVLVKTLQWLGITMDVDEVECIMACLIYKNLIKGYFAHKSKVLVLSKQDPFPKLNGKPV

SEQ ID NO: 25797 - protein, 403 aa, Triticum aestivum
MGEAHRRIADYLSRLDDAISQSDGADLASLLAISSAPASTPLSDALAAFPDFPRLASDRFPHLSDFLPPLLRAIHSHSLRRFGDAYSSFEKAASAFLQEFRNWETPWAMEAMHMVALEIRLLAEKADRELVMSGKNPDKLQAAGSFLMKVFGALAVKGPKRVGALYVTCQLFKIYFRLGTVNLCRSVIRSIETARNFDFEDFPVKDKVTYMYYTGRLEVFNENFLVADQKLTYALMHCNPQSESNLRKILKFLIPVKLSIGVLPRRTLLEKYNLLEYADIVTSLRRGDLRLLKQALDRHEDQLLKCGVYLVLEKLELQVYRRLVKKIHIIQREKEPSKAHQIKLEVLVKTLQWLGITMDVDEVECIMACLIYKNLIKGYFAHKSKVLVLSKQDPFPKLNGKPV

SEQ ID NO: 25798 - protein, 295 aa, Triticum aestivum
MEAMHMVALEIRLLAEKADRELVMSGKNPDKLQAAGSFLMKVFGALAVKGPKRVGALYVTCQLFKIYFRLGTVNLCRSVIRSIETARNFDFEDFPVKDKVTYMYYTGRLEVFNENFLVADQKLTYALMHCNPQSESNLRKILKFLIPVKLSIGVLPRRTLLEKYNLLEYADIVTSLRRGDLRLLKQALDRHEDQLLKCGVYLVLEKLELQVYRRLVKKIHIIQREKEPSKAHQIKLEVLVKTLQWLGITMDVDEVECIMACLIYKNLIKGYFAHKSKVLVLSKQDPFPKLNGKPV

SEQ ID NO: 25799 - DNA, 595 bp, Triticum aestivum
aacaccactacaacagcagaaagcattctaccactagaccgaccgcaccaggtgaagtgggagctttgcgctaagggctcattagcaaccatgaagagcaccaagctcgcggcgatcctgatcctccaggccgtcctggtcatggggatcctctcacacgtgaacgccgactatttccccaagtgctgcaacagttgcaggtccttctcgggggtcgacgtctgcgacgacgcccacccccagtgccccaagggctgctcggcctgccgcgtggtgacgcccagccctcacaagacgttccggtgcgccgacatgaagagcaccgtcgacggcacctgcggcgggccatgcaaaaagcactgatccgttcagggcttcaggctcagacgaggtgtgccgcctaaaataaagctcagatgagatgagcagtcatggtgcctatgcttgtgtgtgggtcgtgctatacggccaacagtatgtataatgctatcgtcgtgtcttggtcaatgtgttttctctctcgagaaaggctggtggtgctagtacttgttcacctacctccgtgaataaacacatgtgatgattgtgtgtgcct

SEQ ID NO: 25800 - protein, 120 aa, Triticum aestivum
NTTTTAESILPLDRPHQVKWELCAKGSLATMKSTKLAAILILQAVLVMGILSHVNADYFPKCCNSCRSFSGVDVCDDAHPQCPKGCSACRVVTPSPHKTFRCADMKSTVDGTCGGPCKKH

SEQ ID NO: 25801 - protein, 90 aa, Triticum aestivum
MKSTKLAAILILQAVLVMGILSHVNADYFPKCCNSCRSFSGVDVCDDAHPQCPKGCSACRVVTPSPHKTFRCADMKSTVDGTCGGPCKKH

SEQ ID NO: 25802 - protein, 73 aa, Triticum aestivum
MGILSHVNADYFPKCCNSCRSFSGVDVCDDAHPQCPKGCSACRVVTPSPHKTFRCADMKSTVDGTCGGPCKKH

SEQ ID NO: 25803 - DNA, 540 bp, Triticum aestivum
ccaattacaacgacgcaccaccgcaccgcaccccatctccatcgccaccgcttttaaatccccaccgccgcgaacggatcgaacggccggcctacccaccctctacctgccagccagcctagggttttgagtccgcccccctccgccgcgcaccatgggccccgacgagctccccaaggccgccgccgccgaggaggccgccccgttctccttcagcatctggccgccgccaaggccgagcctccctcggaggaggcgcccgccgtcaaggaggagacctccgaggcctgagccccggacgaggacattcgtttcgtttatgcttcgagataaaattcgtttacatctagagttcgtgtgcggcgttggcctctgcttgggatgagttgcctgtaggttgttggcgtgcctgtgctgttattgttctttcagtagctgctggttacccttttttttagtgtgttcgttaattactcccgtttgtatctgtgaacaagaattatcttcaccttgtcgtggcaatgatcaagatttcaccgg

SEQ ID NO: 25804 - protein, 76 aa, Triticum aestivum
MGPDELPKAAAAEEAAPFSFSIWPPPRPSLPRRRRPPSRRRPPRPEPRTRTFVSFMLRDKIRLHLEFVCGVGLCLG

SEQ ID NO: 25805 - protein, 42 aa, Triticum aestivum
QLQRRTTAPHPISIATAFKSPPPRTDRTAGLPTLYLPASLGF

SEQ ID NO: 25806 - protein, 39 aa, Triticum aestivum
NYNDAPPHRTPSPSPPLLNPHRRERIERPAYPPSTCQPA

SEQ ID NO: 25807 - DNA, 2016 bp, Triticum aestivum
ggtaatccatttgaaatgactagaaagacaaatatttcggaacggaggaagtacatgacactcttatactcgcaagagttcaattctattctactcgagaagacactcactccctgtgagaaattctaaaaggaaatgcttttacactgcatgaaagctcgaaaactggctacatcagagccttgaaattgcaggccaggcatcagatcacgaaaggcattacactgttggtggcggtcctccctccaaccaactccaaaggtttgcaatacatatagcatgtaagcagcagcttcctatatatttgatgagttctctttccgcagcttggctggcctctccttgtgcgattctgcatatctcctcttcttgttggctcttcttcttttgcgctcagcttgtgtaagctccacgtcttctttaatatcccctttcccttcaaaaacttcttcgggagcgagcattgcggcatctgaaacagctacaggtgcaacctcttccattgctagagcaggtatattaacttgtatggacatatcctcaatgaccggctttggggcaaagtggaaatgagagagcgcatccaacttcaagcatatcctcttaaataaatcatttgcctcattcttcagttcatctgaaatagcaagtgtggcaggtgcaatgccagttttttccttaaactcatcctcatactgttcagcaagaccctttttgctcttgttttcatccatctccttttgctgctttggaactttatacggcaaggttgaaggcttttcaacatcatcaaaatgaccctccgcaattcttttctttatcatctcttcgagagaagctgtgacttcctccgtgattactggggcaggtcttacattatgctcaaaatcaagatccacttccagggcactatttttgggcctcctggaagcatcaacctctccctgcatgatccatttactgggttcaagactagctttctccattaggtctatttggttacgcatcttcaagagccccttttcatgagttgaaagaccttgttcatcctctaatgctggaccatcatttacatcatccttctcaatgtcatccacttccatttcatgcaattcatccttgaagtggactttctttgtgaaaccatttctcttcttgacttgttgcttactgctttcctcaaaaaaatcctcataccttatatctccgccagatttccccacaccctcttcatcatcagactcaaaatcttccaaatccaaatcgtcatcttcatcatcacccccatcatcttcatccacatcctcctcatcactatcgtcctccatcaagttcacacttgccttcttcttctctcctcccttggaacccccaccgtactcctgctcctccccctcctccataaacttttccaggtccttcatcttcaggaacctgtcctccaccccgttccctttcttcgcccctagctcctccgtttcttcatcctccccctcctccgattccaactcgtcatccgtgtcctccaggccaccctcatcctcctcctccgattcgtcaccctctccatcctcctcctcgtctgacgggccctccacggcttcagcgggcttggacggcggaggagtagccaacggctgcgcaggcggttggtgctcgaggcggcggagctggcggtggaggtgggggaggagggggcgggagagcagctcgctctgggaccaaatctgctcggcgtcgaagttggggccggcgaggaggttggggaggggcggcggctgcacgggggagacaacggcgagcgacgagtggaagtgcttcagagccgcccgggcggcggcggcgaggtccgcggacggggagaggtagacggacgggtcggcgcgccgcagctgctgcagcgccacctcgcccttctccgcggcaagcggctcgtccaaatccatggccattgccgtggtggccgggagcgaattggttgactggagtatgtggaggcgacgctgggaaagagag

SEQ ID NO: 25808 - protein, 260 aa, Triticum aestivum
MSSTSISCNSSLKWTFFVKPFLFLTCCLLLSSKKSSYLISPPDFPTPSSSSDSKSSKSKSSSSSSPPSSSSTSSSSLSSSIKFTLAFFFSPPLEPPPYSCSSPSSINFSRSFIFRNLSSTPFPFFAPSSSVSSSSPSSDSNSSSVSSRPPSSSSSDSSPSPSSSSSDGPSTASAGLDGGGVANGCAGGWCSRRRSWRWRWGRRGRESSSLWDQICSASKLGPARRLGRGGGCTGETTASDEWKCFRAARAAAARSADGER

SEQ ID NO: 25809 - DNA, 1030 bp, Triticum aestivum
aacccaatatacacggagaagagatcgtcatcatccgccaaaccagatcggctcggctgcttcctcttcttcaacttcgcagaatcgctggtcttctcgtcctctagttaagtccctcgacagcaatgggaggaggcaacgacggtcatgggtacccacccggtggccaggggggataccctccgcaagggtacccgccgcagcagggaggttaccctccacagcaaggatacccgcctgcacctggagcttacccacctgcacctggggcataccctcctgcacctggggcataccctcctgcgcccggagcgggtggcagtgacggggagaaggggctcctctccaacatcatgcacggtgttgccggtgctcatggtggtggccatggctacccatctggtggccacgggtaccccccgcagcagcatggataccctcagcaaggctaccctcctcagcatggctacccaccgcaacagcatggctaccctccacagcagcatggctatccccctgctggctaccctggctcatctggtcacagtggtagccatggaggaggaggcatgggcatgggcggcatgctagctggaggcgcagcagctgctgccgccgcttacggagcacacaagatttctcacggcggccacggtggaggtggacacatgatgggaggcatgatgggcggccatggaggctatggcggcgggtacggccaccacggcggcaagttcaagcacgggaagcacggccacggcaagttcaagcacggcaagcatgggaagcacggcatgttcggcggcggcggaaagttcaagaagtggaagtaatgcgctagctagtagcttcaccatggctgatgaatcaaaaaaatacctaaactcttcgtgtaggcttccagaacttggtttggtcagggaaagcctttgagatgtatctaagcagggtgtggtgtggttgctgcccggatctcgtggagcttccatcctttcctctatatgatttggcactctagtctgcgtctgtg

SEQ ID NO: 25810 - protein, 235 aa, Triticum aestivum; identical to SEQ ID NO: 14791

SEQ ID NO: 25811 - protein, 159 aa, Triticum aestivum; identical to SEQ ID NO: 14792

SEQ ID NO: 25812 - protein, 147 aa, Triticum aestivum; identical to SEQ ID NO: 14793

SEQ ID NO: 25813 - DNA, 810 bp, Triticum aestivum
cttctttctccttccctgcccaccagtccaccgccgccgcctctccccccatccccctctcccacctcctccggcgtcggccagcaagcagccatggcgagccccgcgcgcatcgacgtggataagctgagcgtggagcagctcaaggcgctcaaggagcagaccgatctggaggtcaatctcctccaggacagcctatccaagatccgcaccgccgccacccgcctcgagaacgccacggccgccctccacgagctctccctccgcccccaagggaagaagctgctcgtgccgctcacggcgtccctctacgtgcccggcacgctcgacgacgccgagaaggtcctcgtcgacgttggcaccggctactacattgagaaaactatgactcaaggaaaagaatactgtgaaaggaaaattaatttgctgaagtccaacttcgatgaactacttgagatggcgaccaaaaagaagagcatagcagatgaaatgggcatgtttctgcaagccaagctgaggcaggcatcaccgagctcgagttcgtgagagcggaatgcgcgccctgtcccttgctttgttgccttgttggagcgccggggtggttcgctcactcgcagccctcagggaacataggaggttctttagctgttttggccgtgtgtgcaaggttctctgagatgatttactgaaacagcctgctccatcgtcagacttcatcctcgagtaatttggaattcggtatcaaacgtgtgtgtcttggatgcacaatctgctttaatggctttgacaatcaattatgagtttgttgct

SEQ ID NO: 25814 - protein, 181 aa, Triticum aestivum
LLSPSLPTSPPPPPLPPSPSPTSSGVGQQAAMASPARIDVDKLSVEQLKALKEQTDLEVNLLQDSLSKIRTAATRLENATAALHELSLRPQGKKLLVPLTASLYVPGTLDDAEKVLVDVGTGYYIEKTMTQGKEYCERKINLLKSNFDELLEMATKKKSIADEMGMFLQAKLRQASPSSSS

SEQ ID NO: 25815 - protein, 150 aa, Triticum aestivum
MASPARIDVDKLSVEQLKALKEQTDLEVNLLQDSLSKIRTAATRLENATAALHELSLRPQGKKLLVPLTASLYVPGTLDDAEKVLVDVGTGYYIEKTMTQGKEYCERKINLLKSNFDELLEMATKKKSIADEMGMFLQAKLRQASPSSSS

SEQ ID NO: 25816 - DNA, 749 bp, Triticum aestivum
atctgccgatctcccccgttccccacctcccccttcccgtcgggccgtagccaccgcaccgcccccgatggcctcctccgctgccggcgccggcaagtcactgatccagacattccgcaagttcttcaagaagccgtgggagatcaccggcccgtgctcctcgcccgagtaccgcagcgcggtcccgggtgcgctcgagtaccgtcaaaccctgcccggccacccttcgcgaggactccctcagggccgtcatccccacctccgactcggagaccgtgttcgacatcaagtactacccgcgcgactgcggccgcaaccgcccgcccgtccgccgcaccctcctccgcaagcccgatctcgagcgctacatggccgccaagcagttcgaccccgccaaggacttccccgtcccctacgtcaattctgctgtcgagtacagcgaagtcggcggcggctacaccaagtgatccaggtcttgtggtcaagctgcagcagaagctgcactcacttcatttccgcttttccttgaaagtcccttcctcttttgtttcggagaaaaatttctggttgtaaaagatgatggtggcaataatatggctcttggggagtaaaccggatgcacctaccttgtaagttgtgttccaaaagtcagccagcctaatgctgatttgtggtttaattaaatttatgaaaaactcaaatcttctgctggaatccgtacatgatctactttcactgcgttttgacag

SEQ ID NO: 25817 - protein, 190 aa, Triticum aestivum
ICRSPPFPTSPFPSGRSHRTAPDGLLRCRRRQVTDPDIPQVLQEAVGDHRPVLLARVPQRGPGCARVPSNPARPPFARTPSGPSSPPPTRRPCSTSSTTRATAAATARPSAAPSSASPISSATWPPSSSTPPRTSPSPTSILLSSTAKSAAATPSDPGLVVKLQQKLHSLHFRFSLKVPSSFVSEKNFWL

SEQ ID NO: 25818 - protein, 175 aa, Triticum aestivum
SADLPRSPPPPSRRAVATAPPPMASSAAGAGKSLIQTFRKFFKKPWEITGPCSSPEYRSAVPGALEYRQTLPGHPSRGLPQGRHPHLRLGDRVRHQVLPARLRPQPPARPPHPPPQARSRALHGRQAVRPRQGLPRPLRQFCCRVQRSRRRLHQVIQVLWSSCSRSCTHFISAFP

SEQ ID NO: 25819 - protein, 153 aa, Triticum aestivum
MASSAAGAGKSLIQTFRKFFKKPWEITGPCSSPEYRSAVPGALEYRQTLPGHPSRGLPQGRHPHLRLGDRVRHQVLPARLRPQPPARPPHPPPQARSRALHGRQAVRPRQGLPRPLRQFCCRVQRSRRRLHQVIQVLWSSCSRSCTHFISAFP

SEQ ID NO: 25820 - DNA, 781 bp, Triticum aestivum
aaaaaaaactcgctattctcaaaaaagaaaaaagaaaaactcgctgttcttgctctcggccggctgtactgctgctgctccttgagctctccgccctctcccggtctccccaatcgccccgccgccgcggcctccttgctgcctgcgtccgcttccgaccttccgtgctccgtcttctcctcgtcttccccgctcccacctccgcgctgccctcgaggatggaagagccgctgcggtacaagttcgggccgtataagattgacgcgagggaggtcttccacgccacgcccctcacctacgccatggtcaacctccgccccctcctccctggtcatgtgctcgtgtgccccaaacgtgaggtgaaacgatttgctgatctaagttctgatgagactagtgatttgtgggtaactgcaaaagaagttggtgcaaagctcgagcagtaccacaaagcttcttccatcacattcgcgattcaggatggtcctcaggctggccaaacagttgcccatgtccacatccacgtcatccccaggaagaaaggagattttgagaaaaacgatgaaatatatgatgcgattgacgtgaaagagaaggaaatgaaggagaagcttgacctggacgtcgaaagaaaagatagaagcatggaagaaatggctcatgaggccaccgagtaccgcgctcttttctcctagccagatagatgtatttctgatgaactctctaattatcatccgctgccactcttgcctaaaataagccttgtgactgcttgtcctcg

SEQ ID NO: 25821 - protein, 230 aa, Triticum aestivum
KKLAILKKEKRKTRCSCSRPAVLLLLLELSALSRSPQSPRRRGLLAACVRFRPSVLRLLLVFPAPTSALPSRMEEPLRYKFGPYKIDAREVFHATPLTYAMVNLRPLLPGHVLVCPKREVKRFADLSSDETSDLWVTAKEVGAKLEQYHKASSITFAIQDGPQAGQTVAHVHIHVIPRKKGDFEKNDEIYDAIDVKEKEMKEKLDLDVERKDRSMEEMAHEATEYRALFS

SEQ ID NO: 25822 - protein, 158 aa, Triticum aestivum
MEEPLRYKFGPYKIDAREVFHATPLTYAMVNLRPLLPGHVLVCPKREVKRFADLSSDETSDLWVTAKEVGAKLEQYHKASSITFAIQDGPQAGQTVAHVHIHVIPRKKGDFEKNDEIYDAIDVKEKEMKEKLDLDVERKDRSMEEMAHEATEYRALFS

SEQ ID NO: 25823 - protein, 130 aa, Triticum aestivum
MVNLRPLLPGHVLVCPKREVKRFADLSSDETSDLWVTAKEVGAKLEQYHKASSITFAIQDGPQAGQTVAHVHIHVIPRKKGDFEKNDEIYDAIDVKEKEMKEKLDLDVERKDRSMEEMAHEATEYRALFS

SEQ ID NO: 25824 - DNA, 618 bp, Triticum aestivum
cccccttgatctactgccaccaagcaagatggtacttgatgactggaagaggctatactcaaacactaagagcaacttccatgatgttgctattaaaggtttctgggagatgtatgacccagagggctactctctgtggttctgtgactacaagtaccaggaagagaacaccgtgtcgtatgtgaccctgaacaaggtcggcgggttcctgcagcggatggatctgtgccgcaagtatgctttcggcaagatgctcgtgattggttctgaggcgcccttcaaggtcaaggggctgtggctcttccgtgggcaggacatccctgagtttgtcatgaacgaggtctacgacatggagctctacgagtggaccaaggttgacctctctgacgaggcccagaagaagcgtgtcgaagccatgatcgaggaccttgagccgtttgaggggcaggccttgctggacgccaagtgcttcaagtaagcggatcagtgctttggatcgtgatggcggtgacaaaagaacctatctaggactcaaattcagtgtcgaaacagttgtcttttttggaagagtttgcttgttacttaatggctatttgacctggtgaacttgttaatttt

SEQ ID NO: 25825 - protein, 158 aa, Triticum aestivum
PLDLLPPSKMVLDDWKRLYSNTKSNFHDVAIKGFWEMYDPEGYSLWFCDYKYQEENTVSYVTLNKVGGFLQRMDLCRKYAFGKMLVIGSEAPFKVKGLWLFRGQDIPEFVMNEVYDMELYEWTKVDLSDEAQKKRVEAMIEDLEPFEGQALLDAKCFK

SEQ ID NO: 25826 - protein, 149 aa, Triticum aestivum
MVLDDWKRLYSNTKSNFHDVAIKGFWEMYDPEGYSLWFCDYKYQEENTVSYVTLNKVGGFLQRMDLCRKYAFGKMLVIGSEAPFKVKGLWLFRGQDIPEFVMNEVYDMELYEWTKVDLSDEAQKKRVEAMIEDLEPFEGQALLDAKCFK

SEQ ID NO: 25827 - protein, 122 aa, Triticum aestivum
MYDPEGYSLWFCDYKYQEENTVSYVTLNKVGGFLQRMDLCRKYAFGKMLVIGSEAPFKVKGLWLFRGQDIPEFVMNEVYDMELYEWTKVDLSDEAQKKRVEAMIEDLEPFEGQALLDAKCFK

SEQ ID NO: 25828 - DNA, 1074 bp, Triticum aestivum
aaacataccacgcctccccgccaccttcggaacgccacagcgcacagcccatccccatccccatccaccaccgcgcgctctccgacggccatcgaacgccatggcgctcctcctcccccgcacggcgcggctcgcgctcctctccgccggccctcgagcctactcctccaccgtcggcgcggcgggaacagcggcgccggcgccgtacggtggcggggcgcccgcgccggcgccgatgccgaaggccgcggagttcgtggtgtccaaggtggacgatctgatgaactgggcccggcggggctcgatctggcccatgacgttcggcctcgcgtgctgcgccgtggagatgatgcacgccggcgccgcccgctacgacttcgaccgcttcggcgtcatcttccgcccctcgccgcgccagtccgactgcatgatcgtcgccggcacgctcaccaacaagatggcgcccgcgctccgcaaggtttatgaccagatgccagagcctcggtgggtgatctcgatgggcagctgcgccaatggcggcggatactaccactactcatactccgtcgtgcgtgggtgcgaccggatcgttcccgtggacatctacgtccctgggtgccctccaacagctgaagctctcctgtatggcgttctccagttgcagaagaagatcaacaggcgcaaggatttccttcactggtgggagaagtgaattagcactttggaccatcaggttcatgaggatgcagctcttctacgtattgttgggacgttgggttctttcgtttctgtttggtggaataagcgaagcatgtgcttcctggtccgtggtaattggtaagtaagtagcttgtgtcttgtgtgtgctgggtgggttcctaccttgcttcacaggccatgaaaaagctacgtactggtggttgtggttgaacaggtgatgcttatggtttaccccagtctgtactggtatattgtatatctgtacagtacatgctggtggttgaacagttgatgcttctggaattgtatgtgttctatgcaattgtgataatgtacactgttggggttgtgtgt

SEQ ID NO: 25829 - protein, 236 aa, Triticum aestivum
NIPRLPATFGTPQRTAHPHPHPPPRALRRPSNAMALLLPRTARLALLSAGPRAYSSTVGAAGTAAPAPYGGGAPAPAPMPKAAEFVVSKVDDLMNWARRGSIWPMTFGLACCAVEMMHAGAARYDFDRFGVIFRPSPRQSDCMIVAGTLTNKMAPALRKVYDQMPEPRWVISMGSCANGGGYYHYSYSVVRGCDRIVPVDIYVPGCPPTAEALLYGVLQLQKKINRRKDFLHWWEK

SEQ ID NO: 25830 - protein, 203 aa, Triticum aestivum
MALLLPRTARLALLSAGPRAYSSTVGAAGTAAPAPYGGGAPAPAPMPKAAEFVVSKVDDLMNWARRGSIWPMTFGLACCAVEMMHAGAARYDFDRFGVIFRPSPRQSDCMIVAGTLTNKMAPALRKVYDQMPEPRWVISMGSCANGGGYYHYSYSVVRGCDRIVPVDIYVPGCPPTAEALLYGVLQLQKKINRRKDFLHWWEK

SEQ ID NO: 25831 - protein, 161 aa, Triticum aestivum
KHTTPPRHLRNATAHSPSPSPSTTARSPTAIERHGAPPPPHGAARAPLRRPSSLLLHRRRGGNSGAGAVRWRGARAGADAEGRGVRGVQGGRSDELGPAGLDLAHDVRPRVLRRGDDARRRRPLRLRPLRRHLPPLAAPVRLHDRRRHAHQQDGARAPQGL

SEQ ID NO: 25832 - DNA, 785 bp, Triticum aestivum
aggttcactcccgactcaagcgacaccataatctccatcccctccacgcaccccattccaagtttccaactgctcgcgctcctcgatctctcatggcgacagcaaccacaagtcggcccagcggcccggtgctgtccatacccagctaccgctccgcctcgcccacccgcgtcaagctcgccagcggcagcggcgccacccgctccccgggtaggtccgtcagcgtctcgtccccgtcttcctccaccggcgttgccgccgccaggagccggcggtcgtgcatgtgctcctcgacgaaccacccgggatcgttccggtgcagcctccacaaggagcgcaagcatgcggcccccgccggtagcagcaagccggcttcccctccgtccatccgcagcgcctgcagtctgggctcgaagcgcatggacagcgggcagtgtgcacgcagggccctcgcgccgtcccccgcggcgcagcagtcgcagcaccggaggcgcgcgggaggcttccgccccaggccgagccggctctccgccgtctccacggccggcgagcgccccagcgacaactaccagtaaacaaatcaacgtcgacatgccagagcaagatagttgtagtacatagtactgatcttgtggagatagaatcggtggggattagacccaatccgattccggactggtcttttacctagcccgtaggtgcagaaagaaagtgggctcgtcctctgctcactgcggtgtaaaacgaacgcccttggttttggatatatatgagtcacaaattgg

SEQ ID NO: 25833 - protein, 206 aa, Triticum aestivum
RFTPDSSDTIISIPSTHPIPSFQLLALLDLSWRQQPQVGPAARCCPYPATAPPRPPASSSPAAAAPPAPRVGPSASRPRLPPPALPPPGAGGRACAPRRTTRDRSGAASTRSASMRPPPVAASRLPLRPSAAPAVWARSAWTAGSVHAGPSRRPPRRSSRSTGGAREASAPGRAGSPPSPRPASAPATTTSKQINVDMPEQDSCST

SEQ ID NO: 25834 - protein, 190 aa, Triticum aestivum
VHSRLKRHHNLHPLHAPHSKFPTARAPRSLMATATTSRPSGPVLSIPSYRSASPTRVKLASGSGATRSPGRSVSVSSPSSSTGVAAARSRRSCMCSSTNHPGSFRCSLHKERKHAAPAGSSKPASPPSIRSACSLGSKRMDSGQCARRALAPSPAAQQSQHRRRAGGFRPRPSRLSAVSTAGERPSDNYQ

SEQ ID NO: 25835 - protein, 160 aa, Triticum aestivum
MATATTSRPSGPVLSIPSYRSASPTRVKLASGSGATRSPGRSVSVSSPSSSTGVAAARSRRSCMCSSTNHPGSFRCSLHKERKHAAPAGSSKPASPPSIRSACSLGSKRMDSGQCARRALAPSPAAQQSQHRRRAGGFRPRPSRLSAVSTAGERPSDNYQ

SEQ ID NO: 25836 - DNA, 760 bp, Triticum aestivum
ccacacgcatcgcacaccacccatccaacccatccccatcgcagcccacgcgcccgggacccgagcagcagccatggccaagggagcagccggaggagggggagggggcgccgtgaagacggccctggtcgtcaccggcggcctcgtcctcgcctggctcaccgtcgagtccgccttgaagcccttcctcgaccgcctccgcggcgccgtctcccgctccaccgaccccgcccgcgaccccgacgaggacaccaccgcccccgaggaggacaagtcgcccgccaccgctgccgccaccgccgccgtcgccgccgctgtcgcctcctccgtcgccgaggagaaggacccctctgtcgccgtcgccgcgcccgagccgtccgcgcccccgctccctgccgaggcggtggagagcgaggagaagggagcggacggggaggtcgaactgggcgagaagggggaggcggccgtggccgccaaggccgagtgaagacgacggtgctcgcctcgcctggctccacttctgaatcgtacgctgtgaatctaatctacgcgtctggaggttgtgatggatgatgcaatgttttgaactctgttatcggtatctgcatctttagggcccgtcttaagattgaggcttaccctgggtcaatttccgacattttgcattcagtacttgatgtcatgatatatacatctgtatggatggtttcatttcccatggaaaccgcttgctattcctgtggacaggaaacttattgtc

SEQ ID NO: 25837 - protein, 190 aa, Triticum aestivum
PHASHTTHPTHPHRSPRARDPSSSHGQGSSRRRGRGRREDGPGRHRRPRPRLAHRRVRLEALPRPPPRRRLPLHRPRPRPRRGHHRPRGGQVARHRCRHRRRRRRCRLLRRRGEGPLCRRRRARAVRAPAPCRGGGERGEGSGRGGRTGREGGGGRGRQGRVKTTVLASPGSTSESYAVNLIYASGGCDG

SEQ ID NO: 25838 - protein, 161 aa, Triticum aestivum
HTHRTPPIQPIPIAAHAPGTRAAAMAKGAAGGGGGGAVKTALVVTGGLVLAWLTVESALKPFLDRLRGAVSRSTDPARDPDEDTTAPEEDKSPATAAATAAVAAAVASSVAEEKDPSVAVAAPEPSAPPLPAEAVESEEKGADGEVELGEKGEAAVAAKAE

SEQ ID NO: 25839 - protein, 137 aa, Triticum aestivum
MAKGAAGGGGGGAVKTALVVTGGLVLAWLTVESALKPFLDRLRGAVSRSTDPARDPDEDTTAPEEDKSPATAAATAAVAAAVASSVAEEKDPSVAVAAPEPSAPPLPAEAVESEEKGADGEVELGEKGEAAVAAKAE

SEQ ID NO: 25840 - DNA, 833 bp, Triticum aestivum
cacctcaccagcagctacctagtagtggtaaaggcttgatttacagaattggcaccaggagagccagagtctggatcaaaagcattcgatctcgtttgctctctaaagaatggcggctccaccacctcccgccttcatggacgacgacgaagatatggacgccgtcgacctgtcgctgacactcgcccacacgccgtggccggcgtcaccgtcgtctcctccggctgcttcatcaggtggtggcaatggcagtggcaatggtggtcgtggtggcgtgaggctgttcccctgcctgttctgcaacaagaagttcctcaagtcgcaggcgctaggggggcaccagaatgcgcacaagaaggagaggaacatcggctggaacgcgcacctctacgccacccccatcaacaccaactcagccgctgatgccatgcccaaccaccagacgatgtaccccatccaggtctcgcactcctgccagcaccaggggtacccccacgtcgccgacggcggctcgccggggggcagctggtggcgcgaccaggacggcgacaagaagcagcaacagccgaggaaggtcgaccttaacctcaagctctagctacctagttctgttattttcctttttattattatattatttttccccctctcttttttagtcgatgttttcctctctttctcttctccctttttagtgtgggtgggtacttgttaatgagtgtaccttgtgctgattgtaccgatcgagtgtgcaattgatgataataaacaagtagttgttcgattgtttgggaaaaaaaaaaaaaaaaaaaaaaaaaaaaaaaaaaaaaaga

SEQ ID NO: 25841 - protein, 162 aa, Triticum aestivum
MAAPPPPAFMDDDEDMDAVDLSLTLAHTPWPASPSSPPAASSGGGNGSGNGGRGGVRLFPCLFCNKKFLKSQALGGHQNAHKKERNIGWNAHLYATPINTNSAADAMPNHQTMYPIQVSHSCQHQGYPHVADGGSPGGSWWRDQDGDKKQQQPRKVDLNLKL

SEQ ID NO: 25842 - protein, 153 aa, Triticum aestivum
MDDDEDMDAVDLSLTLAHTPWPASPSSPPAASSGGGNGSGNGGRGGVRLFPCLFCNKKFLKSQALGGHQNAHKKERNIGWNAHLYATPINTNSAADAMPNHQTMYPIQVSHSCQHQGYPHVADGGSPGGSWWRDQDGDKKQQQPRKVDLNLKL

SEQ ID NO: 25843 - protein, 147 aa, Triticum aestivum
MDAVDLSLTLAHTPWPASPSSPPAASSGGGNGSGNGGRGGVRLFPCLFCNKKFLKSQALGGHQNAHKKERNIGWNAHLYATPINTNSAADAMPNHQTMYPIQVSHSCQHQGYPHVADGGSPGGSWWRDQDGDKKQQQPRKVDLNLKL

SEQ ID NO: 25844 - DNA, 504 bp, Triticum aestivum
acccacagcacacaactccaccggtagtaacaaagccagtacgtagcgcaagcagagagtttaggtcgctcccagcccggccgctcaccatgtggaccaagaaggtggcgacgcaggtggctttggtcctgcttctccttctcatcgcacaggaggcggcggtgccgggggcggaggcgaaggtctgccggcagcgcagcgcggggttcaaagggccgtgcgtgtccgataagaactgcgcgcaggtctgcctgcaggaaggctggggcggcggcaactgcgacggacccttccgccggtgcaagtgcatcaggcagtgctgatcataatatgtgctacggctagctggccctcgccgtacgtcagctagctagcccatggaatcatacgtctgtgtacctacttgaatgtgtgtgtgtgtgccgccttctacgtacgtatgtcgtatgtatatccgtatcaccactagccagctgctgcatctcgatcgatgcatgcgagagc

SEQ ID NO: 25845 - protein, 106 aa, Triticum aestivum; identical to SEQ ID NO: 15268

SEQ ID NO: 25846 - protein, 77 aa, Triticum aestivum; identical to SEQ ID NO: 15269

SEQ ID NO: 25847 - DNA, 980 bp, Triticum aestivum
cccgattacttcagccgccggccgccgccactgccgccagcctcggccagagcttctccgtcccctacccctacagaccgcgatctcgtcctgaaccaccggccgcgactgctgctccgcttgctctcccccgtcggagatccgcccggagcgactttcgtctttctgggtagtgccgacgctacagaaagcccaaacccggaaacagagaagacgacgccacatctacatttgcactcccacgcttaaagccggaggcggcgtaggaagcagcgatagccatggcgtcgtcgttggcaacggcaccggctgctgtacgtgaaatgcagagcgaccttgagtcccaggccaacgccctcagcaagatccagaaagacatctccaagaaccacgaggtccgcaagcagttcaccatccaggtcggcgagaatgaactcgtcctcaaggagctggagctgctgaatgaaggggcaaacgtgtacaagctgattgggccagtgttggtcaagcaggacaatgcagaggcgaaggccaacatcaagaagcgcatcgagtacatcacggctgagctagagagaatggatcgggcgctcaaggacttggaggagaaacagaatagcaagaaggaatcgataatcaagctgcaacagaagatgcaggctgtacaagcgaaggctcaggcgtaaatgaagggttccctgcattagggcctttgtcctcccaaatgttgggtcgtgttatctatcccctaaaaaggtgaaagaaatctgtagtgttcagagattgagagaagttcaaggtttgtgtagtgagagattttgtttgggagtggatacttggttgaagatgtacctcttgctggtttctagtaatatgcttgaaatgacttttattttgagaaggaattggatcaatcttttcatgtaccattttatttcttctatctttgcttatgttgattaatagattcatttttagcg

SEQ ID NO: 25848 - protein, 134 aa, Triticum aestivum
MASSLATAPAAVREMQSDLESQANALSKIQKDISKNHEVRKQFTIQVGENELVLKELELLNEGANVYKLIGPVLVKQDNAEAKANIKKRIEYITAELERMDRALKDLEEKQNSKKESIIKLQQKMQAVQAKAQA

SEQ ID NO: 25849 - protein, 120 aa, Triticum aestivum
MQSDLESQANALSKIQKDISKNHEVRKQFTIQVGENELVLKELELLNEGANVYKLIGPVLVKQDNAEAKANIKKRIEYITAELERMDRALKDLEEKQNSKKESIIKLQQKMQAVQAKAQA

SEQ ID NO: 25850 - protein, 82 aa, Triticum aestivum
PDYFSRRPPPLPPASARASPSPTPTDRDLVLNHRPRLLLRLLSPVGDPPGATFVFLGSADATESPNPETEKTTPHLHLHSHA

SEQ ID NO: 25851 - DNA, 859 bp, Triticum aestivum
aatagaaaatcaacgtcgacctgggccggcttgactcgttcgccccggcgccagataaggttaacgacctgccctcgcccttcgacggcgcggacaggcacatccaggccttcaaggcccgcaaactcagcaccgatgacctggtttccctctccggcgcgcacaccttcggcgtggcccactgcggggtcattgcaccccggggcaccccgtccatggatccccagctcgccgagaagctacagaagacgtgcaccaaacccacggcaacaaccacgcaagacctcgacgtcctcacgccgcacgtcttcgacaacaagtactacctgggcctgacccagaagaaggggatgttcctgtccgaccagtcgctcatcgaccacccgctcaccaagaacctcgccctcaccttctccaaaaaccagacagccttcttcatcgagttcgccaagtcgatgaccaagatgaccgagatgggtgtgatcaccagcaagctgcagggcgaggtccgggccgactgcaccgtcgcagggaagcctccccgcatcgaggccgccaccgccgccgaccaggggttcacggccgacatgtaagacatgttccatgcaacgtagcgttcctcagctaaccgtgtccgtgcgtatacgcacgcgcggtggctttatgtttgtgtgtgcgtcttgtgcttgtgctgcctagctagtactactcctagttagttaataatgagcggtcggttcacttgcttcctagcattagcataggattgatcgaggttcctagtattgggacacccttgtaaggtcttcgtcatgtctttttcagatttccaacatccgtaatgttgtatttacatttc

SEQ ID NO: 25852 - protein, 125 aa, Triticum aestivum
MDPQLAEKLQKTCTKPTATTTQDLDVLTPHVFDNKYYLGLTQKKGMFLSDQSLIDHPLTKNLALTFSKNQTAFFIEFAKSMTKMTEMGVITSKLQGEVRADCTVAGKPPRIEAATAADQGFTADM

SEQ ID NO: 25853 - protein, 111 aa, Triticum aestivum
NRKSTSTWAGLTRSPRRQIRLTTCPRPSTARTGTSRPSRPANSAPMTWFPSPARTPSAWPTAGSLHPGAPRPWIPSSPRSYRRRAPNPRQQPRKTSTSSRRTSSTTSTTWA

SEQ ID NO: 25854 - protein, 80 aa, Triticum aestivum
MFLSDQSLIDHPLTKNLALTFSKNQTAFFIEFAKSMTKMTEMGVITSKLQGEVRADCTVAGKPPRIEAATAADQGFTADM

SEQ ID NO: 25855 - DNA, 738 bp, Triticum aestivum
ccattacctagaacatcctaatcgaaaacaagttagagaatccttcgtccactcgcagtcgcacgcacgcacgcacgcaccaacttcccacgccacagcacacaggcggcggcggcggcggcggtgatgggaggcgagggcgccagttccagcggcggggggttccgcgcccggatagaccactacctgtacagcggcgagaagaagcacgtagtcgcaggcatcgccatcttcgccgccattttcggggtgccctggtacttcatgacccgaggggcaaagcatgactctcatcaagattacatggagcgagctaacaaggcaaggtcggataggctttcttctggacagccatcatcactgaaagaataaagcagctgtctcgaccggccccagatttgcccaacccctgcatatgcagtttgcattatgaatctgaaggcttaatcttgtgtcaaataaacagaccatctctgttcctgaatctcagagtagtgctattgtaatacagtaatagaaattttgttcgccggaatctcatagtagtgtctttgctattctaggaggagatgatggacaaatcatggtatttttgtcccacgaattgcagtccggagccaaaaaaaaaaaaaaaaaaaaaaaaaaaaaaaaaaaaaaaaaaaaaaaaaaaaaaaaaaaaaaattaaaaaaaaaaaaaaaaaagtttatcaataccgccaacctcaagggggggcccgg

SEQ ID NO: 25856 - protein, 81 aa, Triticum aestivum
MGGEGASSSGGGFRARIDHYLYSGEKKHVVAGIAIFAAIFGVPWYFMTRGAKHDSHQDYMERANKARSDRLSSGQPSSLKE

SEQ ID NO: 25857 - protein, 51 aa, Triticum aestivum
MVFLSHELQSGAKKKKKKKKKKKKKKKKKKKKKLKKKKKKFINTANLKGGP

SEQ ID NO: 25858 - protein, 41 aa, Triticum aestivum
HYLEHPNRKQVRESFVHSQSHARTHAPTSHATAHRRRRRRR

SEQ ID NO: 25859 - DNA, 1415 bp, Triticum aestivum
gtcgaacataattgtcgaacgagctcaagctcagctcagttcagcttcacaggtagtacgtggctgcagtgtagagacggaagagctcacccgtcactcgctagctagctatctcctttcagtcgagtcaccggctcaccgccatggcgctcagcctccgggccgccgcgtccctcgcctctccgccgtcgggcccacgccccggccgacgcgccgcctcggtggtccgcgccacggcgtcccccgcggcgctcggcaaccggaaccggcggcgagagcagaacgtctccggcgagttcttcgtcgatcaccggtgcatcgactgcgccacctgccggtggatggcgccggaggtgttcaagagggtggacggcatgtccgccgtggcggcgcagcccagctctgaggaggagaggaccaaggcactgcaggctttgctctcttgcccaacagcctcgatccacaccgacaagcccgcgaaggacattctccaagtgcagaacacgttcccgctccccatcgacgacgatcttcctggtgtttacctttgcggttaccattccgagtcctcatatggagcaacatcttatctcatagttcacccagaaggaaacataatggttgacagtccaaggtatacgccgaaactggtggacaagattgagaagctcggtggagcgcgctacatgtttttgacccacattgatgatgtagcggatcatcggaagtgggccgagcggttgaaatgcgagagaatcatccattcaggagatgtagtggacattactgctgatgtcgagtggaaacttactggaagtggtccctggaacattggaaatgattttgaacttatccataccccaggccatactgaaggctcggtctgcttgttgtacaaaccactaaaggcgctgttcactggcgaccatgtcgcaaaatcagaatattcagacgaactgaatctctttcggatgtacagcaagcaatcagtgaatttgcaactggatagtatgagaaagttactggacctagattttgagtggtatttacctgggcatggctatcgaatccgatatgaagatgtacaggccaaaaatgcagctattgagtctctcctagctaactacaaaaactaaggcgcatgtgatcacatgcttcgcaaataaggattccagaataaagggaccaggttgatatgaagtccctgtgtccaacgaaataatgatcgatgcttttacattttgtccaaacatcatgtattgtggtacttcatatatctctcccaatgtacaaggcatgggtatccttatatcaaattagaaatattattggatcatcctgcaaaagaaactatatgttatttcagcagattgtacaatcattcagtcagtttagtagatcaagcatatttagcg

SEQ ID NO: 25860 - protein, 330 aa, Triticum aestivum
MALSLRAAASLASPPSGPRPGRRAASVVRATASPAALGNRNRRREQNVSGEFFVDHRCIDCATCRWMAPEVFKRVDGMSAVAAQPSSEEERTKALQALLSCPTASIHTDKPAKDILQVQNTFPLPIDDDLPGVYLCGYHSESSYGATSYLIVHPEGNIMVDSPRYTPKLVDKIEKLGGARYMFLTHIDDVADHRKWAERLKCERIIHSGDVVDITADVEWKLTGSGPWNIGNDFELIHTPGHTEGSVCLLYKPLKALFTGDHVAKSEYSDELNLFRMYSKQSVNLQLDSMRKLLDLDFEWYLPGHGYRIRYEDVQAKNAAIESLLANYKN

SEQ ID NO: 25861 - protein, 264 aa, Triticum aestivum
MAPEVFKRVDGMSAVAAQPSSEEERTKALQALLSCPTASIHTDKPAKDILQVQNTFPLPIDDDLPGVYLCGYHSESSYGATSYLIVHPEGNIMVDSPRYTPKLVDKIEKLGGARYMFLTHIDDVADHRKWAERLKCERIIHSGDVVDITADVEWKLTGSGPWNIGNDFELIHTPGHTEGSVCLLYKPLKALFTGDHVAKSEYSDELNLFRMYSKQSVNLQLDSMRKLLDLDFEWYLPGHGYRIRYEDVQAKNAAIESLLANYKN

SEQ ID NO: 25862 - protein, 253 aa, Triticum aestivum
MSAVAAQPSSEEERTKALQALLSCPTASIHTDKPAKDILQVQNTFPLPIDDDLPGVYLCGYHSESSYGATSYLIVHPEGNIMVDSPRYTPKLVDKIEKLGGARYMFLTHIDDVADHRKWAERLKCERIIHSGDVVDITADVEWKLTGSGPWNIGNDFELIHTPGHTEGSVCLLYKPLKALFTGDHVAKSEYSDELNLFRMYSKQSVNLQLDSMRKLLDLDFEWYLPGHGYRIRYEDVQAKNAAIESLLANYKN

SEQ ID NO: 25863 - DNA, 1533 bp, Triticum aestivum
aaaaaacctagatgccacaccctatcccagccgcagccgccgccgccgtcgccgccgccgccgctgcaaccgccgccttcgattccgtgaaattggaggggaagacaattggatctgtctgccgcaggaggagtggggagaaatagaatgaaggcgcgacagttcctgaatgttgtgatggagaggtatggcactggcggtgccggtggcagcttgtatacggtcagtcgcatcgacgccaaggaacacctcttctaccgatccacggccgaagcacaggcagcagaaaaatcaaggttcgatatggagtgcccatcatcagccgttgtgccaccatggatggagaccatctcgcggatgcctccgtccaagctcagattcgagcggtccacctcagacaacaaaagactggatttcctgcccttccatgaacgaggcagcggtgctgcgagcaagatcctctgcgtggacgccgctggccacaccgccctatacgacatggacgccggttcggtccagccaattccatgcctcaacagtcccaaggggagcaggcccatcagcttctccaccaccaatcccgaagcctctgaccgtgaacgtgctgatgccttctacgttatgggaaggttcccttccagctatgacccctacaacttcgaggtactcatgtacagtaacccttctaatggcaggacgatgaaaggctggaattggctcaagctaccaacaccacctgcctatgctgacaattgcattgtcaattcccatgcgctgcttgaaattgaaggtgactcaattcttgttgtctcctccggagaagaaagccttggcacctactgcttcaacacagccagtcgcaagtggtttaaggctggctcctggacactgccattcctcagtcgtgctgtgcatgtaccagagctggacaacctcttatttggcattgccagcgatgcacccaaccacttttgtgcaatgggtatctcccgtcttctctcgaagaggtgtccacctttagtgtacagttggccacaccttgatctgcccgaggactggataatgcaagattgcagctttgtgtacttgggaaatgggaggttttgcatcaccaaagtctttgagtttggtctggacgaagacactggcaacacgactgatatgggtgctgtgatgtctggcgtggaggtagtgcatcacaagaagtctggactcatcatggtcaaccataggtccaaattctacaggttcttcagggatgacatccaatgtgtcttgtaaggtaacttggtgaaaggggagcaacacgggtttttccaggaggattggaattgtctgtcttcccctttccatcagtatctagtagctacaacttctgctatgttagtttttgggcagtagtgctcatttccttcagtatgttgtatcactatatttgctgccgttgctgtatacatagcttcttaggtgcttttattttattattagatggactagtatcttgatgaaattatgatatggtttataactggt

SEQ ID NO: 25864 - protein, 377 aa, Triticum aestivum
MKARQFLNVVMERYGTGGAGGSLYTVSRIDAKEHLFYRSTAEAQAAEKSRFDMECPSSAVVPPWMETISRMPPSKLRFERSTSDNKRLDFLPFHERGSGAASKILCVDAAGHTALYDMDAGSVQPIPCLNSPKGSRPISFSTTNPEASDRERADAFYVMGRFPSSYDPYNFEVLMYSNPSNGRTMKGWNWLKLPTPPAYADNCIVNSHALLEIEGDSILVVSSGEESLGTYCFNTASRKWFKAGSWTLPFLSRAVHVPELDNLLFGIASDAPNHFCAMGISRLLSKRCPPLVYSWPHLDLPEDWIMQDCSFVYLGNGRFCITKVFEFGLDEDTGNTTDMGAVMSGVEVVHHKKSGLIMVNHRSKFYRFFRDDIQCVL

SEQ ID NO: 25865 - protein, 367 aa, Triticum aestivum
MERYGTGGAGGSLYTVSRIDAKEHLFYRSTAEAQAAEKSRFDMECPSSAVVPPWMETISRMPPSKLRFERSTSDNKRLDFLPFHERGSGAASKILCVDAAGHTALYDMDAGSVQPIPCLNSPKGSRPISFSTTNPEASDRERADAFYVMGRFPSSYDPYNFEVLMYSNPSNGRTMKGWNWLKLPTPPAYADNCIVNSHALLEIEGDSILVVSSGEESLGTYCFNTASRKWFKAGSWTLPFLSRAVHVPELDNLLFGIASDAPNHFCAMGISRLLSKRCPPLVYSWPHLDLPEDWIMQDCSFVYLGNGRFCITKVFEFGLDEDTGNTTDMGAVMSGVEVVHHKKSGLIMVNHRSKFYRFFRDDIQCVL

SEQ ID NO: 25866 - protein, 325 aa, Triticum aestivum
MECPSSAVVPPWMETISRMPPSKLRFERSTSDNKRLDFLPFHERGSGAASKILCVDAAGHTALYDMDAGSVQPIPCLNSPKGSRPISFSTTNPEASDRERADAFYVMGRFPSSYDPYNFEVLMYSNPSNGRTMKGWNWLKLPTPPAYADNCIVNSHALLEIEGDSILVVSSGEESLGTYCFNTASRKWFKAGSWTLPFLSRAVHVPELDNLLFGIASDAPNHFCAMGISRLLSKRCPPLVYSWPHLDLPEDWIMQDCSFVYLGNGRFCITKVFEFGLDEDTGNTTDMGAVMSGVEVVHHKKSGLIMVNHRSKFYRFFRDDIQCVL

SEQ ID NO: 25867 - DNA, 1080 bp, Triticum aestivum
  misc_feature (544)..(544): n is a, c, g, or t
taatcgaaaacattttcatcccgcgggacgcgccatgaagaccagctcctcgtcgcaggcgctcttcccggccgcctcgtcgctgtgcaccccgtacctcctcctcgtgcccctcggcctcctcgccgcggtggtcgtcatccccagcctcggctcctcccacgtccgctccgacggcctcggcgtgctctgccccagcctcggcaccgatggctactccgtcgcgtcgggagccgagaaggtcgtctccacggcggcggcggcggcgcagccggagttccggctgctcggcggggtgctgaccacgccgaagcggcgcgagcggcgggacatcgtgcggctggcgtacgcgctgcagccgccggtgccggcgtacgcgcgggtggacgtgcgcttcgtgttctgcggcgtggacgacccggtggaccggatgctggtggcgctggaggccgcgcggcacggcgacgtcctcctgctcaactgcaccgagaacatgaacgacggcaagacccaccagtatttctcctccgtgccgcgggtgttngcgggcgcgccctacgactacgtgatgaagaccgacgacgacacgtacctgcgcgtggccgccatggccgaggagctccggcccaagccccgcgacgacgtctacctcggctacggcttcgccgtcggcgacgaccccatgcagttcatgcacggcatggggtacgtcgtctcgtgggacgtcgcgacctgggtgtccgccaacgaggagatcctccggcacaacgacacccacggccccgagggcctcctcttcggcaagtggctcaacatcgggcgccggggcaagaaccggtacagcctcaggccaaggatgtacgacctcaactgggacatggacaacttccggccggacaccgtcgccgtgcacatgatcaaggacaaccgccggtgggcggctgccttcagatacttcaacgtcaccgccgggatcaggccgtccaacctgtaccacttgccctgatcgatcaaggggtttatattttccatttcttaagtaaactcgccgtgacgtggttgattgtgccacgaaagtgc

SEQ ID NO: 25868 - protein, 334 aa, Triticum aestivum
  misc_feature (181)..(181): Xaa can be any naturally occurring amino acid
NRKHFHPAGRAMKTSSSSQALFPAASSLCTPYLLLVPLGLLAAVVVIPSLGSSHVRSDGLGVLCPSLGTDGYSVASGAEKVVSTAAAAAQPEFRLLGGVLTTPKRRERRDIVRLAYALQPPVPAYARVDVRFVFCGVDDPVDRMLVALEAARHGDVLLLNCTENMNDGKTHQYFSSVPRVXAGAPYDYVMKTDDDTYLRVAAMAEELRPKPRDDVYLGYGFAVGDDPMQFMHGMGYVVSWDVATWVSANEEILRHNDTHGPEGLLFGKWLNIGRRGKNRYSLRPRMYDLNWDMDNFRPDTVAVHMIKDNRRWAAAFRYFNVTAGIRPSNLYHLP

SEQ ID NO: 25869 - protein, 323 aa, Triticum aestivum
  misc_feature (170)..(170): Xaa can be any naturally occurring amino acid
MKTSSSSQALFPAASSLCTPYLLLVPLGLLAAVVVIPSLGSSHVRSDGLGVLCPSLGTDGYSVASGAEKVVSTAAAAAQPEFRLLGGVLTTPKRRERRDIVRLAYALQPPVPAYARVDVRFVFCGVDDPVDRMLVALEAARHGDVLLLNCTENMNDGKTHQYFSSVPRVXAGAPYDYVMKTDDDTYLRVAAMAEELRPKPRDDVYLGYGFAVGDDPMQFMHGMGYVVSWDVATWVSANEEILRHNDTHGPEGLLFGKWLNIGRRGKNRYSLRPRMYDLNWDMDNFRPDTVAVHMIKDNRRWAAAFRYFNVTAGIRPSNLYHLP

SEQ ID NO: 25870 - protein, 191 aa, Triticum aestivum
  misc_feature (38)..(38): Xaa can be any naturally occurring amino acid
MLVALEAARHGDVLLLNCTENMNDGKTHQYFSSVPRVXAGAPYDYVMKTDDDTYLRVAAMAEELRPKPRDDVYLGYGFAVGDDPMQFMHGMGYVVSWDVATWVSANEEILRHNDTHGPEGLLFGKWLNIGRRGKNRYSLRPRMYDLNWDMDNFRPDTVAVHMIKDNRRWAAAFRYFNVTAGIRPSNLYHLP

SEQ ID NO: 25871 - DNA, 966 bp, Triticum aestivum
atggatggctgattctccaccggtacatcccgtcaccggtaaaaaaacttattcggcagctcccagccgtgcgccgtctcaactctcaagcgccgctcgccagcgaaacccgatccaagacaacaatacccactcccaaccttctgtggcgatggcagcactggcgaggagggcgggaggatcccctgcggcggcgctgtgggccgcggccaggggattcgcgtcggtcggctccgacatcgtctccgcggcgcccggcgtgtcgctgcagaaggcgcggtcctgggacgagggggtcgccaccaagttctccaccacccctctcaaggacatcttccatgggaagaaagtcgtcatcttcgggttgccgggtgcatacacaggagtatgttcgcagtcccacgttcctagttacaagaacaacattgataagttgaaagcaaaagggatcgactctgttatctgtgtagctgtaaatgatccctatgtgctgaatggatgggcagaaaaattacaggcaaaagatgcaattgagttttatggtgaccttgacgggagcttccacaaaagcttggatttggaaatagatctctctgctgctttgcttggtcgacgctcccacaggtggtcggcctttgtcgatgatgggaagatcaaggcattcaacgttgagaaagccccttctgacttcaaggtttctggtgctgaggtgatcttggatcaaatctgagctgatcggtaatcggtgctctgttttgcttttgtgatgcaaataagtgacagctcgagaatctgtgtgaagatgttgctgtctgtcgtgctagttccaggacagtcattttgctgctgcaaatctttatttcttttgttccagaacagtcatcgaattagtcaccggttcgtgtatgcgacagtttctgttatttggcgtttgatgaagagctgtgctcgcgtgcaggtaatccg

SEQ ID NO: 25872 - protein, 242 aa, Triticum aestivum
WMADSPPVHPVTGKKTYSAAPSRAPSQLSSAARQRNPIQDNNTHSQPSVAMAALARRAGGSPAAALWAAARGFASVGSDIVSAAPGVSLQKARSWDEGVATKFSTTPLKDIFHGKKVVIFGLPGAYTGVCSQSHVPSYKNNIDKLKAKGIDSVICVAVNDPYVLNGWAEKLQAKDAIEFYGDLDGSFHKSLDLEIDLSAALLGRRSHRWSAFVDDGKIKAFNVEKAPSDFKVSGAEVILDQI

SEQ ID NO: 25873 - protein, 241 aa, Triticum aestivum
MADSPPVHPVTGKKTYSAAPSRAPSQLSSAARQRNPIQDNNTHSQPSVAMAALARRAGGSPAAALWAAARGFASVGSDIVSAAPGVSLQKARSWDEGVATKFSTTPLKDIFHGKKVVIFGLPGAYTGVCSQSHVPSYKNNIDKLKAKGIDSVICVAVNDPYVLNGWAEKLQAKDAIEFYGDLDGSFHKSLDLEIDLSAALLGRRSHRWSAFVDDGKIKAFNVEKAPSDFKVSGAEVILDQI

SEQ ID NO: 25874 - protein, 192 aa, Triticum aestivum
MAALARRAGGSPAAALWAAARGFASVGSDIVSAAPGVSLQKARSWDEGVATKFSTTPLKDIFHGKKVVIFGLPGAYTGVCSQSHVPSYKNNIDKLKAKGIDSVICVAVNDPYVLNGWAEKLQAKDAIEFYGDLDGSFHKSLDLEIDLSAALLGRRSHRWSAFVDDGKIKAFNVEKAPSDFKVSGAEVILDQI

SEQ ID NO: 25875 - DNA, 805 bp, Triticum aestivum
acaaaaacccatccatccactgacccacggcaaaaccaaaatccgctgtcggaagcctccactccactccactccactctctagcagctcctcaacattcaacaagccacgagcagagccaccgcgtccagcgagcgcgagtgaggcgccggcgttcgatcgacgagatgagagtggtggtcctggacgggtcgacggtgcggtccttcgtggccgacgaggcggccttcgcgcgcagcgtggacgcgcgcttcgccgcgctcgacgccaacggcgacggcgtgctctcccgcgccgagctccgccgcgcgctcgagtccttccgcctcctcgacggcgcgggcttcggctccgccgagccggccccgctcccgggcgaggtcgcggccctctacgacgccgtgttcgagcagttcgacgctgaccacagcggcgccgtggaccgcgccgagttccgcggcgagatgcgccgcatcatgctcgccgtcgccgacggcctcggctgccagccgctccaggtcgccgtggacgacaagggcggcagcttcctgctcgaggccgcggagcacgaggccgccatgatcgccgccagggtccaggaagaacgcgacaagaccgcggccgaggaggcagccgacggcaagtgatgacggcgccgacggctccacggtgtgtacgtgtcaaggtggtgacgtggagtggcgcgtggcgtgtacgtgtgagacgagtagtgtgccgcgtgcgtttgtcctgactccttagtgtaatgtaccgagtatattatgaaaaaaatcgtttcagattc

SEQ ID NO: 25876 - protein, 159 aa, Triticum aestivum
MRVVVLDGSTVRSFVADEAAFARSVDARFAALDANGDGVLSRAELRRALESFRLLDGAGFGSAEPAPLPGEVAALYDAVFEQFDADHSGAVDRAEFRGEMRRIMLAVADGLGCQPLQVAVDDKGGSFLLEAAEHEAAMIAARVQEERDKTAAEEAADGK

SEQ ID NO: 25877 - protein, 140 aa, Triticum aestivum
QKPIHPLTHGKTKIRCRKPPLHSTPLSSSSSTFNKPRAEPPRPASASEAPAFDRRDESGGPGRVDGAVLRGRRGGLRAQRGRALRRARRQRRRRALPRRAPPRARVLPPPRRRGLRLRRAGPAPGRGRGPLRRRVRAVRR

SEQ ID NO: 25878 - DNA, 963 bp, Triticum aestivum
  misc_feature (958)..(958): n is a, c, g, or t
atttttcgttttcccctccacctcggcgcgccctccccccagatccagcccctagggtttgcccccgccgccgccgccatggatcccgacggggacggctccttccaccggaaggaggccatctccgccgtgcaggacgtcgaccagtactacggcgacgacgacgactacgacgacctctacaacgacgtcaacgtcggggacggcttcctccacgcctccgagcccctcgacgcccacctcgcagccatggcggagcagaccgagaagtctttcctcaagcagccaaaggttttcctcagcacgaaaaaggccgacaaggccaagaggccaggcaaggctggcaaccgcttctggaagagtgttggccttggtttcaagaccccaagggaagcgatcgatggtacctacattgacaagaagtgcccattcactggaactgttgccatcaggggcagaatcatagctggaacctgccacagtgccaagatgaacaggaccatcattgttcgcaggaactaccttcattttgtgaagaagtatcagaggtatgagaagaggcactccaacatcccagctcacatctcctcctgcttccgagtcaaggaaggcgaccatgtcatcattggccagtgcagacccctgtcgaaaaccgtgagattcaatgtcctgaaggttgttccagctggaaccaccggaggcgggaagaaggctttcatcgctgcttaagcccaggctctgattcatgagtagttcatagtcagacgttttaagcacttaaacctaccaggctgctgctgttttgcgatttgattcctgtgttttctgtcaaaccgaagaatgtcgtgatctgaacatgtcttgtggaatctatctatcattaatagtttcgcttaaaattgtactcagttttttctttggtgctgaatttgttttgcccagatgcgatatgatcttnaccgg

SEQ ID NO: 25879 - protein, 242 aa, Triticum aestivum
IFRFPLHLGAPSPQIQPLGFAPAAAAMDPDGDGSFHRKEAISAVQDVDQYYGDDDDYDDLYNDVNVGDGFLHASEPLDAHLAAMAEQTEKSFLKQPKVFLSTKKADKAKRPGKAGNRFWKSVGLGFKTPREAIDGTYIDKKCPFTGTVAIRGRIIAGTCHSAKMNRTIIVRRNYLHFVKKYQRYEKRHSNIPAHISSCFRVKEGDHVIIGQCRPLSKTVRFNVLKVVPAGTTGGGKKAFIAA

SEQ ID NO: 25880 - protein, 216 aa, Triticum aestivum
MDPDGDGSFHRKEAISAVQDVDQYYGDDDDYDDLYNDVNVGDGFLHASEPLDAHLAAMAEQTEKSFLKQPKVFLSTKKADKAKRPGKAGNRFWKSVGLGFKTPREAIDGTYIDKKCPFTGTVAIRGRIIAGTCHSAKMNRTIIVRRNYLHFVKKYQRYEKRHSNIPAHISSCFRVKEGDHVIIGQCRPLSKTVRFNVLKVVPAGTTGGGKKAFIAA

SEQ ID NO: 25881 - protein, 159 aa, Triticum aestivum
MAEQTEKSFLKQPKVFLSTKKADKAKRPGKAGNRFWKSVGLGFKTPREAIDGTYIDKKCPFTGTVAIRGRIIAGTCHSAKMNRTIIVRRNYLHFVKKYQRYEKRHSNIPAHISSCFRVKEGDHVIIGQCRPLSKTVRFNVLKVVPAGTTGGGKKAFIAA

SEQ ID NO: 25882 - DNA, 531 bp, Triticum aestivum
aagttggatctcgatcccgcaaaagtcaatgttaatggaggtgcaattgctcttggacatccattgggtgccacaggtgcgcgctgtgtcagcactcttctcaacgagatgaagcgccgaggcaaggactgccggtttggagtgatttctatgtgcataggttccgggatgggtgcggccgccgttttcgagcgtggagatgcggtggatgagctgacgaatgcccgaggggggccctcgcttaactggctctccaaagacaccgtgtaactatttctcatgcaaattgtgtagctgccaccattgttctcaattatcaaagcgtgctggggttagggaataatttgatcctgtatttgtaattcttcttgggatatgacaccgtgtaactatttctcatgcaaattgtgtagctaccaccattgttctcaattatcaaagcgtgctggggctagggaataatttgatcctgtatttgtaattcttcttgggatatgaaaaatcttatcaacgtttgagcttatttgttcc

SEQ ID NO: 25883 - protein, 89 aa, Triticum aestivum
KLDLDPAKVNVNGGAIALGHPLGATGARCVSTLLNEMKRRGKDCRFGVISMCIGSGMGAAAVFERGDAVDELTNARGGPSLNWLSKDTV

SEQ ID NO: 25884 - protein, 53 aa, Triticum aestivum
MKRRGKDCRFGVISMCIGSGMGAAAVFERGDAVDELTNARGGPSLNWLSKDTV

SEQ ID NO: 25885 - DNA, 656 bp, Triticum aestivum
cctaatcgaaaaaatcaaggaaaaaacttttaaaaaaagagcacaaaatcgttcctcattctccatctactccaccaaacctcaatccccatctctctccccctaggctctccttcgccgtcggtcgggctccctctccgacacgccgccgtcgatacatccacccgaggcatggcgacggcgttcaaggcgttcgtgaacagccccgtcggccccaagaccacccacttctggggccccgtcgctaactggggcttcgtcctcgcgggtttggttgacttgaacaagcctcctgagatgatatctggcaatatgacagccgccatgtgtgtgtattctgggctctttatgaggttcgcgtggatggtacagccccggaactacttgctcctggcatgccatgcctccaacgaaaccgttcagctctatcatttatctcgctgtgctagggctcaggggtatctggattccaagaaagagccggaggcccaacagtaaagggtgtggtgtttctgaagtcggaggagccttgactccgcagccagcctttcaataagtaaaatttgtttctgaagctttgcaatgcccttcatgagaaaaaacctatacagtggaaatttctatttctatgatactcatgcctgcaatgtggcctt

SEQ ID NO: 25886 - protein, 108 aa, Triticum aestivum
MATAFKAFVNSPVGPKTTHFWGPVANWGFVLAGLVDLNKPPEMISGNMTAAMCVYSGLFMRFAWMVQPRNYLLLACHASNETVQLYHLSRCARAQGYLDSKKEPEAQQ

SEQ ID NO: 25887 - protein, 66 aa, Triticum aestivum
MISGNMTAAMCVYSGLFMRFAWMVQPRNYLLLACHASNETVQLYHLSRCARAQGYLDSKKEPEAQQ

SEQ ID NO: 25888 - protein, 61 aa, Triticum aestivum
MTAAMCVYSGLFMRFAWMVQPRNYLLLACHASNETVQLYHLSRCARAQGYLDSKKEPEAQQ

SEQ ID NO: 25889 - DNA, 530 bp, Triticum aestivum
aaaaaatcaacctcccagcacgaaccaacccaatccctgctacatagtcagtcagtctttgcaaccatgaggccacaggtgctgctcgccgcgctggccgtcgtcctcctcctcgcagcagctctgcccttcgcccacagccaaggtgcgaccccaagcgcgtcgctgtgctgcaacaactgcggcacctgcactaggtccatcccgcccaggtgtacgtgcatggatgcgtcgcccagcggctgcaacccgtcctgcaagacctgcgacaagaccaccgtcgccggccgtgacagcttccagtgcaaggaccgcgtcgcaaacttctgccagcgcagctgcactaagcccgcgtgactcgacctgttgtcgccagaataatgccgattagcttgttcttttcctttgtttttgcagtatttaagagttccctctgcatcttgctctggtagatgcagagaagaaatgagagttggatgcatgctcgttgttccttcttgtgtctgaaataaagagcatattctttgccc

SEQ ID NO: 25890 - protein, 118 aa, Triticum aestivum
KKSTSQHEPTQSLLHSQSVFATMRPQVLLAALAVVLLLAAALPFAHSQGATPSASLCCNNCGTCTRSIPPRCTCMDASPSGCNPSCKTCDKTTVAGRDSFQCKDRVANFCQRSCTKPA

SEQ ID NO: 25891 - protein, 96 aa, Triticum aestivum
MRPQVLLAALAVVLLLAAALPFAHSQGATPSASLCCNNCGTCTRSIPPRCTCMDASPSGCNPSCKTCDKTTVAGRDSFQCKDRVANFCQRSCTKPA

SEQ ID NO: 25892 - DNA, 1093 bp, Triticum aestivum
aaggctcttcccaaaccctccccgaccgccgccccccgttcgcctccgccgccgcctagccaccacgcgccaggagaaccccgcgccgccggccatggcggaggaggagggcacgcagcagctgccgttcgtgcgggagacggtcctcaagaagaggaaggacaacgaggagtgggccaccaagaaccgggagcgcaaggcggccaagaggcagcgccgctgccacgacgccaagggcgccatcaagcgccccgaggacttcgtcaaggagttccgcaacaaggagctcgacttcctgcggatgcgcacgcgcctcaaggtccggaacctgcgccccgccgaggccatcgacgccaagctgctcttcgccgtccgcatcccaggcaccgccgacttgcacccgcaaatcaggaagatcttggccaggctgcggctcacgcaggtcctcaccggcgtgttcctcaaggccaccgaggcaaacctcaagaggcttgcagctgtcggaccgttcgtcacctatgggttccccaatttgaagaatgtgaaggagcttatttacaagaagggtcgcggttatttcgacaaggagcctttcccccttaccagcaatgatctaatcgagaaggcacttggagaacacggtgtcatatgcttggaagacgtggtgcacgaaatctccacggtcgggccacacttcagagaaacggcgagctttctcatgcccttcaagctcaagtgtccggagaggaggctgcggatgaagaagaagcccttcaaggatggtggcgactcgggcaaccgtggggacaagatcaacgagctactcgagaagctgaactgaggcagtctccaacctgcgtccgcaaacaagcgatggatccgttattaccttgtcggttttgtaatagcatagctgaatgtacctttgttttggaaaccctgcctgagtgtttgggatcaaatcacgaaatactgttcttcgcccctcgctctgtccttcatgatcgatctgccgtgctttgcttgcgctgacagacttagtgaggttggatgatattgcaacaaaacatcaggttctcaaaaaaattttttt

SEQ ID NO: 25893 - protein, 279 aa, Triticum aestivum
RLFPNPPRPPPPVRLRRRLATTRQENPAPPAMAEEEGTQQLPFVRETVLKKRKDNEEWATKNRERKAAKRQRRCHDAKGAIKRPEDFVKEFRNKELDFLRMRTRLKVRNLRPAEAIDAKLLFAVRIPGTADLHPQIRKILARLRLTQVLTGVFLKATEANLKRLAAVGPFVTYGFPNLKNVKELIYKKGRGYFDKEPFPLTSNDLIEKALGEHGVICLEDVVHEISTVGPHFRETASFLMPFKLKCPERRLRMKKKPFKDGGDSGNRGDKINELLEKLN

SEQ ID NO: 25894 - protein, 248 aa, Triticum aestivum
MAEEEGTQQLPFVRETVLKKRKDNEEWATKNRERKAAKRQRRCHDAKGAIKRPEDFVKEFRNKELDFLRMRTRLKVRNLRPAEAIDAKLLFAVRIPGTADLHPQIRKILARLRLTQVLTGVFLKATEANLKRLAAVGPFVTYGFPNLKNVKELIYKKGRGYFDKEPFPLTSNDLIEKALGEHGVICLEDVVHEISTVGPHFRETASFLMPFKLKCPERRLRMKKKPFKDGGDSGNRGDKINELLEKLN

SEQ ID NO: 25895 - protein, 203 aa, Triticum aestivum
KALPKPSPTAAPRSPPPPPSHHAPGEPRAAGHGGGGGHAAAAVRAGDGPQEEEGQRGVGHQEPGAQGGQEAAPLPRRQGRHQAPRGLRQGVPQQGARLPADAHAPQGPEPAPRRGHRRQAALRRPHPRHRRLAPANQEDLGQAAAHAGPHRRVPQGHRGKPQEACSCRTVRHLWVPQFEECEGAYLQEGSRLFRQGAFPPYQQ

SEQ ID NO: 25896 - DNA, 824 bp, Triticum aestivum
gcatctgaagacaccaagctcgatcgcgctccgacccgtcagccatggctcggctcgccgccctcctcctcgccttcgccgtcgccgtctccgccgccgcgctggcgcatggccgcgatctcccgacccagatcaagctgaccaagggcggtggcgcggtgggcggcgacagccaggagtgcgtgtacacggtgtacgtgcgcacggggtcgatctggaaggccgggacggacgccaacatcacgctggagctctacacggcgggcaacgccgacggcgtggcgatcgcggacctgccgtcgtggggcgggctcatgtgggggggccactcctacttcgagcgcggcaacctggacatcttcagcgggcgcgggccgtgcatggccggcgcgccctgccgcatgagggtgtcctccgacggcaccggcgcgcaccacggctggtactgcaactacgtggaggtcaccgtcaccggcccgcaccgcggctgcgcccagcagctcttcaccgtcgagcagtggctcgccaccgacgccgcgccctacaagctcgaggccgtcgtcgaccgctgccccgccgatggcaccgccgccgaggagtaagatcgagtaagctgtacgccggcctcttcgtcatcgtgtgtggttggtagcaataagctgcggggccgttcgtgccggccccgtgatccgcgtgcgccgcgccggacgcggagatgtactactagatgagttcgtgctgctggtggtggcgaaataatcgggacctgatttgtactgtgtgccattagtgagagttgtgattagttgcggtggctgttttgt

SEQ ID NO: 25897 - protein, 216 aa, Triticum aestivum
HLKTPSSIALRPVSHGSARRPPPRLRRRRLRRRAGAWPRSPDPDQADQGRWRGGRRQPGVRVHGVRAHGVDLEGRDGRQHHAGALHGGQRRRRGDRGPAVVGRAHVGGPLLLRARQPGHLQRARAVHGRRALPHEGVLRRHRRAPRLVLQLRGGHRHRPAPRLRPAALHRRAVARHRRRALQARGRRRPLPRRWHRRRGVRSSKLYAGLFVIVCGW

SEQ ID NO: 25898 - protein, 185 aa, Triticum aestivum
MARLAALLLAFAVAVSAAALAHGRDLPTQIKLTKGGGAVGGDSQECVYTVYVRTGSIWKAGTDANITLELYTAGNADGVAIADLPSWGGLMWGGHSYFERGNLDIFSGRGPCMAGAPCRMRVSSDGTGAHHGWYCNYVEVTVTGPHRGCAQQLFTVEQWLATDAAPYKLEAVVDRCPADGTAAEE

SEQ ID NO: 25899 - DNA, 722 bp, Triticum aestivum
cggcctacccaccccctgccgctccctgcctagggttttgagtcccgcccccctccgccgcgcaccatgggccccgacgagctccccaaggccgccgccgccggtgccgaggaggccgccccgttctccttcagcatctggccgccgacgcagcggacgcgggacgccgtggtgcggcgcctggtggacacgctggccggcgacaccctcctctgcaagcgctacggcgccgtgccggccgccgacgccgagcccgccgcgcgggccatcgaggccgaggccttcgacgccgccgccgtcaccggcggggccgccgcctccgtcgaggagggcatcgaggcgctgcagctctactccaaggaggtcagccgccgccctcctcgacttcgtcaagtcccgctccgccgccgccaaggccgagccgccggccgaggaggcgctcgccgtcaaggaggagacctcccaggcctgagccccggacgagaaccgttcgtttcgattatgcttcgagataaaattcatttgcatctagagttcgtgtgcggcgttggcctctgcttgggatgagttgcctgtaggttgttcgcgtgcctgtgctgttattgttctttcagtagctgctggttacctttttttttagtgtgttcgtttattacttccgtttgtatctgtgaacaagaattatcttcaccttgtcgtggcaatgatccaagatttgaccg

SEQ ID NO: 25900 - protein, 166 aa, Triticum aestivum
MGPDELPKAAAAGAEEAAPFSFSIWPPTQRTRDAVVRRLVDTLAGDTLLCKRYGAVPAADAEPAARAIEAEAFDAAAVTGGAAASVEEGIEALQLYSKEVSRRPPRLRQVPLRRRQGRAAGRGGARRQGGDLPGLSPGREPFVSIMLRDKIHLHLEFVCGVGLCLG

SEQ ID NO: 25901 - protein, 156 aa, Triticum aestivum
GLPTPCRSLPRVLSPAPLRRAPWAPTSSPRPPPPVPRRPPRSPSASGRRRSGRGTPWCGAWWTRWPATPSSASATAPCRPPTPSPPRGPSRPRPSTPPPSPAGPPPPSRRASRRCSSTPRRSAAALLDFVKSRSAAAKAEPPAEEALAVKEETSQA

SEQ ID NO: 25902 - DNA, 1156 bp, Triticum aestivum
attacacacctgcatctcggaatcatcgcgcagcatcaggcgattcgacctcgccgttgcccaggcgccggagacgacgacgccgacgagatgacggtgttccacttcctcaactgcgcggtcctcaccttcggcccccacgtcgtctactactccgccacccccctgtcagagtatgacacgattggcaccagtgtaaaagcagctgttgtttatcttggagcagcacttgtaaagcttgtttgtttagcaacgttcctcaaagtacctgatgcgaatgatagctttgatccctaccaggaattaatgaaaattctaattgggtttatagatgttgctggcctttattttgctttgacacagttgacccacagaaacatctcccagaaccataagttccaggctgttggtcttggctgggcttttgctgattcagttctgcacaggcttgcacctctctggattggggcacgagggcttgaatttacttgggagtacatattccaaggacttgaagcaaatgccaatcttgtgatgaccctctcccttgctgcattaggatccttgatgtggctgaggaagaacaaacctaggactttaattccaataatttatgcatgtgctctgcttctggcaacaatgccatctatcaccagttacttgcggagatcattggagtggcagactcccaaggtggttggcttcgagctctcctcctccttggttatggctttcatcagctggcagctgttctcggcttgtcagaggccgatgtaatcaacgaaacaaagcactgcgggatttgccggagatttggtgctcccaagatgtctcttgttgtacttgggcaaaattagaatgctgcttagagcctcggcgctaccgtaacatatattttgaggttcagttgcagaacgttttactttatttgtcggccatagtgcagaaacacatgatctgatgagtgctactgctactgtaacaggtgctcttgtaggaatcgagctaaaacgtagcaccttattccctgttgtatcacatattctgctcaatagcattgcatcttctagtctgaagccaagacattcacttatgccgacagattatgagaaaatacactgtcgtttcatctttggtacgatacatggttttggtc

SEQ ID NO: 25903 - protein, 258 aa, Triticum aestivum
ITHLHLGIIAQHQAIRPRRCPGAGDDDADEMTVFHFLNCAVLTFGPHVVYYSATPLSEYDTIGTSVKAAVVYLGAALVKLVCLATFLKVPDANDSFDPYQELMKILIGFIDVAGLYFALTQLTHRNISQNHKFQAVGLGWAFADSVLHRLAPLWIGARGLEFTWEYIFQGLEANANLVMTLSLAALGSLMWLRKNKPRTLIPIIYACALLLATMPSITSYLRRSLEWQTPKVVGFELSSSLVMAFISWQLFSACQRPM

SEQ ID NO: 25904 - protein, 228 aa, Triticum aestivum
MTVFHFLNCAVLTFGPHVVYYSATPLSEYDTIGTSVKAAVVYLGAALVKLVCLATFLKVPDANDSFDPYQELMKILIGFIDVAGLYFALTQLTHRNISQNHKFQAVGLGWAFADSVLHRLAPLWIGARGLEFTWEYIFQGLEANANLVMTLSLAALGSLMWLRKNKPRTLIPIIYACALLLATMPSITSYLRRSLEWQTPKVVGFELSSSLVMAFISWQLFSACQRPM

SEQ ID NO: 25905 - protein, 156 aa, Triticum aestivum
MKILIGFIDVAGLYFALTQLTHRNISQNHKFQAVGLGWAFADSVLHRLAPLWIGARGLEFTWEYIFQGLEANANLVMTLSLAALGSLMWLRKNKPRTLIPIIYACALLLATMPSITSYLRRSLEWQTPKVVGFELSSSLVMAFISWQLFSACQRPM

SEQ ID NO: 25906 - DNA, 536 bp, Triticum aestivum
actgaagatctccccgatcgatcctcgcattcagcttgtcactctctgtctctcttgtagctcggctcagttgtctgttccctgcaagccgcggccgacccatgtcgagcctgatagatatttggacggtggaggtggacaggatccgggccatgaggagaacgggggggccgttcagacccacggcttctcccggcgcacaagaagccggccacgtagctcggccgtccgggtccggcgacggaaatggaacgccaacacctgatggtgccacggcttggccggccagggatcaggctgccggcgctggctcgccgtcgtcgccggtgctcgtccgggaggacgccttcttgtccatcctggtcgattgcttcggtcagtagattgcaccgagcgcttgaacatgtagcaacacgttcctgagctctagctagatgcggtgcaactaaagtgtctttcgtgattgctgtagcctgctgaattatcaagttcggcgccttctgaatgtctctgttacagtacaaatctcttctccg

SEQ ID NO: 25907 - protein, 93 aa, Triticum aestivum
MSSLIDIWTVEVDRIRAMRRTGGPFRPTASPGAQEAGHVARPSGSGDGNGTPTPDGATAWPARDQAAGAGSPSSPVLVREDAFLSILVDCFGQ

SEQ ID NO: 25908 - protein, 87 aa, Triticum aestivum
LKISPIDPRIQLVTLCLSCSSAQLSVPCKPRPTHVEPDRYLDGGGGQDPGHEENGGAVQTHGFSRRTRSRPRSSAVRVRRRKWNANT

SEQ ID NO: 25909 - protein, 76 aa, Triticum aestivum
MRRTGGPFRPTASPGAQEAGHVARPSGSGDGNGTPTPDGATAWPARDQAAGAGSPSSPVLVREDAFLSILVDCFGQ

SEQ ID NO: 25910 - DNA, 721 bp, Triticum aestivum
aaaaaaagagagcccccgctagtactactctctaaccttacccagaccgccgcaggtcttcatcgtcttcctcggaacgccgccgccgaagtgcgcctcgagtaatttcagaggaaggaggagccaagtgttgatcggagatgaatgcccctgaccgctatgagcgcttcgtcgtgcctgagggcacgaagaaggtatcatttgagaaggatacaaagatcatgaatgctgcatctttcactattgaacgtgaggaccacaccatcgggaacatcctccgcatgcagctgcacagggacccaaatgttcactttgctggctataagctccctcacccccttcagtacaagatcattgttaggatccatactgcaagccaatcctccccaactcaggcatatacccaggcaatcaatgatctagacaaggagcttgagaacctgaagcaagcttttgaggatgagaagacccgattcgaggaaaggatgaagcagggctactaggccaagggtgttctggatgctgacgtgaaaccttccttgctagtaattatatctgatgtctgaactgcggtagaaaaaaaattactcaaggattgtcgatgatcctctgaactcgtagaacctcttcatgtgcggattgcgtatgattgcacggttgttaaacatgtgttggcacttgataagcctgctagttgaattgctcgcctttgacaggttcc

SEQ ID NO: 25911 - protein, 120 aa, Triticum aestivum
MNAPDRYERFVVPEGTKKVSFEKDTKIMNAASFTIEREDHTIGNILRMQLHRDPNVHFAGYKLPHPLQYKIIVRIHTASQSSPTQAYTQAINDLDKELENLKQAFEDEKTRFEERMKQGY

SEQ ID NO: 25912 - protein, 93 aa, Triticum aestivum
MNAASFTIEREDHTIGNILRMQLHRDPNVHFAGYKLPHPLQYKIIVRIHTASQSSPTQAYTQAINDLDKELENLKQAFEDEKTRFEERMKQGY

SEQ ID NO: 25913 - protein, 73 aa, Triticum aestivum
MQLHRDPNVHFAGYKLPHPLQYKIIVRIHTASQSSPTQAYTQAINDLDKELENLKQAFEDEKTRFEERMKQGY

SEQ ID NO: 25914 - DNA, 826 bp, Triticum aestivum
acaacacacatccatccatggagggagtggtcaagcaggccatccacgcgggcggggagcagggagtccgcatgggcagcgagcaaggcggatgcgcgggcggcgagccgagcccgcatgtgcagcgagcaaggcggacacgctggcggcgagccgagcccgcatgggcagcgagcaaggcggacgcacggacggcgagccgaggccgcgtgggcagcgagcaaggcagacgcgcgggcgacgagccgagcccgcatgcgcagcgagcaaggcggactcgcggacggcgagccgaggccgcgtgggcagtgaacaaggcagatgcgcgggcggcgagcatggtgcgcggcggcggcccactccaccgtcggcttcttccctcgggcgtgtggcggcctattcccttgggcgcacggtggcctattccctcaagcatggcgcgtgacggccactacagaggagctccttcctccggcgtcggccgcccgacgctgcactagcgcgcggcggtgcccctctctctctctccaggaaccagcgagcacggccgggcggcggtgcagataccagggtcgggcgggcgtgcctgtctggtggcgtggcgagtagggcggggcgagcggcgcggtgagcagggggaggcggcagtattgtccccagcgagaagaaggtggctggcggtgaagtagttgttgctgcgatggaggacttgattgcttttcctttttagtttctaggggtccttgtgtaaattttcaggacagcttgtaacttctctgtaacttcaccgacgatgaatgcaagacagcacggctgtgtcaaattc

SEQ ID NO: 25915 - protein, 165 aa, Triticum aestivum
NTHPSMEGVVKQAIHAGGEQGVRMGSEQGGCAGGEPSPHVQRARRTRWRRAEPAWAASKADARTASRGRVGSEQGRRAGDEPSPHAQRARRTRGRRAEAAWAVNKADARAASMVRGGGPLHRRLLPSGVWRPIPLGARWPIPSSMARDGHYRGAPSSGVGRPTLH

SEQ ID NO: 25916 - protein, 160 aa, Triticum aestivum
MEGVVKQAIHAGGEQGVRMGSEQGGCAGGEPSPHVQRARRTRWRRAEPAWAASKADARTASRGRVGSEQGRRAGDEPSPHAQRARRTRGRRAEAAWAVNKADARAASMVRGGGPLHRRLLPSGVWRPIPLGARWPIPSSMARDGHYRGAPSSGVGRPTLH

SEQ ID NO: 25917 - protein, 147 aa, Triticum aestivum
QHTSIHGGSGQAGHPRGRGAGSPHGQRARRMRGRRAEPACAASKADTLAASRARMGSEQGGRTDGEPRPRGQRARQTRGRRAEPACAASKADSRTASRGRVGSEQGRCAGGEHGARRRPTPPSASSLGRVAAYSLGRTVAYSLKHGA

SEQ ID NO: 25918 - DNA, 633 bp, Triticum aestivum
ctcgaaggcggaagttctcgaagacgtaaacctgccagctccctccccaacccctggaaacgctctggtagtctccgccgcgggagaggcggagatggagaacgcggtggtgctccgggagtggttcgaccgcgtcgacgccgccggcaccggcaacatcacggctcctcagctccagagcgcgctggccgtgggcaacctcgacttccccctctccgtcgtgcagcagatgatcaggatgtacgactttgatcggaacggcaccatgagcttcgaagagttcttggctcttaacaagttccttcagaaggtgcagactgttttctcctccctagaaaggggccgtggatttctcagccttgaggatgtgtatgaggcgttaatcaaactcggtttctctttggattcacctgccttttacactgtctgtgagagcttcgacaagagcaagaaagggatggttcgtttggatgagttcatatcgatctgcatctttgtgcagtcagctcgtaacttgttcagctcatttgacacaaccaagcaagggaaagtgactttggatttcaaccagttcgtctactgcacggcaaactgcaggatatagctgtattacctgaaacctgtacatggaag

SEQ ID NO: 25919 - protein, 200 aa, Triticum aestivum
SKAEVLEDVNLPAPSPTPGNALVVSAAGEAEMENAVVLREWFDRVDAAGTGNITAPQLQSALAVGNLDFPLSVVQQMIRMYDFDRNGTMSFEEFLALNKFLQKVQTVFSSLERGRGFLSLEDVYEALIKLGFSLDSPAFYTVCESFDKSKKGMVRLDEFISICIFVQSARNLFSSFDTTKQGKVTLDFNQFVYCTANCRI

SEQ ID NO: 25920 - protein, 169 aa, Triticum aestivum
MENAVVLREWFDRVDAAGTGNITAPQLQSALAVGNLDFPLSVVQQMIRMYDFDRNGTMSFEEFLALNKFLQKVQTVFSSLERGRGFLSLEDVYEALIKLGFSLDSPAFYTVCESFDKSKKGMVRLDEFISICIFVQSARNLFSSFDTTKQGKVTLDFNQFVYCTANCRI

SEQ ID NO: 25921 - protein, 124 aa, Triticum aestivum
MIRMYDFDRNGTMSFEEFLALNKFLQKVQTVFSSLERGRGFLSLEDVYEALIKLGFSLDSPAFYTVCESFDKSKKGMVRLDEFISICIFVQSARNLFSSFDTTKQGKVTLDFNQFVYCTANCRI

SEQ ID NO: 25922 - DNA, 673 bp, Triticum aestivum
ctccaagaaagaaggagggcaaaaccctagagcttttctcgccgctgctccagcgtccccccccccccccccccgcgaccgcggcatctcgaccaccgccgccgccgccgccgagctcgcgagatctccggcctcctccggtcttccttcccggctgaggcgtcgcgacaatggctggccccaaggacgtgcggagcgagctggagaaggagatgatgttcgggatggccgagaaggagatggagtaccgggtcgagcttttcaaccggcttacacatgtctgttttgagaagtgcattgagaaaaggcataaagaaggtgaactcaatatgggagagaacagttgcattgatcggtgtgtttcaaagtactggcaggtgactaacattgtcggcggaatgctcgggactcagcagaccccgatgtgagcgctctgagaagcagtagtcgcattttctgtagcaggataccgtcgccatgtttctcctccgtttttgttttggaatgttcgccgtttcgctaagtaaaagcatgagtgactgactaattcatatatactgttcaaaagggaacctcccagcgcgtcgtgctttccagtggtgtaccgtgtcactgaatcatgggcagaggcgcatgcctgtaataatttggtacagctcgatagattttgttg

SEQ ID NO: 25923 - protein, 95 aa, Triticum aestivum
SKKEGGQNPRAFLAAAPASPPPPPRDRGISTTAAAAAELARSPASSGLPSRLRRRDNGWPQGRAERAGEGDDVRDGREGDGVPGRAFQPAYTCLF

SEQ ID NO: 25924 - protein, 85 aa, Triticum aestivum; identical to SEQ ID NO: 14006

SEQ ID NO: 25925 - protein, 71 aa, Triticum aestivum; identical to SEQ ID NO: 14007

SEQ ID NO: 25926 - DNA, 703 bp, Triticum aestivum
aaaaaaaacgtgaccccctccccgtccctacccctcttcctcctcggacaagccctccccctcgccgccgccgccgccgccgccgccccgcaggtcgccggctccgcttcgcgccgtaccgatggcggaagaagcagctgccaatgcggcgaagaaggaggaggaggagttcagcaccgggcccctgtccctgctcctcatgagcgtcaagaacaatactcaggtgcttatcaactgccggaacaacaagaagctacttggtcgcgtgagggcatttgaccgtcattgcaacatggttcttgagaatgtccgggagatgtggactgaggttccaaagactggcaaaggcaagaagaaggcccttccagtgaacaaggacaggttcatcagcaagatgttcctccgcggcgactcggtcatcattgttctcaggaacccgaaatgagttagacgacgacgacgacacatcgtacgcccagaagagtctctttgctatgtagtcgctgttaagtttgtgatactgaatactctaaaacagtgagtgcttaagagatgatatcaagccgagatttagcagtattgattaccggtccagtgttgtagtttgggatgttctgagttttgcctgtcctgtatctaaattgcgctcgtagtttgtatttggaccatcaatatatcggcagaacacaatttaaaaagtttg

SEQ ID NO: 25927 - protein, 107 aa, Triticum aestivum
MAEEAAANAAKKEEEEFSTGPLSLLLMSVKNNTQVLINCRNNKKLLGRVRAFDRHCNMVLENVREMWTEVPKTGKGKKKALPVNKDRFISKMFLRGDSVIIVLRNPK

SEQ ID NO: 25928 - protein, 92 aa, Triticum aestivum
KKNVTPSPSLPLFLLGQALPLAAAAAAAAPQVAGSASRRTDGGRSSCQCGEEGGGGVQHRAPVPAPHERQEQYSGAYQLPEQQEATWSREGI

SEQ ID NO: 25929 - protein, 81 aa, Triticum aestivum
MSVKNNTQVLINCRNNKKLLGRVRAFDRHCNMVLENVREMWTEVPKTGKGKKKALPVNKDRFISKMFLRGDSVIIVLRNPK

SEQ ID NO: 25930 - DNA, 703 bp, Triticum aestivum
aactccccagcccagcttggcctagctgccaccacccctcttcctcctcctcctaggctagctccctccggcagactctcccttccatggcggatcggcacggcgagggcggcgtggcctcggcgcggcggccggggcgcacggacctggacgacccgtcgacgacgctgctgcagcgcgtgcaggcgcacctcccgaacgcgacgcaggtggtgggcctgctgaccctgctgctcgccggcgcggcgctgctggtgctggcggggctgacgttcacgggcgcggtggtggcgctcgtcttcctcggcccgctggcgctgctgaccagccccatctgggtgccgttctccttcgcgctcctggtcgtggccgtggcggcgctctccttcgtcgggttcgccgtggccgccctcgccgcggccacctgggcgtaccggtacttcacggggcggcaccccgtgggcgccgaccgcgtggatcgcgcccgcagccgcctcgccgacaccgccagccacgtcaaggactacgcccgccgcgagtacggcggatacctcggcaaccgcaccaaggacgccgccccgggcgcctaggcacgtcgcggctagatcgttattacgatatgttcttctctctttgcgtctctgtactctcccagctgttggtaatctcgtcgtcttcacgtgtatgaactactattagttcc

SEQ ID NO: 25931 - protein, 167 aa, Triticum aestivum
MADRHGEGGVASARRPGRTDLDDPSTTLLQRVQAHLPNATQVVGLLTLLLAGAALLVLAGLTFTGAVVALVFLGPLALLTSPIWVPFSFALLVVAVAALSFVGFAVAALAAATWAYRYFTGRHPVGADRVDRARSRLADTASHVKDYARREYGGYLGNRTKDAAPGA

SEQ ID NO: 25932 - DNA, 516 bp, Triticum aestivum
catcctaatcgaaaaacaacatccagagcaaagagcatccagattccacactccagagcaactgtttcaggctgagttgagtttttttggggttgccaatggcggacatcgcgatgctggtggcggaggagcacgagaagaggatgaagcgaggggcgccccgcacggtcgccggcgccggcgaggaggcgtccgaggggagggtgaacttcggggcggtgaccaaggtgtggggctcctgggccgagtctgccgccgccgccgcgtccggggtcaaggtgcacgtcgcggtgctcgtcaggtccgacctggtggcggccgagcccaggagcccggtcgcccgggcagccttcgacggcttcttctctgcttgatgagtgtgaattagagtaattcggaggagtttaccgtgtggagtacctctcccccttaagccagcgtcatataactccggtttgtacataaccgtgtgctttactggtttgcaacgaggaagaagtgtacttttcgtactgc

SEQ ID NO: 25933 - protein, 128 aa, Triticum aestivum
ILIEKQHPEQRASRFHTPEQLFQAELSFFGVANGGHRDAGGGGAREEDEARGAPHGRRRRRGGVRGEGELRGGDQGVGLLGRVCRRRRVRGQGARRGARQVRPGGGRAQEPGRPGSLRRLLLCLMSVN

SEQ ID NO: 25934 - protein, 91 aa, Triticum aestivum
MADIAMLVAEEHEKRMKRGAPRTVAGAGEEASEGRVNFGAVTKVWGSWAESAAAAASGVKVHVAVLVRSDLVAAEPRSPVARAAFDGFFSA

SEQ ID NO: 25935 - protein, 86 aa, Triticum aestivum
MLVAEEHEKRMKRGAPRTVAGAGEEASEGRVNFGAVTKVWGSWAESAAAAASGVKVHVAVLVRSDLVAAEPRSPVARAAFDGFFSA

SEQ ID NO: 25936 - DNA, 642 bp, Triticum aestivum
tcaggtgaagaagcaggttagctggattgaggtgagaatcggttgagaggagcagagcacaactcaagacggcatgaggttactagttgggattgtgaggcttgttgctctgatgttgatgttggtcgtcggtttgtcagttcaccaggcggtaggagttggtgctatcaggctgcacgacagaaggacgcacggggagcagtgggcggaggagaggatgcagatgaggtcctacatgaccatggactacacccgcgtcaagcggcgcacgcccaagcacaactgattattcagctagctagctagctagaagaaagcctctcatctccgggctctggctccttcagcagcgaccatctgctgaaatgtgacagcaggggaagctctcgattcagctagcggtcgagaagaagctcccagctctactaatccaccttcttacttcttcagtagtatgtgtatgtatgcgtccggcgtgcagatccatctgtgcacgcaaattttgccccctgtctgttgtttcaatcagttagaatttaatacatatctgctgagagcatattgggaagtcttgctttagcttattgttatctactgttcatgatgttccatgacttcttgatagaagatttgagacgttgg

SEQ ID NO: 25937 - protein, 70 aa, Triticum aestivum
MRLLVGIVRLVALMLMLVVGLSVHQAVGVGAIRLHDRRTHGEQWAEERMQMRSYMTMDYTRVKRRTPKHN

SEQ ID NO: 25938 - protein, 57 aa, Triticum aestivum
MLMLVVGLSVHQAVGVGAIRLHDRRTHGEQWAEERMQMRSYMTMDYTRVKRRTPKHN

SEQ ID NO: 25939 - protein, 55 aa, Triticum aestivum
MLVVGLSVHQAVGVGAIRLHDRRTHGEQWAEERMQMRSYMTMDYTRVKRRTPKHN

SEQ ID NO: 25940 - DNA, 482 bp, Triticum aestivum
acaactactgagaaaaagaatcccactatctcatgacatatggaggagagagaagggcgagcaatcccactacggtcatccacaagacattccttcctctctctcttccgtgtgctccagacgacatctagctgctcctccttccctcgccccgctcctcgttctctcctcctgttcgtagcgcagcctgcgaggatttttgttgagcaggagcagcaattgggatcgatccttggatggatgcggcccagtggcaccaggggctaggactcgtgaagcccatggaggagatgatcatggctggaaacccaaatcctaatcctaatcctaatgggaacccgaacccacagccggcgccaccgtctggcgcagaagcccagagggctcccgttcctggcccgccggcaggaggagctggcgcggcggccgggacgggctccaccgagcggaaggcggcgcggccgcagaaggagaaggcaatc

SEQ ID NO: 25941 - protein, 82 aa, Triticum aestivum
MDAAQWHQGLGLVKPMEEMIMAGNPNPNPNPNGNPNPQPAPPSGAEAQRAPVPGPPAGGAGAAAGTGSTERKAARPQKEKAI

SEQ ID NO: 25942 - protein, 75 aa, Triticum aestivum
MEEREGRAIPLRSSTRHSFLSLFRVLQTTSSCSSFPRPAPRSLLLFVAQPARIFVEQEQQLGSILGWMRPSGTRG

SEQ ID NO: 25943 - protein, 67 aa, Triticum aestivum
MEEMIMAGNPNPNPNPNGNPNPQPAPPSGAEAQRAPVPGPPAGGAGAAAGTGSTERKAARPQKEKAI

SEQ ID NO: 25944 - DNA, 847 bp, Triticum aestivum
aatcgaaaacccctgactccgccgagcgagcatcacctttccgccgctgctcgccgcacgccgccccgccgaccgagaccctcaggcccgccccactctagcccgcccgcccgcatggctgccgatcgccggcccggcgtctgagggagcgggcggctgcgctcgggggccagtccggcggcgcgatggagctgtccgggagccccggcacgtggagcggcctctcgctgcggctcggccagttcctcttcgccgccgcgtccgtctgcgtcatgtcctccgcgatcggcttcgccaactacaccgccttctgctacttgattgcatcaatgggactacaagcactctggagcttgggacttgcgtgtcttgatggctatgctttgagaatgaaaaaggaactcaacagtgctgttctcgtgagcttatttgttgttggagattgggtaacgtcgatcctgtcgttcgccgcttcatgctcagcaggaagcgtcgttgttctcttcgacaaggatgcgtacttctgcagcagggacccgcatctcccctgtgggacatttgagcttgcgaccgcgtttgcattcctttcctgggcgcttagtgccacatctgcccttgtgatgttttggctcctcgcttcatcttgattagatatgtaggagctctgtctgtacctagtgttgtttggtcctgtctggttatataccgactgatgtgtcaagcagactacataggaatagactgctaattccagagaatagatgggcaatggtcgcaagttccatggagtcttaaattttagagccatgcttcagtgtttcgggccaaagataacttggttcctggc

SEQ ID NO: 25945 - protein, 153 aa, Triticum aestivum
MELSGSPGTWSGLSLRLGQFLFAAASVCVMSSAIGFANYTAFCYLIASMGLQALWSLGLACLDGYALRMKKELNSAVLVSLFVVGDWVTSILSFAASCSAGSVVVLFDKDAYFCSRDPHLPCGTFELATAFAFLSWALSATSALVMFWLLASS

SEQ ID NO: 25946 - protein, 124 aa, Triticum aestivum
MSSAIGFANYTAFCYLIASMGLQALWSLGLACLDGYALRMKKELNSAVLVSLFVVGDWVTSILSFAASCSAGSVVVLFDKDAYFCSRDPHLPCGTFELATAFAFLSWALSATSALVMFWLLASS

SEQ ID NO: 25947 - protein, 105 aa, Triticum aestivum
MGLQALWSLGLACLDGYALRMKKELNSAVLVSLFVVGDWVTSILSFAASCSAGSVVVLFDKDAYFCSRDPHLPCGTFELATAFAFLSWALSATSALVMFWLLASS

SEQ ID NO: 25948 - DNA, 914 bp, Triticum aestivum
cctaatcgaaaagcatggaactaagttgttgtggagagtttatggtatgtgctggtgatcatggacaaattgttctgcggtctatggattctctcggagttgtttggaggtatgatggatctgggaagacaataacttctttagctgtgactcgcgaggagtgctttttggctggaaccaaggatggcagcttgattgtattttcaatagaaaatccattacttcgcaaaggcggcatacaacgaaacaaagtaaaatcttctgtaggttagtggtgtgtgattaagcagcgctccttgctgcaagttctgaacaaagcttgcagaatgctcaaattgcatagtcaatctgcccttcgggatctttccaggggaggagattgttgtgatgctctcgtcaatgggggtcaccggcagtaaatgtaaaagagaacagtttgttgctcttctgtacatacagctttagattgaggagttaggattctacaggatgcctgagctgatcaaggtccacaagcggataattcttctaactgcaaaatggatacgtggtaactaataccacagtactttctccttttgattttcgagatgagctcggataccgtggtgctggactgctagttgcatagctagtgcatgcgagtgtaacataatctcgtgcggtgttcttacaagttagggcgagcaatttcctctcccaatagaatttatctgtatgtattagatgccagtatcctgtagttacgaaatcatacattgtacatgaagctcatcttctcagtgggaaagtaagcggcgcgtggttgtgccattagtctcttgagacccaaaacattcacagaataacattctcggaaaagcatccttcgatgtttaaactcaagaaagtgggaactggaggggggaaaggag

SEQ ID NO: 25949 - protein, 85 aa, Triticum aestivum
MELSCCGEFMVCAGDHGQIVLRSMDSLGVVWRYDGSGKTITSLAVTREECFLAGTKDGSLIVFSIENPLLRKGGIQRNKVKSSVG

SEQ ID NO: 25950 - protein, 76 aa, Triticum aestivum
MVCAGDHGQIVLRSMDSLGVVWRYDGSGKTITSLAVTREECFLAGTKDGSLIVFSIENPLLRKGGIQRNKVKSSVG

SEQ ID NO: 25951 - protein, 62 aa, Triticum aestivum
MDSLGVVWRYDGSGKTITSLAVTREECFLAGTKDGSLIVFSIENPLLRKGGIQRNKVKSSVG

SEQ ID NO: 25952 - DNA, 524 bp, Triticum aestivum
aacatcataatcgaaaaaacaagtactccctagaagctgccagccatggccgccaagaaccaccgcattgtgccgctgctgctgctgctcctggcactattcacgctggcggccgccgggcatccgtctctgccgtcggacaagcaatgccctccgaccccacccacgccgccgaccccgccaacaccgcccactccgcccggggggcagaccccgccgacaccgccaaccccgcctaccccacccacgccgccgtgccgaaggctgctgacacgctgaagatgctggtgcccgtacgtgtacgttcgtggtgctgcccatcgccatggaggcgctggacgacaacgactgcggttgctgtcctccgccttccactgcctgcccttaactccatcaattagtatcaccttccacctttgttttggcctcttgggcttgtcgcaatttgtatgttttatttcctgcaaaaaatggtttatgtaacgtgtgtttatcaagcttcaaaaaccagatcaattttttcc

SEQ ID NO: 25953 - protein, 132 aa, Triticum aestivum
HHNRKNKYSLEAASHGRQEPPHCAAAAAAPGTIHAGGRRASVSAVGQAMPSDPTHAADPANTAHSARGADPADTANPAYPTHAAVPKAADTLKMLVPVRVRSWCCPSPWRRWTTTTAVAVLRLPLPALNSIN

SEQ ID NO: 25954 - protein, 84 aa, Triticum aestivum
MPSDPTHAADPANTAHSARGADPADTANPAYPTHAAVPKAADTLKMLVPVRVRSWCCPSPWRRWTTTTAVAVLRLPLPALNSIN

SEQ ID NO: 25955 - protein, 77 aa, Triticum aestivum
MAAKNHRIVPLLLLLLALFTLAAAGHPSLPSDKQCPPTPPTPPTPPTPPTPPGGQTPPTPPTPPTPPTPPCRRLLTR

SEQ ID NO: 25956 - DNA, 1156 bp, Triticum aestivum
ttagttgtgttcgggggatgtggaaggcagggccttcttaatgatgtattcatgttggatttggatgcgaaacacccaacttggcgggagatccctggtgttgcaccgccggttccgcgttcatggcacagctcctgcactttggatgggaataagttggtggtttctggtggctgtgcagactcgggtgtactactcagtgatacgtttcttcttgatgtgagcatggacaaacctgtatggagggaagtacctgcatcttggacaccaccttctagattgggccactcaatgtctgtgtatgatggtaggaaaattctgatgttcggcggtcttgctaagagtggtcctctccgactacgatctagtgatgtgttcacaatggacctaagcgaagaagagccctgttggcggtgcctaaccgggagtggaatgcctggggcgggaaatccggctggagctggtccacctcctcgtcttgatcatgttgctgtgagtttgccagggggaagagtgttgatatttggtggatcagtggcaggcctccactcggcgtcacagctgtatctcttggatccgactgaagagaaacctacgtggaggatacttaatgttcccgggcgacctccgcggtttgcgtggggccacagtacctgtgtcgttggaggtacaaaagcgatagtgcttggaggacaaactggagaagagtggatgctcaccgaagtacatgagctctctctggctagtagtaactctgtttgaagtctatataaaggtctttcaaccaaagcttccatgaaaacaaattagacctttcaagtggcgttaagcttgattgtcttcaccaccgggccagagcactgaatggatgtatttgcttggaagtgagatatggttgggtctcgagtaaagattaaacctcttaaactggggttgctcgctttatttagctaatgcgtagtgatatgttttctctcttgttgctgtttgtttggtcttttaccagataagtataattcataagctactctcatggaatgagtatcagttttatgtattctcagactattctgacatccattctgttaggttaaaaaaaggactactctgtacagatgaaccctctcttgtattctgtgaaaccgtgatagttatg

SEQ ID NO: 25957 - protein, 253 aa, Triticum aestivum
LVVFGGCGRQGLLNDVFMLDLDAKHPTWREIPGVAPPVPRSWHSSCTLDGNKLVVSGGCADSGVLLSDTFLLDVSMDKPVWREVPASWTPPSRLGHSMSVYDGRKILMFGGLAKSGPLRLRSSDVFTMDLSEEEPCWRCLTGSGMPGAGNPAGAGPPPRLDHVAVSLPGGRVLIFGGSVAGLHSASQLYLLDPTEEKPTWRILNVPGRPPRFAWGHSTCVVGGTKAIVLGGQTGEEWMLTEVHELSLASSNSV

SEQ ID NO: 25958 - protein, 236 aa, Triticum aestivum
MLDLDAKHPTWREIPGVAPPVPRSWHSSCTLDGNKLVVSGGCADSGVLLSDTFLLDVSMDKPVWREVPASWTPPSRLGHSMSVYDGRKILMFGGLAKSGPLRLRSSDVFTMDLSEEEPCWRCLTGSGMPGAGNPAGAGPPPRLDHVAVSLPGGRVLIFGGSVAGLHSASQLYLLDPTEEKPTWRILNVPGRPPRFAWGHSTCVVGGTKAIVLGGQTGEEWMLTEVHELSLASSNSV

SEQ ID NO: 25959 - protein, 178 aa, Triticum aestivum
MDKPVWREVPASWTPPSRLGHSMSVYDGRKILMFGGLAKSGPLRLRSSDVFTMDLSEEEPCWRCLTGSGMPGAGNPAGAGPPPRLDHVAVSLPGGRVLIFGGSVAGLHSASQLYLLDPTEEKPTWRILNVPGRPPRFAWGHSTCVVGGTKAIVLGGQTGEEWMLTEVHELSLASSNSV

SEQ ID NO: 25960 - DNA, 594 bp, Triticum aestivum
ctcaccaagcaagcacaccagcctcctcagtcctcacagcatcctctcagtccttagcttccttccctcgccgccacccaccaaggaaaggaggatgtcttgctgcggcggcaactgcgggtgcggcgccggctgcaagtgcggcaacggctgcggcgggtgcaagatgttccccgacgtggaggccaccgccggcgccgccgccatggtcatgcccaccgcctcccacaaggggagctccggcgggttcgagacggccggggagaccggcggctgcgactgcaccacctgcaagtgcggcaccgcgtgcggctgctcctgctgcagctgcaactgagccggcgcccaggaggccggccggcagaggcgagcacgaggatgaggaggacaagcaagcaagcaccatcaccaccagttcaccaccacccagcgtatcatcaccagccgccgcatgcgctcgcgcgcgcgcgcgctgaataaaataaaaccaccgttcgtgttccgtagttctgtatgcccctgtcgcgtgtgttcgaccagtactgtccttcctcatgcctccacttctaatgaatatatggcgcctcaactttg

SEQ ID NO: 25961 - protein, 157 aa, Triticum aestivum
HQASTPASSVLTASSQSLASFPRRHPPRKGGCLAAAATAGAAPAASAATAAAGARCSPTWRPPPAPPPWSCPPPPTRGAPAGSRRPGRPAAATAPPASAAPRAAAPAAAATEPAPRRPAGRGEHEDEEDKQASTITTSSPPPSVSSPAAACARARAR

SEQ ID NO: 25962 - protein, 111 aa, Triticum aestivum
SPSKHTSLLSPHSILSVLSFLPSPPPTKERRMSCCGGNCGCGAGCKCGNGCGGCKMFPDVEATAGAAAMVMPTASHKGSSGGFETAGETGGCDCTTCKCGTACGCSCCSCN

SEQ ID NO: 25963 - protein, 80 aa, Triticum aestivum
MSCCGGNCGCGAGCKCGNGCGGCKMFPDVEATAGAAAMVMPTASHKGSSGGFETAGETGGCDCTTCKCGTACGCSCCSCN

SEQ ID NO: 25964 - DNA, 908 bp, Triticum aestivum
aatcccaatcgagccctcctccccttccgccgccgccgccgccgccatgtcccgcttcgtgcggcgcctcgccggcatcccgtggcgccagatcgccggggaggcctcctccgtcggtctgctaatggcgcagggcctctgcgccgtccacgtcgtcagcgagcacgtcctcggcgtcgccttcccacggggccccagcatgctgccggcgctgaacatggcgggggacgtgctgctcaccgacaaggtgagcccgcggcgcgggtgggtggggccgggggacgtcgtgctcctcctctcgccggaggacccgcgcaagatcgtcgccaagcgcgtgctcgggatggagggcgacgaggtcacctaccccgtcgacgccggcaacagcgacgccaccaagaccgtcgtggtaccgcaaggtcatatctgggtgcagggcgacaatatctattcatctaacgactcgaggcagtttggacccgtgccttacggtctcgtaaaagggaagatgtcctatcggatttggccaccgtcaaggattggttcgattgactcaaaggagtaggacacagagtataagcgactgttcatacgatgcaaccaggccctgcatttgttggtgcatcttgatgtctaccatttgatgcttcacaattttggtccttgccccccagaagccccgttcagcgaatctatggcatgatttgattgctgtgtctcatgtcgtaacttatggtctgtgatacttgtaaagtgaactaacccgatgaacctacaagttccgggcatggctgagatcagctagtgtcttgacgttgagattgtattaaacttgtcattctcctggaccaaagcttgatgagttgtgcattgtaacatttgcttattattaaggccgttttaagcgg

SEQ ID NO: 25965 - protein, 187 aa, Triticum aestivum
IPIEPSSPSAAAAAAMSRFVRRLAGIPWRQIAGEASSVGLLMAQGLCAVHVVSEHVLGVAFPRGPSMLPALNMAGDVLLTDKVSPRRGWVGPGDVVLLLSPEDPRKIVAKRVLGMEGDEVTYPVDAGNSDATKTVVVPQGHIWVQGDNIYSSNDSRQFGPVPYGLVKGKMSYRIWPPSRIGSIDSKE

SEQ ID NO: 25966 - protein, 172 aa, Triticum aestivum
MSRFVRRLAGIPWRQIAGEASSVGLLMAQGLCAVHVVSEHVLGVAFPRGPSMLPALNMAGDVLLTDKVSPRRGWVGPGDVVLLLSPEDPRKIVAKRVLGMEGDEVTYPVDAGNSDATKTVVVPQGHIWVQGDNIYSSNDSRQFGPVPYGLVKGKMSYRIWPPSRIGSIDSKE

SEQ ID NO: 25967 - protein, 152 aa, Triticum aestivum
NPNRALLPFRRRRRRHVPLRAAPRRHPVAPDRRGGLLRRSANGAGPLRRPRRQRARPRRRLPTGPQHAAGAEHGGGRAAHRQGEPAARVGGAGGRRAPPLAGGPAQDRRQARARDGGRRGHLPRRRRQQRRHQDRRGTARSYLGAGRQYLFI

SEQ ID NO: 25968 - DNA, 760 bp, Triticum aestivum
gaagagccgaacacccaccccaatccactaacctagcgatgcctcccaagcgcaagtccccggttgcgacggcggcggcccccgcaatgccgcctaggatgacccggagcatggccgccgggaagcggggcgccgacgctccggctaaaaaggaggaagcagaggcggcgccggcggcggccggggggaagggcaggaagaaggccaagaaggaggtgtctgcggtggagacggtactgtcgcctcctgcagcggccaagcagaaggtgaagaaaaatgccaagaaggaggtggtggcggccgcggtagatgatggcggtgctggcgctgaaagcgggaagcgcgtcatcgtcgaggcctgcacccagtgccaacagttcaagagaagagctttaaaggtgaaggaggatcttgaaagtgctgtccctggggtttctgtgacaatcaaccctgagaagccacgccgtggatgccttgagatacgggaggaaggtggtgatgtgttcatttcactgcagaacatgccccggcccttcaaaaagatgagggagctcgacatggacaaggttatcaaggacattgcccagaaaattgcttgaatctgacgtggcattaatgtatggatgcgctccttttgcaattgatgtttagggcttattttgtgtgggaacttggtattgcagtggccgtagaatgtgggatcagtgtttcgttattgtgccctatgtgggctaagacatgctgaaattatcgcattagc

SEQ ID NO: 25969 - protein, 198 aa, Triticum aestivum
RAEHPPQSTNLAMPPKRKSPVATAAAPAMPPRMTRSMAAGKRGADAPAKKEEAEAAPAAAGGKGRKKAKKEVSAVETVLSPPAAAKQKVKKNAKKEVVAAAVDDGGAGAESGKRVIVEACTQCQQFKRRALKVKEDLESAVPGVSVTINPEKPRRGCLEIREEGGDVFISLQNMPRPFKKMRELDMDKVIKDIAQKIA

SEQ ID NO: 25970 - protein, 186 aa, Triticum aestivum
MPPKRKSPVATAAAPAMPPRMTRSMAAGKRGADAPAKKEEAEAAPAAAGGKGRKKAKKEVSAVETVLSPPAAAKQKVKKNAKKEVVAAAVDDGGAGAESGKRVIVEACTQCQQFKRRALKVKEDLESAVPGVSVTINPEKPRRGCLEIREEGGDVFISLQNMPRPFKKMRELDMDKVIKDIAQKIA

SEQ ID NO: 25971 - protein, 170 aa, Triticum aestivum
MPPRMTRSMAAGKRGADAPAKKEEAEAAPAAAGGKGRKKAKKEVSAVETVLSPPAAAKQKVKKNAKKEVVAAAVDDGGAGAESGKRVIVEACTQCQQFKRRALKVKEDLESAVPGVSVTINPEKPRRGCLEIREEGGDVFISLQNMPRPFKKMRELDMDKVIKDIAQKIA

SEQ ID NO: 25972 - DNA, 630 bp, Triticum aestivum
ccctttgcttcgcccactcccaaaccctacctcctagctccccctcccctcccatcgttgcggcggcgacagagagagagagagagagagagagagagagagatggccaagtctctgcgctccaagcgggagaagcggctgcggactctccggcgggagatcgcggagcccttctacgacaagaaggaggccgccaagcaggccgcgcaggccgccgccctcgaggcccccaagctccccgtccgcgtgcacccggcgtacgaggagtccctcgccgccgccgctgccgccgccgccagccgggcctctgccatggaggttgatggaggaagcaagaagtcgacatcctttctgaagccaatgggcaccattagcaagaagaaggtacagcttcacttgaagatcaagaaagacaagagaaaagctaggaagaagggaaattctgggaagaagagttactagatgtgcgagctgctgtgttatgtatcatgcaatcttgtttcgttagtttgaacaacgcatgtaacggtaattctgcttgtgaacccaagtgttaatcctagggtggtcaacaatgtactgaaaaatatctcaatgagcaccccaaacgaaaatagtgtcgccatgttc

SEQ ID NO: 25973 - protein, 153 aa, Triticum aestivum; identical to SEQ ID NO: 12335

SEQ ID NO: 25974 - protein, 119 aa, Triticum aestivum; identical to SEQ ID NO: 12336

SEQ ID NO: 25975 - protein, 106 aa, Triticum aestivum
LCFAHSQTLPPSSPSPPIVAAATERERERERERDGQVSALQAGEAAADSPAGDRGALLRQEGGRQAGRAGRRPRGPQAPRPRAPGVRGVPRRRRCRRRQPGLCHGG

SEQ ID NO: 25976 - DNA, 875 bp, Triticum aestivum
atcccgtcgctactcgcccatccccttcgccgcagcgccgccgcctctgatctccaccctcctcgacgcggcgactctgctttacgcccttacgcggcggaggcaaacagatcaaggataacacaaaatcatactttgaagaggtgtcttgtgccaatcactggaataatgactccgtcggcatctgttggaaaggaagtcaacttgaaggaagtcaacttcaacttgaaggaggataagaacataccctgtgctattcagtttgtaacgacgatgttggggacgtcttcaacattgacgatcggggaccggaacaagaagttcagggtgagccgttcttcgacttggataacggttgtcttcacacagtctatgttcattgccaccacagcaggttggatctacgacatgtataataaacctatctggaatgccggcttcccatggtggctgccagttgctgtgttgttgggcgcctacctggcagtggtagacctggcgcgtgggtatttgaccctcttcgtgccacaggcacccttggcggcatggaatgcacttgacgaagttggcttcaaggtgattggattttctgtcatcttaatctctgtccctgttttcttgtttgaccaggcgtggctgcacatcacctttgcttgccttcttagtgtcctcattgctaccatacttgccttctgtgtctgtcttgttcgcacgtaccggcaatagccctcttggcacctagcggctttgtttatggtttggatgtcgtttgctagtagacgaataagcttgtctctccaagccaaagtcgccccttttgtgtaaacagtcggtgccactcatgtgttgttgttgttattattattattattatt

SEQ ID NO: 25977 - protein, 241 aa, Triticum aestivum
IPSLLAHPLRRSAAASDLHPPRRGDSALRPYAAEANRSRITQNHTLKRCLVPITGIMTPSASVGKEVNLKEVNFNLKEDKNIPCAIQFVTTMLGTSSTLTIGDRNKKFRVSRSSTWITVVFTQSMFIATTAGWIYDMYNKPIWNAGFPWWLPVAVLLGAYLAVVDLARGYLTLFVPQAPLAAWNALDEVGFKVIGFSVILISVPVFLFDQAWLHITFACLLSVLIATILAFCVCLVRTYRQ

SEQ ID NO: 25978 - protein, 185 aa, Triticum aestivum
MTPSASVGKEVNLKEVNFNLKEDKNIPCAIQFVTTMLGTSSTLTIGDRNKKFRVSRSSTWITVVFTQSMFIATTAGWIYDMYNKPIWNAGFPWWLPVAVLLGAYLAVVDLARGYLTLFVPQAPLAAWNALDEVGFKVIGFSVILISVPVFLFDQAWLHITFACLLSVLIATILAFCVCLVRTYRQ

SEQ ID NO: 25979 - protein, 150 aa, Triticum aestivum
MLGTSSTLTIGDRNKKFRVSRSSTWITVVFTQSMFIATTAGWIYDMYNKPIWNAGFPWWLPVAVLLGAYLAVVDLARGYLTLFVPQAPLAAWNALDEVGFKVIGFSVILISVPVFLFDQAWLHITFACLLSVLIATILAFCVCLVRTYRQ

SEQ ID NO: 25980 - DNA, 658 bp, Triticum aestivum
tacattggggaatggcaagctggaagaacctaacagtgctgaaaatgtacctgccgatggagagatggtctcaagagtgaccgccgagcataatgattccttaactacgctaaaacgagccgcagcgactgctgtttcagcagctgctgcgaaggctaagctccttgctgagcaggaagaagatcaaattcgacggctagctgcactggtggtcgagaaactgctgcagaagacagaggcgaagatgtcattatttgcagatgttgagcatgtggccctgcgcacaagagaatacactgaaaagaccagaaagaagcttctgatggagcggaacgcaataatcgcagctcgcatgggcgcactgccatctaggccgaaccagcagggtgcagctgggaacagattgccgcccggatatggcgcccctgcagtaagaccgccgaacgcaatgccccggccgagcagctgagtcgatgaggtaaaacctgtcgcctcggtgatcgacctgtatacccgattcttttagaagcacacctcagaccaatcaggcataagttatgttgttgttgtagcattcatgtaggagcgtaccttatcgtgatctgtataaggaaaaaacccggccattttggctttggatgtgatgctctctccgtgc

SEQ ID NO: 25981 - protein, 155 aa, Triticum aestivum
TLGNGKLEEPNSAENVPADGEMVSRVTAEHNDSLTTLKRAAATAVSAAAAKAKLLAEQEEDQIRRLAALVVEKLLQKTEAKMSLFADVEHVALRTREYTEKTRKKLLMERNAIIAARMGALPSRPNQQGAAGNRLPPGYGAPAVRPPNAMPRPSS

SEQ ID NO: 25982 - protein, 134 aa, Triticum aestivum
MVSRVTAEHNDSLTTLKRAAATAVSAAAAKAKLLAEQEEDQIRRLAALVVEKLLQKTEAKMSLFADVEHVALRTREYTEKTRKKLLMERNAIIAARMGALPSRPNQQGAAGNRLPPGYGAPAVRPPNAMPRPSS

SEQ ID NO: 25983 - DNA, 476 bp, Triticum aestivum
tgatgcaggactagcaaaggagtttgaccggcctgccgccctgatcgaaagaccgtcgctctttggagcattggttcaagagtacgcgaaccggtcgtctgacatgtagccaatgagagggaatggccaattttctgcttcaagacttgggagggattcagggatggagatttctccaggagatgggatgagcaacctgcactcgtactctgaacaccaaggcctcaaaaatatgtcaccggcggtgattgatgttgagaaaggtcaaggagaagccagtgtgagataggcatatatgatccgcgtagattgattccaagatttcattcaacccattaagctggagtttttctgtcactggtatgagctgaggatgatgtatgatgtaatgtacccgcaattgtttcaatggcgacagtggcgtagctaggatttcaaaccagggtgagctgataataattgatgagttcaatttt

SEQ ID NO: 25984 - protein, 58 aa, Triticum aestivum
MRGNGQFSASRLGRDSGMEISPGDGMSNLHSYSEHQGLKNMSPAVIDVEKGQGEASVR

SEQ ID NO: 25985 - protein, 41 aa, Triticum aestivum
MEISPGDGMSNLHSYSEHQGLKNMSPAVIDVEKGQGEASVR

SEQ ID NO: 25986 - protein, 35 aa, Triticum aestivum
DAGLAKEFDRPAALIERPSLFGALVQEYANRSSDM

SEQ ID NO: 25987 - DNA, 457 bp, Triticum aestivum
cttcaatgatttctagcggtttcacgcctgataacccaactgacctgagcgggaagatctatgacatgatgagcacagctatggcgggcaagtgggcgtcgcagccccaacctgcccagccaagccagcagcctgctgcacctagtagctctgaacctgagccgcttgaagccgaggtggtggaacccgtcgaggctggccagcagaagtgagaatccgcatcgtgggaatccatcagggtcgatgtcaagtgcgtacgcgggtgctatcccaagctctccgcttgttcctttttatttatgtcggaatcggtttacacggcatgtatgatgagccgtgctaacttattctagatagggttgtggtgatactaataatagtactagaacattttggccttgaacacgctgcctgctacttaacttattcgactaccgaatcgaaagactttgtattg

SEQ ID NO: 25988 - protein, 69 aa, Triticum aestivum
SMISSGFTPDNPTDLSGKIYDMMSTAMAGKWASQPQPAQPSQQPAAPSSSEPEPLEAEVVEPVEAGQQK

SEQ ID NO: 25989 - protein, 68 aa, Triticum aestivum
MISSGFTPDNPTDLSGKIYDMMSTAMAGKWASQPQPAQPSQQPAAPSSSEPEPLEAEVVEPVEAGQQK

SEQ ID NO: 25990 - protein, 48 aa, Triticum aestivum
MMSTAMAGKWASQPQPAQPSQQPAAPSSSEPEPLEAEVVEPVEAGQQK

SEQ ID NO: 25991 - DNA, 528 bp, Triticum aestivum
tcgaaaaaatttcaagggacgttgctaaattcgtggttcaaggtcaccaagaacgaacacttcagctatttagacttgaagacgtggccatgggaatatggatccagcaatacaaagacagtggccagcaagtgaactatgccaacgatgagcgcttctacaacgaaggatgcgactctgattacgtcctcgcccactaccagagcccgaggcttatgatgtgcttgtgggagaagctccagaaggaatctcaagcagtgtgctgtgaataactctgaatcagtgttagcacgagccgtgcaaggacgcggtagatcagttagtcttgttgttgttgttgttgttggtggtggtggtggtggtggtatgcgtccagcatttttatgtgggtgggaagtttgtgtgtaacagttgtaacaaccggcgatcatcgttcttttgttccgatcaacgtttttgtttcacggaagagagtgttgatccatgtatatgaatgttgttctcaaatgagactttgagagagattgc

SEQ ID NO: 25992 - protein, 89 aa, Triticum aestivum
EKISRDVAKFVVQGHQERTLQLFRLEDVAMGIWIQQYKDSGQQVNYANDERFYNEGCDSDYVLAHYQSPRLMMCLWEKLQKESQAVCCE

SEQ ID NO: 25993 - protein, 60 aa, Triticum aestivum
MGIWIQQYKDSGQQVNYANDERFYNEGCDSDYVLAHYQSPRLMMCLWEKLQKESQAVCCE

SEQ ID NO: 25994 - protein, 44 aa, Triticum aestivum
SKKFQGTLLNSWFKVTKNEHFSYLDLKTWPWEYGSSNTKTVASK

SEQ ID NO: 25995 - DNA, 562 bp, Triticum aestivum
atcctaatcgaaaatatcttgtcagctttaacattttctggtgtattccttgccgagaaaataaacacgttcttaggacaaaactggaagagcttctcaagccagaattactttgatccccaaggcctcttcatctcggtcatgtggtccggtcccttgctcctgattacgatacttattctggtgaacacccttgtgacgctctgcatgctcatggtaaggtggaaaagggccgagctcaagcaccgtgctcgtgaggcccgtagcaagcaggagtgatgatgctgccctgctcttgaaccgtggatctattgtgcagtaggggattaagctgctgatttaacggagaagtttgattggaacagtaaagtggaaggttaattagcccttgattttgattgatggtcccacttatggtctctggtactgaagcacacggttttacacatgtattagctgctgttcgtcaaatttaagggatatgtttgtgtagggagctctgaatgttatttggatggctgcaggagtcaagtgccgtcgtatatgcattgctttgtcatct

SEQ ID NO: 25996 - protein, 92 aa, Triticum aestivum
ILIENILSALTFSGVFLAEKINTFLGQNWKSFSSQNYFDPQGLFISVMWSGPLLLITILILVNTLVTLCMLMVRWKRAELKHRAREARSKQE

SEQ ID NO: 25997 - protein, 45 aa, Triticum aestivum
MWSGPLLLITILILVNTLVTLCMLMVRWKRAELKHRAREARSKQE

SEQ ID NO: 25998 - DNA, 925 bp, Triticum aestivum
caccatcccaaattcgtccgtccattcgtcgaaaggggattacggctccacgccagcgcgccccggcaccgccgatccagccgcgccgctgccgccggccccctcgatcggaggcctcggaaggagagcaggcgcgccaggaggggggagatccgggacgccccggcgtaatcctgccgtgcaaggctcttcctgccgagacgaatcgtacgtgcctgccgccgcgccggcgaaccatgtcgtcgtccgcgttgagggccgcggggcagagggcgggggccgcggcccgtaagcaggcgctcaccctgacggaggccgcggcggccagggtgcgccacctcctcgacctcaggcagcggccctacctgcgccttggcgtcaaggcgcgcggctgcaacggcctgtcctacacgctcaattacgccgaaaaagggaagttcgatgagcttgttgaagagaagggtgtgaaagtgctgattgaccccaaggccctgatgcatgtgatcggcaccaagatggacttcgtcgacgatccactgaggtcagagtttgtgttcataaacccgaactcgaaaggggagtgtggatgcggtgaatctttcatgactacgggcagcaaaggatctacgtcatgatgcgtcatgcgatgatgtaaatagagcgaagcatgtgcagtggtggctctagttactgatataattttgtcttggaaagcaacggccattgtaagcttgttgcgcttgcatccaggtagtgaacactgcagtggatttaatcacgtgatggatgaaccagcttgttaccggtactcttacattcatcttggccccgtgttgttgatacgttcactaattcttgtttgggaacataccgagtgcatgataatcaaaataaacacagcaacatttcttcttttgctgttttg

SEQ ID NO: 25999 - protein, 210 aa, Triticum aestivum
PSQIRPSIRRKGITAPRQRAPAPPIQPRRCRRPPRSEASEGEQARQEGGDPGRPGVILPCKALPAETNRTCLPPRRRTMSSSALRAAGQRAGAAARKQALTLTEAAAARVRHLLDLRQRPYLRLGVKARGCNGLSYTLNYAEKGKFDELVEEKGVKVLIDPKALMHVIGTKMDFVDDPLRSEFVFINPNSKGECGCGESFMTTGSKGSTS

SEQ ID NO: 26000 - protein, 132 aa, Triticum aestivum
MSSSALRAAGQRAGAAARKQALTLTEAAAARVRHLLDLRQRPYLRLGVKARGCNGLSYTLNYAEKGKFDELVEEKGVKVLIDPKALMHVIGTKMDFVDDPLRSEFVFINPNSKGECGCGESFMTTGSKGSTS

SEQ ID NO: 26001 - DNA, 839 bp, Triticum aestivum
acacactgaactgcttcagcttgttcttgttggttcacagacacttcccttctcacagtccattaagtccatggcgatgaggaagaacaaggttcacgagttcgaggccgatgtgcccgccgccgacctatgggggctctatggcacgctccgtgcagcggagctgctgcccgagcttctcccgcaggtgctcgccaagatacagctcgtgagcggcgacggcgacgtcggcaccatcttggagctcacattcgctccagggatccctggcctggagacatacagggagaaattcatcaaggtcgacaatgagaactacatcaaggaagcgcagacgattgacggagacatcctgaagctcgggttcctctattacatggtcaggttcgagatcatcgccaaaggacccagttcttcagtgataagatcgaccattgtgtatgagataaattatgaaactcaccccgggcttgaagctatggtcagcaccggacctctggctgcaactgctgagaaatttgcagggtacctcaaggagcagaagatcgctcagagcagttaattcttgcaacagctcagagcaaaagtgtatcaatgctttgagaaaaataatgtctgattccacgttgtgtgttttccctgaaaaaataaatgaccaatgatcaaacatattaggatagtatgtttgatcatatgaatatcacatagttgatatatagatatttcacggtccatgtaccttaactttattagtttcatgaaaatgaagttgggagccttgatgctccttttctcgaagaaatgtaccttaacttgttttggttaatgaaggtttgatt

SEQ ID NO: 26002 - protein, 186 aa, Triticum aestivum
HTELLQLVLVGSQTLPFSQSIKSMAMRKNKVHEFEADVPAADLWGLYGTLRAAELLPELLPQVLAKIQLVSGDGDVGTILELTFAPGIPGLETYREKFIKVDNENYIKEAQTIDGDILKLGFLYYMVRFEIIAKGPSSSVIRSTIVYEINYETHPGLEAMVSTGPLAATAEKFAGYLKEQKIAQSS

SEQ ID NO: 26003 - protein, 163 aa, Triticum aestivum
MAMRKNKVHEFEADVPAADLWGLYGTLRAAELLPELLPQVLAKIQLVSGDGDVGTILELTFAPGIPGLETYREKFIKVDNENYIKEAQTIDGDILKLGFLYYMVRFEIIAKGPSSSVIRSTIVYEINYETHPGLEAMVSTGPLAATAEKFAGYLKEQKIAQSS

SEQ ID NO: 26004 - protein, 161 aa, Triticum aestivum
MRKNKVHEFEADVPAADLWGLYGTLRAAELLPELLPQVLAKIQLVSGDGDVGTILELTFAPGIPGLETYREKFIKVDNENYIKEAQTIDGDILKLGFLYYMVRFEIIAKGPSSSVIRSTIVYEINYETHPGLEAMVSTGPLAATAEKFAGYLKEQKIAQSS

SEQ ID NO: 26005 - DNA, 400 bp, Triticum aestivum
gaattgctcagccttgcaagccaagcgaaaggcccacccggcagccgacagctcaccaccaacccccccaatggcgaagacgcaaccccgcgggccgacggcggcggagccgctgctccccccgccgccgtacctcggcccccactcgccatcccacctccacgacgccgacctccacgactcctacgtcctcctcgtccccgtgcgcctccgccgccgcctgcgcgggggctgcggctgcggccgcgtcgcggcggccctcgccgccctcgcgctcctggccctcgccttcctcctctggccctccgaccctggagtcagcgtggcgcgcctccgcctcgcgcaagcctccgtaggcggccgccccgccgtcgccctcaacgtagccgccgggctcaag

SEQ ID NO: 26006 - protein, 133 aa, Triticum aestivum
NCSALQAKRKAHPAADSSPPTPPMAKTQPRGPTAAEPLLPPPPYLGPHSPSHLHDADLHDSYVLLVPVRLRRRLRGGCGCGRVAAALAALALLALAFLLWPSDPGVSVARLRLAQASVGGRPAVALNVAAGLK

SEQ ID NO: 26007 - protein, 133 aa, Triticum aestivum
ELLSLASQAKGPPGSRQLTTNPPNGEDATPRADGGGAAAPPAAVPRPPLAIPPPRRRPPRLLRPPRPRAPPPPPARGLRLRPRRGGPRRPRAPGPRLPPLALRPWSQRGAPPPRASLRRRPPRRRPQRSRRAQ

SEQ ID NO: 26008 - protein, 117 aa, Triticum aestivum
IAQPCKPSERPTRQPTAHHQPPQWRRRNPAGRRRRSRCSPRRRTSAPTRHPTSTTPTSTTPTSSSSPCASAAACAGAAAAAASRRPSPPSRSWPSPSSSGPPTLESAWRASASRKPP

SEQ ID NO: 26009 - protein, 110 aa, Triticum aestivum
MAKTQPRGPTAAEPLLPPPPYLGPHSPSHLHDADLHDSYVLLVPVRLRRRLRGGCGCGRVAAALAALALLALAFLLWPSDPGVSVARLRLAQASVGGRPAVALNVAAGLK

SEQ ID NO: 26010 - DNA, 1899 bp, Triticum aestivum
gaaaaatgaactagtactgtacaagccaatagcaaacgcgtacgcatgcagctgtcccgcctgaaccagcacaccttcctctccctcctcaaagccgccgcctccgtctcctctcgccgcctccccagcctccacgccgtctacatcaagctcgggttcctcgcccacacgcgcgtcaccaatggcttcatccaggggtactgcgccacgaggcgagtcaccgacgcgcgcagggtgttcgccgaaatgccgcgccaggacaccgtctccttcaactccatgatccacggctacgcggtgtccggcgacgtcgcatcggcgtgccggctctttgagcaggtcccggcgccgacgcccgtcacgtggacgtcgatggtcgccggcctctgccgcgccggggatgtcgggtcggcgaggcgcgtcttcgacaagatgccggagagggacctggtttcgtggaacgccatgatctctgggcacgtcgggaacaggcagcccgtcgaggctctctgtctctttgggcggatgatgaaggaagggttcgtgccaaaccgtgggactgttgtcagcgcgctgtcagcctgcgcgagcgccggtgcgttggagacagggaagtgggtccatgtgttcatagagaagaacaggctccggtgggacgagttcctggggacggcgcttattgacatgtatgccaagtgtggcgctgtggagcttgcgttggaggtgttcgcgagcttgagggcgaggaacacatgtacctggaatgccatgatcaatggcttggccatgaatggctactcagcaatggcgttggacatgtttcgccaaatggagcttgacggaagagtggtaccggatgaagtgacctttgtaggagtcctcttggcatgcagccatggtggatctgtggatgcaggtagggagcatttcaacatgatctccaagaagtatggcatagggttaatccttgagcactatgcgtgcatggttgatctccttgcccgatctggtcatctacaagaggcacacaagctcattacagagatgccaatgaagccagatgttgtcatctggagggcattgcttggtggatgccggctccacaagaatgtcaagatggctgaaattgtcataactgaaatggcagcaacctgcagtggagaccatgtgctcctgtccaatctctatgctgcagtagggagatggaatggcgttgaagatgttcggaggaccatgagaagcaaggggatcgagaagattcctggttgcagctcggttgagatggatggttccatccatgaattcatttcaggtgacaagtcacatccatcatatgatgacattcatgcaaaactgattgagattggtggaaggatgcaacagcaaggtcatgtcacagagatcactgaggtgttctatgacattgaagatgaagagaaagagcaggcgcttggacatcacagtgagaagcttgcaatagcgtttgggctcattggaggacctccagatgctacaatcagaattgtcaaaaatctccgcttttgcatggattgccacaagtttgctaagctagtgtccaagatctatcaacgggaaattgtggttcgtgatagagccaggttccatcattttagagggggaacttgttcttgcaatgatttttggtagaagagaatcagttaaactctggcacagtggcagtggtatacagtatgtttttctcattgtgagcttctgcttgctagttcttgtttactctttagtaggatatgcccttgcacagttgtctgagtcaatgtgtgtagtctggggataagttcaaaagtcttgatagcgtacccgaacaagtcaagaaacatcgtgaactccaatcgagctaatgaaatcattcagttatcc

SEQ ID NO: 26011 - protein, 540 aa, Triticum aestivum
MQLSRLNQHTFLSLLKAAASVSSRRLPSLHAVYIKLGFLAHTRVTNGFIQGYCATRRVTDARRVFAEMPRQDTVSFNSMIHGYAVSGDVASACRLFEQVPAPTPVTWTSMVAGLCRAGDVGSARRVFDKMPERDLVSWNAMISGHVGNRQPVEALCLFGRMMKEGFVPNRGTVVSALSACASAGALETGKWVHVFIEKNRLRWDEFLGTALIDMYAKCGAVELALEVFASLRARNTCTWNAMINGLAMNGYSAMALDMFRQMELDGRVVPDEVTFVGVLLACSHGGSVDAGREHFNMISKKYGIGLILEHYACMVDLLARSGHLQEAHKLITEMPMKPDVVIWRALLGGCRLHKNVKMAEIVITEMAATCSGDHVLLSNLYAAVGRWNGVEDVRRTMRSKGIEKIPGCSSVEMDGSIHEFISGDKSHPSYDDIHAKLIEIGGRMQQQGHVTEITEVFYDIEDEEKEQALGHHSEKLAIAFGLIGGPPDATIRIVKNLRFCMDCHKFAKLVSKIYQREIVVRDRARFHHFRGGTCSCNDFW

SEQ ID NO: 26012 - protein, 473 aa, Triticum aestivum
MPRQDTVSFNSMIHGYAVSGDVASACRLFEQVPAPTPVTWTSMVAGLCRAGDVGSARRVFDKMPERDLVSWNAMISGHVGNRQPVEALCLFGRMMKEGFVPNRGTVVSALSACASAGALETGKWVHVFIEKNRLRWDEFLGTALIDMYAKCGAVELALEVFASLRARNTCTWNAMINGLAMNGYSAMALDMFRQMELDGRVVPDEVTFVGVLLACSHGGSVDAGREHFNMISKKYGIGLILEHYACMVDLLARSGHLQEAHKLITEMPMKPDVVIWRALLGGCRLHKNVKMAEIVITEMAATCSGDHVLLSNLYAAVGRWNGVEDVRRTMRSKGIEKIPGCSSVEMDGSIHEFISGDKSHPSYDDIHAKLIEIGGRMQQQGHVTEITEVFYDIEDEEKEQALGHHSEKLAIAFGLIGGPPDATIRIVKNLRFCMDCHKFAKLVSKIYQREIVVRDRARFHHFRGGTCSCNDFW

SEQ ID NO: 26013 - protein, 462 aa, Triticum aestivum
MIHGYAVSGDVASACRLFEQVPAPTPVTWTSMVAGLCRAGDVGSARRVFDKMPERDLVSWNAMISGHVGNRQPVEALCLFGRMMKEGFVPNRGTVVSALSACASAGALETGKWVHVFIEKNRLRWDEFLGTALIDMYAKCGAVELALEVFASLRARNTCTWNAMINGLAMNGYSAMALDMFRQMELDGRVVPDEVTFVGVLLACSHGGSVDAGREHFNMISKKYGIGLILEHYACMVDLLARSGHLQEAHKLITEMPMKPDVVIWRALLGGCRLHKNVKMAEIVITEMAATCSGDHVLLSNLYAAVGRWNGVEDVRRTMRSKGIEKIPGCSSVEMDGSIHEFISGDKSHPSYDDIHAKLIEIGGRMQQQGHVTEITEVFYDIEDEEKEQALGHHSEKLAIAFGLIGGPPDATIRIVKNLRFCMDCHKFAKLVSKIYQREIVVRDRARFHHFRGGTCSCNDFW

SEQ ID NO: 26014 - DNA, 595 bp, Triticum aestivum
ctcaccaagcaagagcaaaaccaatcaaccacaggtcgatcgattcgcgaagtaccctccgatcacaacccaagaccgccatggctgacaagtgcggcaactgcgactgcgccgacaagacccagtgcgtgaagaagggcgacggctacggcatcgtcatggtcgacaccgagaagagccacttcgaggtgcaggaggccgcggagaacgacggcaagtgcaagtgcggcgccagctgcacctgcaccaactgcacctgcggccactgaacaggcccgccccgctgggcctctcggtcatcgcgtacgcctctacccgtactagtaacccgtgtcaataaaggttgtacgtgtgtgtctacgtatgttgtgttgtcgtcgtgcaagaacctgaaggttggctgatgcgtgcataggataggatcttggatcagccgatcggtcccgtgttcctcccctgtaaccagtggctgagcttcaggtactactactatgtggttgtgagctcgtacgtgttgtggcatgtgacttcatttcgcgtatgcgtgttgcacggaatgaaatttgtcgtgtggttaactagtacttcctccgcg

SEQ ID NO: 26015 - protein, 88 aa, Triticum aestivum
HQARAKPINHRSIDSRSTLRSQPKTAMADKCGNCDCADKTQCVKKGDGYGIVMVDTEKSHFEVQEAAENDGKCKCGASCTCTNCTCGH

SEQ ID NO: 26016 - protein, 62 aa, Triticum aestivum
MADKCGNCDCADKTQCVKKGDGYGIVMVDTEKSHFEVQEAAENDGKCKCGASCTCTNCTCGH

SEQ ID NO: 26017 - DNA, 1027 bp, Triticum aestivum
atgattttcttgtattgggtgtaaaccctagccgccagtggcgtgctgaccctattttccccatttcttagcaataaccctagtttgaagctcctgttctcctcctaaatttgttgctctggtagttaaattgcttgattctgagctttggacctgacaggacccacgcaaggccccatggttcggcgtcacgctcagatgcggctccgggaagtcagtgctgctccggatacgcgcagacaacctctacatctccggttaccggagcccggaaggtctatggtccgagttcctcggtggctccctaatcgacggcgcggcgccactctcgttcgccggtagctacggcgatatggcgagagtggccaagacggcacttgaggcactcaccctcggcaaggaggagctcgaagccgcggcggagcgcgtcacggccaacgccggcacccagcaggagatcgtgagatcgccgatgaccatgtcggtgatggtctgtgaggccgtcaggttcaggagcgtcggcggcgtgctcggccacatgatgtgcaacgctgcccggcacatggtggagcgggtgaagaactggaggagcctctccgagtactggctcggggccgtcctctacgcactgtcgttcctgccgtacatagaggccgacggcagtcagcactatggccacatcccccagcacctactcgcgccggcgaagatcgactgccaggaccacgccatgatggcgctcggcgtcgcgctgaaccggcagagggggctgcaggacaagcaccaggcggcgttcgacgagcactggcgcgccgtgcacgcccacgctcgcaagcttgacagggaaagagcatctgcatccggtacacgatgagtcggattgtcagagtaagcggctggtgagagaacatgctttcctatacctggtatatttgcctttttggcttgaaatgtgacccatgttacagaggtcatcctctggtaatgtgctatatttgtatcagcaaaaatggatttacagaactgc

SEQ ID NO: 26018 - protein, 173 aa, Triticum aestivum
MARVAKTALEALTLGKEELEAAAERVTANAGTQQEIVRSPMTMSVMVCEAVRFRSVGGVLGHMMCNAARHMVERVKNWRSLSEYWLGAVLYALSFLPYIEADGSQHYGHIPQHLLAPAKIDCQDHAMMALGVALNRQRGLQDKHQAAFDEHWRAVHAHARKLDRERASASGTR

SEQ ID NO: 26019 - protein, 133 aa, Triticum aestivum
MTMSVMVCEAVRFRSVGGVLGHMMCNAARHMVERVKNWRSLSEYWLGAVLYALSFLPYIEADGSQHYGHIPQHLLAPAKIDCQDHAMMALGVALNRQRGLQDKHQAAFDEHWRAVHAHARKLDRERASASGTR

SEQ ID NO: 26020 - protein, 131 aa, Triticum aestivum
MSVMVCEAVRFRSVGGVLGHMMCNAARHMVERVKNWRSLSEYWLGAVLYALSFLPYIEADGSQHYGHIPQHLLAPAKIDCQDHAMMALGVALNRQRGLQDKHQAAFDEHWRAVHAHARKLDRERASASGTR

SEQ ID NO: 26021 - DNA, 1470 bp, Triticum aestivum
aaaaaaaacagagcagggaggtcggccgcgacctaggagctcggcggcggcgaccaccacgagcatcggcggctgcgcagccatgcttggccatctccggcgatcctctggcattctgcgccgcctaccgatcgccagcttcgctccctccgaccctgccgctgcatactcgggatggagttcacacgccgagtcactctcgtttgtttcatgttggtgtggcaagcatgctaccaggaatttctctacagatgataaagttaccaatggtcgtcgagggtatcggcaaaaggagttgaagaagccaagtacggccgtgaaggataatgatgcaatcattgatcgcatacaaaagagcacaagggggttgaaaaaagggccggttgggcacaccctttcatcagcagagaaaaggaaattccttatcaacactcttcttgatcttgaagactcaaaagaagctgtttacagcacccttgatgcatggatcgcctttgagcaggactttccactcgcctcattaaagcaagcaattgtagctcttgaaaaggaggaacaatggcatagagttgtccaagtaataaaatggatgttgagcaaagggcaaggaaataccatcagaacatacgagcaattagtgcgtgcacttgagaaggacaacagagcagaggaagcacataaaatctgggagaagaaaatagcccatgacctgcattcagttccttggcgtttctgcggtcttatgttggcaatttactacagaaacaatatgctagataggcttatcaagctcttcggtgcccttgaagcatgtggtcgcaagtgtcctagtaaagaatatatacggaaagttgaagttgcatatgaaatgcttggtctattagaagagaagaaggatttgcttgaaaagtacaaggatttgtacaataagccatcaaatagtgatagaaagaaagatcgacggttcaagaaggctgagaagaaagctgctgatgatggcagcaaacaattggagatggaaacatctgaaaacttaccagttaactcatgcccttcagataaggaactggttgccagcagttagtcaagataagaaatacaacaccgatggtgagatcagtatcagccaagaacgtgatgcagctagtaatctctaccagtaacacttactgggccaaccaatagtccattactaataggaaagaagcatgaacattgaaacccccttattcttccataaatcattgaagtgcggtgacttccatgttgccttggacaaatatttccgagtgttatcgttcgccaaaaaagttgtaatgtctgaatattggaataagtgggcgcataactgtagtcaacgaagggattacatgaggaaaccagtactttatctcatgtactcagtgtgagaattgttgtgctgacatttctgttttcatactagaaagccaaattcctgttatccatcgc

SEQ ID NO: 26022 - protein, 360 aa, Triticum aestivum
KKTEQGGRPRPRSSAAATTTSIGGCAAMLGHLRRSSGILRRLPIASFAPSDPAAAYSGWSSHAESLSFVSCWCGKHATRNFSTDDKVTNGRRGYRQKELKKPSTAVKDNDAIIDRIQKSTRGLKKGPVGHTLSSAEKRKFLINTLLDLEDSKEAVYSTLDAWIAFEQDFPLASLKQAIVALEKEEQWHRVVQVIKWMLSKGQGNTIRTYEQLVRALEKDNRAEEAHKIWEKKIAHDLHSVPWRFCGLMLAIYYRNNMLDRLIKLFGALEACGRKCPSKEYIRKVEVAYEMLGLLEEKKDLLEKYKDLYNKPSNSDRKKDRRFKKAEKKAADDGSKQLEMETSENLPVNSCPSDKELVASS

SEQ ID NO: 26023 - protein, 333 aa, Triticum aestivum
MLGHLRRSSGILRRLPIASFAPSDPAAAYSGWSSHAESLSFVSCWCGKHATRNFSTDDKVTNGRRGYRQKELKKPSTAVKDNDAIIDRIQKSTRGLKKGPVGHTLSSAEKRKFLINTLLDLEDSKEAVYSTLDAWIAFEQDFPLASLKQAIVALEKEEQWHRVVQVIKWMLSKGQGNTIRTYEQLVRALEKDNRAEEAHKIWEKKIAHDLHSVPWRFCGLMLAIYYRNNMLDRLIKLFGALEACGRKCPSKEYIRKVEVAYEMLGLLEEKKDLLEKYKDLYNKPSNSDRKKDRRFKKAEKKAADDGSKQLEMETSENLPVNSCPSDKELVASS

SEQ ID NO: 26024 - DNA, 1359 bp, Triticum aestivum
acgtccctcggcagtagatcgaagtacgtcagaggatctcgttcccccctcccctcccgtccgccgccgcctttctaccccactttcccggcgccagcttgttagatcccggcgccagcttcagccacgatattcaactattgggtgtgttaaattctcgaggatgatgaatcgtcagtttgcgaatatgatagtacacaattaccccaagggagtttattccctgcgccggatcaacctcatggagtatctcttctacccttcaacagaagctgccgaaaaggcagaagtgaataagaagggatggttatccaccatgttgaaagggagccccaagcagagtctgcccaagacgaacatcaacttctcatcactgcctaacatggccgacttaactaccaggcatttcttctccctgctgagagggcagggggagggctctgtcatgtttgtcagccctaacgtccacacgatgatgtacgacactagcacggacttcgtctttggcatgccacaagccaacttctgtaagcagagtgactcaatcgccctgtccatcactcggcggagctatggccaggacaaccacaagctctatgtcataggaaaaggagaggacaatgccttgttcgaggtcttgaactataccaggacaactgatctgaacaactcgtcttggtactggcgacctctaccctgcccgccactgtttcggccgtgcctgcctggcagcaacagcaaagtttgtcctccctctgcagccgctgtgttggatgccgccacaatatgtgtctcatctgtggatgctggagcctgcgccttctttgacacggcaacgcgcgagtggaggcaggctggcagctgggtgctgcccatccacggtgcggcggagtatgtccctgagtttgacctctggtttggcctcgacgatgtcattggcaaccccaaccattgcctgcgtgcttttgacttcgattcctccaggcgaccggtggtgcggcactcctggaactatctcagcgtcctgcccgatgagtggttgccgcggcagaggcacctgctaaacatgggctcaggcaagttctgcatcgccaccagctttcgaaatctcttgaggcacacctcgtgcagaccacttcatggtgcagtcaatgagcttactgtcttgaccggcgtggaggtggtgcgcaatgtcaatggtttccagatcatcaagcacaagtctgaatgttacagcttggaggacaatagaatccactgtgtgctctgaggaaaacttatctatgtttcactgttattggatggatccttccatgttttttcttctcagatgtgaatgaaaatatttgcttacctttt

SEQ ID NO: 26025 - protein, 422 aa, Triticum aestivum
RPSAVDRSTSEDLVPPSPPVRRRLSTPLSRRQLVRSRRQLQPRYSTIGCVKFSRMMNRQFANMIVHNYPKGVYSLRRINLMEYLFYPSTEAAEKAEVNKKGWLSTMLKGSPKQSLPKTNINFSSLPNMADLTTRHFFSLLRGQGEGSVMFVSPNVHTMMYDTSTDFVFGMPQANFCKQSDSIALSITRRSYGQDNHKLYVIGKGEDNALFEVLNYTRTTDLNNSSWYWRPLPCPPLFRPCLPGSNSKVCPPSAAAVLDAATICVSSVDAGACAFFDTATREWRQAGSWVLPIHGAAEYVPEFDLWFGLDDVIGNPNHCLRAFDFDSSRRPVVRHSWNYLSVLPDEWLPRQRHLLNMGSGKFCIATSFRNLLRHTSCRPLHGAVNELTVLTGVEVVRNVNGFQIIKHKSECYSLEDNRIHCVL

SEQ ID NO: 26026 - protein, 368 aa, Triticum aestivum
MMNRQFANMIVHNYPKGVYSLRRINLMEYLFYPSTEAAEKAEVNKKGWLSTMLKGSPKQSLPKTNINFSSLPNMADLTTRHFFSLLRGQGEGSVMFVSPNVHTMMYDTSTDFVFGMPQANFCKQSDSIALSITRRSYGQDNHKLYVIGKGEDNALFEVLNYTRTTDLNNSSWYWRPLPCPPLFRPCLPGSNSKVCPPSAAAVLDAATICVSSVDAGACAFFDTATREWRQAGSWVLPIHGAAEYVPEFDLWFGLDDVIGNPNHCLRAFDFDSSRRPVVRHSWNYLSVLPDEWLPRQRHLLNMGSGKFCIATSFRNLLRHTSCRPLHGAVNELTVLTGVEVVRNVNGFQIIKHKSECYSLEDNRIHCVL

SEQ ID NO: 26027 - protein, 367 aa, Triticum aestivum
MNRQFANMIVHNYPKGVYSLRRINLMEYLFYPSTEAAEKAEVNKKGWLSTMLKGSPKQSLPKTNINFSSLPNMADLTTRHFFSLLRGQGEGSVMFVSPNVHTMMYDTSTDFVFGMPQANFCKQSDSIALSITRRSYGQDNHKLYVIGKGEDNALFEVLNYTRTTDLNNSSWYWRPLPCPPLFRPCLPGSNSKVCPPSAAAVLDAATICVSSVDAGACAFFDTATREWRQAGSWVLPIHGAAEYVPEFDLWFGLDDVIGNPNHCLRAFDFDSSRRPVVRHSWNYLSVLPDEWLPRQRHLLNMGSGKFCIATSFRNLLRHTSCRPLHGAVNELTVLTGVEVVRNVNGFQIIKHKSECYSLEDNRIHCVL

SEQ ID NO: 26028 - DNA, 1092 bp, Triticum aestivum
aatttctgctaacctgctgctgcggtcgccggcggcgaggaggaggaggaaggggctgagagatggcgggcgccggcggcacgagggagcgggaggaggaagaggaggacgacttcgtctgcctggatccctccttcttcatgaaccgcaactacgagatgaagaccttcacctacggctcccaggagctccagctcctctgcctcagctccgcctgcactgattatgatcttactggacaattagtgtggccaggtgctgttctgatgaacacgtacctatctgaacaccctgagactgtgaaggggcgttcactaattgagttaggatctgggatcggcattaccggcatattgtgcagccgtttctgcaaagaggtggtattgactgatcacaatgatgaagttctagagattataaagaaaaatatagagatgcagtcatgttctggcaatgcggatgcagtgttgactgctgagaagctagaatggggaaatcatgatcatctaagcaatatcattgaaaaacatcctgttggatttgatctcattcttggagccgatatctgcttccagcaagctagcattccatgtctctttgatactgtagagaagcttcttcgtatgcaggccaataaatgtagatttatactggcttatgtatcacgaaccaaagtcatggacgcactggtactgaaggaagctgaaaaacgtggaatgcttgtcgaggaagtggacgggacaagaacaaccatcacagatctcgaaggcgtcatattcgacatcaccctcaaatgacgcctccgatgaaatgcttgggtgacaattccatcagacaggaacaagatgtggagcctcctcccatcaggaaagccaatgttaccgccttcatgatctgctgagctggccctgaacatgatgtggtctctagtccgcatctctccactccatgggagaaaacagttgcacaacaccagcatcagtcctgatatggcgctgattgattcagcgtaacttttaaatgattcgtcggtcgtgacccctttcgctaaatcaagaagcgattcggggtcacgagcatcgcatcgccgtc

SEQ ID NO: 26029 - protein, 244 aa, Triticum aestivum
MAGAGGTREREEEEEDDFVCLDPSFFMNRNYEMKTFTYGSQELQLLCLSSACTDYDLTGQLVWPGAVLMNTYLSEHPETVKGRSLIELGSGIGITGILCSRFCKEVVLTDHNDEVLEIIKKNIEMQSCSGNADAVLTAEKLEWGNHDHLSNIIEKHPVGFDLILGADICFQQASIPCLFDTVEKLLRMQANKCRFILAYVSRTKVMDALVLKEAEKRGMLVEEVDGTRTTITDLEGVIFDITLK

SEQ ID NO: 26030 - protein, 218 aa, Triticum aestivum
MNRNYEMKTFTYGSQELQLLCLSSACTDYDLTGQLVWPGAVLMNTYLSEHPETVKGRSLIELGSGIGITGILCSRFCKEVVLTDHNDEVLEIIKKNIEMQSCSGNADAVLTAEKLEWGNHDHLSNIIEKHPVGFDLILGADICFQQASIPCLFDTVEKLLRMQANKCRFILAYVSRTKVMDALVLKEAEKRGMLVEEVDGTRTTITDLEGVIFDITLK

SEQ ID NO: 26031 - protein, 212 aa, Triticum aestivum
MKTFTYGSQELQLLCLSSACTDYDLTGQLVWPGAVLMNTYLSEHPETVKGRSLIELGSGIGITGILCSRFCKEVVLTDHNDEVLEIIKKNIEMQSCSGNADAVLTAEKLEWGNHDHLSNIIEKHPVGFDLILGADICFQQASIPCLFDTVEKLLRMQANKCRFILAYVSRTKVMDALVLKEAEKRGMLVEEVDGTRTTITDLEGVIFDITLK

SEQ ID NO: 26032 - DNA, 1467 bp, Triticum aestivum
acaatatataccaggttaaaatctactgcgacggacgagtaacgaaaacggaacgacagatcctgcacgggccacataaaatccaacaatatctgaagccccgatctggatctgggggtgaggccgtgggagcgcgatggggatcagtccatcgtcgttgcgacccccatggagctcgcggcgggccgccacgaaggccgcgccccctgctgcgaccgagggcggcggcggcactcccgtccggctgccgctgccgcacgatgtggtcttcgacatcctgtcgtgggtgccggtgaagtcggcgtgccggttcaaatccgtgtgccgggagtggcgcgccctcatcaacgaccctgccttcgtcgccgcgcacaaggctcgcgcggagccgctcctcgccatcgccgccgactcgtgcgacgagccgtcgaccctgcggctcatcgacatggacggccacatcatcaaggtgatcaaaaactctcttccgattttaaggcttgtctgcagcagccctggcaacctgatgtgcgtcatcgggtatgcgctggggatagccagagtgctcaaccttgcaaccggagaggctgctgtgattgaactcacatctaactttatgggcttcggccgcgccgccccgtcgggcgcctacaagattgtctgcgttagtcccggcagcaccgagatcctcacggtaggagacggcgtgtgctggaggcaagctcagcccctgcctagcagcagcatctcgtataacagccgccctgtcgtggtcaggggtgtcatgtacttgattttagtttcacagctcaatggtgacagcgtgatctgcttcgatcttgagagcgaggagtggaagggggggatcagaggcccgccgagtagcgaacgtcagcggtgtgacgctagcttgcaggaactcaacggggccctgtgtatgctcctgccggaggtcggaaacatttaccatggaaccatgagcatatggctcctgatagattcacgcaagggggtctggatcaaggtgtactcgatccccatggacccgtctgcgtatagtctgatcacgcctttgaggatactaggtgataatggtaaactgctcttccatgtcacgcttagcttcgacgaattcgcagtgctgcaaatctacgaccctcgtcatcggacattcacggacgcgcccaaggtgcttgcgggtgacaacggcggcagtatcagcctttgcagcttgcatctggatagttttctgccggccaacgtctagtgctataaattgtacctatgtgctcgtcctggattgttttattgattgaaaaggttaatttctcaaaagaacaaggtcatactactcctttagagttgacggaaactggctatgtgtctccttggaaaacttctcaggtgggtaatattttgatgtggtgtggtgtgcttgacttgaaattggagtatcgtaatcctcag

SEQ ID NO: 26033 - protein, 376 aa, Triticum aestivum
MGISPSSLRPPWSSRRAATKAAPPAATEGGGGTPVRLPLPHDVVFDILSWVPVKSACRFKSVCREWRALINDPAFVAAHKARAEPLLAIAADSCDEPSTLRLIDMDGHIIKVIKNSLPILRLVCSSPGNLMCVIGYALGIARVLNLATGEAAVIELTSNFMGFGRAAPSGAYKIVCVSPGSTEILTVGDGVCWRQAQPLPSSSISYNSRPVVVRGVMYLILVSQLNGDSVICFDLESEEWKGGIRGPPSSERQRCDASLQELNGALCMLLPEVGNIYHGTMSIWLLIDSRKGVWIKVYSIPMDPSAYSLITPLRILGDNGKLLFHVTLSFDEFAVLQIYDPRHRTFTDAPKVLAGDNGGSISLCSLHLDSFLPANV

SEQ ID NO: 26034 - protein, 272 aa, Triticum aestivum
MDGHIIKVIKNSLPILRLVCSSPGNLMCVIGYALGIARVLNLATGEAAVIELTSNFMGFGRAAPSGAYKIVCVSPGSTEILTVGDGVCWRQAQPLPSSSISYNSRPVVVRGVMYLILVSQLNGDSVICFDLESEEWKGGIRGPPSSERQRCDASLQELNGALCMLLPEVGNIYHGTMSIWLLIDSRKGVWIKVYSIPMDPSAYSLITPLRILGDNGKLLFHVTLSFDEFAVLQIYDPRHRTFTDAPKVLAGDNGGSISLCSLHLDSFLPANV

SEQ ID NO: 26035 - protein, 246 aa, Triticum aestivum
MCVIGYALGIARVLNLATGEAAVIELTSNFMGFGRAAPSGAYKIVCVSPGSTEILTVGDGVCWRQAQPLPSSSISYNSRPVVVRGVMYLILVSQLNGDSVICFDLESEEWKGGIRGPPSSERQRCDASLQELNGALCMLLPEVGNIYHGTMSIWLLIDSRKGVWIKVYSIPMDPSAYSLITPLRILGDNGKLLFHVTLSFDEFAVLQIYDPRHRTFTDAPKVLAGDNGGSISLCSLHLDSFLPANV

SEQ ID NO: 26036 - DNA, 924 bp, Triticum aestivum
cctctctgtcaccgccagcttccacacacctcgtcggcacggaacaccgcccctcgagtcaagagtcaacccacacccaccgatctccgtccatcgaccatgggagccggccaggacctggaggccggcgccggcgacggcggcgagaagaagatggcccactcctcctcctcgggcccgctcccgccgtcggagccgccgcacctgcggggccaggaccccgcccagtaccagtatggtaccttccacccccctgccccccaccccgacgtccgcccccacccgcccgtcggcttcccccaacccgcgcctccccccggattcgccgccggcggctaccagcagcagcagcagaagcagccctacgcgcccgccgacccctactacgcgcaggggtaccaggccgccccaggttatggtcctgttgttcaaggtaggcctgttgaaggaagacccgtgagaatgcggcgccttccatgctgtgggctcggcatgggctggcttctgttcattgccgggttcttcttggctgccattccgtggtatattggtgctttcgtcctaatctgtgtccgggtacatgaccacagagagaaaccaggatatgttgcctgcactgttgctgctataattgcggccattgttataccccttggagtaacaaaaggaacagactcatggtgagccaccaccaggtcttggcaggcggttctgttgctgaatataaacatcgttatttcaggcccagttacatgataggttaaaaagtctgctggttgtatttcatgtatgagtgtgtcttgtatacatatatgtacagtaaaaagagtggggctgcatcttcgatgttctcttgtatcgatacttggtacttatagtgtgtaataaaagcttgaatgtacaacacatatcttcctcgaggct

SEQ ID NO: 26037 - protein, 227 aa, Triticum aestivum
PLCHRQLPHTSSARNTAPRVKSQPTPTDLRPSTMGAGQDLEAGAGDGGEKKMAHSSSSGPLPPSEPPHLRGQDPAQYQYGTFHPPAPHPDVRPHPPVGFPQPAPPPGFAAGGYQQQQQKQPYAPADPYYAQGYQAAPGYGPVVQGRPVEGRPVRMRRLPCCGLGMGWLLFIAGFFLAAIPWYIGAFVLICVRVHDHREKPGYVACTVAAIIAAIVIPLGVTKGTDSW

SEQ ID NO: 26038 - protein, 194 aa, Triticum aestivum
MGAGQDLEAGAGDGGEKKMAHSSSSGPLPPSEPPHLRGQDPAQYQYGTFHPPAPHPDVRPHPPVGFPQPAPPPGFAAGGYQQQQQKQPYAPADPYYAQGYQAAPGYGPVVQGRPVEGRPVRMRRLPCCGLGMGWLLFIAGFFLAAIPWYIGAFVLICVRVHDHREKPGYVACTVAAIIAAIVIPLGVTKGTDSW

SEQ ID NO: 26039 - protein, 176 aa, Triticum aestivum
MAHSSSSGPLPPSEPPHLRGQDPAQYQYGTFHPPAPHPDVRPHPPVGFPQPAPPPGFAAGGYQQQQQKQPYAPADPYYAQGYQAAPGYGPVVQGRPVEGRPVRMRRLPCCGLGMGWLLFIAGFFLAAIPWYIGAFVLICVRVHDHREKPGYVACTVAAIIAAIVIPLGVTKGTDSW

SEQ ID NO: 26040 - DNA, 1831 bp, Triticum aestivum
agattaaatgttgaggtggaggaaagagaaaccgaaaaaaaggtcttgccttcgcttaattaagcgatgacatcttagccccgattttgatgcgatctgtgatccatgcgccgaacggccacagccggatccttctcgttgcctcgcgcgaaaattttcttcttggcgcgcctctcttccttctcgcccgtcctgcgcgccaaatttctcatcccgatcctggagcccgccagaagaaacctaggcccgctgcccccataaatccacagcagcagactccatcttccatccgtgcgacttgcaggttccttgagcaccaacatggctggccatgggaggaagaaagcggcgcccccatcccaggtgatggacggaccagacggacaagacccaaaatatggcgcccctcccctgccgatggggcgacctaaagctgccgcagcagccgtagcggcatcgaacgcttggttggctgggcatgctgccgctagatccgattcttcccttcaagttgattggggaaatgatgtttacccacctggtggttttgtaaattatttgaacaattcatcgagcttcagtcttccacaacaaattcctcctccaccagccatgacacatggtgctaatttcgcggcaccgctgacatttgcatctcaaaagaatccaattacagcagtgaagaaacgatccaaacgtgcccatgttgaaattgcggatgatgcgggagaaggtaaaactatgaagagattgccatggacatcagaggaggaggatagattgatgagtgcttggctcaagaactcaaatgatcctatcggtggtaatttcaagaagaatgacaaatattggggagatgtggtcgcggactacaatagcaacaccccctcagatcgcaaaagacaagtcaatcaagctatgaaccgatggcatcgagttaacaaaatgataaataatttccattccatccacggagagattagcggtgtatatgctagtgggcagtccaatcagcaattgatggagaaagtccacaaagcatatgagaacagacacggaggaccatttcttctggaaagtacctggcaggttgttcgtcactatccgaagtggtctacgtacaatgcagaactgaatggattgaagaaaatagatgtggccgacctggggaaggcagaggatcatgaggcagctgatagtgatgatatcccacggcctccaggtactaaaacagctaaaagagatgggaatggcaatgacaaaagaaagttgaagtcagaggatttagaagagcttgagaaattcttagaagcccaaaaagaagctactaaaagtcgcacggatgtccttgaggttcaaaagcgtattgcagccgataaacttgagtcgtcgaggctcattctccttgcagcgaaggagaacaaggaggcaaaaacaagagggaaaatgctagaacagtacggtaaattattgacacaagatatggcagggatgaccgagtttcagaaagctgagcatgcgattgcacttaaattgatgcgggaggagttattccccaacgctcgtcaataagtttggaaggaacctgttcctgtttgatgaatgaagagagaagaacagccaatgaagcaatgtggttcatgtcctagtactgatgcttcgggagtgcacaagcttgtttttgttttgttgacagaagtagttattatcaatagatttctgttggtctcgagctagttatttatgtatgtcaacttcttgcttaagtacttccaaaaattgttttctaatctgaagtcagtaataatcattaatccgtaatgattaaaat

SEQ ID NO: 26041 - protein, 416 aa, Triticum aestivum
MAGHGRKKAAPPSQVMDGPDGQDPKYGAPPLPMGRPKAAAAAVAASNAWLAGHAAARSDSSLQVDWGNDVYPPGGFVNYLNNSSSFSLPQQIPPPPAMTHGANFAAPLTFASQKNPITAVKKRSKRAHVEIADDAGEGKTMKRLPWTSEEEDRLMSAWLKNSNDPIGGNFKKNDKYWGDVVADYNSNTPSDRKRQVNQAMNRWHRVNKMINNFHSIHGEISGVYASGQSNQQLMEKVHKAYENRHGGPFLLESTWQVVRHYPKWSTYNAELNGLKKIDVADLGKAEDHEAADSDDIPRPPGTKTAKRDGNGNDKRKLKSEDLEELEKFLEAQKEATKSRTDVLEVQKRIAADKLESSRLILLAAKENKEAKTRGKMLEQYGKLLTQDMAGMTEFQKAEHAIALKLMREELFPNARQ

SEQ ID NO: 26042 - protein, 401 aa, Triticum aestivum
MDGPDGQDPKYGAPPLPMGRPKAAAAAVAASNAWLAGHAAARSDSSLQVDWGNDVYPPGGFVNYLNNSSSFSLPQQIPPPPAMTHGANFAAPLTFASQKNPITAVKKRSKRAHVEIADDAGEGKTMKRLPWTSEEEDRLMSAWLKNSNDPIGGNFKKNDKYWGDVVADYNSNTPSDRKRQVNQAMNRWHRVNKMINNFHSIHGEISGVYASGQSNQQLMEKVHKAYENRHGGPFLLESTWQVVRHYPKWSTYNAELNGLKKIDVADLGKAEDHEAADSDDIPRPPGTKTAKRDGNGNDKRKLKSEDLEELEKFLEAQKEATKSRTDVLEVQKRIAADKLESSRLILLAAKENKEAKTRGKMLEQYGKLLTQDMAGMTEFQKAEHAIALKLMREELFPNARQ

SEQ ID NO: 26043 - protein, 384 aa, Triticum aestivum
MGRPKAAAAAVAASNAWLAGHAAARSDSSLQVDWGNDVYPPGGFVNYLNNSSSFSLPQQIPPPPAMTHGANFAAPLTFASQKNPITAVKKRSKRAHVEIADDAGEGKTMKRLPWTSEEEDRLMSAWLKNSNDPIGGNFKKNDKYWGDVVADYNSNTPSDRKRQVNQAMNRWHRVNKMINNFHSIHGEISGVYASGQSNQQLMEKVHKAYENRHGGPFLLESTWQVVRHYPKWSTYNAELNGLKKIDVADLGKAEDHEAADSDDIPRPPGTKTAKRDGNGNDKRKLKSEDLEELEKFLEAQKEATKSRTDVLEVQKRIAADKLESSRLILLAAKENKEAKTRGKMLEQYGKLLTQDMAGMTEFQKAEHAIALKLMREELFPNARQ

SEQ ID NO: 26044 - DNA, 515 bp, Triticum aestivum
ataacgtttcctcgttgccggggggaagctctctcgtgtcctcctctgctcttcctcgacgagagtgaggccggccaccggcgacagggcggccatggcggcggcgcttctctccccggcctctcccctccctcgctcctcctccgcggcccatcccaggagcaagggcgcggctggtgcagcagcagggtgcgctccgccgtccaggaggagggccgtctcgtgctcgtgcgcgcccgattcgtggagcctcgggctggagaggaggcagctcgtgctctccggcctcgtctcctcctttgcaatcgccctcccgattacagtagtacaatcgtgcgctgctgccactgaggttgagcttgacgacggcgtgaagatggccatgctggtagatgagaccaacgcctactcttttctctacccggttcagctgccagggaagaaaacctccttcagatgggtggagtccaggaaatcggagcgatattcctctgcggcgccactatctcctgatg

SEQ ID NO: 26045 - protein, 140 aa, Triticum aestivum
MAAALLSPASPLPRSSSAAHPRSKGAAGAAAGCAPPSRRRAVSCSCAPDSWSLGLERRQLVLSGLVSSFAIALPITVVQSCAAATEVELDDGVKMAMLVDETNAYSFLYPVQLPGKKTSFRWVESRKSERYSSAAPLSPD

SEQ ID NO: 26046 - protein, 116 aa, Triticum aestivum
ITFPRCRGEALSCPPLLFLDESEAGHRRQGGHGGGASLPGLSPPSLLLRGPSQEQGRGWCSSRVRSAVQEEGRLVLVRARFVEPRAGEEAARALRPRLLLCNRPPDYSSTIVRCCH

SEQ ID NO: 26047 - DNA, 673 bp, Triticum aestivum
aactcagccagccacaccgccgcccctcccacccacccaagaatcctccaccataatccccggcaacccacgcccggctccgatggcccgcacgaagcagacggcgcgcaagtcgacgggcggcaaggcgccgaggaagcagctggcgaccaaggcggcgcgcaagtcggcgccggccaccggcggcgtgaagaagccgcaccgcttccgcccgggcaccgtggcgctgcgcgagatccgcaagtaccagaagagcacggagctgctcatccgcaagctccccttccagcgcctggtgcgggagatcgcgcaggacttcaagacggacctccggttccagagctccgccgtgtcggcgctgcaggaggccgccgaggcatacctggtgggcctgttcgaggacaccaacctctgcgccatccacgccaagcgcgtcaccatcatgcccaaggacatccagctcgcccgccgcatccgtggggagcgcgcctaggtctctctgcctcccgcccgccgccacggttccttctcggttgatcccgccgacggatctgttctgccctgttagtctagtctagtcgtgcttcgagttgttattaagatttgttctgtcctgttagtcgtgggctgttgattacctgctcgaaaattggaatggaagtgatgttatttg

SEQ ID NO: 26048 - protein, 178 aa, Triticum aestivum
NSASHTAAPPTHPRILHHNPRQPTPGSDGPHEADGAQVDGRQGAEEAAGDQGGAQVGAGHRRREEAAPLPPGHRGAARDPQVPEEHGAAHPQAPLPAPGAGDRAGLQDGPPVPELRRVGAAGGRRGIPGGPVRGHQPLRHPRQARHHHAQGHPARPPHPWGARLGLSASRPPPRFLLG

SEQ ID NO: 26049 - protein, 163 aa, Triticum aestivum
TQPATPPPLPPTQESSTIIPGNPRPAPMARTKQTARKSTGGKAPRKQLATKAARKSAPATGGVKKPHRFRPGTVALREIRKYQKSTELLIRKLPFQRLVREIAQDFKTDLRFQSSAVSALQEAAEAYLVGLFEDTNLCAIHAKRVTIMPKDIQLARRIRGERA

SEQ ID NO: 26050 - protein, 136 aa, Triticum aestivum; identical to SEQ ID NO: 13956

SEQ ID NO: 26051 - DNA, 1096 bp, Triticum aestivum
acaagcctgttctccccagatcccctcctcgtccccgattcgattcgattccccgcatcggccggtaccaatccggcgcccgccaccccacactccgccgatgttcctccgatcgcgccgcctgtgatcaccccgctctcttctctctcgccagctcagccagccgccggttaggatcggggccgggggagcgcgatggccgcgccgccggctagggcccgcgccgactacgactacctcatcaagctcctcctcatcggcgacagcggtgattctccttgctcctcctgctagatctctctcccggcatgccgcgggcttctctgcgcgagtgcgcaatggtgttggcaagagttgcctcctcctacggttctctgatggctccttcactactagttttattactacaataggtattgacttcaagataagaacaattgaactggatggcaagcgcattaagttgcaaatttgggatacagccggtcaagagcgattcaggactatcacgacagcatactaccggggagccatgggaatcttgcttgtttatgatgtcacggatgagtcatctttcaacaacagacatacggaactggatacgcaacattgagcaacatgcctctgataatgtgaacaaaattttgataggcaacaaggctgatatggatgagagtaaaagggctgtttctactgcaaagggacaagcactagcggatgaatatggcatccagttctttgaaactagtgccaagacaaacctcaatgttgagcaagttttcttttccattgcccgagatattaagcagaggcttgctgagactgattccaagcccgaggaccagacgatcaagattaacaagacagaaggttctgagaatccagaatctcagaaatctgcttgctgtggctcatgaggaatacgtggacttctaccatgggctgttttaactttatctgtttattactgtcagcttgttattataggaactgtaagacttaaggagatgactatgttgtggttgttgtgttaccttctatattctttgcagcagcaactattacttttaatgtagtttttgtgatttctaggggt

SEQ ID NO: 26052 - protein, 156 aa, Triticum aestivum
MASALSCKFGIQPVKSDSGLSRQHTTGEPWESCLFMMSRMSHLSTTDIRNWIRNIEQHASDNVNKILIGNKADMDESKRAVSTAKGQALADEYGIQFFETSAKTNLNVEQVFFSIARDIKQRLAETDSKPEDQTIKINKTEGSENPESQKSACCGS

SEQ ID NO: 26053 - protein, 121 aa, Triticum aestivum
MMSRMSHLSTTDIRNWIRNIEQHASDNVNKILIGNKADMDESKRAVSTAKGQALADEYGIQFFETSAKTNLNVEQVFFSIARDIKQRLAETDSKPEDQTIKINKTEGSENPESQKSACCGS

SEQ ID NO: 26054 - protein, 120 aa, Triticum aestivum
MSRMSHLSTTDIRNWIRNIEQHASDNVNKILIGNKADMDESKRAVSTAKGQALADEYGIQFFETSAKTNLNVEQVFFSIARDIKQRLAETDSKPEDQTIKINKTEGSENPESQKSACCGS

SEQ ID NO: 26055 - DNA, 1451 bp, Triticum aestivum
ggggtttccgacttttctttctctcctcctccacgactctcccaacctctctagcgaagtcgacgcggcgaagaaatcaggcgacaagattgcgaacgctagatatctcgacccgatccgggtcgggtcggccatgacggtagatcggaaggacgctgaggcggccgccgccgccgcacccttcgagatcccggcgctccagcctggaagaacttgtggagcagaggaaagtacccggagtcatgttctcgtcaaaccaataggaaaaagcgacctcggagatcacgtgatgggcctaattcagtctctgaaacgatcaggcgatggaaagaagtgaaccaacaactggagcatgatccacagggttcaaagaggtcgaggaagccacctgcaaagggttcaaagaagggctgtatgcaggggaaaggaggacctgagaatacacaatgtggattccgtggtgtaaggcaacgtacttgggggaagtgggttgctgaaattcgggagccaaatcgggtgagcaggctctggttgggaacgttccccactgctgaggatgctgcccgtgcttatgacgaggcagccagagcaatgtatggcgcactggctcgtgccaacttccctgtgcatcctgcacaagctcctgctgtggctgtagcagcggcaattgaaggtgttgtacgtggtgcttcagcatcatgtgagtctactacaacatccaccaaccactcagatgttgcttcttccttgccgcgacaagctcaagctcttgagatttactcccagccagatgtgcttgagtccaccgaatctgttgagcattacagccatcaagacagtgttcctgacgctggctcaagcattgcaaggagcatatccgaagaggatgtgtttgagccgttggagcctatttccagtttgccggatggggaatctgacggttttgatatagaagaattattaagattgatggaagccgacccaattgaagttgagccggtcaccgggggctcctggaatggcgtggagattggccagcaggaacctctctacctggatggcttggaccaaggcatgctggagggcatgctgcagtctgattatccttacccaatgtggatatcagaggatcgggccatgtacaaccctgccttccatgatgctgagatgagcgagttcttcgaagggttgtgatcccctctctggcggccaaaccatgtctatggtgtttggtcggcttgcccttcggtgtccgctgctgcgctccaatgaagatcaaatggtggaccggattggattcctctgcagaactaataagctcctaagctagttttttgtgcttcgtttgcagttctgttaggcatgggaactcttctctgtttcgatgtttcttattataagaaaccttgcttgtgcatcacgatctttggaaggtggaaaaagaaaatgtg

SEQ ID NO: 26056 - protein, 259 aa, Triticum aestivum
MQGKGGPENTQCGFRGVRQRTWGKWVAEIREPNRVSRLWLGTFPTAEDAARAYDEAARAMYGALARANFPVHPAQAPAVAVAAAIEGVVRGASASCESTTTSTNHSDVASSLPRQAQALEIYSQPDVLESTESVEHYSHQDSVPDAGSSIARSISEEDVFEPLEPISSLPDGESDGFDIEELLRLMEADPIEVEPVTGGSWNGVEIGQQEPLYLDGLDQGMLEGMLQSDYPYPMWISEDRAMYNPAFHDAEMSEFFEGL

SEQ ID NO: 26057 - protein, 200 aa, Triticum aestivum
MYGALARANFPVHPAQAPAVAVAAAIEGVVRGASASCESTTTSTNHSDVASSLPRQAQALEIYSQPDVLESTESVEHYSHQDSVPDAGSSIARSISEEDVFEPLEPISSLPDGESDGFDIEELLRLMEADPIEVEPVTGGSWNGVEIGQQEPLYLDGLDQGMLEGMLQSDYPYPMWISEDRAMYNPAFHDAEMSEFFEGL

SEQ ID NO: 26058 - DNA, 713 bp, Triticum aestivum
gaccgtccgagccaatccaggagcgccgccgagccctcctccctcccgtcccgatcatttctctccgccaccaccaccagccgcaaaaaaaatgtgcggaaagggccggaacaacgggctcgcgtcgccggcggggacaagcggcacggcgaccgccatcgtcgccctcgcgtcgctgctcctcgcggcctcggtcgtcgtcttcctcgtgtcgccgccggcgccggcggcggacgagaagccccccgagccggtggagctcgccatcggcgtcgccgggcacgagggctggctggacgcgctccgggcgtgggccaagctggcgtgcctcaagctccgcccgctcgagccaaggtgtgatctgaggagctcggggtcgatgaagaaggcggccaagcagagcctggcgatgggcaaggaggccgtggagcagacggcggtgtcggcggcgagggccgccgaggagaccatcgggaggaccaccgagaaggtgcggaggaaggtctccccgtcgccgtcgacgtcgtcggcgccactcgccgatggagacctgtgatctgcatgcaggtcgacgcaagcgccaaaattttccgagctgtatccctccactttatgttacctgtaagctgtagctttctactagtgcgagaagaaaagatgcccccctcggcgatatgtatgcgtatgaatatcctgcgattctgtttttctct

SEQ ID NO: 26059 - protein, 184 aa, Triticum aestivum
TVRANPGAPPSPPPSRPDHFSPPPPPAAKKMCGKGRNNGLASPAGTSGTATAIVALASLLLAASVVVFLVSPPAPAADEKPPEPVELAIGVAGHEGWLDALRAWAKLACLKLRPLEPRCDLRSSGSMKKAAKQSLAMGKEAVEQTAVSAARAAEETIGRTTEKVRRKVSPSPSTSSAPLADGDL

SEQ ID NO: 26060 - protein, 154 aa, Triticum aestivum
MCGKGRNNGLASPAGTSGTATAIVALASLLLAASVVVFLVSPPAPAADEKPPEPVELAIGVAGHEGWLDALRAWAKLACLKLRPLEPRCDLRSSGSMKKAAKQSLAMGKEAVEQTAVSAARAAEETIGRTTEKVRRKVSPSPSTSSAPLADGDL

SEQ ID NO: 26061 - protein, 120 aa, Triticum aestivum
PSEPIQERRRALLPPVPIISLRHHHQPQKKCAERAGTTGSRRRRGQAARRPPSSPSRRCSSRPRSSSSSCRRRRRRRTRSPPSRWSSPSASPGTRAGWTRSGRGPSWRASSSARSSQGVI

SEQ ID NO: 26062 - DNA, 883 bp, Triticum aestivum
tttagcggatctaattggagatgaaaacaaggcaaaagaaattgttgaggcagcaaaggcatctatgggccaggatctttcacctgttgatttgatcaatgtccaacagtttgctcagagggtcatgaatctatctgagtaccgtaaaaatctctatgagtatctggtgacaaagatgaatgatattgcaccaaacctgacatcattgattggtgaaatggttggagctcggctaatctctcatgctggcagtctttcaaatcttgcaaaatgccctgcctctactctgcagatactgggtgctgaaaaggcactctttagagctctgaaaacacgtggaaacacaccaaagtatggcctcatattccactcatcttttattggtcgtgcatcaaccaagaacaagggaaggatggctcgttaccttgcaaacaaatgttccattgcttcacgaattgactgctattcagatatgagtagctccatttttggtgagaagctgcgtgaacaggttgaggagaggctagatttctacgataagggtgttgcaccccgcaagaaccttgatgtgatgaaagctgctattgatggcttgacaaacacagaggatgatgacggcaaagagaatggtgacacatctgtgaagaaaagcaagaagaagaagtccaaagctgaggctaacggtgacgcgatggacgttgagaatgctgcaacagaagctgaaactggaaccgagaagaagaagaagaagaagcacaagcttgaggagccgcaggatgaggagatgcaagccaatggcgatgacgagacccctaagaagaagaaaaagaagaaccgcgacgccgagtctgttgatcctaagactggcaccgaggggaaatcc

SEQ ID NO: 26063 - protein, 294 aa, Triticum aestivum
LADLIGDENKAKEIVEAAKASMGQDLSPVDLINVQQFAQRVMNLSEYRKNLYEYLVTKMNDIAPNLTSLIGEMVGARLISHAGSLSNLAKCPASTLQILGAEKALFRALKTRGNTPKYGLIFHSSFIGRASTKNKGRMARYLANKCSIASRIDCYSDMSSSIFGEKLREQVEERLDFYDKGVAPRKNLDVMKAAIDGLTNTEDDDGKENGDTSVKKSKKKKSKAEANGDAMDVENAATEAETGTEKKKKKKHKLEEPQDEEMQANGDDETPKKKKKKNRDAESVDPKTGTEGKS

SEQ ID NO: 26064 - protein, 273 aa, Triticum aestivum
MGQDLSPVDLINVQQFAQRVMNLSEYRKNLYEYLVTKMNDIAPNLTSLIGEMVGARLISHAGSLSNLAKCPASTLQILGAEKALFRALKTRGNTPKYGLIFHSSFIGRASTKNKGRMARYLANKCSIASRIDCYSDMSSSIFGEKLREQVEERLDFYDKGVAPRKNLDVMKAAIDGLTNTEDDDGKENGDTSVKKSKKKKSKAEANGDAMDVENAATEAETGTEKKKKKKHKLEEPQDEEMQANGDDETPKKKKKKNRDAESVDPKTGTEGKS

SEQ ID NO: 26065 - protein, 253 aa, Triticum aestivum
MNLSEYRKNLYEYLVTKMNDIAPNLTSLIGEMVGARLISHAGSLSNLAKCPASTLQILGAEKALFRALKTRGNTPKYGLIFHSSFIGRASTKNKGRMARYLANKCSIASRIDCYSDMSSSIFGEKLREQVEERLDFYDKGVAPRKNLDVMKAAIDGLTNTEDDDGKENGDTSVKKSKKKKSKAEANGDAMDVENAATEAETGTEKKKKKKHKLEEPQDEEMQANGDDETPKKKKKKNRDAESVDPKTGTEGKS

SEQ ID NO: 26066 - DNA, 1750 bp, Triticum aestivum
aaagtaacaacctccaactcagacacagtcaccaccctgtcccctcccctcctcttcctcggccctcgcttcgttctccgcgggagccggcgagccgccgccccactctctctctccccccgtccaccgcacgcctccgccacgccattcccatatgctcttctccggcgagggcaacagagcatgattctgtggcaaggttgaatggcggtgagttaggagactgcggagcaggggttattaataaattgtgcaagaggcgagccttggccgagatggatgccgttgttgatgttgccgatgctatgggcgctgtgactatagagaacggggcgaagctggagttgcctgacggtgtagaggagcgcggcgaagagcatgatgcgcaggccaacagagaccattcaggggagagtgaggtgatcaacccgcacgaagaggcaggtggagaagccagctcacacccagaagggaggaagatcggccgttccaagggaactgcaagtcatggtcctaaggttgcaaagacaaggagcccaaagagtggagatgaaggtctagcaaggagaggcacccctagttcctctcttcgtaaggcacccattgtgcgagtatcgcatgcagactcaggcactggctcttgtaccaatggtgatccgagtgtcgataagaaaaaatctggaaagattgagtctcgtccgtctgccaaggagacatcattgctcgaggacgcaaaatccagggagggaagtaaagctcaaaagcaatcagaccagcattcttccatcagaagagatgaagaagatttaaatagtgaaagttcaaaagctcgaaggtctggcagcactcctgcctatggattcagtttcaagtgtgatgagagagctgaaaaaagaagagagttctactcaaagcttgaggagaagattcacgcaagagagatggaaataagcaatatgcaagcgaaatcgaaggagactgaagaagctgaactcaaaatgctgagaaaaagcttaaagttcaaggctacgccgatgccaagcttctccccaccaccaaaggttgaactgaaaaagattcctcccactagagctaaatcaccaaagcttggccgttccaagaacaaatctgggctggaggctgaagaaagtaccaccccaagccatcctatccgtatgagccttgatgagaaggctactcaaaatggtgcgaagaaagtaaccccatcaaactcggtgaagaagccccagaggaagtcactcccgaaattgccatcagaggcaagcggcccacttgaggccagacagccaaaaatgccatcagaggcaagcggcccacttgaggccacacagccaaaaagcacggaggacctaaacacagataatcatcaggagtcagggtcgccagcaaagcagcttcaggaaaccgagtcgatcgccagcaacgcccaggagccgatccgagctaaagttacccccgacgaccaagaactcgacgagcaggcatccgtgtagcaacgaccatggtgaccaaatccttcgattttgtgatggcaggtgtgcatgcctctggctttgtcgcgtattgtgccatatttcgatagtgtatctagtgtcctgtgttcagtaaaccaacgctcgtctcgtctttgttgagtctagcatctgtgttgcttctgttcataatcgtaagcgaggctccagtgtcgtgtgcaactgcaaatagttttgtcctattttctactgctgct

SEQ ID NO: 26067 - protein, 503 aa, Triticum aestivum
SNNLQLRHSHHPVPSPPLPRPSLRSPREPASRRPTLSLPPSTARLRHAIPICSSPARATEHDSVARLNGGELGDCGAGVINKLCKRRALAEMDAVVDVADAMGAVTIENGAKLELPDGVEERGEEHDAQANRDHSGESEVINPHEEAGGEASSHPEGRKIGRSKGTASHGPKVAKTRSPKSGDEGLARRGTPSSSLRKAPIVRVSHADSGTGSCTNGDPSVDKKKSGKIESRPSAKETSLLEDAKSREGSKAQKQSDQHSSIRRDEEDLNSESSKARRSGSTPAYGFSFKCDERAEKRREFYSKLEEKIHAREMEISNMQAKSKETEEAELKMLRKSLKFKATPMPSFSPPPKVELKKIPPTRAKSPKLGRSKNKSGLEAEESTTPSHPIRMSLDEKATQNGAKKVTPSNSVKKPQRKSLPKLPSEASGPLEARQPKMPSEASGPLEATQPKSTEDLNTDNHQESGSPAKQLQETESIASNAQEPIRAKVTPDDQELDEQASV

SEQ ID NO: 26068 - protein, 412 aa, Triticum aestivum
MDAVVDVADAMGAVTIENGAKLELPDGVEERGEEHDAQANRDHSGESEVINPHEEAGGEASSHPEGRKIGRSKGTASHGPKVAKTRSPKSGDEGLARRGTPSSSLRKAPIVRVSHADSGTGSCTNGDPSVDKKKSGKIESRPSAKETSLLEDAKSREGSKAQKQSDQHSSIRRDEEDLNSESSKARRSGSTPAYGFSFKCDERAEKRREFYSKLEEKIHAREMEISNMQAKSKETEEAELKMLRKSLKFKATPMPSFSPPPKVELKKIPPTRAKSPKLGRSKNKSGLEAEESTTPSHPIRMSLDEKATQNGAKKVTPSNSVKKPQRKSLPKLPSEASGPLEARQPKMPSEASGPLEATQPKSTEDLNTDNHQESGSPAKQLQETESIASNAQEPIRAKVTPDDQELDEQASV

SEQ ID NO: 26069 - protein, 402 aa, Triticum aestivum
MGAVTIENGAKLELPDGVEERGEEHDAQANRDHSGESEVINPHEEAGGEASSHPEGRKIGRSKGTASHGPKVAKTRSPKSGDEGLARRGTPSSSLRKAPIVRVSHADSGTGSCTNGDPSVDKKKSGKIESRPSAKETSLLEDAKSREGSKAQKQSDQHSSIRRDEEDLNSESSKARRSGSTPAYGFSFKCDERAEKRREFYSKLEEKIHAREMEISNMQAKSKETEEAELKMLRKSLKFKATPMPSFSPPPKVELKKIPPTRAKSPKLGRSKNKSGLEAEESTTPSHPIRMSLDEKATQNGAKKVTPSNSVKKPQRKSLPKLPSEASGPLEARQPKMPSEASGPLEATQPKSTEDLNTDNHQESGSPAKQLQETESIASNAQEPIRAKVTPDDQELDEQASV

SEQ ID NO: 26070 - DNA, 482 bp, Triticum aestivum
aacacacacataccaacagagcaacaaccaacaaagaacagagtaccatatcaactagccgtagccacacagagagatcgacggaagagccttagctttagccatcgcctagcacagcacaccaccgcaccaccaccagcacctacataagcacgcatggcgcgctgggccatcgccatccacggaggcgcgggcgtggaccccaacctgccggagcaccgccaggaggaggccaagcgcgtgctggcccggtgcctgcaggtcggcgtcgacctgctccgggctggtgcgacggcgctggacgtcgtggaggccgtggtgcgggagctggagacggacccctgcttcaactcgggccgcggctccgcgctcacacgcgccggcaccgtcgagatggaggccagcatcatggacggccgcggccgccgctgcggcgccgtctccggtgtgtccaccgttaaaaaccccgtgtccctggcccg

SEQ ID NO: 26071 - protein, 108 aa, Triticum aestivum
MARWAIAIHGGAGVDPNLPEHRQEEAKRVLARCLQVGVDLLRAGATALDVVEAVVRELETDPCFNSGRGSALTRAGTVEMEASIMDGRGRRCGAVSGVSTVKNPVSLA

SEQ ID NO: 26072 - DNA, 486 bp, Triticum aestivum
tcgtctccgtttgaagacaaggagcaaagttggaaaccgccgccgattccctgtcctgcccctcctcgtagcataccgcttctagtataaccttgccctccggggggcacagcctctcctccttcccctgaccacctcctcagttttttctcaccctcctcaatggcgaatctgccgccgtccctcgccgccggcccctccttcggcgcgccctccccgcccccgctcccgcccccgtccggctcgtcggccgcggcgccgcccgccggggggagggaccggaagatggtgtccgcggagcagctcgtgctcgacctctgcgacccggagctgcgcgagaacgccctcctcgagctctccaagaagcgagagatttttcaagaccttgctccactgctgtggcactcctttggcaccgttgctgcactgctccaggagattgtgtcaatctacccttcactttcacctcctactttgtcgccagtt

SEQ ID NO: 26073 - protein, 108 aa, Triticum aestivum
MANLPPSLAAGPSFGAPSPPPLPPPSGSSAAAPPAGGRDRKMVSAEQLVLDLCDPELRENALLELSKKREIFQDLAPLLWHSFGTVAALLQEIVSIYPSLSPPTLSPV

SEQ ID NO: 26074 - protein, 67 aa, Triticum aestivum
MVSAEQLVLDLCDPELRENALLELSKKREIFQDLAPLLWHSFGTVAALLQEIVSIYPSLSPPTLSPV

SEQ ID NO: 26075 - DNA, 1608 bp, Triticum aestivum
ccactttcccctctccccgactgcgaatcattccgctcgtcgctcgacatggcgacggaacctgtagagtttcaggttgtggtgctcagggtgtccatccattgtgaagggtgcaaaaagaaggtgaagaaggtgctcctacatattgatggtatgcctcgctgatttgattgatcgccatgtgttgtttcagatgcctttgtagaaatttccatgctgggaactctgataggatatttgcatgtgcatctctaagcaaacactgccatactaacatgtacaaagaaggcgcaagaaccaaaataatcatggttatgctgagttactgaacaaaatttccgtttcctttgatcttgcaggcgtatacagatgtgacatcgacgcccggagaaacagggtggcggtcacagtctctccaaagatcgacgccgggatcctcgtcgcgaggctgcgcaagtctggcaaactggcggagccttggccggaggagcccaaacagcagcaggagccgcctcctcctgcagagagccaaagccaagaagccaagaaccaagcagatgatgccagcaagcctaacgaggccgccgagaagcccgccgccgagccaagcaccgcccagcctccggcgccggaacccgagaagaccgccgaagagaccccaccgccggccgaagaaagcaaagggcccgacgaggccaaggcggagacagggccgcaacaacaacccagcgaggcgaacgggaaagccaagcagcagcagcagcaccaggagcagcatgatcatcatgataagccgatgaacgccagggtgacgatggagttcgacgacgcccgcagcagaggcgtctacggctacgggggcccccaccagtacatgccagccacacggcagccgccggtgcacgtcatgagctacaacgtggcacggccgatggcgagctcgtcatactacgccgccgcgccgacgccggcggcgatgcccacgcccatggcgaggccagggccgtcgcacggcggctacatagacgagtacgcgcctccgaactactacagccggccagcgccatcggcgtacgagccctactactaccccgatccccagccgtcgccgtaccagcatcagcgttctgcggccgaggactactactacggagggccgccgccgcctccgcagaggagcgccttctcgccgccgcgggaggcctacggcgacatgttcaacgacgagaatgccaattcttgcagcgtgatgtgaaggatccattcggcaggtttagctagttaatttaatgttctttaactgaggacctctccatgtgttagagccgagattttagtagtagcagccgatgtattagcagtattgctcaggttccatgctagtactagaataaaacgagctgagcttggtgcatgcatgcatgagaggaagaacgggagggattcatggaacagctctgatcgatgcttactggagcaattttgtaatatacttcctctgtatttgaactgcaaaaacgtcttacatttaaataggagcctcttctacggaaggctctgaggagcgtgtcgaaatcatcttaattcttatacatatggttatcgttg

SEQ ID NO: 26076 - protein, 152 aa, Triticum aestivum
MNARVTMEFDDARSRGVYGYGGPHQYMPATRQPPVHVMSYNVARPMASSSYYAAAPTPAAMPTPMARPGPSHGGYIDEYAPPNYYSRPAPSAYEPYYYPDPQPSPYQHQRSAAEDYYYGGPPPPPQRSAFSPPREAYGDMFNDENANSCSVM

SEQ ID NO: 26077 - protein, 146 aa, Triticum aestivum
MEFDDARSRGVYGYGGPHQYMPATRQPPVHVMSYNVARPMASSSYYAAAPTPAAMPTPMARPGPSHGGYIDEYAPPNYYSRPAPSAYEPYYYPDPQPSPYQHQRSAAEDYYYGGPPPPPQRSAFSPPREAYGDMFNDENANSCSVM

SEQ ID NO: 26078 - protein, 126 aa, Triticum aestivum
MPATRQPPVHVMSYNVARPMASSSYYAAAPTPAAMPTPMARPGPSHGGYIDEYAPPNYYSRPAPSAYEPYYYPDPQPSPYQHQRSAAEDYYYGGPPPPPQRSAFSPPREAYGDMFNDENANSCSVM

SEQ ID NO: 26079 - DNA, 531 bp, Triticum aestivum
  misc_feature (487)..(487): n is a, c, g, or t
tataacatctctaatcgaaaaaaattaaaaagacagaacaccgaagcaccgaagcgcagctccaccaccatttcacactctcccctgcttcacttcactgagaagcacacggacgaaaagctgcttgctgggagccatggctcccccgctcctcctcctcgtcctcttcctcctcccggccctcgccgccggccaccagcacccctcctcctacggctcctccgccctctccgaatggcgcaacgccaagtcctcctacttcgccgccgaccccggagacgccatcggtggcgcgtgcgggttcggggatctggggaagcacgggtacgggatggcgacggtggggctgagcacggcgctgttcgagcgcggcgccgcctgcggcggctgctacgaggtcaagtgcgtggaggacctcaagtactgcctccccggcacctccatcgtcgtcacggccaccaacttctgcccgcccaactacggcttncccgccgacgccggcggcgtctgcaacccgcccaaccaccattt

SEQ ID NO: 26080 - protein, 177 aa, Triticum aestivum
  misc_feature (163)..(163): Xaa can be any naturally occurring amino acid
YNISNRKKLKRQNTEAPKRSSTTISHSPLLHFTEKHTDEKLLAGSHGSPAPPPRPLPPPGPRRRPPAPLLLRLLRPLRMAQRQVLLLRRRPRRRHRWRVRVRGSGEARVRDGDGGAEHGAVRARRRLRRLLRGQVRGGPQVLPPRHLHRRHGHQLLPAQLRLXRRRRRRLQPAQPPF

SEQ ID NO: 26081 - protein, 131 aa, Triticum aestivum
  misc_feature (117)..(117): Xaa can be any naturally occurring amino acid
MAPPLLLLVLFLLPALAAGHQHPSSYGSSALSEWRNAKSSYFAADPGDAIGGACGFGDLGKHGYGMATVGLSTALFERGAACGGCYEVKCVEDLKYCLPGTSIVVTATNFCPPNYGXPADAGGVCNPPNHH

SEQ ID NO: 26082 - protein, 99 aa, Triticum aestivum
  misc_feature (85)..(85): Xaa can be any naturally occurring amino acid
MAQRQVLLLRRRPRRRHRWRVRVRGSGEARVRDGDGGAEHGAVRARRRLRRLLRGQVRGGPQVLPPRHLHRRHGHQLLPAQLRLXRRRRRRLQPAQPPF

SEQ ID NO: 26083 - DNA, 1205 bp, Triticum aestivum
accattacctagaacattcctaatcgaaaaactagaacggtggtagtactagtgtgctccactaccaccaccaacaccacgagtgagggcggtggccaaaagacaggagataaggcgagactgtgagagggacagggcgggagacctcgacgacccctctcattgtttctttccggccgtccagcgccggcaggcagcgaagctagggcagatcgaatcaacagacgcgcgccggccgccggacaagatgatgggtcgcccggtgttcgtgctcttcggctcctccatcgtgcagtacagcttcagcaacggcggatggggagccaccctcaccgacgtctacgcccgcaaggctgatattgttctcagaggatatattgcatggaactcaaggcgagcacttcaagtcattaccaaaattttccccaaggattcagcagtgcagcctagcttggtggtagtttactttggtggcaatgattcgattgctccgcacccttctgggcttggacctcatgtgccacttgaggagtacatggacaacatgaggaagataggagagcacctcaagagcctgtccgacaagactcgtgtgatctttctgagctgcccgccgctcaacgaggagctgctcaagaaatcaacgagcactgcactgagcgagattgtgcggaccaatgaaacctgccgtctctactctgaagcatgtatatctgtatcgaaagagatgggcatcaaggtggtcgatctttggaacgccatgcagaaacgagaggactgggccacagcatgctttacggacgggctgcatttgtcagaagaggggagcaatatagttgtggaagagatcctgaggatcctcaaggaggcggagtgggatccatgcctacactggaaggcgatgccgaccgagttcggggaggactcgccctacgaccttgtcgcctctagcggcaaatccaccatcaacccatccgagtggacattccacaggaaaagatcatgggaatgaacggatcgccaggacatgtgtgagatcgagcagctgcacgtgatattttgcgccggcgctcttcggtcgctttgtgttattcatctgatggaagaacgtgataagatgtttctgaattgcaagtgtccatcgggtcgtagaattaataatgaacatgtttgagttgaacaacgttgagctgagttgggtgtgc

SEQ ID NO: 26084 - protein, 254 aa, Triticum aestivum
MMGRPVFVLFGSSIVQYSFSNGGWGATLTDVYARKADIVLRGYIAWNSRRALQVITKIFPKDSAVQPSLVVVYFGGNDSIAPHPSGLGPHVPLEEYMDNMRKIGEHLKSLSDKTRVIFLSCPPLNEELLKKSTSTALSEIVRTNETCRLYSEACISVSKEMGIKVVDLWNAMQKREDWATACFTDGLHLSEEGSNIVVEEILRILKEAEWDPCLHWKAMPTEFGEDSPYDLVASSGKSTINPSEWTFHRKRSWE

SEQ ID NO: 26085 - protein, 253 aa, Triticum aestivum
MGRPVFVLFGSSIVQYSFSNGGWGATLTDVYARKADIVLRGYIAWNSRRALQVITKIFPKDSAVQPSLVVVYFGGNDSIAPHPSGLGPHVPLEEYMDNMRKIGEHLKSLSDKTRVIFLSCPPLNEELLKKSTSTALSEIVRTNETCRLYSEACISVSKEMGIKVVDLWNAMQKREDWATACFTDGLHLSEEGSNIVVEEILRILKEAEWDPCLHWKAMPTEFGEDSPYDLVASSGKSTINPSEWTFHRKRSWE

SEQ ID NO: 26086 - protein, 158 aa, Triticum aestivum
MDNMRKIGEHLKSLSDKTRVIFLSCPPLNEELLKKSTSTALSEIVRTNETCRLYSEACISVSKEMGIKVVDLWNAMQKREDWATACFTDGLHLSEEGSNIVVEEILRILKEAEWDPCLHWKAMPTEFGEDSPYDLVASSGKSTINPSEWTFHRKRSWE

SEQ ID NO: 26087 - DNA, 672 bp, Triticum aestivum
agatctctctcaccccaaagacaacagaaaaccttcttcacgcgcgcacgcaccaaaatcaccttcgatctcatcaccggggaagggggatggccgccgaggagggagccgtgatagcgtgccacaccaagcaagagttcgacacccacatggctaatggcaaggagaccggcaagctggtgatcattgacttcactgcttcctggtgcggtccttgtcgtgtcatagccccagtctttgctgagtacgccaagaagttccctggcgccattttcctgaaggtggacgttgacgagctgaaggacgtcgctgaagcatacaacgttgaggcaatgccgaccttcctgtttatcaaggatggtgcgaaggtggacactgttgtcggtggcaggaaggatgatatccataccaagatagtggccctcatgggttctgcatctgcctaagaagggaagagtgatgcccctcttgtgtcaataagagccagcacctggtgtaagtagttatcgctgcagtatgctttggcttagtcgtgactgaactttgtgatgattcggtttagagttcagaacttcagacatttgcaccggttgttctgaattacagtacctaatgttttgctacagttgcttcgttgtgaagtttggaataaactatcctgtctgacatgtt

SEQ ID NO: 26088 - protein, 147 aa, Triticum aestivum
ISLTPKTTENLLHARTHQNHLRSHHRGRGMAAEEGAVIACHTKQEFDTHMANGKETGKLVIIDFTASWCGPCRVIAPVFAEYAKKFPGAIFLKVDVDELKDVAEAYNVEAMPTFLFIKDGAKVDTVVGGRKDDIHTKIVALMGSASA

SEQ ID NO: 26089 - protein, 118 aa, Triticum aestivum
MAAEEGAVIACHTKQEFDTHMANGKETGKLVIIDFTASWCGPCRVIAPVFAEYAKKFPGAIFLKVDVDELKDVAEAYNVEAMPTFLFIKDGAKVDTVVGGRKDDIHTKIVALMGSASA

SEQ ID NO: 26090 - protein, 98 aa, Triticum aestivum
MANGKETGKLVIIDFTASWCGPCRVIAPVFAEYAKKFPGAIFLKVDVDELKDVAEAYNVEAMPTFLFIKDGAKVDTVVGGRKDDIHTKIVALMGSASA

SEQ ID NO: 26091 - DNA, 1115 bp, Triticum aestivum
agggtaaagcggcctggcgatggccacagcgcgactactgctccgaagcgcctccctgctccccctccgccgctcgcccctgcactcatccggcttccagccccgagccgccatggcctccgatgccgccagccagttccagaagatccagatccagcgcgaggacacgacctttgatgtctatgttgttggcaaagaaaatgctcctggagtcgtagtgttgcaagagtggtggggtgttgactatgaggtcaagaatcatgccatccatatttcccaaatcggcgatggatacagagcacttattccagatttgtaccgtgggaaggttgctttggaggtagctgaggcacaacatctgatggaaggactagactggcagggtgcaatcaaggatattcaggcttcagttaaatggctgaaggaaaatggatcgcccaaggttggtgttactggttattgcatgggaggtgctttggcggtcgcaagtggagttttggtcccagaggttgatgctgttgttgctttctacgggacgccatcttcggagcttgctgatgcttccaaggctcaggctccaatccaggctcattttggggagcttgacagttttgttgggtttgcggatgttaccgcggccaagtcattggaggagaagctcaaggcttctggagtggcacatgaagtccacatatactctggatgctcccatgccttcatgaacgcatcgcctgaggccctcaagaggaggaagggcatgggtttgactgatgagaatcagggggccattgacctggcatggtcccgcttctccacttggatgggtcgtttcctggggtctgcatgagccattaccatatccatatggtctctgaatgatgtatatggagtctgtcggctcagaagaataaaatgtttgggtgcaatatgtagccagtgcccaatctagacaagcagtgtgttttgtgttagtactactatatgttccaactcgtcatggttttgccagaacatctcggggtacttgattggaggggaaatgaaacacttacgacgctgtcatacgagtttgttttgtgttttaataggcttcagccgagtgctttctggatttt

SEQ ID NO: 26092 - protein, 275 aa, Triticum aestivum
MATARLLLRSASLLPLRRSPLHSSGFQPRAAMASDAASQFQKIQIQREDTTFDVYVVGKENAPGVVVLQEWWGVDYEVKNHAIHISQIGDGYRALIPDLYRGKVALEVAEAQHLMEGLDWQGAIKDIQASVKWLKENGSPKVGVTGYCMGGALAVASGVLVPEVDAVVAFYGTPSSELADASKAQAPIQAHFGELDSFVGFADVTAAKSLEEKLKASGVAHEVHIYSGCSHAFMNASPEALKRRKGMGLTDENQGAIDLAWSRFSTWMGRFLGSA

SEQ ID NO: 26093 - protein, 244 aa, Triticum aestivum
MASDAASQFQKIQIQREDTTFDVYVVGKENAPGVVVLQEWWGVDYEVKNHAIHISQIGDGYRALIPDLYRGKVALEVAEAQHLMEGLDWQGAIKDIQASVKWLKENGSPKVGVTGYCMGGALAVASGVLVPEVDAVVAFYGTPSSELADASKAQAPIQAHFGELDSFVGFADVTAAKSLEEKLKASGVAHEVHIYSGCSHAFMNASPEALKRRKGMGLTDENQGAIDLAWSRFSTWMGRFLGSA

SEQ ID NO: 26094 - protein, 161 aa, Triticum aestivum
MEGLDWQGAIKDIQASVKWLKENGSPKVGVTGYCMGGALAVASGVLVPEVDAVVAFYGTPSSELADASKAQAPIQAHFGELDSFVGFADVTAAKSLEEKLKASGVAHEVHIYSGCSHAFMNASPEALKRRKGMGLTDENQGAIDLAWSRFSTWMGRFLGSA

SEQ ID NO: 26095 - DNA, 1219 bp, Triticum aestivum
atcgaaaatccatccattagcatccatctccggctagcaacacaaacgaccttctctttctcctctttcttcagggtagtcggccggagtccgggacgaagccggcggcgaagactccaaagaggatcatcatcagttcatcgcacaaatcgaccagccatgtgtaacaacagcggcggccgcggcggggcgatggcggctcggaaggggccgtggacggagaacgaggacgcccaactggtatggttcgtgcgcttgctcggcgaacgccgttgggatttcttagctcaggtctcaggtttgcgcggtggcgggtgatcgatccaacctgacctctacggccagtcaccattaatcttcttcttctccctcccctcctccggcgtgttctcggctgtgctccatgcaggtctccggcgcaccggcaagagctgccgcctccgctgggtcaactacctccacccgggcctcaagcgcggacgcatcaccgccgacgaggagcggctcatcctcagcctccacgccgagtggggctcccggtggtccaggatcgctaggaagctccccggccgcaccgacaacgagatcaagaactactggaggacgcacatgaggaagaaggcccaggaggagaagatgctggccaagaagaaggcctcatcctcgccctcctcctcctcctcctcgaccacgtcgctgacctgctcggcctcccccacggccacgtcgtcctcggcggccaccaccgaggcgccccaggagagcactactactagcatggacgacgaggccgagcaggaggccaccacgtcggcgagcgaggagaagaaggcggaggtggtgcagtactgctccgccgtggacatggaccagctctggaacgacatcgccgcgtcggagagctacccggagatgatgatgagctggggcgcagccggccacgtggccatgcccgcccccgctgtggagccctcgtcgccggtgtgggagttctgcgaggattactccctgtggaggatcgacgaccaagagtactacaacaagatcgatcaacacgctctgaattgagaggctttcgttacgtttctcttgttgttcttgttcttcctagctagctagcttaattgcatgtattactatatactaattcatgcatgtaattatatgtaaaacttgagttgtgagattatattggtgacagctttttgcgcacatgtgt

SEQ ID NO: 26096 - protein, 152 aa, Triticum aestivum
MRKKAQEEKMLAKKKASSSPSSSSSSTTSLTCSASPTATSSSAATTEAPQESTTTSMDDEAEQEATTSASEEKKAEVVQYCSAVDMDQLWNDIAASESYPEMMMSWGAAGHVAMPAPAVEPSSPVWEFCEDYSLWRIDDQEYYNKIDQHALN

SEQ ID NO: 26097 - protein, 143 aa, Triticum aestivum
MLAKKKASSSPSSSSSSTTSLTCSASPTATSSSAATTEAPQESTTTSMDDEAEQEATTSASEEKKAEVVQYCSAVDMDQLWNDIAASESYPEMMMSWGAAGHVAMPAPAVEPSSPVWEFCEDYSLWRIDDQEYYNKIDQHALN

SEQ ID NO: 26098 - protein, 105 aa, Triticum aestivum
IENPSISIHLRLATQTTFSFSSFFRVVGRSPGRSRRRRLQRGSSSVHRTNRPAMCNNSGGRGGAMAARKGPWTENEDAQLVWFVRLLGERRWDFLAQVSGLRGGG

SEQ ID NO: 26099 - DNA, 1061 bp, Triticum aestivum
gaaaaacccacgcgaccgagaccagcagcagcaccacctcctccctccatcctgatccgatctgactgagccggccatggcggttagggtttggctctccgccatcctcctcgccttcctcctcgccgcctcccccttcgcccaagttgctagagctcagtctgaggaagatgctgctatgcaagaagttgttgatggggctgatctaggatatgtgggtgatgatactccggtttccagtgaagagcctttaagccctgctcctggtgtggagactgtttgcgtcttccccaaaaacgctgggaaaattgtaccagcaggtgaagaaactgagcttttggttggcctgcaaaatgagggtgaatcaactttgaatgttgttgctgtccattcaaccctgcatcttccttatgatcacaaaatgtatggacaaaaccttacagttcagagtttctacaacgcgtcagttcctgtctctgtgcaagcaacctttccctatacatttgccgtgagcaaattcttgcagcctggagcatatgatcttgttggttacattgtgtacgagattgatcagcacccttaccagaacgtattctacaatggcaccattgaggttgttgaggtcggagggttactgagtgttgaatctgtgttccttattacccttggaattgcacttcttggtctcctaggattgtgggcttatggtcaagtgcaacagctctcgaagaaaacaaagaaaggccccaaggtggaactcggaactggaacaactgacgccaacatggacgagtggctggagggtaccgcgtttgcaaaggacaaggccaagaaaaacaaatagattcgaggttgatgggcctagctagacatttcaggatctagaatgagacaaatcgagggtagcccttcacaagtaacctggatagatgagagagcagaggtgtttgaactagtctcgtggctgcacatcttgttgacaccattttcgaccttgctgtgtactttacagatagttttccttgaaacacaattttgttgaaggtatatgttatctatgg

SEQ ID NO: 26100 - protein, 255 aa, Triticum aestivum
MAVRVWLSAILLAFLLAASPFAQVARAQSEEDAAMQEVVDGADLGYVGDDTPVSSEEPLSPAPGVETVCVFPKNAGKIVPAGEETELLVGLQNEGESTLNVVAVHSTLHLPYDHKMYGQNLTVQSFYNASVPVSVQATFPYTFAVSKFLQPGAYDLVGYIVYEIDQHPYQNVFYNGTIEVVEVGGLLSVESVFLITLGIALLGLLGLWAYGQVQQLSKKTKKGPKVELGTGTTDANMDEWLEGTAFAKDKAKKNK

SEQ ID NO: 26101 - protein, 221 aa, Triticum aestivum
MQEVVDGADLGYVGDDTPVSSEEPLSPAPGVETVCVFPKNAGKIVPAGEETELLVGLQNEGESTLNVVAVHSTLHLPYDHKMYGQNLTVQSFYNASVPVSVQATFPYTFAVSKFLQPGAYDLVGYIVYEIDQHPYQNVFYNGTIEVVEVGGLLSVESVFLITLGIALLGLLGLWAYGQVQQLSKKTKKGPKVELGTGTTDANMDEWLEGTAFAKDKAKKNK

SEQ ID NO: 26102 - protein, 140 aa, Triticum aestivum
MYGQNLTVQSFYNASVPVSVQATFPYTFAVSKFLQPGAYDLVGYIVYEIDQHPYQNVFYNGTIEVVEVGGLLSVESVFLITLGIALLGLLGLWAYGQVQQLSKKTKKGPKVELGTGTTDANMDEWLEGTAFAKDKAKKNK

SEQ ID NO: 26103 - DNA, 528 bp, Triticum aestivum
taatcaaaaatcctttgcacgtagcagtcgctcccacaccgctccagaggtcgccgccgccgccgccgcttccccgccgtcggccgctacgagaaccccagagtaaaggaagatgccttcacttcagaaagctttacctccagaacttgccgataacgcgcttagattataccgcgaatgcttaaggagggctaagttcatcggtagtcagcaacataatacagggcttcttgtttccatggtgaggcaacagttcaagaaaaacatgcatgaaactgatccagagaagatacagaaaatgaaggatgatgcggcacggggccttatcaatcacataatatatgaatccgagaagatgacgggacgtaaattctcaggttaagaaagttgaaagtagacttttggcatatgctgtacgagttgaacagcgacttgatcctatggctgttgaattatttttctcctccgacacaaggaccatctaatgcttttctttgttgttgacttaataaagcagtgttttttcgc

SEQ ID NO: 26104 - protein, 89 aa, Triticum aestivum; identical to SEQ ID NO: 15500

SEQ ID NO: 26105 - protein, 60 aa, Triticum aestivum
IKNPLHVAVAPTPLQRSPPPPPLPRRRPLREPQSKGRCLHFRKLYLQNLPITRLDYTANA

SEQ ID NO: 26106 - protein, 47 aa, Triticum aestivum; identical to SEQ ID NO: 15502

SEQ ID NO: 26107 - DNA, 1201 bp, Triticum aestivum
agacagacagagaaaaaaaaaacccagagaaagagatcgagaccctctccaccctccttccccatccccgtcgtcgctcttcgattccgccggcgatccgtgccacagtctagccggaggagaggcgagcagcagggggagcgcgtgcggtctagcgggggctagggtttcctcgcgtgtgagggacgggagaggaggagcagggatggcgcaggcggtggaggagtggtaccggcagatgcccatcatcacgcgctcctacctcaccgccgccgtcctcaccaccgtcggatgcaccctcgagatcatctcgccctaccacctgtacctgaaccccaagctggtggtgcagcactacgagatctggcgcctcgtcaccaacttcctctacttccgcaagatggatttggatttcctgttccacatgttttttcttgcgcgctactgcaaacttctcgaggagaactcattcaggggaagaacagctgactttttctacatgctcttgtttggtgctactgtcctaaccagcatcgttctgattggtgggacaataccttacatttctgagacgtttgccaggattctgttcctcagcaattcattgacgtttatgatggtttatgtctggagcaagcacaatcccttcattcacatgagcttcttgggtctgttcaccttcactgctgcctacttaccttgggtccttcttggcttctctattctggtggggagcagcacatgggttgatcttttgggtatgattgctggccatgtgtattacttcctggaagacgtgtaccctcggatgacgggccgtcgccccctgaagaccccttccttcatcaaggcgctgttcgccgacgacaatgtggtcgtggcggcgcggccccccaacgctggtgtcgcggctgcaaggtttggtggtgtgggtgcagcagacccccagttccagtgatggtctacatgcagtttgttggatataattttgtacacccgtgtccgtgatgatatgtgcaaaaatacatagagagtataattctcagttaggggttgggcttgatgccaatgcgctgctaaccaaagtgtatgtagctgggctcgtgaagccgtctggttgttggttaactttgacttaacgtacttgtctcatcttgcgtggcaccttcgttaattaggcgaaaaaacacgctgaagcctc

SEQ ID NO: 26108 - protein, 318 aa, Triticum aestivum
DRQRKKKPRERDRDPLHPPSPSPSSLFDSAGDPCHSLAGGEASSRGSACGLAGARVSSRVRDGRGGAGMAQAVEEWYRQMPIITRSYLTAAVLTTVGCTLEIISPYHLYLNPKLVVQHYEIWRLVTNFLYFRKMDLDFLFHMFFLARYCKLLEENSFRGRTADFFYMLLFGATVLTSIVLIGGTIPYISETFARILFLSNSLTFMMVYVWSKHNPFIHMSFLGLFTFTAAYLPWVLLGFSILVGSSTWVDLLGMIAGHVYYFLEDVYPRMTGRRPLKTPSFIKALFADDNVVVAARPPNAGVAAARFGGVGAADPQFQ

SEQ ID NO: 26109 - protein, 250 aa, Triticum aestivum
MAQAVEEWYRQMPIITRSYLTAAVLTTVGCTLEIISPYHLYLNPKLVVQHYEIWRLVTNFLYFRKMDLDFLFHMFFLARYCKLLEENSFRGRTADFFYMLLFGATVLTSIVLIGGTIPYISETFARILFLSNSLTFMMVYVWSKHNPFIHMSFLGLFTFTAAYLPWVLLGFSILVGSSTWVDLLGMIAGHVYYFLEDVYPRMTGRRPLKTPSFIKALFADDNVVVAARPPNAGVAAARFGGVGAADPQFQ

SEQ ID NO: 26110 - protein, 239 aa, Triticum aestivum
MPIITRSYLTAAVLTTVGCTLEIISPYHLYLNPKLVVQHYEIWRLVTNFLYFRKMDLDFLFHMFFLARYCKLLEENSFRGRTADFFYMLLFGATVLTSIVLIGGTIPYISETFARILFLSNSLTFMMVYVWSKHNPFIHMSFLGLFTFTAAYLPWVLLGFSILVGSSTWVDLLGMIAGHVYYFLEDVYPRMTGRRPLKTPSFIKALFADDNVVVAARPPNAGVAAARFGGVGAADPQFQ

SEQ ID NO: 26111 - DNA, 1488 bp, Triticum aestivum
cacttgcacacaacattcttcctcgcaccactcagctagcagctgccaaacacaagctcgcaagctcacggccgggtacgtgcgaagcattgaacatgggagatgcgctgtgcgatcagctcctcgtggacgtcgacggtgagttccagctccccaccgacgccgaagacctattcagcatcctcgagacttgggaggactgcgtccacggcgccgctgcagcgttgagccccaccgccggcgccagcagccgtggtgagctgatgggcggttctgcgccggggaacaaaagcagcaagcggcgagcgcggccggacgaatgtgacggaatagcgcagacgcagaagaggcagaagtgctccccggaggagggaggcggcgcggcgccgaagacagcccacatcacggtggagcgcaaccgccggaagcagatgaacgagcacctgaccgtgctgcggtcgctcatgccctgcttctatgtcaagcgtggtgaccaagcatccatcataggaggagtggtggactacatcaaggagctgcagcaagtgaagcagtcgctggaggccaagaagcagcgcaaggcctacaccgagcacgtcctcagcccgcgtccgcccccgacgtcctacagcccacgcctacctctcagcccgctccacaaatccacgccgccgctcagcccattgctcaggtccactccgccgctcagcccgcgcctcgccgtcccgatcagccctgccaggacgccgccgacgccaggcagcccctacaagctccgccccctgccgccgccgatctccggctccacctacgtgtccccggcgatgacgccgaccggctacgagccgggctcctcctacctcccgtcgctcgacgccatcgccgccgagctgtcggtgtacgccaacaggcaggcgctgcagctgcccccgactgacccactccccgacgtgagggtggagttcgcaggcgcgaacctggtgctgaagacggtgtcgcaccgcgcgccggggcaggtggtgaagatcatcgccgcgctcgagtcacgggcgccggcgctggagattctccacgccaagatcagcaccatcgacgacactgacgtcaacgccttcaccgtcaagattggaatcgagtgttcgctcagcgctgaagagctggtgcaagagattcagcaaacgttctcgtaagcgtttagttaaggtccccgcttcgagttaaactctttcttgtttttcccaacagggctgaaactcgtcgaattagacggtgaagatgcatgtattggtaagcatgcataagtttgtgcatgtgtgtgtcttgtaagatcgaaactgaggatgagctgaggagccgggcacttgaatggtcgtggtacaggtcgtactctagctatagctaactagctagatcgatcatttcttgtgctacctgcgtacgtatgtaactgcagttgttcaatggcacgtgcatttattttcacaactc

SEQ ID NO: 26112 - protein, 395 aa, Triticum aestivum
LAHNILPRTTQLAAAKHKLASSRPGTCEALNMGDALCDQLLVDVDGEFQLPTDAEDLFSILETWEDCVHGAAAALSPTAGASSRGELMGGSAPGNKSSKRRARPDECDGIAQTQKRQKCSPEEGGGAAPKTAHITVERNRRKQMNEHLTVLRSLMPCFYVKRGDQASIIGGVVDYIKELQQVKQSLEAKKQRKAYTEHVLSPRPPPTSYSPRLPLSPLHKSTPPLSPLLRSTPPLSPRLAVPISPARTPPTPGSPYKLRPLPPPISGSTYVSPAMTPTGYEPGSSYLPSLDAIAAELSVYANRQALQLPPTDPLPDVRVEFAGANLVLKTVSHRAPGQVVKIIAALESRAPALEILHAKISTIDDTDVNAFTVKIGIECSLSAEELVQEIQQTFS

SEQ ID NO: 26113 - protein, 364 aa, Triticum aestivum
MGDALCDQLLVDVDGEFQLPTDAEDLFSILETWEDCVHGAAAALSPTAGASSRGELMGGSAPGNKSSKRRARPDECDGIAQTQKRQKCSPEEGGGAAPKTAHITVERNRRKQMNEHLTVLRSLMPCFYVKRGDQASIIGGVVDYIKELQQVKQSLEAKKQRKAYTEHVLSPRPPPTSYSPRLPLSPLHKSTPPLSPLLRSTPPLSPRLAVPISPARTPPTPGSPYKLRPLPPPISGSTYVSPAMTPTGYEPGSSYLPSLDAIAAELSVYANRQALQLPPTDPLPDVRVEFAGANLVLKTVSHRAPGQVVKIIAALESRAPALEILHAKISTIDDTDVNAFTVKIGIECSLSAEELVQEIQQTFS

SEQ ID NO: 26114 - protein, 308 aa, Triticum aestivum
MGGSAPGNKSSKRRARPDECDGIAQTQKRQKCSPEEGGGAAPKTAHITVERNRRKQMNEHLTVLRSLMPCFYVKRGDQASIIGGVVDYIKELQQVKQSLEAKKQRKAYTEHVLSPRPPPTSYSPRLPLSPLHKSTPPLSPLLRSTPPLSPRLAVPISPARTPPTPGSPYKLRPLPPPISGSTYVSPAMTPTGYEPGSSYLPSLDAIAAELSVYANRQALQLPPTDPLPDVRVEFAGANLVLKTVSHRAPGQVVKIIAALESRAPALEILHAKISTIDDTDVNAFTVKIGIECSLSAEELVQEIQQTFS

SEQ ID NO: 26115 - DNA, 1303 bp, Triticum aestivum
gtggctgcatcatcaccaccaccacctcggaagtccttggcgagcgtgcgtgcgtgcgtgcgagctgtaggagggctgtgatgaaaagttgcatctgttaacggacacgagttctgctaccaagttcgacatgggttcaggaaacctgatggtgaagaaggtggtgaggcccagctcttttgacctcgacatacatctcgacaaaagctggaaggaggacgttacctgcccaatctgtctggattacccccacaatgcagtcctactgaggtgcacatcttatgagaagggctgcaggccgtttgtgtgcgacaccgaccagacccgctccaactgtcttgagaggttcaaaggtgcttatgagctgcctgccaatgtcaaggtctcgtctatagctgtggcccctcttgatagcatccacatcgtgtcgtctcacgcaaacaatcgcccaagttgcccgttgtgcagaggtgatgttatcgggtggattgtaatcagcgaggctcgtctgcatcttaaccagaagaagagatgctgtgaagaggattgctgctcctttactggcaacttcaatgagcttcagaagcacacacaacaaaagcatccagattcacgcccttcagaaatcgaccctgccaggcaagtcgattgggacaacttccagcaatcttctgatatcgtggatgtcttgagcacaatacatgcacaagttcctaatggcatcgttctcggagactatgtcattgaatatggggatgatgatactggagatgactatgaagtgctccgcagggttaggaggaagtggtggtcttttatttgttgcaaggctttttgtagatatccaaggagccgaagaagagggagaggaagggacaatagaggaagtggaaggaggaacagcaatcaggctcatctggagaacttcaatctcgaggttccgacacaagctgttgacctgagggaactcagatttgatgaaatcgatgatgagtacattgttacaggggcagtacctagtatggcaacaccaggaagaatggccagtttccattacagggatacaagatatggtcggtgatcgggcgtactacttaatagaaccagctgataaagaaaaggatttgcagccgcgatgtgatgccgcagccttcaggaaactccacccccgcccatttttcgtttcttttcctgcccccgtcgttgctaggtgccgctccagcccggacttcctgtgcataaaaagtagcaacagaaaccctctgccgccgccgttcgtttgcaatagattttcatttaccct

SEQ ID NO: 26116 - protein, 316 aa, Triticum aestivum
MGSGNLMVKKVVRPSSFDLDIHLDKSWKEDVTCPICLDYPHNAVLLRCTSYEKGCRPFVCDTDQTRSNCLERFKGAYELPANVKVSSIAVAPLDSIHIVSSHANNRPSCPLCRGDVIGWIVISEARLHLNQKKRCCEEDCCSFTGNFNELQKHTQQKHPDSRPSEIDPARQVDWDNFQQSSDIVDVLSTIHAQVPNGIVLGDYVIEYGDDDTGDDYEVLRRVRRKWWSFICCKAFCRYPRSRRRGRGRDNRGSGRRNSNQAHLENFNLEVPTQAVDLRELRFDEIDDEYIVTGAVPSMATPGRMASFHYRDTRYGR

SEQ ID NO: 26117 - protein, 310 aa, Triticum aestivum
MVKKVVRPSSFDLDIHLDKSWKEDVTCPICLDYPHNAVLLRCTSYEKGCRPFVCDTDQTRSNCLERFKGAYELPANVKVSSIAVAPLDSIHIVSSHANNRPSCPLCRGDVIGWIVISEARLHLNQKKRCCEEDCCSFTGNFNELQKHTQQKHPDSRPSEIDPARQVDWDNFQQSSDIVDVLSTIHAQVPNGIVLGDYVIEYGDDDTGDDYEVLRRVRRKWWSFICCKAFCRYPRSRRRGRGRDNRGSGRRNSNQAHLENFNLEVPTQAVDLRELRFDEIDDEYIVTGAVPSMATPGRMASFHYRDTRYGR

SEQ ID NO: 26118 - DNA, 496 bp, Triticum aestivum
atgatgaagttttcatcaaactgggtgctgataaggaggctttgaagaagaaagagaatgctgaacgtgaagagcgtgctaagaagtctgtgagcatcaatgagttcctgaagcctgctgaaggagaaaggttctatggaggccgtggccgtggcggcaggggccgtggagaccgcggaggcttcagaggtggatttggtggtgggggttatcacggcccaccgcctgccccggcaattcaggaccagaaccagttcccaaccctcggtgggaagtgagattgctgtaccgtctcaagtaccaccttcaccgataccgtcgcctgtcaagtttaatttttcctatcaccatatatttctgcgcggatacttatgttgaagcaaataactctgctgtatgtggaccattcatccctgtgtctgtcgactttgtaaatccgacggttgtcgcttgtcagaattttgtaggctataaattgctcgttcctttgtccgtc

SEQ ID NO: 26119 - protein, 91 aa, Triticum aestivum
DEVFIKLGADKEALKKKENAEREERAKKSVSINEFLKPAEGERFYGGRGRGGRGRGDRGGFRGGFGGGGYHGPPPAPAIQDQNQFPTLGGK

SEQ ID NO: 26120 - protein, 80 aa, Triticum aestivum
MEAVAVAAGAVETAEASEVDLVVGVITAHRLPRQFRTRTSSQPSVGSEIAVPSQVPPSPIPSPVKFNFSYHHIFLRGYLC

SEQ ID NO: 26121 - DNA, 731 bp, Triticum aestivum
ctggacaatgttcttcttggaagcggcgccatccctggaggagctctacatgacggtaattgatcatccatgtgaaatgataatggatgaggagaaaaggaggaagggctattattgtgataacaagggcgtcgagtgggaatcatcgtcatcaaatttcaagcaccagcgtctgaccaagctcaccatcttctgctttcagtctgaaaactacatgatgagtcatgtcaggcgtgtcatggaagcagcggtgaatctagaggatgtctacttgtatgatagactgacatgtagcagatgccgagacgtggagcctctaaagccaataaggttcccggaggcaagtaggcagaggtgttgggtggagaagcaaatcaggggggacattgagtcacttgccacagttcacttcctggcgactgatgtaataagggacgatcatcttgcaaggatacctcgaggctattagaggcagtttgttcaataccagtcggttggactgagtactcggttggagcagaaagtcatgcaagtctgcgtttccttatttggtctatttgtgtagctgcaatgcctcgtataattaagatgagttgaaagtggcacttgtattgttggtgaattaattttttttgataatcagttaaattttagaccttagtttgtagagtcatattgtatctaccgatctctaattgctgatgagtgcatcagttgatactattctttgg

SEQ ID NO: 26122 - protein, 155 aa, Triticum aestivum
WTMFFLEAAPSLEELYMTVIDHPCEMIMDEEKRRKGYYCDNKGVEWESSSSNFKHQRLTKLTIFCFQSENYMMSHVRRVMEAAVNLEDVYLYDRLTCSRCRDVEPLKPIRFPEASRQRCWVEKQIRGDIESLATVHFLATDVIRDDHLARIPRGY

SEQ ID NO: 26123 - protein, 153 aa, Triticum aestivum
MFFLEAAPSLEELYMTVIDHPCEMIMDEEKRRKGYYCDNKGVEWESSSSNFKHQRLTKLTIFCFQSENYMMSHVRRVMEAAVNLEDVYLYDRLTCSRCRDVEPLKPIRFPEASRQRCWVEKQIRGDIESLATVHFLATDVIRDDHLARIPRGY

SEQ ID NO: 26124 - protein, 139 aa, Triticum aestivum
MTVIDHPCEMIMDEEKRRKGYYCDNKGVEWESSSSNFKHQRLTKLTIFCFQSENYMMSHVRRVMEAAVNLEDVYLYDRLTCSRCRDVEPLKPIRFPEASRQRCWVEKQIRGDIESLATVHFLATDVIRDDHLARIPRGY

SEQ ID NO: 26125 - DNA, 1092 bp, Triticum aestivum
ccacccacccccgattcacatccccttcacctcctctcctctcctctcctctgccgacgggatctctccctttctccgatccatgccgggatcctccgccgtgtggccgcacacgcgtgcagccctcctccaccacccgaccgaccaggcccatcccggcggccagcccgggctgctccccgccgcggcatgggggcagggcggcgcggcggccccgagggcgagcatagtggcggcgcgggcggtgcagaccaacaggcagcaggcgcgtgggaggagcagtgctgccgaagccggcgctaggaacaagctgaggaagccgccggctggaggagctggaggtgcagcggggatccacggctccgcgccctgtccccagtcagtcccctccaaatctcgccgcagccgccacagtggtttagcatggtggtgcgaaagtgttgcggcttggtttgtgagctacagaccttatcaagcagcaaagtcatctcacatatgccgacgacgaagatccatatttattggctgagggagcaacaacacaattctgatgattctgccaatatttacttgcaaggaccagagggtatgctgatgctgcgcaggcacttgagctatttacagaaggagaggacccgaccttcttcatgtcttgtggctgtgtcttcctttgattcattcgtgcaacaaagaggggacctggccttcttcatgtctcgtgcaaaaagggtgattgacactgactacgacagcctggtgggcgtcgtgctcttcaaccacttagaggtggacttcgacgtgaagcccagcgaccgcgccgcacggatgatcgtccatgtgatcacgatgccggatgtcgccgaggtggaggacctcgacgccatcttttggcgtgagggaggattcgggtcctccggcgtctgaactccgagccttggtagatacatgtagagaaataatctgtttaggctggtggtggaacactagggaaggtagccaccttcggttgtgtgtgtttaatttattttgcactggacgtgtccctgatttctatctatgaataatgcacgtaatttttattttttttaattt

SEQ ID NO: 26126 - protein, 175 aa, Triticum aestivum
HPPPIHIPFTSSPLLSSADGISPFLRSMPGSSAVWPHTRAALLHHPTDQAHPGGQPGLLPAAAWGQGGAAAPRASIVAARAVQTNRQQARGRSSAAEAGARNKLRKPPAGGAGGAAGIHGSAPCPQSVPSKSRRSRHSGLAWWCESVAAWFVSYRPYQAAKSSHICRRRRSIFIG

SEQ ID NO: 26127 - protein, 166 aa, Triticum aestivum
MVVRKCCGLVCELQTLSSSKVISHMPTTKIHIYWLREQQHNSDDSANIYLQGPEGMLMLRRHLSYLQKERTRPSSCLVAVSSFDSFVQQRGDLAFFMSRAKRVIDTDYDSLVGVVLFNHLEVDFDVKPSDRAARMIVHVITMPDVAEVEDLDAIFWREGGFGSSGV

SEQ ID NO: 26128 - protein, 148 aa, Triticum aestivum
MPGSSAVWPHTRAALLHHPTDQAHPGGQPGLLPAAAWGQGGAAAPRASIVAARAVQTNRQQARGRSSAAEAGARNKLRKPPAGGAGGAAGIHGSAPCPQSVPSKSRRSRHSGLAWWCESVAAWFVSYRPYQAAKSSHICRRRRSIFIG

SEQ ID NO: 26129 - DNA, 565 bp, Triticum aestivum
attgcagtaagtaagcaagagcgaagaaaggaggagagattagaagagagcaactattctcctcctttgtgagagaggatcgacgatgcatccaagaagcgcgtccacggtgcggctctgccttgtatgcctcgttctcctgctgctaacccgagatgcccactccaggaatctcgtaggggcagtggtggtgcagaaggagaagcacaagcagagccatggcggccacggcgcagccaccctggaaccttggggtgaggaagggagcaacgcaggcgccaagaggagacagctgcagcgtgatccgacgaaatgggaggagatccacacggattacatctacacccaagacgtcaaacacccgtgacactatcgtgtttagtatagagtagtagtatcagctcctggggtcgtttgaagaggacggattagtctgggatttgtcgtttaagtttgagccaccgagtcaaatcacaaattaatccctcctctgttagtataattagaggcatgtagtcggtgatgtaatgtataattatttcagtctagcttcggcacacccttt

SEQ ID NO: 26130 - protein, 93 aa, Triticum aestivum
MHPRSASTVRLCLVCLVLLLLTRDAHSRNLVGAVVVQKEKHKQSHGGHGAATLEPWGEEGSNAGAKRRQLQRDPTKWEEIHTDYIYTQDVKHP

SEQ ID NO: 26131 - protein, 57 aa, Triticum aestivum
MAATAQPPWNLGVRKGATQAPRGDSCSVIRRNGRRSTRITSTPKTSNTRDTIVFSIE

SEQ ID NO: 26132 - DNA, 904 bp, Triticum aestivum
aggcctcgaaactgggccgagtgttggcccacgctccttgggctaaaccctaacgcagagcgtcctctcctctccaacccgacgccggcctccgcctcctcctccgccctcgcctccttcctagccgcacaccttgctggtctggtttgggttgacccggagtgaggcgggatggcgctgaggggcgtttggcagctgcagaagctcgtggtgaacttctgcgattggggagggagcagcaaggggatcagggcttttatggagtcgcatcttccagctatcaaggaaaagaatccccagttagaggtggtgacacagcttgtccgtggccagcatcctaacttgaagggcatttacaaaaaccataatgagagagtggtttgcgtcagaaacttggcacctgaggacataatgctgcaagctagtaggctaaggtgttctctgggcaggaaagtggtgaagctgagaaccagacacgtgacgaagcggccaagcgtccagggaacatggacgacggaactgaagatgtgagtcaaagttcctgatggcacgcactcagcaacaaccgtctcagatctatagcaagaactccgtgctgctattagacctctgttccgtcagtagttattacagtttcattctgtctccttttgtttgagccgcagtctgataataacatgtgaacttggggattttttttttttgttagtgtcacctgtctagctgatattttgatggcaaatgcctgatctttagaccattgcattcattaaagctgtcagcgcagaatttgttctgaaggaaggaggaatgttctgcatgttatgacaggacaagttataaatgtaaaactgtcatgaactatatacattgtgccatgtcttgctgtccatctggtgcactc

SEQ ID NO: 26133 - protein, 119 aa, Triticum aestivum
MALRGVWQLQKLVVNFCDWGGSSKGIRAFMESHLPAIKEKNPQLEVVTQLVRGQHPNLKGIYKNHNERVVCVRNLAPEDIMLQASRLRCSLGRKVVKLRTRHVTKRPSVQGTWTTELKM

SEQ ID NO: 26134 - protein, 90 aa, Triticum aestivum
MESHLPAIKEKNPQLEVVTQLVRGQHPNLKGIYKNHNERVVCVRNLAPEDIMLQASRLRCSLGRKVVKLRTRHVTKRPSVQGTWTTELKM

SEQ ID NO: 26135 - DNA, 500 bp, Triticum aestivum
ataaagtactaataaacagagggagtacaagtacaacgcgtttgcatacgaaaatactacaaagttaacatacattttagtctcgcagctaggcacgaaaaattcttagccactgcaacactcttgacacaactaccggtgcaccagtgcatatacggcggactcgtcgtcatcgtcatgcgccggtcagcacctagcgtgctccagctgatcacagccgcacggcggtcctcccgcggccagcgcggccgaaggagagcacccggaccaggcggcgccacagcgccccgagcgacggcatccgccggctcgtccggaccgccggggtcgttgtcgccgccctcttcctccgccacagcgacggcatcgcgcgctagctagtcaagtcgagccttcttgcggagttccggttgtacggtgaaaggcttcaagatggcgagtgcacgagtggacaaatgggagatcgatggtggtgtctggtgttttttgattaggatgtt

SEQ ID NO: 26136 - protein, 67 aa, Triticum aestivum
MRRSAPSVLQLITAARRSSRGQRGRRRAPGPGGATAPRATASAGSSGPPGSLSPPSSSATATASRAS

SEQ ID NO: 26137 - DNA, 504 bp, Triticum aestivum
actaccagccctccggcacaaaaactgcacgattcaatccgttccaaaacaagggtagccgtcaccatggcgagggcaacgacactggtgctcgtggccgcgctcgccgtcctcctcctcctcgcctcaggccccgcgggcgccacggccgcccgaacctcgcccaaggacgtggcaacggcatctcccaacgagaaggtcgcggcggcggcggcggaagaccacgagtgcgagatgatggccggcgagaagcagcgggatgagtgcatggcgagaaggacgctcgccgcgcacacggactacatctacacctaggagaagcacaactagtagccttcatatctgcgtccatgtaatgtaatgatgttagtcggcactgcgtccgcgtgttcgatctctatcctatagcttccttcataaaaaagggaccgatcccaccgtgcatgcatcgcatgcatgcatggcgcacttatgtattgcctataatttagtaattcgataatc

SEQ ID NO: 26138 - protein, 104 aa, Triticum aestivum
TTSPPAQKLHDSIRSKTRVAVTMARATTLVLVAALAVLLLLASGPAGATAARTSPKDVATASPNEKVAAAAAEDHECEMMAGEKQRDECMARRTLAAHTDYIYT

SEQ ID NO: 26139 - protein, 86 aa, Triticum aestivum
YQPSGTKTARFNPFQNKGSRHHGEGNDTGARGRARRPPPPRLRPRGRHGRPNLAQGRGNGISQREGRGGGGGRPRVRDDGRREAAG

SEQ ID NO: 26140 - protein, 82 aa, Triticum aestivum
MARATTLVLVAALAVLLLLASGPAGATAARTSPKDVATASPNEKVAAAAAEDHECEMMAGEKQRDECMARRTLAAHTDYIYT

SEQ ID NO: 26141 - DNA, 1560 bp, Triticum aestivum
atacccgtccccgactttctcggtcttcctcgactcgactcgattcgtgtccgtgcaccgacctctaccgcctcctcgctcccagccatggccggcggcgatggtgaccgcgcccgtgcgccgaagcggtacaagtcctcggcgccatcgaaggcggccctggtggacgagaccgccgagatgaactacgccgacgacttcgacgacgatgcccgcgacggagataacgaggtgaagaagagggacttcaccaagctggagctcaagccggatcacgtgaaccggccgctgtgggcgtgcgcagacggccgcatcttcctcgagaccttctcccctctctacaagcaggcctacgatttcctcatcgccatcgccgaacctgtatgcaggccagaatctatgcatgaatacaatctaacgccacactcattgtatgccgcggtctcagttggacttgagacaaccactatcattagtgtcttgagtaagctctccaagactaagttacctcatgagataattgatttcatccatgggtcaactgcgaattatggcaaagtaaagcttgttctgaagaagaatcaatattttgtggagtcgccgttccctgaggttttgaagaccctcctgaacgatgacgtaatttcgaaagcacgaaaagctcccgaggactgtctaggagcatcttcattcgctgttagcaaaacagctggggaaatagctagtggacatgatttgttagatggaatagagctggcagctgcaactgaagacaaggaaacacattctttcgaaattgattccaatcaggttgagaacgtaaagcaacggtgcttaccaaatgcactgaactttcccatgctagaggagtatgattttagaaatgacacagtaaacccagatttggatatggaattaaaacctcaagcacggccaaggccgtatcaagaaaagagcctcagtaagatgtttgggaatggtagagcaaggtcaggcattattgtgctaccttgtggtgcgggaaaatccttggtcggtgtatctgcagcatgtcgtattaagaagagctgtctatgcttggccacaaatgctgtgtctgttgatcaatgggcattccagttcaagctttggtcaactataagagacgaacatatcagtagatttacatcagataacaaagagaaatttcgagggatggctggtgttgttgtgactacctataacatggtggcatttgggggcaaacgatccgaagactcagagaagattattgaggaaatccggaacagggagtggggtttgctccttatggatgaggttcacgttgtccctgctcatatgttcagaaaggtcatcagcattacgaagtctcactgcaagcttggtcttactgctacgcttgtgagagaggatgaacgtatcacagatctaaattttctaattggaccaaagctgtatgaagcaaattggttggatttagtgaaaggtggatttattgcaaacgtgcaatgtgcagaagtatggtgtcccatgaccaaagagttctttgctgagtatttg

SEQ ID NO: 26142 - protein, 520 aa, Triticum aestivum
IPVPDFLGLPRLDSIRVRAPTSTASSLPAMAGGDGDRARAPKRYKSSAPSKAALVDETAEMNYADDFDDDARDGDNEVKKRDFTKLELKPDHVNRPLWACADGRIFLETFSPLYKQAYDFLIAIAEPVCRPESMHEYNLTPHSLYAAVSVGLETTTIISVLSKLSKTKLPHEIIDFIHGSTANYGKVKLVLKKNQYFVESPFPEVLKTLLNDDVISKARKAPEDCLGASSFAVSKTAGEIASGHDLLDGIELAAATEDKETHSFEIDSNQVENVKQRCLPNALNFPMLEEYDFRNDTVNPDLDMELKPQARPRPYQEKSLSKMFGNGRARSGIIVLPCGAGKSLVGVSAACRIKKSCLCLATNAVSVDQWAFQFKLWSTIRDEHISRFTSDNKEKFRGMAGVVVTTYNMVAFGGKRSEDSEKIIEEIRNREWGLLLMDEVHVVPAHMFRKVISITKSHCKLGLTATLVREDERITDLNFLIGPKLYEANWLDLVKGGFIANVQCAEVWCPMTKEFFAEYL

SEQ ID NO: 26143 - protein, 491 aa, Triticum aestivum
MAGGDGDRARAPKRYKSSAPSKAALVDETAEMNYADDFDDDARDGDNEVKKRDFTKLELKPDHVNRPLWACADGRIFLETFSPLYKQAYDFLIAIAEPVCRPESMHEYNLTPHSLYAAVSVGLETTTIISVLSKLSKTKLPHEIIDFIHGSTANYGKVKLVLKKNQYFVESPFPEVLKTLLNDDVISKARKAPEDCLGASSFAVSKTAGEIASGHDLLDGIELAAATEDKETHSFEIDSNQVENVKQRCLPNALNFPMLEEYDFRNDTVNPDLDMELKPQARPRPYQEKSLSKMFGNGRARSGIIVLPCGAGKSLVGVSAACRIKKSCLCLATNAVSVDQWAFQFKLWSTIRDEHISRFTSDNKEKFRGMAGVVVTTYNMVAFGGKRSEDSEKIIEEIRNREWGLLLMDEVHVVPAHMFRKVISITKSHCKLGLTATLVREDERITDLNFLIGPKLYEANWLDLVKGGFIANVQCAEVWCPMTKEFFAEYL

SEQ ID NO: 26144 - protein, 460 aa, Triticum aestivum
MNYADDFDDDARDGDNEVKKRDFTKLELKPDHVNRPLWACADGRIFLETFSPLYKQAYDFLIAIAEPVCRPESMHEYNLTPHSLYAAVSVGLETTTIISVLSKLSKTKLPHEIIDFIHGSTANYGKVKLVLKKNQYFVESPFPEVLKTLLNDDVISKARKAPEDCLGASSFAVSKTAGEIASGHDLLDGIELAAATEDKETHSFEIDSNQVENVKQRCLPNALNFPMLEEYDFRNDTVNPDLDMELKPQARPRPYQEKSLSKMFGNGRARSGIIVLPCGAGKSLVGVSAACRIKKSCLCLATNAVSVDQWAFQFKLWSTIRDEHISRFTSDNKEKFRGMAGVVVTTYNMVAFGGKRSEDSEKIIEEIRNREWGLLLMDEVHVVPAHMFRKVISITKSHCKLGLTATLVREDERITDLNFLIGPKLYEANWLDLVKGGFIANVQCAEVWCPMTKEFFAEYL

SEQ ID NO: 26145 - DNA, 1691 bp, Triticum aestivum
gattcgtaaagtgattgaagaagataatgagattccaaagtctggagttttttcattgcctttcatggagcgtgctatgaaaaagcgtgcagatgcaacttatgaggaaacacggctagattatgaagaattggaggaatccttaaggaaattggaggatgacaacaccgaggagaatgtagattcaatgaaggtgacaggtaaaagaacttttgggcctgtgaaaagggcacatgaagaggcaaacaagaggccaaaattaggtgatgctgacaagaacagtgacagtgagtatgactctgactctggtcaacatttcgacagcagtgaagtaaataagaaggcagaatatgcgaataacaaggcagatgatgtccaacttgggactgcactgctcgacgatgaacaacagaatgatctatacgttagctttgatggtactagaaaaagcccaggcccaaagacagacattgaagttcgaatgttagcggataattcgtggaagaaggtcaaaaatagcaaaacaaatggtggtaacaatattaaagagagtggcaataactccaaagtgcagatcccttctgtggattcaaaccctaagcctcacaattctgattcagattctgaggaagagatggttgacggtttcttgactgtctctgatgaaaaggaaacttatgaacttccatcgcaagctgatcttatacgtcaagcttttgctggtgatgatgttgaagctgagtttgtgaaagataaagtggaagctttaaatgaagaaaatcctgaacctgaagaacctgcacttgttcctggttgggggcagtggactcatgtacaacagaaaagaggacttccttcatggatggtgaaagaacatgaagatgccaaaaggaagagggaagaaaccttaaagagtaggaaggatgcaaagctaaaacacgttattatttctgaacatgttgacaagaaggctgaaaaacttttagcaacgaatcttcctttcccatacacctcaaatgatgtgtatgaaaatagcatgcgtatgcctcttggacctgatttcaacccagcaatatcactctctgctcttaaccgacctgcgattgtgaagaagcctggtgttgttattaagccaatacagtacggggaaattgatccgcatgagaagcctgatgaactcaagcgggtcattcagagagtaaaaccgaacccgaacataaagaaggcgtctgcgaaacaagcgaagaggacagcttcacatcggaggacttgatgagacagtagtacccagttaatgtggtgagagatgcgcataacagaatgcggacctgggttttcttgccatggctattttcaaacacttgagaagtatacaaagattcttctcatggagtcaaacgacagctttggtttggctattggaagcgggggtttgggggtgccattgttcacacacctgtgctgtattgagatttgaaattttgcagctggttcctgcaccagggccgaaatatgtttgtacgcgggaagtcgcaagttagtgtagtgtttttttctatgtggtatctatatgtagcacaaaattaaagagcaccgtttgcttctcgtctcgtctgctcctagattcaacaggtctttcatagtatgtattctcaaatcttaaagttcgaataccaatattttctaccttt

SEQ ID NO: 26146 - protein, 423 aa, Triticum aestivum
IRKVIEEDNEIPKSGVFSLPFMERAMKKRADATYEETRLDYEELEESLRKLEDDNTEENVDSMKVTGKRTFGPVKRAHEEANKRPKLGDADKNSDSEYDSDSGQHFDSSEVNKKAEYANNKADDVQLGTALLDDEQQNDLYVSFDGTRKSPGPKTDIEVRMLADNSWKKVKNSKTNGGNNIKESGNNSKVQIPSVDSNPKPHNSDSDSEEEMVDGFLTVSDEKETYELPSQADLIRQAFAGDDVEAEFVKDKVEALNEENPEPEEPALVPGWGQWTHVQQKRGLPSWMVKEHEDAKRKREETLKSRKDAKLKHVIISEHVDKKAEKLLATNLPFPYTSNDVYENSMRMPLGPDFNPAISLSALNRPAIVKKPGVVIKPIQYGEIDPHEKPDELKRVIQRVKPNPNIKKASAKQAKRTASHRRT

SEQ ID NO: 26147 - protein, 402 aa, Triticum aestivum
MERAMKKRADATYEETRLDYEELEESLRKLEDDNTEENVDSMKVTGKRTFGPVKRAHEEANKRPKLGDADKNSDSEYDSDSGQHFDSSEVNKKAEYANNKADDVQLGTALLDDEQQNDLYVSFDGTRKSPGPKTDIEVRMLADNSWKKVKNSKTNGGNNIKESGNNSKVQIPSVDSNPKPHNSDSDSEEEMVDGFLTVSDEKETYELPSQADLIRQAFAGDDVEAEFVKDKVEALNEENPEPEEPALVPGWGQWTHVQQKRGLPSWMVKEHEDAKRKREETLKSRKDAKLKHVIISEHVDKKAEKLLATNLPFPYTSNDVYENSMRMPLGPDFNPAISLSALNRPAIVKKPGVVIKPIQYGEIDPHEKPDELKRVIQRVKPNPNIKKASAKQAKRTASHRRT

SEQ ID NO: 26148 - protein, 398 aa, Triticum aestivum
MKKRADATYEETRLDYEELEESLRKLEDDNTEENVDSMKVTGKRTFGPVKRAHEEANKRPKLGDADKNSDSEYDSDSGQHFDSSEVNKKAEYANNKADDVQLGTALLDDEQQNDLYVSFDGTRKSPGPKTDIEVRMLADNSWKKVKNSKTNGGNNIKESGNNSKVQIPSVDSNPKPHNSDSDSEEEMVDGFLTVSDEKETYELPSQADLIRQAFAGDDVEAEFVKDKVEALNEENPEPEEPALVPGWGQWTHVQQKRGLPSWMVKEHEDAKRKREETLKSRKDAKLKHVIISEHVDKKAEKLLATNLPFPYTSNDVYENSMRMPLGPDFNPAISLSALNRPAIVKKPGVVIKPIQYGEIDPHEKPDELKRVIQRVKPNPNIKKASAKQAKRTASHRRT

SEQ ID NO: 26149 - DNA, 538 bp, Triticum aestivum
ccaaaaggaaacaaaatttccaagaaaagaggttggggtcgtcgcgtcggcgttgcccaatcctctcccatctcccccacctctcctactccgctccgcgccgttgccgatctggcctccagtcaactccggcgagattggatttgattggattgaagtttactggactggagccgatccgatccgatctgatcggactctgctggcatctagcgaagcttgaggaggggtcgctcgctgtcgcgggccacagatctgccgcgtccgccatggacggcaacaaggacgacgctgtcaaggccctgcgcatcggcaaggacgccctcgacgccggcgatacctcccgcgccctcaagtttctgtctaaggccaagcggctggaccccttgctccccatcgatcacctcctcaaccccctcctcaataaggatgacccgtcctcctcaccggcctcgtcatcatcgtcatctgccccacatcccccaccgcctccgccgtcgcgagctgcatcatcagcagccggtgctgacggcttgag

SEQ ID NO: 26150 - protein, 178 aa, Triticum aestivum
KRKQNFQEKRLGSSRRRCPILSHLPHLSYSAPRRCRSGLQSTPARLDLIGLKFTGLEPIRSDLIGLCWHLAKLEEGSLAVAGHRSAASAMDGNKDDAVKALRIGKDALDAGDTSRALKFLSKAKRLDPLLPIDHLLNPLLNKDDPSSSPASSSSSSAPHPPPPPPSRAASSAAGADGL

SEQ ID NO: 26151 - protein, 89 aa, Triticum aestivum
MDGNKDDAVKALRIGKDALDAGDTSRALKFLSKAKRLDPLLPIDHLLNPLLNKDDPSSSPASSSSSSAPHPPPPPPSRAASSAAGADGL

SEQ ID NO: 26152 - DNA, 1207 bp, Triticum aestivum
aggaagccacactcccgcagctgcagcgaatttacactgcaggtcgaggctagctgagatccatggcgtcgagcagggcgatcttggccatgggcctccttgccgccgtgctgtcccccgccttgtcaaagcggtcgtttatctccatgccagccgacgtgagtagtcctgtgaccctggccaacggcctctcctacggttaccacgccaactcctgcccgcagctgcaagacattgtgtggccgatcgtggagagcgcggtcctgggtgaggtggccatcgccgccggcctcctccgtatcttcttccacgactgctttcctcagggctgcgacgcgtccgtccttctgacgggacccaacagcgagcgggacctgccgccgaaccagacgctgcagccgcgtgcgatgcagctcatcgaggacgtccgcgtcaaggtacacgccgcctgtggcgccaccgtctcctgcgccgacatcatcgccctcgccacccgcgacgccgtcttcgtggccggggaaagcgaaatgttctacttctacgacctgccgctcggccggtttgacagcctcgagccggctaatagcagcgccgtcttcgacctcccgcagtccaccgccgacgccaacacgctcatcaacgtcttcaagagccgcaacctcgagccgatcgacctcgtcgcactctctggcgcgcacactgtcgggaaggcgcagtgcagctccttcaacaaccgcttctccgaggacgccgacttcgcccggaggctcgccgccaactgctccagcgacccgaaccggctgcaggacctcgacgtggaaacccccatcgtgttggacaaccagtacttcaaaaacctgatggagggaaagggggtgttcacctccgaccaagtgctcatcagcgacgggcgcaccgactgggcggtcaaaggcctcgccgagaacaaatattggttctacagccagttccgtgactccttggtgaagctgagtcagtaccaacccggaggaaacgtgggcgagatccgccgcaacagctgcttcacgcccaacggacagagcattcccgccaccgccggtgacgaggggttcgcagcctctgcttgagttcaccgctcactacgggatcgtcgtttagtttgcttgtagtaagagtataagctcgtgtgtactctgcttcgttcaatcctctttcatgatggctc

SEQ ID NO: 26153 - protein, 348 aa, Triticum aestivum
MASSRAILAMGLLAAVLSPALSKRSFISMPADVSSPVTLANGLSYGYHANSCPQLQDIVWPIVESAVLGEVAIAAGLLRIFFHDCFPQGCDASVLLTGPNSERDLPPNQTLQPRAMQLIEDVRVKVHAACGATVSCADIIALATRDAVFVAGESEMFYFYDLPLGRFDSLEPANSSAVFDLPQSTADANTLINVFKSRNLEPIDLVALSGAHTVGKAQCSSFNNRFSEDADFARRLAANCSSDPNRLQDLDVETPIVLDNQYFKNLMEGKGVFTSDQVLISDGRTDWAVKGLAENKYWFYSQFRDSLVKLSQYQPGGNVGEIRRNSCFTPNGQSIPATAGDEGFAASA

SEQ ID NO: 26154 - protein, 339 aa, Triticum aestivum
MGLLAAVLSPALSKRSFISMPADVSSPVTLANGLSYGYHANSCPQLQDIVWPIVESAVLGEVAIAAGLLRIFFHDCFPQGCDASVLLTGPNSERDLPPNQTLQPRAMQLIEDVRVKVHAACGATVSCADIIALATRDAVFVAGESEMFYFYDLPLGRFDSLEPANSSAVFDLPQSTADANTLINVFKSRNLEPIDLVALSGAHTVGKAQCSSFNNRFSEDADFARRLAANCSSDPNRLQDLDVETPIVLDNQYFKNLMEGKGVFTSDQVLISDGRTDWAVKGLAENKYWFYSQFRDSLVKLSQYQPGGNVGEIRRNSCFTPNGQSIPATAGDEGFAASA

SEQ ID NO: 26155 - protein, 320 aa, Triticum aestivum
MPADVSSPVTLANGLSYGYHANSCPQLQDIVWPIVESAVLGEVAIAAGLLRIFFHDCFPQGCDASVLLTGPNSERDLPPNQTLQPRAMQLIEDVRVKVHAACGATVSCADIIALATRDAVFVAGESEMFYFYDLPLGRFDSLEPANSSAVFDLPQSTADANTLINVFKSRNLEPIDLVALSGAHTVGKAQCSSFNNRFSEDADFARRLAANCSSDPNRLQDLDVETPIVLDNQYFKNLMEGKGVFTSDQVLISDGRTDWAVKGLAENKYWFYSQFRDSLVKLSQYQPGGNVGEIRRNSCFTPNGQSIPATAGDEGFAASA

SEQ ID NO: 26156 - DNA, 488 bp, Triticum aestivum
aatcgaaaaaggctgtagctcctccaagcacacagaagtaacacacgcatccttccttgcttccttcaggcttcaaccatggctctcctcagaagcctggctgcgttcttgtgcgtgatgctggcctccctcgtgttcgtcgcacaggccgtgctcgccgccagaggcgatttaagcagcgtgaagcgagacggtgtgaggggaacctgggcgtccccttcctaccaggtgcggccggggccgctcccgcgctatcctccaaagtaggctcgaggcgatctatgacaagaatgggaatacaaatatgccagtcaagagtaatttagttatttgttactgagcagtgagcgtttgcggccgatataaagataccaaaatgcacgattgtatttgtatgttagttcatccgacttatctaagatgttgctacaaccatatgcgaataaacaacacggagcaacgtttgtgccttgccgtgtgtgccatgc

SEQ ID NO: 26157 - protein, 62 aa, Triticum aestivum
MALLRSLAAFLCVMLASLVFVAQAVLAARGDLSSVKRDGVRGTWASPSYQVRPGPLPRYPPK

SEQ ID NO: 26158 - protein, 49 aa, Triticum aestivum
MLASLVFVAQAVLAARGDLSSVKRDGVRGTWASPSYQVRPGPLPRYPPK

SEQ ID NO: 26159 - protein, 38 aa, Triticum aestivum
IEKGCSSSKHTEVTHASFLASFRLQPWLSSEAWLRSCA

SEQ ID NO: 26160 - DNA, 1035 bp, Triticum aestivum
agcaaaggcgtccccgtatggcggcagcgccagctccacggcctcctccgcctgccgcctccccgccccctccgccccgtcttcgtgccaccaactccctgccgcgcacgccctcccctcgcctccctgcgtattccacacccaccatctcctctccccaagaaacgcctctccagcgctcccgaagccaaaggcgagacggcggcggcgttattgggggagggggaggaggggaatggagcgacggaggatgaggcgcgggaggcgcaagaaggggcggggggatacgcggagagcgttggcgccggggaccccgcgggccctccggcccatcaccttgcggcccgcgctggtcttggggacccggtgttcttcctcctgaccttcgtcgccgtcacgacatccgttgccttcatcagcatggtagcggtggcgattcctacgatgctcgctatgaggagagctgcaaattcatttgctctgctggctgatgcagctctggatgagttaccgagcacgatgacagctgtaagactctctggcatggaaatcagtgatttcacccttgaacttagtgacttgagccaagtgatagcagacggtgtgaacaagtcaacgaatattgttcaagcagtagaagatggaataggacaaatgaggaatatagctcggcagaagactaaatagaatgacagacaagcgaggaaacttgcggaatattatcaccgcagggccagctaaaagttcaaatgattcgtctagccaatacatggaccatagaagaaacgaccaatcatctgttagagtatcttgacatttttcacagaactccaaatggcgcataagactgcttctgggtgggacgtaaacgcttagtaatatacaattgttggtaggccagcttggttggcataaaatgtttgtctctgtatgaggtagaatgagaaattgaagaggcaacaaatggtttttgatttatgagcatgcctatactgtgtacttaggatgctccaatttggaaatattgtgcagcgc

SEQ ID NO: 26161 - protein, 228 aa, Triticum aestivum
SKGVPVWRQRQLHGLLRLPPPRPLRPVFVPPTPCRARPPLASLRIPHPPSPLPKKRLSSAPEAKGETAAALLGEGEEGNGATEDEAREAQEGAGGYAESVGAGDPAGPPAHHLAARAGLGDPVFFLLTFVAVTTSVAFISMVAVAIPTMLAMRRAANSFALLADAALDELPSTMTAVRLSGMEISDFTLELSDLSQVIADGVNKSTNIVQAVEDGIGQMRNIARQKTK

SEQ ID NO: 26162 - protein, 126 aa, Triticum aestivum
AKASPYGGSASSTASSACRLPAPSAPSSCHQLPAAHALPSPPCVFHTHHLLSPRNASPALPKPKARRRRRYWGRGRRGMERRRMRRGRRKKGRGDTRRALAPGTPRALRPITLRPALVLGTRCSSS

SEQ ID NO: 26163 - DNA, 2159 bp, Triticum aestivum
atcaacggtgaccctcgatagggtttcatcgtcagagaggaaaagccgaaaaggggatctgaggtcagagtgatgcgccgcctgccttctgccgagctccagcctcgcgccgccgcccttgcctgaggcctcctatgaggatcgagtggtgcttcagaagagacgaccggggagctgcagttcccaatcgaagtagcagctccttttcgagctgccatccgcagtcgaaggaatcaagcggctcctctccgagtcgtggtccgcaatccaagcggctccttttttcagcggcaatccggattcaaagcagtccttcccgggctgcaatcagaaacaggtcctgtttcagttttaataaagtctacgagctgttggctccctcacgtggcaggaacgtagctgctataaatctggcctggcggcaaccgtggtacccgccagttttaagaggatacgatcatctcccttcggcgagcgatggccaaaccatccgtggacggcctaggcaaatcctccctcgatatggtggaggacaatggagttgacaggctcagcaagttgcctgatgacgttttgctcaacattgtggagcgacttgatatcgctgatgttgcacgaaccaccatcctctccagacgttggaagcagatccctgctatactctcaaagatttttataatggttgcttcttttcaacccaagcatgaaggtaggaagttaacctcagatgatatagttcgggccaacaccaacgtgctggaagcaaccaggagcatactggtaaagagggctggaggtccacacaccattcacctgctgcgcatgcaattctacttgggagatgagtccattttcattggtcatgctgttgccaacaccatagcaacacacaaggttgcttcagttgagtttacaatcttgaccaaggtgcgcacaaagtttaccaataatgacctgctcactcatgggaggcagttcatgtcattccttgattcgtgtccaaacacatttggtggtcttgcacgcctcacgctagagaatttgaggttaggagaatcagactttcccaaaattttcagtatatgcaagcaactcgaggtcctctgcctctaccactgtgatatgggcattgagtctttgctggaagtggaacactcacaactcagtgaactggtgattggccgtagcgtgcttattaagagggttgatctgaagtgggtaccaaaactcacagtactgaaatttaatatgtttcgatctcaagatgaccccttctgtcttggctatgtcccacttctccagactgtgagcatcattaatactggtttttcttggcacaagatgctcaagataagcgagttgctgggtgaaaccgccataagcaacctgcatttgaacttcaaaagtgaaaagatttgggtcaagccggaaggtcgaagacaattgttaccagtgttacacaagctaaggcttgtgaatttgattaacatttctgaagaatgcgatctgacttggataatgttcatacttcaaggtgcacccacccttaaggaactacgcatcttggtgcgggaccatttatgtgaaatggtaactggggagcggagaaaaaagtatgcctttagcgaggagaaggacaagggactagagtgggaaccatctgcatctgatttcaagcaccacaaccttgctgagctcagaatctatgggaggtttgaagcagaagaaaaaatcgtgcgctttgccaggaatatcatggaagcagcggtgaatctcgaggacataaaactttataagagtccagtgtgtgagaattgcaagcacatgctccaggagtggacgttgaaggagaagtcgttgcttagctacaaactcagcaaggggatgctgtcttcgctcgtccggattcagttcccaagtttaggggaaatttttacttggccaaagtactggtcttagctgcaagctgtggttttttttttgaggggttgcaagctgcagttcacaggagttgttgtatgcatcgattaattctcactagtcaaccttttaaattattcctgttttgagattgtactgagtcgaggaggataaggagtaactcttgacattagtgtgaagtattttggcaaatgaaagtttcggatgtgttattcgtg

SEQ ID NO: 26164 - protein, 493 aa, Triticum aestivum
MAKPSVDGLGKSSLDMVEDNGVDRLSKLPDDVLLNIVERLDIADVARTTILSRRWKQIPAILSKIFIMVASFQPKHEGRKLTSDDIVRANTNVLEATRSILVKRAGGPHTIHLLRMQFYLGDESIFIGHAVANTIATHKVASVEFTILTKVRTKFTNNDLLTHGRQFMSFLDSCPNTFGGLARLTLENLRLGESDFPKIFSICKQLEVLCLYHCDMGIESLLEVEHSQLSELVIGRSVLIKRVDLKWVPKLTVLKFNMFRSQDDPFCLGYVPLLQTVSIINTGFSWHKMLKISELLGETAISNLHLNFKSEKIWVKPEGRRQLLPVLHKLRLVNLINISEECDLTWIMFILQGAPTLKELRILVRDHLCEMVTGERRKKYAFSEEKDKGLEWEPSASDFKHHNLAELRIYGRFEAEEKIVRFARNIMEAAVNLEDIKLYKSPVCENCKHMLQEWTLKEKSLLSYKLSKGMLSSLVRIQFPSLGEIFTWPKYWS

SEQ ID NO: 26165 - protein, 478 aa, Triticum aestivum
MVEDNGVDRLSKLPDDVLLNIVERLDIADVARTTILSRRWKQIPAILSKIFIMVASFQPKHEGRKLTSDDIVRANTNVLEATRSILVKRAGGPHTIHLLRMQFYLGDESIFIGHAVANTIATHKVASVEFTILTKVRTKFTNNDLLTHGRQFMSFLDSCPNTFGGLARLTLENLRLGESDFPKIFSICKQLEVLCLYHCDMGIESLLEVEHSQLSELVIGRSVLIKRVDLKWVPKLTVLKFNMFRSQDDPFCLGYVPLLQTVSIINTGFSWHKMLKISELLGETAISNLHLNFKSEKIWVKPEGRRQLLPVLHKLRLVNLINISEECDLTWIMFILQGAPTLKELRILVRDHLCEMVTGERRKKYAFSEEKDKGLEWEPSASDFKHHNLAELRIYGRFEAEEKIVRFARNIMEAAVNLEDIKLYKSPVCENCKHMLQEWTLKEKSLLSYKLSKGMLSSLVRIQFPSLGEIFTWPKYWS

SEQ ID NO: 26166 - protein, 426 aa, Triticum aestivum
MVASFQPKHEGRKLTSDDIVRANTNVLEATRSILVKRAGGPHTIHLLRMQFYLGDESIFIGHAVANTIATHKVASVEFTILTKVRTKFTNNDLLTHGRQFMSFLDSCPNTFGGLARLTLENLRLGESDFPKIFSICKQLEVLCLYHCDMGIESLLEVEHSQLSELVIGRSVLIKRVDLKWVPKLTVLKFNMFRSQDDPFCLGYVPLLQTVSIINTGFSWHKMLKISELLGETAISNLHLNFKSEKIWVKPEGRRQLLPVLHKLRLVNLINISEECDLTWIMFILQGAPTLKELRILVRDHLCEMVTGERRKKYAFSEEKDKGLEWEPSASDFKHHNLAELRIYGRFEAEEKIVRFARNIMEAAVNLEDIKLYKSPVCENCKHMLQEWTLKEKSLLSYKLSKGMLSSLVRIQFPSLGEIFTWPKYWS

SEQ ID NO: 26167 - DNA, 1953 bp, Triticum aestivum
aatccgccgactgctccgtttatttaaccgagccgtcccattcttggagagcaagaagcacgccaccacctcgcgtccccaaagaatccccatcccttcccctcccctcccctccccggccgcacacagatccggcgaccgacaacaagccatggtgtccaacggggagctgtcgcagccgcaggcgggggagtacggcctcgccgtcatgcgccgccggcccaagaccaagatcgtctgcacgctcggcccggcctcccgctccgtcgacatgatcgagaagctgctgcgcgccggcatgtgcgtcgcccgcttcaacttctcccacggctcccacgactaccaccaggagacgctcgacaacctgcacgccgccatggaccgcaccgggatcctctgcgccgtcatgctcgacaccaagggtccagagatccgtactggatttttgaaagatgggaagcctatccagttgaggaagggccaagaaattgtgatctccacagattatagcataaagggggacgacaagatgatatcgatgagctataagaagctagcagttgatctgaagccaggcagtgtcatattatgcgctgatggtaccatcactcttacagtgcttcattgtgacaaagagcaaggtctcgttcgctgctgttgtgagaacactgctatgcttggtgagaggaagaatgtcaatcttccaggggtcgttgttgatctgccaacactcactgaaaaggacagggaggatatccttcaatggggcgtcccgaacaagattgacatgattgctttgtcgtttgtccgcaaaggttcagatcttgtggaggtcaggaaggtacttggggagcatgccaagtcaataatgctgatgtcaaaggttgagaaccaggaaggagtagctaactttgacgatatcctggcacagtctgatgcttttatggtggcaagaggtgatttggggatggaaattcctgtagagaagatcttttatgcacagaaggtgatgattttcaagtgcaacattcagggcaagccagttgtgactgcaacccagatgttggagtctatgatcaagtctcctcggcctactcgagcggaagcaactgatgtggccaacgcagttcttgatggcactgactgtgtgatgctcagtggtgagacagcggctggggcttatccagaactggcagtgcaaactatggccaagatctgcttgcaggccgagtcatgcgtggactattctgctgtttttaaatcaatcatgtcatcagccccgattcccatgagcccattggagagccttgcctcatcagctgtccgcacagccaactcagccaaggcgacgcttatcttggtactgaccaggggaggaacaactgcaaggcttgtagccaagtacaggccatccatgccgatactgtctgtggtggttcctgagctcaagacggtcgagtttgactggatctgcagcgacgaggggcctgccaggcaaagcctcatcgtgaggggcgtgatccctatgctcagtgctggcactgccaaggcgtttgacagcgaagccacggaagaggcactgaggtttgccatgaagaacgccaaggagatgggcctttgcaacgctggtgactccattgtggcccttcaccgcatcgggaatgcatctgtcatcaagctcttgaccgtgtaagctagtggcagcgaagcgacaatgcaacaccattttgcccggggattttcccttctttctttttgcgaggctacgcatacccacagttttttgctgccaagattgcggcagtgcaacctggttaaaactttgtgttatcaagttgtggctgtttactctttatgagagggtttagccaccaaaactattatcgcagcagcttgttttgctactactactataacttatatgcaacgattgaactacctgatagttgctcc

SEQ ID NO: 26168 - protein, 563 aa, Triticum aestivum
IRRLLRLFNRAVPFLESKKHATTSRPQRIPIPSPPLPSPAAHRSGDRQQAMVSNGELSQPQAGEYGLAVMRRRPKTKIVCTLGPASRSVDMIEKLLRAGMCVARFNFSHGSHDYHQETLDNLHAAMDRTGILCAVMLDTKGPEIRTGFLKDGKPIQLRKGQEIVISTDYSIKGDDKMISMSYKKLAVDLKPGSVILCADGTITLTVLHCDKEQGLVRCCCENTAMLGERKNVNLPGVVVDLPTLTEKDREDILQWGVPNKIDMIALSFVRKGSDLVEVRKVLGEHAKSIMLMSKVENQEGVANFDDILAQSDAFMVARGDLGMEIPVEKIFYAQKVMIFKCNIQGKPVVTATQMLESMIKSPRPTRAEATDVANAVLDGTDCVMLSGETAAGAYPELAVQTMAKICLQAESCVDYSAVFKSIMSSAPIPMSPLESLASSAVRTANSAKATLILVLTRGGTTARLVAKYRPSMPILSVVVPELKTVEFDWICSDEGPARQSLIVRGVIPMLSAGTAKAFDSEATEEALRFAMKNAKEMGLCNAGDSIVALHRIGNASVIKLLTV

SEQ ID NO: 26169 - protein, 513 aa, Triticum aestivum
MVSNGELSQPQAGEYGLAVMRRRPKTKIVCTLGPASRSVDMIEKLLRAGMCVARFNFSHGSHDYHQETLDNLHAAMDRTGILCAVMLDTKGPEIRTGFLKDGKPIQLRKGQEIVISTDYSIKGDDKMISMSYKKLAVDLKPGSVILCADGTITLTVLHCDKEQGLVRCCCENTAMLGERKNVNLPGVVVDLPTLTEKDREDILQWGVPNKIDMIALSFVRKGSDLVEVRKVLGEHAKSIMLMSKVENQEGVANFDDILAQSDAFMVARGDLGMEIPVEKIFYAQKVMIFKCNIQGKPVVTATQMLESMIKSPRPTRAEATDVANAVLDGTDCVMLSGETAAGAYPELAVQTMAKICLQAESCVDYSAVFKSIMSSAPIPMSPLESLASSAVRTANSAKATLILVLTRGGTTARLVAKYRPSMPILSVVVPELKTVEFDWICSDEGPARQSLIVRGVIPMLSAGTAKAFDSEATEEALRFAMKNAKEMGLCNAGDSIVALHRIGNASVIKLLTV

SEQ ID NO: 26170 - protein, 494 aa, Triticum aestivum
MRRRPKTKIVCTLGPASRSVDMIEKLLRAGMCVARFNFSHGSHDYHQETLDNLHAAMDRTGILCAVMLDTKGPEIRTGFLKDGKPIQLRKGQEIVISTDYSIKGDDKMISMSYKKLAVDLKPGSVILCADGTITLTVLHCDKEQGLVRCCCENTAMLGERKNVNLPGVVVDLPTLTEKDREDILQWGVPNKIDMIALSFVRKGSDLVEVRKVLGEHAKSIMLMSKVENQEGVANFDDILAQSDAFMVARGDLGMEIPVEKIFYAQKVMIFKCNIQGKPVVTATQMLESMIKSPRPTRAEATDVANAVLDGTDCVMLSGETAAGAYPELAVQTMAKICLQAESCVDYSAVFKSIMSSAPIPMSPLESLASSAVRTANSAKATLILVLTRGGTTARLVAKYRPSMPILSVVVPELKTVEFDWICSDEGPARQSLIVRGVIPMLSAGTAKAFDSEATEEALRFAMKNAKEMGLCNAGDSIVALHRIGNASVIKLLTV

SEQ ID NO: 26171 - DNA, 1247 bp, Triticum aestivum
gtgctagctagctggcctgattcgcgtgagttcatccatccatccaccatggcctccgaccgcctcgccgccctcaaggccttcgacgagaccaaggccggcgtgaagggcctcgtggacgccggcgtcaaggccgtcccggacatcttccgccaccctcccgacccgctcccccagtgcaccaaggtcgccgccatcccggtcgtcgacctctcgggtccccgctcggaggtggtcgccgcggtgagggaggcggcgcggacggcgggcttcttccagctggtgaaccacggcgtgccggaggcggccatgtcggggatgctggcggcggtgcggcggttcaacgaggagcccgcggaggccaaggcgccctactacacgcgggacgccgcgcggcgcgtgcgctacaactgcaacgccgacctcttccggaccctggtgggcaagtggcgcgacaccatctacatggacgacgtggaccggctggcggcgggcgaggaggaggaggtcctcccgccggcgtgccggggcgtcgcgcccaagtacacggcgcagatacggatgctggggcgcgcgctcttcgagctgctgtcggaggccctgggcgtgcggcgcgggtacctggaggaggaggccggctgcctggggacgctcagcgtcgccggccactactacccggcgtgcccggagccgcacctgacgctgggcgccgtcaggcacaacgaccccggcttcctcaccgtgctgctccaggacggggtcggcggcctccaggtgctcacggacgtcgaggacggcgaagggaacgtgtccgccgcgtgggccgacgtgccggcggtgccgggggcgctggtggtgaacgtcggcgacttcctgcagctggtgtccaacgacaggttcaggagcgtcgcgcaccgcgtggtggccaacagcgtggggccccggatgtcggtggcgtgcttcttcagggccaagggagcgaccgtgtgcgccccggtggtggcggacgggggtggcccgccgcgctacaggaccgtcacggcggaggagctgctccgctcgtccgggaagcagaacgggctccgcgacgtgaggctctagctggcgagcctcaagaaagcagagagcagagacgaggcgtgaatgcatgttgggacatggtgatgaaatgcgtgtcgatgaagttggagctttgcatgaatttgcttatctttgtctgaaaaataaataaatttgcttatctgctg

SEQ ID NO: 26172 - protein, 366 aa, Triticum aestivum
VLASWPDSREFIHPSTMASDRLAALKAFDETKAGVKGLVDAGVKAVPDIFRHPPDPLPQCTKVAAIPVVDLSGPRSEVVAAVREAARTAGFFQLVNHGVPEAAMSGMLAAVRRFNEEPAEAKAPYYTRDAARRVRYNCNADLFRTLVGKWRDTIYMDDVDRLAAGEEEEVLPPACRGVAPKYTAQIRMLGRALFELLSEALGVRRGYLEEEAGCLGTLSVAGHYYPACPEPHLTLGAVRHNDPGFLTVLLQDGVGGLQVLTDVEDGEGNVSAAWADVPAVPGALVVNVGDFLQLVSNDRFRSVAHRVVANSVGPRMSVACFFRAKGATVCAPVVADGGGPPRYRTVTAEELLRSSGKQNGLRDVRL

SEQ ID NO: 26173 - protein, 350 aa, Triticum aestivum
MASDRLAALKAFDETKAGVKGLVDAGVKAVPDIFRHPPDPLPQCTKVAAIPVVDLSGPRSEVVAAVREAARTAGFFQLVNHGVPEAAMSGMLAAVRRFNEEPAEAKAPYYTRDAARRVRYNCNADLFRTLVGKWRDTIYMDDVDRLAAGEEEEVLPPACRGVAPKYTAQIRMLGRALFELLSEALGVRRGYLEEEAGCLGTLSVAGHYYPACPEPHLTLGAVRHNDPGFLTVLLQDGVGGLQVLTDVEDGEGNVSAAWADVPAVPGALVVNVGDFLQLVSNDRFRSVAHRVVANSVGPRMSVACFFRAKGATVCAPVVADGGGPPRYRTVTAEELLRSSGKQNGLRDVRL

SEQ ID NO: 26174 - protein, 263 aa, Triticum aestivum
MSGMLAAVRRFNEEPAEAKAPYYTRDAARRVRYNCNADLFRTLVGKWRDTIYMDDVDRLAAGEEEEVLPPACRGVAPKYTAQIRMLGRALFELLSEALGVRRGYLEEEAGCLGTLSVAGHYYPACPEPHLTLGAVRHNDPGFLTVLLQDGVGGLQVLTDVEDGEGNVSAAWADVPAVPGALVVNVGDFLQLVSNDRFRSVAHRVVANSVGPRMSVACFFRAKGATVCAPVVADGGGPPRYRTVTAEELLRSSGKQNGLRDVRL

SEQ ID NO: 26175 - DNA, 1180 bp, Triticum aestivum
aaacaatccagtgaaccgcccatgctcaccctcccgtgcttcaccactcctcctcaacctccaccgacccggccggtccggtccggtccggtcccggctccggaagtctccagaacccggacaaccaccgccacgcgggcccgcatggcagggtcacgtccctcacgcgccgctacctccggcgagacctgctcgcaccaccccctcataaatactggtgcgcccaagcctcgccgcagatcgaccgcgctcgccctctccactttcctgctgctggtgctgttaaccggactccccgacgccgccgtcgccgccaacatgaccgaggtctgcgtcaaggccgccgtcggccaccccgacacgctcggcgactgtcccttctcccagagggtgctgctcacgctggaggagaagaaggtgccctaccagatgaagctcatcgacgtcagcaacaagcccgactggttcctgaagatcaatccagagggcaaggtgcctgtgtataacggtggtgatggcaaatggattgctgattctgatgtgatcactcaagtcattgaggagaagtacccaactccatcacttgtgacccctgctgaatatgcatcagtgggatcaaagatcttctccacctttgtcacgttcttgaagagcaaggatgccagcgatggttcggagaaggcacttgttgatgagctgcaggcgctcgaagagcacctgaaggcccatggaccctacatcaatggggcgaacatctccgctgtcgatctcagcctggctccgaagctctaccatctccaggtcgccctggagcacttcaagggctggaaggtccctgaaaccctgaccagcgtccatgcctacaccgaggctctcttcagccgcgagtcgttcgtcaagaccaaggcgaccaaggagaacctgatcgccgggtgggcgccgaaagtgaacccgtaagccctcccgccgctcggagacccggcccacccccgtcgtgtgagagtagcgacgggcctcatctgtctaggttggaataatgcgagcgagccttgatgtgctctggttgtcgcaagacgtgcacttgctgcctgggctgtgccctgcctggcttgtgtgtgtgggtgtgggtgatatgtgtgtggtctgtcctctttcgtgtgaatgaataatggagctgcgt

SEQ ID NO: 26176 - protein, 318 aa, Triticum aestivum
KQSSEPPMLTLPCFTTPPQPPPTRPVRSGPVPAPEVSRTRTTTATRARMAGSRPSRAATSGETCSHHPLINTGAPKPRRRSTALALSTFLLLVLLTGLPDAAVAANMTEVCVKAAVGHPDTLGDCPFSQRVLLTLEEKKVPYQMKLIDVSNKPDWFLKINPEGKVPVYNGGDGKWIADSDVITQVIEEKYPTPSLVTPAEYASVGSKIFSTFVTFLKSKDASDGSEKALVDELQALEEHLKAHGPYINGANISAVDLSLAPKLYHLQVALEHFKGWKVPETLTSVHAYTEALFSRESFVKTKATKENLIAGWAPKVNP

SEQ ID NO: 26177 - protein, 311 aa, Triticum aestivum
MLTLPCFTTPPQPPPTRPVRSGPVPAPEVSRTRTTTATRARMAGSRPSRAATSGETCSHHPLINTGAPKPRRRSTALALSTFLLLVLLTGLPDAAVAANMTEVCVKAAVGHPDTLGDCPFSQRVLLTLEEKKVPYQMKLIDVSNKPDWFLKINPEGKVPVYNGGDGKWIADSDVITQVIEEKYPTPSLVTPAEYASVGSKIFSTFVTFLKSKDASDGSEKALVDELQALEEHLKAHGPYINGANISAVDLSLAPKLYHLQVALEHFKGWKVPETLTSVHAYTEALFSRESFVKTKATKENLIAGWAPKVNP

SEQ ID NO: 26178 - protein, 270 aa, Triticum aestivum
MAGSRPSRAATSGETCSHHPLINTGAPKPRRRSTALALSTFLLLVLLTGLPDAAVAANMTEVCVKAAVGHPDTLGDCPFSQRVLLTLEEKKVPYQMKLIDVSNKPDWFLKINPEGKVPVYNGGDGKWIADSDVITQVIEEKYPTPSLVTPAEYASVGSKIFSTFVTFLKSKDASDGSEKALVDELQALEEHLKAHGPYINGANISAVDLSLAPKLYHLQVALEHFKGWKVPETLTSVHAYTEALFSRESFVKTKATKENLIAGWAPKVNP

SEQ ID NO: 26179 - DNA, 1490 bp, Triticum aestivum
attaagctcgctcctcgttgtgcttctccactcgcacggcgaagaacagggcacctctgaccgaacatagcagcatagcatctccccacgctctcacgcatcaccacagctacagcatcaagatcactagtagtagatcaactagccaggtatagctatggcgtccgagcagagtcgccgcgaggagcgcgcgcaggccgcggcgcagaaggcgaccgacgagctcgccgcggccaggcgggacatgcgcgagcccagcagcccaggacggcggaccggcatcttcggcaccgtgcaggagagcgcgcgctccctgatgggcgccgtccgcgacaccttctccggcggcgtccgggacacaaccacggcacacgacagccactccacaggcgccatggggaccgcgggggggaaactcaatgagtacgggagctacgcatcccagaaggccgatgaagggaaggagagcgcgagtgagatggcggaagccgccgcggggaagaccaaggagaccaaggatgcggccgcggagaagacgagggagatggcggacgccgccgcggggaagaccaaggagaccaaggacgcggcggtggagaagacgagggagatggcggacaccgccgcgacgaaggccgtggagaccaaggacgcggccgcagagaaggcgcgcggcgcgggggagatggtgacggagaaggcgaggagtgccaaggacacggcggctgacaaggcgagtggagcggcggagaaggcgaagggcgccaaggacgcagccttcgatacagcggagggtgccaaggagtacatggtggacaagaaggaggacgcccggcgagcgctcgccggctcggccaaggatagcaagggcgagacgaacgagtcggcgtggcaacagggccaggacgtgcggcggcgggcggcggagaaggccgaggaggttcgtcagcgcacgcaccaaccgccggaggaggggaggtcgaagtcggcaacggagaacatcttcgggtcggcgcaggggttgacggaggcgttcaaggagaagatgacgatgccgacggacgtgatcgagcggaagctcgctgagaggaaggggacgccgacggacgcgagcaggggcgaggcactgaacacggacgacgtgatgatgcgcgtgaaggaggcggaccagatgaccgggacagggtttaacgacgtcggcaagatgggcgaggagggcacgggcatgaaggcggcactgagggtcgacgatgaggaggacgtgatgctgcgggtgaaggcggcggaccagatgacagggcaggcgttcaacgacgtcggcccgatgggcgaggagggcacgggatggggtccggcgttgagggcgcggaaggacgcctgagagcgttgacacgtgcatgcactcctgttgcgtgtgagcgttttgtgtgacactttgtagtacaagctactcctgtagcaaatcaataaattatgcccggcaacttttt

SEQ ID NO: 26180 - protein, 407 aa, Triticum aestivum
MASEQSRREERAQAAAQKATDELAAARRDMREPSSPGRRTGIFGTVQESARSLMGAVRDTFSGGVRDTTTAHDSHSTGAMGTAGGKLNEYGSYASQKADEGKESASEMAEAAAGKTKETKDAAAEKTREMADAAAGKTKETKDAAVEKTREMADTAATKAVETKDAAAEKARGAGEMVTEKARSAKDTAADKASGAAEKAKGAKDAAFDTAEGAKEYMVDKKEDARRALAGSAKDSKGETNESAWQQGQDVRRRAAEKAEEVRQRTHQPPEEGRSKSATENIFGSAQGLTEAFKEKMTMPTDVIERKLAERKGTPTDASRGEALNTDDVMMRVKEADQMTGTGFNDVGKMGEEGTGMKAALRVDDEEDVMLRVKAADQMTGQAFNDVGPMGEEGTGWGPALRARKDA

SEQ ID NO: 26181 - protein, 378 aa, Triticum aestivum
MREPSSPGRRTGIFGTVQESARSLMGAVRDTFSGGVRDTTTAHDSHSTGAMGTAGGKLNEYGSYASQKADEGKESASEMAEAAAGKTKETKDAAAEKTREMADAAAGKTKETKDAAVEKTREMADTAATKAVETKDAAAEKARGAGEMVTEKARSAKDTAADKASGAAEKAKGAKDAAFDTAEGAKEYMVDKKEDARRALAGSAKDSKGETNESAWQQGQDVRRRAAEKAEEVRQRTHQPPEEGRSKSATENIFGSAQGLTEAFKEKMTMPTDVIERKLAERKGTPTDASRGEALNTDDVMMRVKEADQMTGTGFNDVGKMGEEGTGMKAALRVDDEEDVMLRVKAADQMTGQAFNDVGPMGEEGTGWGPALRARKDA

SEQ ID NO: 26182 - protein, 354 aa, Triticum aestivum
MGAVRDTFSGGVRDTTTAHDSHSTGAMGTAGGKLNEYGSYASQKADEGKESASEMAEAAAGKTKETKDAAAEKTREMADAAAGKTKETKDAAVEKTREMADTAATKAVETKDAAAEKARGAGEMVTEKARSAKDTAADKASGAAEKAKGAKDAAFDTAEGAKEYMVDKKEDARRALAGSAKDSKGETNESAWQQGQDVRRRAAEKAEEVRQRTHQPPEEGRSKSATENIFGSAQGLTEAFKEKMTMPTDVIERKLAERKGTPTDASRGEALNTDDVMMRVKEADQMTGTGFNDVGKMGEEGTGMKAALRVDDEEDVMLRVKAADQMTGQAFNDVGPMGEEGTGWGPALRARKDA

SEQ ID NO: 26183 - DNA, 1613 bp, Triticum aestivum
aaaaaccccacaaatccatcccggccgaccgccgccgccgccgttgccacccccaccgccatgaatccggcatgcgcggaggcagcagccgccaagaagtcccggcacaaggacaagaaggagaagaaaaacaagcgcaaagacaccgcggagcacctcggcggcgagcccgcgacggccgacgaggaagccgtccacaagaagaagaagaagaagcacgcgaaggaggaggaggaggcggattcgaaggggaagccgacggtgagcatcgccgtcgccggttccgtcatcgacaacgcccagtccctcgagctcgccaccctcctggccggtcagatagcccgcgcggcggccgtattccgcatcgacgagatcgttgtcttcgacagcagcccacctgcggagaacggcggcggcggtgccgaagacgaagaggagagcggtgcgcggttcctcgttcgcatactggagtatctggagacgccgcagtacctgcgccgccgtctcttcccaatgcacaagaactttaaatatgtggggttgcttccgcctctggacgcgccgcaccatgtgcgcaagcatgagtggtctgaatttcgtgaaggtgtaacattgggcggggatcgttcaaagggtacacttgttgatgttgggttaagtcagaacgttctggttgagcaaatcctagaacaaggaaaaagggtaactgtagccatgggaaccaacagagaccttacaccagcttgtataaggaaagtcgttcctccgtcctcacccagcgaagaaatgggatcatattggggctataaagtccgctatgcttcaaatttaagtggtgttatcaatgattcaccatacaaggaaggatatgatcatatcattggcacttctgagcatggtgaaaccattatttcatctgagctaatcttaccttcattcaggcaccttttaattgcgtttggtggactggctggtctggaagaaagcatcgaagaggacccaaatctgaatggcaaaggtgcaaatgatgtattcgcatcttattttaatacatgccccaaccaaggtagcagaacaataaggacagaggaggcacttctcatatcccttcagtacttccaagaccccatcaggcgagcagggatatcgaattagaaggttttatgcagacacatgcaaatacaacattgcgcttaccaaaggattggctttaacgcttggaatagacatggaagatgcaccttgggtttgtttttgatggtcaatcgctggattgtagcacctacgggttttctgctcgggtcaagcactgtaaagcaaagaggaggtgcaagaataggtgatagctttaacttctattttgaaacaggcaaggcacacattttcattattaagaagagaatttgcctggttaattagaggaaaactgggcaaaagccaagatagcttgaacattgatgctagcattggtagagttttcttaagggggcattgatagagttgagaagaagatcagtgccccccaaaagagtgtttagagagggagcataattatcgtcggggatttgttttctttgctccaaattggctgaaatgagtgttttgtttttttt

SEQ ID NO: 26184 - protein, 384 aa, Triticum aestivum
KNPTNPSRPTAAAAVATPTAMNPACAEAAAAKKSRHKDKKEKKNKRKDTAEHLGGEPATADEEAVHKKKKKKHAKEEEEADSKGKPTVSIAVAGSVIDNAQSLELATLLAGQIARAAAVFRIDEIVVFDSSPPAENGGGGAEDEEESGARFLVRILEYLETPQYLRRRLFPMHKNFKYVGLLPPLDAPHHVRKHEWSEFREGVTLGGDRSKGTLVDVGLSQNVLVEQILEQGKRVTVAMGTNRDLTPACIRKVVPPSSPSEEMGSYWGYKVRYASNLSGVINDSPYKEGYDHIIGTSEHGETIISSELILPSFRHLLIAFGGLAGLEESIEEDPNLNGKGANDVFASYFNTCPNQGSRTIRTEEALLISLQYFQDPIRRAGISN

SEQ ID NO: 26185 - protein, 364 aa, Triticum aestivum
MNPACAEAAAAKKSRHKDKKEKKNKRKDTAEHLGGEPATADEEAVHKKKKKKHAKEEEEADSKGKPTVSIAVAGSVIDNAQSLELATLLAGQIARAAAVFRIDEIVVFDSSPPAENGGGGAEDEEESGARFLVRILEYLETPQYLRRRLFPMHKNFKYVGLLPPLDAPHHVRKHEWSEFREGVTLGGDRSKGTLVDVGLSQNVLVEQILEQGKRVTVAMGTNRDLTPACIRKVVPPSSPSEEMGSYWGYKVRYASNLSGVINDSPYKEGYDHIIGTSEHGETIISSELILPSFRHLLIAFGGLAGLEESIEEDPNLNGKGANDVFASYFNTCPNQGSRTIRTEEALLISLQYFQDPIRRAGISN

SEQ ID NO: 26186 - protein, 213 aa, Triticum aestivum
MHKNFKYVGLLPPLDAPHHVRKHEWSEFREGVTLGGDRSKGTLVDVGLSQNVLVEQILEQGKRVTVAMGTNRDLTPACIRKVVPPSSPSEEMGSYWGYKVRYASNLSGVINDSPYKEGYDHIIGTSEHGETIISSELILPSFRHLLIAFGGLAGLEESIEEDPNLNGKGANDVFASYFNTCPNQGSRTIRTEEALLISLQYFQDPIRRAGISN

SEQ ID NO: 26187 - DNA, 1546 bp, Triticum aestivum
atcccctctcccaccccaccaatctaccgtcgccggaccaggcgcgggccggggcgcgcgatgctgccgcagcagagccaggccgcggcgatgatgcagcaggcggccgcgatgcagtccatgtacgcgatgccgccgccgcctcaccaccaccacctcctcggcgccgcgccgccgcagcagatagagccaattctcactggaaatctgccacctggttttgatacaagtacatgccgcagtgtatatgtcggcaatattcatgttcaagtgactgaggcacttctccgagaggtttttcagagtgctggttcagttgacggatgcaagcttataagaaaagagaagtcctcatatggttttgttgactactacgaacgcggatcagctgccctagcaattttgacacttaacgggaagcaaatttttgggcagcctatcagagttaattgggcatatgctagcggtcagagggaggatacaacagaccatttccatatttttgttggtgatcttagccctgaggtcacggattctgcattatttgcattcttctcagcatattcccctaactgctctgatgctcgagtaatgtgggaccaaaagaccggaagatcaagaggttatggctttgtttccttcaggaatcaacaggatgcgcagagtgccataaatgacttaaatggtcagtggcttggaaatcggcagattcgttgcaactgggcaacaaaaggtgccaacagtggcgaggaccagctaacatcagattcgaaaagtatagctgatgtaaataacaatttcacagaaaatgcaaagcagaaatcaaacgaagatgctcccgagaataatccactgtacagaactgtttatgttgggaaccttgctcacgaggttactcaagacgtgcttcaccgtttcttccatgcacttggtgctggagccatcgaggaggtgcgtgtccagcatggcaaaggctttggttttgtcaagtacagcaatcatgccgaaactgcccttgcaattcagacgggtaatggtcgtattttgggtggtaaaccagtcaagtgttcctggggcaacaagcctacaccccctggtaccacctctgcgccactgccccctcctgctgctcctagccaccccgctgccgccgatctcgtagcgtatcaacgtgctattgcgatgagcaagatggcttcaacccaggcattgatgcaggctcagcatctcaggcacgcagccatggggatgggtgtaggtgcgagtcaggcgatgtacgatggtactttccagaacgtcggtgcctcgcagcagcaacagcagcagcagcagcagctcatgtactattaattccagccttggagggagctcatctttgtaatttgacccggattttattttttcttttctatcttcgtcgtgtctatatgcagtgtgacactatatgtcggtgttgccgtctggctgtgttggtagtgcaccgaatctgtgtctgtagtgatgcaagttgaccggttaatatcgaattttatgttattttctcgtg

SEQ ID NO: 26188 - protein, 449 aa, Triticum aestivum
IPSPTPPIYRRRTRRGPGRAMLPQQSQAAAMMQQAAAMQSMYAMPPPPHHHHLLGAAPPQQIEPILTGNLPPGFDTSTCRSVYVGNIHVQVTEALLREVFQSAGSVDGCKLIRKEKSSYGFVDYYERGSAALAILTLNGKQIFGQPIRVNWAYASGQREDTTDHFHIFVGDLSPEVTDSALFAFFSAYSPNCSDARVMWDQKTGRSRGYGFVSFRNQQDAQSAINDLNGQWLGNRQIRCNWATKGANSGEDQLTSDSKSIADVNNNFTENAKQKSNEDAPENNPLYRTVYVGNLAHEVTQDVLHRFFHALGAGAIEEVRVQHGKGFGFVKYSNHAETALAIQTGNGRILGGKPVKCSWGNKPTPPGTTSAPLPPPAAPSHPAAADLVAYQRAIAMSKMASTQALMQAQHLRHAAMGMGVGASQAMYDGTFQNVGASQQQQQQQQQLMYY

SEQ ID NO: 26189 - protein, 429 aa, Triticum aestivum
MLPQQSQAAAMMQQAAAMQSMYAMPPPPHHHHLLGAAPPQQIEPILTGNLPPGFDTSTCRSVYVGNIHVQVTEALLREVFQSAGSVDGCKLIRKEKSSYGFVDYYERGSAALAILTLNGKQIFGQPIRVNWAYASGQREDTTDHFHIFVGDLSPEVTDSALFAFFSAYSPNCSDARVMWDQKTGRSRGYGFVSFRNQQDAQSAINDLNGQWLGNRQIRCNWATKGANSGEDQLTSDSKSIADVNNNFTENAKQKSNEDAPENNPLYRTVYVGNLAHEVTQDVLHRFFHALGAGAIEEVRVQHGKGFGFVKYSNHAETALAIQTGNGRILGGKPVKCSWGNKPTPPGTTSAPLPPPAAPSHPAAADLVAYQRAIAMSKMASTQALMQAQHLRHAAMGMGVGASQAMYDGTFQNVGASQQQQQQQQQLMYY

SEQ ID NO: 26190 - protein, 419 aa, Triticum aestivum
MMQQAAAMQSMYAMPPPPHHHHLLGAAPPQQIEPILTGNLPPGFDTSTCRSVYVGNIHVQVTEALLREVFQSAGSVDGCKLIRKEKSSYGFVDYYERGSAALAILTLNGKQIFGQPIRVNWAYASGQREDTTDHFHIFVGDLSPEVTDSALFAFFSAYSPNCSDARVMWDQKTGRSRGYGFVSFRNQQDAQSAINDLNGQWLGNRQIRCNWATKGANSGEDQLTSDSKSIADVNNNFTENAKQKSNEDAPENNPLYRTVYVGNLAHEVTQDVLHRFFHALGAGAIEEVRVQHGKGFGFVKYSNHAETALAIQTGNGRILGGKPVKCSWGNKPTPPGTTSAPLPPPAAPSHPAAADLVAYQRAIAMSKMASTQALMQAQHLRHAAMGMGVGASQAMYDGTFQNVGASQQQQQQQQQLMYY

SEQ ID NO: 26191 - DNA, 1896 bp, Triticum aestivum
atccagtggatcccggtgaacggcacatggcggctaccaactctcgatcccctttcttcttcctcctcgcccgaaccccagctactctccatcttgtgtaatcgctacttgatcatgtatctgtgagtgagattgccaccatatattcgagctactactattgtgtaccttatatttggtatcagtcgccaccaccatcctctccgcagcgcgctctggctcacttcatcgagacgcgccgactccgccaagcgcgcctgcaactggaacacatggatccagcggtcaagtcctacctcgacaagctctcggctacgatggaggccaacacgacggctctgacggtgatcacctcccgtctcgacgatctagcggcgtggcggcctgatctggagaagtgcgtcgccgatctaggggaagcggtggctgcgctgcagcaagggcgcccgggctccaccaacggcgagggtacacaggcgccggcaccaacggcgccactgccagcgactcgtgccacggcaagtcgtgtcgctgaaggtgcggcgggcgcaccccacgggtccattgaccatggcgagttccacctgcaacgagggtcgacggtggtgtcatcccagacgccgccgccactcccgaccaacggtcagctcaaaatcccgtccccaaattctcttccatcgccttttgcgcatgctagtcagatgttagcggggctaggacaggcgcacccatccatcgctttccctcaattctcgagggagaatccaaatctctggaaaaccatgtgtgagcagtactttaacatgtttggaatacacgaatacttttaggttccgatggtggcgctgaatttttcagggcctgctgccatttggctgcaatccatacagaaaaaactgggatcatttacatgggaatcatttgctgccttgctatgcactagatttgggcgtgatacgcaccgaaatctaatccgtcggttctacaccattaagcagacttcctcaatagctaattttattgagaaatttgagcttattacaaatcacttgagttcatattcagattcaattcacccctactatttccttactcgttttgtggagggactgaggccggacatacgcgcggtggtcatagtgcagcggccgccggacctggacacagcttgtgctctagctctgctccaggaggaggtggctgatggagcaggcctggagtcgtcgcggcagttccactaccagtcacggcctccaaaggtgaacacgcgccctcccgcggcgctgccacttccaccaccatcgggtcgcccaccaccaccagctggggcggccgatcggcgtgggactgaagccgctcgagctgaagcggcgaaaatcaagactctgcgcgactacagaagagcgcgggggctatgcttcaagtgtggcgaacgatggggtcatgaccacacctgacccacgtcagtccagctccatgtggtcgaggaactcctggagctgtttggcatcgacgcagtcacggatcagcagagcttgccagcggacgagcaacagcaagatatagtcatggcgatctcatgatctgccgtgacgggaggggtgtcatctaaagctttttagctccgtgcttggattcaaggccgcgaagtgttgatgctcgtcgactccggaagcacaacttcttcttcctcctcgcccgaaccctagttactctcgatcttgtgtaatcgctacttgatcgtgtatctgtgagtgagattgccaccatatattcgagctactactactatgtaaaaaaaaaaaaaaaaaaaaaaaaaaaaaaaaaaaaaaaaaaaaaaaaaaaaaaaaaaaaccaaaaaaaaaaaaaaaaaggtttatcaataccgccaacctc

SEQ ID NO: 26192 - protein, 206 aa, Triticum aestivum
MVALNFSGPAAIWLQSIQKKLGSFTWESFAALLCTRFGRDTHRNLIRRFYTIKQTSSIANFIEKFELITNHLSSYSDSIHPYYFLTRFVEGLRPDIRAVVIVQRPPDLDTACALALLQEEVADGAGLESSRQFHYQSRPPKVNTRPPAALPLPPPSGRPPPPAGAADRRGTEAARAEAAKIKTLRDYRRARGLCFKCGERWGHDHT

SEQ ID NO: 26193 - protein, 185 aa, Triticum aestivum
MDPAVKSYLDKLSATMEANTTALTVITSRLDDLAAWRPDLEKCVADLGEAVAALQQGRPGSTNGEGTQAPAPTAPLPATRATASRVAEGAAGAPHGSIDHGEFHLQRGSTVVSSQTPPPLPTNGQLKIPSPNSLPSPFAHASQMLAGLGQAHPSIAFPQFSRENPNLWKTMCEQYFNMFGIHEYF

SEQ ID NO: 26194 - protein, 170 aa, Triticum aestivum
MEANTTALTVITSRLDDLAAWRPDLEKCVADLGEAVAALQQGRPGSTNGEGTQAPAPTAPLPATRATASRVAEGAAGAPHGSIDHGEFHLQRGSTVVSSQTPPPLPTNGQLKIPSPNSLPSPFAHASQMLAGLGQAHPSIAFPQFSRENPNLWKTMCEQYFNMFGIHEYF

SEQ ID NO: 26195 - DNA, 1321 bp, Triticum aestivum
aaaccgaaacactttctctctctcccttgtttctcgtgctcggaaaccctagccgcacgaagacttcgcctcgcccccacatcgcccgccgtctgacctgcctacgagggcgaacgatggccgcggagaactactggaggtacgccgacgcgcggcagcagcaggccatggtggcggctgcggcggccgcggcggggatggcccctgcagctaccgttgcgcaggccgcgacggccgcggggggcatgcagcagcaccagcaccagcaccagcaccagcaggcggcgatggcgcaacagcagcagcagcagcaacagcagcagcaggcggccgcgccgtcgcttaagcgcgcgcgcccagactatggcgatggtcctggaggacaagagatggctggatattatccgcgggaaaatgcaggttaccactcacttagagacaatgaagcaattggagcatcttacgaccgctacttacgcaatgggatgccttctgtggcagccaatgaaccaagtagggcagttgttggtgccatgggtggagctgcaatggttggtggtggaatgagtggatatcctgttgatgaccgccgtatgatgggtgtcgttggtatggacagcagagccatggggtatggtgcaagacctgagcctcctcttcccccggatgcatccaacaccttgtatattgaaggtctgcctgcaaactgcacccgtagggaggtttcacatatattccgcccttttgttggtttccgtgaagtgaggcttgtcaacaaagagtcaagacaccctggtggagatcctcatgtcctgtgtttcgttgattttgatagccctgcccaagctactattgcacttgaagccctgcaaggttataagtttgacgaacacgatcgtgaatcagcccatttaaggctgcaattctcgcgctttcctggtccgaggtcagctggcgggcctcgtggtaggcgttaagtcgtgcgggtcaggcggttgacgaacctaccgtttatacgagcgatcgaacctgcttggtgtaacgctttgcgccgaattctccgccggtggctcgtagggttcgtcagcccttgtcgtgaaagcgtgaaaaggacgatgcaataatctcgctgttcagtatccattagattctcggggtcgcatgtgtgtctgctttagtatttatggtctactgtattttgttatctcgcggcgtgacccagacaatatcagtcttttatcatgtgtaacgctaactttcttaaagcacttgctcgtttgtttagccgtgctagtaatatcaactcttttcttcgtcttgc

SEQ ID NO: 26196 - protein, 324 aa, Triticum aestivum
TETLSLSPLFLVLGNPSRTKTSPRPHIARRLTCLRGRTMAAENYWRYADARQQQAMVAAAAAAAGMAPAATVAQAATAAGGMQQHQHQHQHQQAAMAQQQQQQQQQQQAAAPSLKRARPDYGDGPGGQEMAGYYPRENAGYHSLRDNEAIGASYDRYLRNGMPSVAANEPSRAVVGAMGGAAMVGGGMSGYPVDDRRMMGVVGMDSRAMGYGARPEPPLPPDASNTLYIEGLPANCTRREVSHIFRPFVGFREVRLVNKESRHPGGDPHVLCFVDFDSPAQATIALEALQGYKFDEHDRESAHLRLQFSRFPGPRSAGGPRGRR

SEQ ID NO: 26197 - protein, 286 aa, Triticum aestivum
MAAENYWRYADARQQQAMVAAAAAAAGMAPAATVAQAATAAGGMQQHQHQHQHQQAAMAQQQQQQQQQQQAAAPSLKRARPDYGDGPGGQEMAGYYPRENAGYHSLRDNEAIGASYDRYLRNGMPSVAANEPSRAVVGAMGGAAMVGGGMSGYPVDDRRMMGVVGMDSRAMGYGARPEPPLPPDASNTLYIEGLPANCTRREVSHIFRPFVGFREVRLVNKESRHPGGDPHVLCFVDFDSPAQATIALEALQGYKFDEHDRESAHLRLQFSRFPGPRSAGGPRGRR

SEQ ID NO: 26198 - protein, 269 aa, Triticum aestivum
MVAAAAAAAGMAPAATVAQAATAAGGMQQHQHQHQHQQAAMAQQQQQQQQQQQAAAPSLKRARPDYGDGPGGQEMAGYYPRENAGYHSLRDNEAIGASYDRYLRNGMPSVAANEPSRAVVGAMGGAAMVGGGMSGYPVDDRRMMGVVGMDSRAMGYGARPEPPLPPDASNTLYIEGLPANCTRREVSHIFRPFVGFREVRLVNKESRHPGGDPHVLCFVDFDSPAQATIALEALQGYKFDEHDRESAHLRLQFSRFPGPRSAGGPRGRR

SEQ ID NO: 26199 - DNA, 1389 bp, Triticum aestivum
taatcgaaaaaccacctacacatctctctgcagtttgcacaccaacacactcactggcattgctccctccgtcgcgtcacaaagccttcacggctacgaggttcatacttggtaccaggtaacgatcgatgaacgctgccatcactgcagtgtggtcggtggttagcaaggcactgagccccgtctcagatggcttgttggaggcttgggcggctagcaaggatctcggccccaacattgacgcactcaagacggagttgttgtatgtgcagggggtgctcagcaacacccgtggaagggagatcgacaacctggccctaaacgagctgctgcaaaagctgcagcagctagcgtatggggccgatgatgtgttggatgagctggactacttccgcatccaggacggtctttacggcacctgtgaggctgcagatgagcatgccaagggttgtgtatgcaacctcttcttcaacgctcaccacaccgccaaagctatcggcaaactgctcaagtgctctgggtgctcatgttctgctactaaccctcgtgatcctgaggagccgagatcagacgaagatacaaggcagcaagttcgctgctgcgcttggtcatgttccaggagaagcgcgcgcggcgatacctcattcgatccaaacactgaccaagctgatggggaagccagcggatgcattcgcaagcttgcttctggtgttctcaacaccgtgtgtactgtcagtaaattcctcccttgctcatcattcccacctgttcatgatgatctttctggcaagttagccctctgtggtgcctgcatacacaacgcaccacagaaaaagcatgcgaaagaagcaccaaaattagattttgatagggtgaatctttctaaaaggatgaagcatattgttgagcaactgcagcccttatgtgcaaaggttatagccattcttaatctagagctattgggttctagccatagtactaccccaagcattgccaagagtcctcgcaccaccacctctgacattgtagagccaacattgtatgggagggaccatgcaaagaagacaatcatagattgcatcactcatgatgaatacagtggcaagatcctaactatcttgccaattgttggtccggggggcatagggaagacaactctcgtacaagacatatatcacaaccaagaggtgcaaaaacattttcaggtcaaggtctggatatgtgtgtctcagaatttcactgttagtaagctacttgaagagattgcaaatgctatacctagtgtggaagatgaaaaaaagggtagagcagaagtgttgattgaacgaagatcaaattttaaaaggttttgaaaaaaaaaaaaaaaaaaaaaatataaaaaaattattg

SEQ ID NO: 26200 - protein, 407 aa, Triticum aestivum
MNAAITAVWSVVSKALSPVSDGLLEAWAASKDLGPNIDALKTELLYVQGVLSNTRGREIDNLALNELLQKLQQLAYGADDVLDELDYFRIQDGLYGTCEAADEHAKGCVCNLFFNAHHTAKAIGKLLKCSGCSCSATNPRDPEEPRSDEDTRQQVRCCAWSCSRRSARGDTSFDPNTDQADGEASGCIRKLASGVLNTVCTVSKFLPCSSFPPVHDDLSGKLALCGACIHNAPQKKHAKEAPKLDFDRVNLSKRMKHIVEQLQPLCAKVIAILNLELLGSSHSTTPSIAKSPRTTTSDIVEPTLYGRDHAKKTIIDCITHDEYSGKILTILPIVGPGGIGKTTLVQDIYHNQEVQKHFQVKVWICVSQNFTVSKLLEEIANAIPSVEDEKKGRAEVLIERRSNFKRF

SEQ ID NO: 26201 - DNA, 1417 bp, Triticum aestivum
aacggtggaccagacaccgcagcaccaacgcaaatcctcaccactctctcctccgcctcgcaccatcccctcgccgccgccgccgccgccgccatgttctggctccgtcgcggcgtcctcgctcaggtcctcccttcttcctccgcctctcccgtatcccctctccaccgcctcatctccgccgccgcgcccgccatctctccaaacatcagattcgccgtggaggagtacctcgtctccacctgcggcctcacgcgaccacaggccctaaaggcctccgccaagctttcccacctcaagtcccccgccaatcccgacgccgtgctcgccttcctcgccggcctcggcctctccgacgccgatgtcgccgccctcgtcgccaaggacccgcagttcctctgcgccagcgtggagagaaccctggcacccgtcgtcgccgggctctctggcctcggcttatcacgttccgacatcgcgcgcctcgcctcgctctcccgttacagattccgctgtagatccatcgtctccaagctgcagtactacatgcctttctttgggtcctttgagaatctcctccgagccctcaagaggaacttctaccttcactcggctgacctcgatgatgtggtcaagcccaacgtcgcgatgctgcgggagtgcgggctaggtgcttgtgatattgtcaagctatgcatcagtcaaccatggcttctcaccgccaacctggagcgtgtccaggcgatggtggaatgcgctgaaaacataggtgtgccccgtgcctctgggatgttcaggcatgcactgcacgctgttgcatttctcagcgaggacaagatcgcagccagggtgaagtacttgaagaacaccttcaggtggacggatgctgaggtaggcatggctgtttctaaggctccaatggtgctggcgaggtccaaggagtcgctgcagcgcaggtctgagttcctcatctccgaggtgggcttggaaccggtgtacattgctcaacggtcggaaataatcgggcacagcctagagggccggctcaggccccggtactatgctgtgaagtttctcaaggaaaatggattgctcaagcgtgacccaaactacagtaccgttttcaagattagtgagaaggcattcaggaagaagttcatattccctcacaaggaggctgcactccacctcacagaagactacgatgccgcttgcaagggggacgtgccgactaatttcagattcacataaagacgggctatgatgtaattgggtgctggttgtctgctgttgtatgactgttagatgctgggttggtcattgctaacgtgtgatggaattgataatttgatccccaaatactggtatgtaatgctatcactcagcagagaagaaaccattgattggttatgaacttctc

SEQ ID NO: 26202 - protein, 415 aa, Triticum aestivum
NGGPDTAAPTQILTTLSSASHHPLAAAAAAAMFWLRRGVLAQVLPSSSASPVSPLHRLISAAAPAISPNIRFAVEEYLVSTCGLTRPQALKASAKLSHLKSPANPDAVLAFLAGLGLSDADVAALVAKDPQFLCASVERTLAPVVAGLSGLGLSRSDIARLASLSRYRFRCRSIVSKLQYYMPFFGSFENLLRALKRNFYLHSADLDDVVKPNVAMLRECGLGACDIVKLCISQPWLLTANLERVQAMVECAENIGVPRASGMFRHALHAVAFLSEDKIAARVKYLKNTFRWTDAEVGMAVSKAPMVLARSKESLQRRSEFLISEVGLEPVYIAQRSEIIGHSLEGRLRPRYYAVKFLKENGLLKRDPNYSTVFKISEKAFRKKFIFPHKEAALHLTEDYDAACKGDVPTNFRFT

SEQ ID NO: 26203 - protein, 384 aa, Triticum aestivum
MFWLRRGVLAQVLPSSSASPVSPLHRLISAAAPAISPNIRFAVEEYLVSTCGLTRPQALKASAKLSHLKSPANPDAVLAFLAGLGLSDADVAALVAKDPQFLCASVERTLAPVVAGLSGLGLSRSDIARLASLSRYRFRCRSIVSKLQYYMPFFGSFENLLRALKRNFYLHSADLDDVVKPNVAMLRECGLGACDIVKLCISQPWLLTANLERVQAMVECAENIGVPRASGMFRHALHAVAFLSEDKIAARVKYLKNTFRWTDAEVGMAVSKAPMVLARSKESLQRRSEFLISEVGLEPVYIAQRSEIIGHSLEGRLRPRYYAVKFLKENGLLKRDPNYSTVFKISEKAFRKKFIFPHKEAALHLTEDYDAACKGDVPTNFRFT

SEQ ID NO: 26204 - protein, 234 aa, Triticum aestivum
MPFFGSFENLLRALKRNFYLHSADLDDVVKPNVAMLRECGLGACDIVKLCISQPWLLTANLERVQAMVECAENIGVPRASGMFRHALHAVAFLSEDKIAARVKYLKNTFRWTDAEVGMAVSKAPMVLARSKESLQRRSEFLISEVGLEPVYIAQRSEIIGHSLEGRLRPRYYAVKFLKENGLLKRDPNYSTVFKISEKAFRKKFIFPHKEAALHLTEDYDAACKGDVPTNFRFT

SEQ ID NO: 26205 - DNA, 1358 bp, Triticum aestivum
ggtctcctcctccgccctcccacacccaaaaagctctagggaaacccccacgcgcgcgcctggtgccggatcggatcggggatgtgggagtcggtggcgctcacgctggccggcgccgccggcaacagcatcggcaaggtcctccagaagaagggcacccacatcctcccgcccctctccttcaagctcaaggtcatacggggctacgcgctcaacaggctctggatcagcggcttcctcctggacatgtgcggcgccgccctcatgctcactgcgctctcgcaggcgtcggtctctgtcgtgcagccgattgccggctgcggcctcgccatactctgcgtcttctcccatttttacctcaaggaggtcatgaatggccttgattggcttgccatcacaatggccggtctcggcaccataggagtcggtgtaggaggggaggagcagaaagtggaagagattccccttttcagtataccttggctggtgctcaccgttctcatcttgtttgttctgctcaacacttggcttcatatctacaaaaagcaaaggcgcgaacaagagttgactggacctgaagtgatcgaggaggtcatatacggcttagaatcaggcattttgtttgggatttcatcagtgatctctaagatgggatttgtgatgtctgaaatgggctttccgaagattgttgtgccagctgccatttcttgtagtgtggcctgcagtgctgtgggatttgtttaccagactcgaggtctcaagcatgggagggcaattgttgtgtccacgtgtacatcggtggcatctattgtgtctggtgttgtggctggtatggttgcacttgacgaacatctgccgacagctcctgcaggacgtttttttctcctgcttggatggttcttcattattacgggggtgatacttcttgttacttcaacccgattgattgcgcgcctacctaagcctgtgcagaagtttttgaagagtaatatggagcgttcacacagcatcaggaggcctggaccagcccgagggaaggatcccaaccaaagcacaacaatccatgcatcgacattacatatactaacctctacaggaaaagagaaggcctagaacagctgctggtagagcaagattgtcttaacacctttgatgggtcatgttgtcgtttaaatcattatgtggatgtacaagtctagagtagcatcttaaaagtttgggccggttgctcatatactgactgcccttgttataggtctaacagaagtttggaaaatctcctgtgaattttggtcaagttacatatcatcctgtggtgagttgtaagtggtatattcatttgttctcttccctttcgg

SEQ ID NO: 26206 - protein, 343 aa, Triticum aestivum
MWESVALTLAGAAGNSIGKVLQKKGTHILPPLSFKLKVIRGYALNRLWISGFLLDMCGAALMLTALSQASVSVVQPIAGCGLAILCVFSHFYLKEVMNGLDWLAITMAGLGTIGVGVGGEEQKVEEIPLFSIPWLVLTVLILFVLLNTWLHIYKKQRREQELTGPEVIEEVIYGLESGILFGISSVISKMGFVMSEMGFPKIVVPAAISCSVACSAVGFVYQTRGLKHGRAIVVSTCTSVASIVSGVVAGMVALDEHLPTAPAGRFFLLLGWFFIITGVILLVTSTRLIARLPKPVQKFLKSNMERSHSIRRPGPARGKDPNQSTTIHASTLHILTSTGKEKA

SEQ ID NO: 26207 - protein, 288 aa, Triticum aestivum
MCGAALMLTALSQASVSVVQPIAGCGLAILCVFSHFYLKEVMNGLDWLAITMAGLGTIGVGVGGEEQKVEEIPLFSIPWLVLTVLILFVLLNTWLHIYKKQRREQELTGPEVIEEVIYGLESGILFGISSVISKMGFVMSEMGFPKIVVPAAISCSVACSAVGFVYQTRGLKHGRAIVVSTCTSVASIVSGVVAGMVALDEHLPTAPAGRFFLLLGWFFIITGVILLVTSTRLIARLPKPVQKFLKSNMERSHSIRRPGPARGKDPNQSTTIHASTLHILTSTGKEKA

SEQ ID NO: 26208 - protein, 282 aa, Triticum aestivum
MLTALSQASVSVVQPIAGCGLAILCVFSHFYLKEVMNGLDWLAITMAGLGTIGVGVGGEEQKVEEIPLFSIPWLVLTVLILFVLLNTWLHIYKKQRREQELTGPEVIEEVIYGLESGILFGISSVISKMGFVMSEMGFPKIVVPAAISCSVACSAVGFVYQTRGLKHGRAIVVSTCTSVASIVSGVVAGMVALDEHLPTAPAGRFFLLLGWFFIITGVILLVTSTRLIARLPKPVQKFLKSNMERSHSIRRPGPARGKDPNQSTTIHASTLHILTSTGKEKA

SEQ ID NO: 26209 - DNA, 1045 bp, Triticum aestivum
atgtgccattgctgcagttgcgtgacacgctcgcctaactcccgcacgcaccccctccaccctccgctgcccgtggccggctgtaccgcaccattcccacacaccctcacttagctagctgctcccattattctcacctgtccccatttgatccatcttctgatcgtctacccgctcgccttctctttccctgcgagcagcccaggccggaggcatgtcggccaagaagatcgtggtgaagctggagctccatgacaacaaggacaagcagaaggccatgaaggccgtctccgtcctcgtcggcatcgatgccatatccatggacctggcgtcgcgcaagatgacggtgatcggcacggtggacccggtgcacgtggtgagcaagctgcgcaagggctgggcggcctacatcgagtccgtcggcccggccaaggagcccgagaagaaagaggagaagaaggaggaggccaagaaggagggagacggggccaagaaggaaggcggcgacggcggcgacgccaagaaggagggcgacgggaagaaggagggcgacgggaagaaggacggcgacaagaaggaggagggtgacggcaagaaggacggcgacgggaagaaggacggcgacaagaaggaggagggcgatggcaagaaggacgaccagaagaagcccgccgccgtggccccgctgccgttcccgcaccacatgccgctgccgcaccacatgccgccgccctacatgtacaacgcggactacatgatgaaccagtaccggccggcgccgccggcctacccgccgccgtacgtgccgccgcagcactactacgtgcggaacatgagcatggaggagaacccaaactcgtgcgtcatctgctaagtcaaagtcgatccctcgatcgcgcgcgtacgtcccgagaggcgaccatgcatgcatctgtgtatagtagtattttctcgaccgtttttacgagaccagcaaagtttgcaagatgaaactgtacaactagtagtctactatagcactacgtacgtacatacgtacatttgt

SEQ ID NO: 26210 - protein, 219 aa, Triticum aestivum
MSAKKIVVKLELHDNKDKQKAMKAVSVLVGIDAISMDLASRKMTVIGTVDPVHVVSKLRKGWAAYIESVGPAKEPEKKEEKKEEAKKEGDGAKKEGGDGGDAKKEGDGKKEGDGKKDGDKKEEGDGKKDGDGKKDGDKKEEGDGKKDDQKKPAAVAPLPFPHHMPLPHHMPPPYMYNADYMMNQYRPAPPAYPPPYVPPQHYYVRNMSMEENPNSCVIC

SEQ ID NO: 26211 - protein, 198 aa, Triticum aestivum
MKAVSVLVGIDAISMDLASRKMTVIGTVDPVHVVSKLRKGWAAYIESVGPAKEPEKKEEKKEEAKKEGDGAKKEGGDGGDAKKEGDGKKEGDGKKDGDKKEEGDGKKDGDGKKDGDKKEEGDGKKDDQKKPAAVAPLPFPHHMPLPHHMPPPYMYNADYMMNQYRPAPPAYPPPYVPPQHYYVRNMSMEENPNSCVIC

SEQ ID NO: 26212 - protein, 184 aa, Triticum aestivum
MDLASRKMTVIGTVDPVHVVSKLRKGWAAYIESVGPAKEPEKKEEKKEEAKKEGDGAKKEGGDGGDAKKEGDGKKEGDGKKDGDKKEEGDGKKDGDGKKDGDKKEEGDGKKDDQKKPAAVAPLPFPHHMPLPHHMPPPYMYNADYMMNQYRPAPPAYPPPYVPPQHYYVRNMSMEENPNSCVIC

SEQ ID NO: 26213 - DNA, 1801 bp, Triticum aestivum
aaacgattgatcaattccctctgagaaagaaagcaattgcctaattttcccgtctgctgaggaaatccgtgctgtcctgaggaaatccgggttggggatttgccaaatttcttgatttcagccctattgttggggctgccgaggccggattatgagatgggcttcttgtcgtgcctattccggtgccccgaggaggaggagcgggtggtgaaggagcacgatgacgacgaggactccggcggaatcgaccatggagtcgcctcagagtcatcagaaagtgccccactgaagactgaatccgcacatatggaaggaatccagagaaatggcacacataatgaggcgacgatcttcactttgcgtgagcttgttgatgctaccaaaaacttcagcaaggattttcagttggggcgaggaggatttggttgtgtgtataaagcatatctgaatgatggtcaggttgttgcagtcaaacaacttgatctaaatgggcttcaggggaaccgagaattccttgtggaggttctcatgctcaacctcttgcatcaccctaaccttgtcaatttgatagggtactgtgttgacggtgatcaacgcttgcttgtttatgaatatatgccattgggatcactagaagaccatctacacgaccttccacccaataaagaacctctagattggacaacacggatgaagatagctgctggcgcagctgctggtttggaatacctacatgataaggcaaatccaccagttatttaccgagatattaagccatcaaacattcttctttctgaaaggtatcatgcgaagttgtccgactttggacttgctaaacttggtcctgtgggtgataagactcatgtgacaacccgtgtcatggggacttatggctattgtgctcctgagtacgccgcgactggacagctaacggttaagtctgacatctatagttttggtgtggtgttcctcgagctaattacaggacgaagggcactcgatagcaatcggcctcgtgaggaacaggacttggtctcatgggctcgtccattgttcaaagaccaaaggaaatttccaaagatggctgatcctttgttgcgtggccgctttccaaagaggggtttgtaccaggccttggctattgcagcgatgtgtttgcaggagaagtcaaggaatcgccctctgattagggaagttgctgctgctctctcctatttgtcatcacaaacatacgatgggaatgacgctgctgttcgccgttaccttgatggcccttcagcatcaaaagtgtcagacgatcaggttaaccaagatgatgctttggctagtcaacatggagctcaaacgtcgatgcatgaccgtatgaatgacttcgtcccagaaggaaaagaacattgcaggagtggctccaaccgtggaggacggggcagggttgttccaaacggtgtcgacagagaccgcgcacttgcagatgcgaatgtctgggccgaggcttggagacgccatgagaaggcaagcaaagtgcgtgtaaccgatgaaatcctcggatagtgagctgagctctgcttgatgttttggcatgctggcgattttgaagagagcgttgttaggagaggaggaataatgcgcagcgaggtgtgtagtactgcaccaccagagtgagcgctcgcaaggtttcaccggtggagcctgtcactgtcacgtccaccatcgtttcgctgcatacattacacggtctgaatttcacatgtaggtattgtttcaggggctttgtaaataaatgtaataacccccttaattg

SEQ ID NO: 26214 - protein, 464 aa, Triticum aestivum
MGFLSCLFRCPEEEERVVKEHDDDEDSGGIDHGVASESSESAPLKTESAHMEGIQRNGTHNEATIFTLRELVDATKNFSKDFQLGRGGFGCVYKAYLNDGQVVAVKQLDLNGLQGNREFLVEVLMLNLLHHPNLVNLIGYCVDGDQRLLVYEYMPLGSLEDHLHDLPPNKEPLDWTTRMKIAAGAAAGLEYLHDKANPPVIYRDIKPSNILLSERYHAKLSDFGLAKLGPVGDKTHVTTRVMGTYGYCAPEYAATGQLTVKSDIYSFGVVFLELITGRRALDSNRPREEQDLVSWARPLFKDQRKFPKMADPLLRGRFPKRGLYQALAIAAMCLQEKSRNRPLIREVAAALSYLSSQTYDGNDAAVRRYLDGPSASKVSDDQVNQDDALASQHGAQTSMHDRMNDFVPEGKEHCRSGSNRGGRGRVVPNGVDRDRALADANVWAEAWRRHEKASKVRVTDEILG

SEQ ID NO: 26215 - protein, 414 aa, Triticum aestivum
MEGIQRNGTHNEATIFTLRELVDATKNFSKDFQLGRGGFGCVYKAYLNDGQVVAVKQLDLNGLQGNREFLVEVLMLNLLHHPNLVNLIGYCVDGDQRLLVYEYMPLGSLEDHLHDLPPNKEPLDWTTRMKIAAGAAAGLEYLHDKANPPVIYRDIKPSNILLSERYHAKLSDFGLAKLGPVGDKTHVTTRVMGTYGYCAPEYAATGQLTVKSDIYSFGVVFLELITGRRALDSNRPREEQDLVSWARPLFKDQRKFPKMADPLLRGRFPKRGLYQALAIAAMCLQEKSRNRPLIREVAAALSYLSSQTYDGNDAAVRRYLDGPSASKVSDDQVNQDDALASQHGAQTSMHDRMNDFVPEGKEHCRSGSNRGGRGRVVPNGVDRDRALADANVWAEAWRRHEKASKVRVTDEILG

SEQ ID NO: 26216 - protein, 340 aa, Triticum aestivum
MLNLLHHPNLVNLIGYCVDGDQRLLVYEYMPLGSLEDHLHDLPPNKEPLDWTTRMKIAAGAAAGLEYLHDKANPPVIYRDIKPSNILLSERYHAKLSDFGLAKLGPVGDKTHVTTRVMGTYGYCAPEYAATGQLTVKSDIYSFGVVFLELITGRRALDSNRPREEQDLVSWARPLFKDQRKFPKMADPLLRGRFPKRGLYQALAIAAMCLQEKSRNRPLIREVAAALSYLSSQTYDGNDAAVRRYLDGPSASKVSDDQVNQDDALASQHGAQTSMHDRMNDFVPEGKEHCRSGSNRGGRGRVVPNGVDRDRALADANVWAEAWRRHEKASKVRVTDEILG

SEQ ID NO: 26217 - DNA, 1164 bp, Triticum aestivum
aaaggcaactagacgctgagagctccctcctgcttacccgtgccggcggccgccgccgcaagcccagaggagggagcaacgccggcgcctggatcccccgagtgccgccgccgacccgtcccgtactccggccgtcgcccatcggctgcagcatcttggccctcgcgcgcctccgctgccgcttcctctccgccccgcctcagctgatggacatgtctggtccaagatggaagaagggcaaagacggcaaggatttcgcagctctggcagcagcccaacccatgtcaagcattgttgccaagctccagtcttcactggaaggatcaaagctcgtggcgactttatctagcaggggcggggatgcggttcttggcgtgaacccgcaggaagccgcgcttctgaaccgcgccgcctttggccgggcactggaaaatgtcggggccgagaaacagtggttccagctgggcgctgaggaggtcttctaccttcaccatgctttggagtgcatcgtggtcgagtcggcgaacaaggatctgatgagccaaggggagctgtgggatcacttgtgctccgcatcagagtcgtttcctgagatgtacagggcgtactcgcatctcaggtcgaagaactgggtggtgcggtcaggtttgcagtatggtacggatttcgtcgcttaccgtcatcaccccgcgctcgtccactcggagtttgctgtggttgtggttccggaaggatcggggttcggcggtaggtgtggccgcctgaaggtgtggtctgatctactgtgcgcgctccgagcttctggcagtgtggccaagacgctgctggttctgacaatctccagcaatgtctgtgaactgagatccccagattgtttggaacggttggttgttcatgaaagaactattacaaggtggatagcccagcagtgccgtgagcagcgatgtaaaccgtgcagagaagaagcatatacggaagaacaagatcacgcaggagaaactgtagtgttcaactattggggtctagtactaggtttcacagttctttctagcctgcttgtatacaagctgagattccgacaatcaagctaaatatttctctgtactcctattggtgatgtttaacttctcatcttattgcaatcctgtgccggtagtcttgtgc

SEQ ID NO: 26218 - protein, 362 aa, Triticum aestivum
RQLDAESSLLLTRAGGRRRKPRGGSNAGAWIPRVPPPTRPVLRPSPIGCSILALARLRCRFLSAPPQLMDMSGPRWKKGKDGKDFAALAAAQPMSSIVAKLQSSLEGSKLVATLSSRGGDAVLGVNPQEAALLNRAAFGRALENVGAEKQWFQLGAEEVFYLHHALECIVVESANKDLMSQGELWDHLCSASESFPEMYRAYSHLRSKNWVVRSGLQYGTDFVAYRHHPALVHSEFAVVVVPEGSGFGGRCGRLKVWSDLLCALRASGSVAKTLLVLTISSNVCELRSPDCLERLVVHERTITRWIAQQCREQRCKPCREEAYTEEQDHAGETVVFNYWGLVLGFTVLSSLLVYKLRFRQSS

SEQ ID NO: 26219 - protein, 294 aa, Triticum aestivum
MDMSGPRWKKGKDGKDFAALAAAQPMSSIVAKLQSSLEGSKLVATLSSRGGDAVLGVNPQEAALLNRAAFGRALENVGAEKQWFQLGAEEVFYLHHALECIVVESANKDLMSQGELWDHLCSASESFPEMYRAYSHLRSKNWVVRSGLQYGTDFVAYRHHPALVHSEFAVVVVPEGSGFGGRCGRLKVWSDLLCALRASGSVAKTLLVLTISSNVCELRSPDCLERLVVHERTITRWIAQQCREQRCKPCREEAYTEEQDHAGETVVFNYWGLVLGFTVLSSLLVYKLRFRQSS

SEQ ID NO: 26220 - protein, 292 aa, Triticum aestivum
MSGPRWKKGKDGKDFAALAAAQPMSSIVAKLQSSLEGSKLVATLSSRGGDAVLGVNPQEAALLNRAAFGRALENVGAEKQWFQLGAEEVFYLHHALECIVVESANKDLMSQGELWDHLCSASESFPEMYRAYSHLRSKNWVVRSGLQYGTDFVAYRHHPALVHSEFAVVVVPEGSGFGGRCGRLKVWSDLLCALRASGSVAKTLLVLTISSNVCELRSPDCLERLVVHERTITRWIAQQCREQRCKPCREEAYTEEQDHAGETVVFNYWGLVLGFTVLSSLLVYKLRFRQSS

SEQ ID NO: 26221 - DNA, 1448 bp, Triticum aestivum
gtggactcctagccagccccttcacctcttcgggcttctgtggcgagccgagttttccggcggaggcgagccatggccgcagcggaggaaacggccgtgggaaccgctgcggaggggagcgacctgcgctccttcttctcgacgcgcggcgtcgccgccgatcttgctgcgttggacgaccagaccctcaaggcgctggacgagaagtacattatcgccagggacctcgacgccgccacggtgctctccaagatccaccacttggtggggcacagcgaagccagcatcgtcccctacgaagggctgtcctaccagcttccgtgccgtgacccggggcagcacgagtacgaccccacactccggcagctttgcctgcgccgcggcaaggtcgaaacttgcacggtcggcgaccccaggacctcgcgcaaggccgagatcatcacggccacgctatccttggtcaagaagaccgtcctgagtggccatcgctcgtttagcgacggtctgcgctacggcgatgaagtcttcaagcaggacaagaagaccgtggatgatgccctgctggacatctgctgcctactcgagtgcccaagggcatctctcaaaatgcttgaacttggtccgggcacggtcgttgggccactgatattcacaatggaagatggggcagagaaccattgcaggtcattcggtccgagtggagcccgggtacatgaggggatctctaatattactgtcgaacaaggcgcaacggtcaatttcatcctactagtccagagggatgatgttttttgggattttgctcggtcgcaactccgccacgaattgaattgtgtggtcatgacaggcggcgatggggaaccaaatgtcatgacacgggctttcttgcgcaaactcaaggattgtctgtctgtccctgtgtatgctctcaccgattcagatccagagggaatttcgatcttttgtacctacaagtttggatcagcagagatgccatttgacaatgtgggtcttaccattcctgatatcaagttgattgcgtatataggtgatgatgcccttcatttgagtcaccttcaaccgctggccaagcgcgacagatcgattcttaagggattgtgtgcccaaaagcatgtaataggtgatgaacaattgagggagaacatacatttcatgatgaacaggggcttaaaatgcaaaatcgaagctttatattatcttcagtaccctcctactgactacatccgcaaagcagtaggcaatctggaggacatctaagtagctcgttgtgtttaactttggtagagagacatctatgtagtttgccatgttgactttagaggataatcttctaagttagttcatgttgggtgtgcaaactatggttactactagattgtgcatgcacttatgttgtcacaatctaggttattaatgctccagattcc

SEQ ID NO: 26222 - protein, 401 aa, Triticum aestivum
MAAAEETAVGTAAEGSDLRSFFSTRGVAADLAALDDQTLKALDEKYIIARDLDAATVLSKIHHLVGHSEASIVPYEGLSYQLPCRDPGQHEYDPTLRQLCLRRGKVETCTVGDPRTSRKAEIITATLSLVKKTVLSGHRSFSDGLRYGDEVFKQDKKTVDDALLDICCLLECPRASLKMLELGPGTVVGPLIFTMEDGAENHCRSFGPSGARVHEGISNITVEQGATVNFILLVQRDDVFWDFARSQLRHELNCVVMTGGDGEPNVMTRAFLRKLKDCLSVPVYALTDSDPEGISIFCTYKFGSAEMPFDNVGLTIPDIKLIAYIGDDALHLSHLQPLAKRDRSILKGLCAQKHVIGDEQLRENIHFMMNRGLKCKIEALYYLQYPPTDYIRKAVGNLEDI

SEQ ID NO: 26223 - protein, 223 aa, Triticum aestivum
MLELGPGTVVGPLIFTMEDGAENHCRSFGPSGARVHEGISNITVEQGATVNFILLVQRDDVFWDFARSQLRHELNCVVMTGGDGEPNVMTRAFLRKLKDCLSVPVYALTDSDPEGISIFCTYKFGSAEMPFDNVGLTIPDIKLIAYIGDDALHLSHLQPLAKRDRSILKGLCAQKHVIGDEQLRENIHFMMNRGLKCKIEALYYLQYPPTDYIRKAVGNLEDI

SEQ ID NO: 26224 - protein, 207 aa, Triticum aestivum
MEDGAENHCRSFGPSGARVHEGISNITVEQGATVNFILLVQRDDVFWDFARSQLRHELNCVVMTGGDGEPNVMTRAFLRKLKDCLSVPVYALTDSDPEGISIFCTYKFGSAEMPFDNVGLTIPDIKLIAYIGDDALHLSHLQPLAKRDRSILKGLCAQKHVIGDEQLRENIHFMMNRGLKCKIEALYYLQYPPTDYIRKAVGNLEDI

SEQ ID NO: 26225 - DNA, 1044 bp, Triticum aestivum
aatcgaaaactctcggtctcgctagggttttgggattttagcctccagcgccgccgccgccgccccccagcgaattcgacaagcccccgagctcgccggatccgatggccgtcacgttctccgacctccacaccgccgacgggctcaaggccctcgaggcgcacctcgccggcaagacctacatctccggcgatgggatcaccaaggacgacgtcaaggtgttcgcggcggtgcccgtgaagcccagcgccgagttcccgaacgctgcccgctggtatgacaccgtcgccgcggctgttgcttcaaggttccctggccagtcctctggggtgagtgcatcatcggctcctgctgcagctgctcctgccgcttccaaggatgaagacgacgatgatgacatggatctgtttggcgatgagaccgaggaggacaagaaagctgcagctgagcgtgaggctgccaagcctgcaaagaagaaagaaagtggcaaatcctctgtcctcatggatatcaagccatgggacgatgagactgacatgaagaagttggaggaggctgtccgcagtgttcaaatggagggtctcacctggggtgcatctaagcttatgcccgtgggttatggcatcaagaagctccagatcatgctgacgatcattgacgacctcgtgtctgtcgacactcttattgaggaagtgctctgcgagacgcccatcaacgagtatgtccagtcgtgtgacatcgttgccttcaacaagatctagaatctttgttcacccacttgttgctgctggattcttggtactgggatctgtcgatctggaaaacattattgtcgtcccatttagttacccctcttacagaaatgctactggttttgtttttgagtgatgccctggtcttgaatgtctgctacctttaaatagttgaactgctgagcggtttgtaatggcgaaacatctatcatgtggagtaaaatcagtctttgataaaaaaaaaaaaaaaaaagcttatcgataccgtcgacctcgagggggggcccggtac

SEQ ID NO: 26226 - protein, 218 aa, Triticum aestivum
MAVTFSDLHTADGLKALEAHLAGKTYISGDGITKDDVKVFAAVPVKPSAEFPNAARWYDTVAAAVASRFPGQSSGVSASSAPAAAAPAASKDEDDDDDMDLFGDETEEDKKAAAEREAAKPAKKKESGKSSVLMDIKPWDDETDMKKLEEAVRSVQMEGLTWGASKLMPVGYGIKKLQIMLTIIDDLVSVDTLIEEVLCETPINEYVQSCDIVAFNKI

SEQ ID NO: 26227 - protein, 120 aa, Triticum aestivum
MDLFGDETEEDKKAAAEREAAKPAKKKESGKSSVLMDIKPWDDETDMKKLEEAVRSVQMEGLTWGASKLMPVGYGIKKLQIMLTIIDDLVSVDTLIEEVLCETPINEYVQSCDIVAFNKI

SEQ ID NO: 26228 - DNA, 900 bp, Triticum aestivum
ccctggcaagcttatcggcaatggcggaaccggtgaagctcatcggcgccttcggcagcccgttcgtccaccgcgccgaggtggccctgcgcctcaagggcgtcccattcgagctcatccttgaagacctcaacaacaagagtgagctgctgctgaagcacaaccccatccacaagacggtgccggtgctcctccatggtgaccggccggccgtcttagagtccctcctcatcgtcgagtatgtggatgaggctttcgacggcccgccgctcctccccgtcgacccctacgggagggccatggctcgcttctgggcccaattcatcgagcaaaagtgctcgaggccgttctggatggcggtgtggttggacgacggggaggcgcgggaggggttcgtgagggacaccaaggagaatctggcgctgctggatgcgcggctgcaggggaagcggttcttcgccggcgacgccgttgggtacctggacctggcggcctgcgggctggcgcacctgctgggcgtgatcgaggaggtggccggggcgagcattgttggcgcgggcgagttccccgcactgcgccggtgggcggaggactacacctccgacgcgaccgtcgccgcgtgcctaccgcggagggagcagctcgccgcacacttcgccgggaagaaggaccgaatcaagctcgccgtcagcgcgatggtggggcgggcgtagttgtcagtttggggcatcgatcaacacagcaggcgtcggcaaaatattcagattacgtactgtattatgatttgtgatttgtctgttatgtgtgtgttccctatggtgcgtatactaaaataaaattcatattagtatttgttgcaacgaaatttatgtcaaattatagtcaaaagtacggaattgc

SEQ ID NO: 26229 - protein, 236 aa, Triticum aestivum
LASLSAMAEPVKLIGAFGSPFVHRAEVALRLKGVPFELILEDLNNKSELLLKHNPIHKTVPVLLHGDRPAVLESLLIVEYVDEAFDGPPLLPVDPYGRAMARFWAQFIEQKCSRPFWMAVWLDDGEAREGFVRDTKENLALLDARLQGKRFFAGDAVGYLDLAACGLAHLLGVIEEVAGASIVGAGEFPALRRWAEDYTSDATVAACLPRREQLAAHFAGKKDRIKLAVSAMVGRA

SEQ ID NO: 26230 - protein, 230 aa, Triticum aestivum
MAEPVKLIGAFGSPFVHRAEVALRLKGVPFELILEDLNNKSELLLKHNPIHKTVPVLLHGDRPAVLESLLIVEYVDEAFDGPPLLPVDPYGRAMARFWAQFIEQKCSRPFWMAVWLDDGEAREGFVRDTKENLALLDARLQGKRFFAGDAVGYLDLAACGLAHLLGVIEEVAGASIVGAGEFPALRRWAEDYTSDATVAACLPRREQLAAHFAGKKDRIKLAVSAMVGRA

SEQ ID NO: 26231 - protein, 137 aa, Triticum aestivum
MARFWAQFIEQKCSRPFWMAVWLDDGEAREGFVRDTKENLALLDARLQGKRFFAGDAVGYLDLAACGLAHLLGVIEEVAGASIVGAGEFPALRRWAEDYTSDATVAACLPRREQLAAHFAGKKDRIKLAVSAMVGRA

SEQ ID NO: 26232 - DNA, 1395 bp, Triticum aestivum
atctgaatgctagaaggaggtggttggacgatgaggcatcccaacacggtagaaggagttccgcctatcgaagttgagagggccaatttgaaaaaaagaaaaagttgagagggacagagagggaaacatctgggcattctcgttgcagaaagtagagcgctgtacaaacgggccttcacgaaccaagagacatccatcaaatttcatggcgtcctctccacaatcctcctcctctgcacccaaagccgacgacaaggcagcgtcccacaaagaaatctacgaccagctactagaggtcgtgtccacctacccgacggcgcctagcggcatcggccgcccgtacacccaccacccagacggctggtacgcgttcacgccggccgtcgtgaacgccatggtcatcaagcggcacctcaaggcgtgcgacaccgacgtcttcctctccacctttcccaagtccggcaccacctggctcaaggcgctcctgtttgcgaccctccgccgcaccgcggacgggccagcgatcgcggcgctcgcagcccacagcccccaccagctcatccctttcctcgaggtccaggttttcagcaacggccggatcccagacctgagctccctccctgcgccgcggctcctgatgacgcacatcccgtcccggtcgctgccggagtccgtggccgcctccggctgcaaggtggtgtacctgtgccgggaccccaaggactgcttcgtgtcgctctggcacttctggaaccggttcgcgccgtcgccgtgggacctcggtgaggcgctccagcagttctgcgacggcgtctccctgttcgggcctttctgggagcacgtgctgggctactggcgctggcatgtggagaggccggagcaggttctattcctgacctacgaggagctcgccgccgacaccctcggccagctgaagcggctcgctgcgtttctcgggcgcccgttcacgtcagaggagcgggaagccagggtagacagggagatcgtggaggcatgcgccatggagagcctggcgggactggaggtgaaccgctccgggaagacggacatgaccgagtcttcagtggcgaacaacatattcttccggcgcggcgtcgttggcgactggaagaaccacctgacgccggagatggctagaaggatcgatgagatcaccgatagcaagttcagaggatcggggttggcgttgacgccggcaaccgcagatcagaactagtgggttcatgatggcagatgctatataaataaggacgacttgcgcaacatttttataaaatattgtactattaatgtcaggcatgataacttgatcagcaaacatgcgaagggaaataacagaagtgttaccatacagtaatatacatgaatatcgtt

SEQ ID NO: 26233 - protein, 343 aa, Triticum aestivum
MASSPQSSSSAPKADDKAASHKEIYDQLLEVVSTYPTAPSGIGRPYTHHPDGWYAFTPAVVNAMVIKRHLKACDTDVFLSTFPKSGTTWLKALLFATLRRTADGPAIAALAAHSPHQLIPFLEVQVFSNGRIPDLSSLPAPRLLMTHIPSRSLPESVAASGCKVVYLCRDPKDCFVSLWHFWNRFAPSPWDLGEALQQFCDGVSLFGPFWEHVLGYWRWHVERPEQVLFLTYEELAADTLGQLKRLAAFLGRPFTSEEREARVDREIVEACAMESLAGLEVNRSGKTDMTESSVANNIFFRRGVVGDWKNHLTPEMARRIDEITDSKFRGSGLALTPATADQN

SEQ ID NO: 26234 - protein, 280 aa, Triticum aestivum
MVIKRHLKACDTDVFLSTFPKSGTTWLKALLFATLRRTADGPAIAALAAHSPHQLIPFLEVQVFSNGRIPDLSSLPAPRLLMTHIPSRSLPESVAASGCKVVYLCRDPKDCFVSLWHFWNRFAPSPWDLGEALQQFCDGVSLFGPFWEHVLGYWRWHVERPEQVLFLTYEELAADTLGQLKRLAAFLGRPFTSEEREARVDREIVEACAMESLAGLEVNRSGKTDMTESSVANNIFFRRGVVGDWKNHLTPEMARRIDEITDSKFRGSGLALTPATADQN

SEQ ID NO: 26235 - protein, 199 aa, Triticum aestivum
MTHIPSRSLPESVAASGCKVVYLCRDPKDCFVSLWHFWNRFAPSPWDLGEALQQFCDGVSLFGPFWEHVLGYWRWHVERPEQVLFLTYEELAADTLGQLKRLAAFLGRPFTSEEREARVDREIVEACAMESLAGLEVNRSGKTDMTESSVANNIFFRRGVVGDWKNHLTPEMARRIDEITDSKFRGSGLALTPATADQN

SEQ ID NO: 26236 - DNA, 669 bp, Triticum aestivum
gtccaccattcctcccaccttcaagcgcatccacacacacacacaccacagaccacctctccccgcccaagcatccccatccgcatcctcatccatggcccccaaggcagccgagaagaagccggtggagaagaccccggcggggaagaagcccaaggcggagaagaaggtgccggcgtccaaggagggcggcggggacaagaagggcaagaagaaggccaagaagagcgtggagacgtacaagatctacatcttcaaggtgctgaagcaggtgcacccggacatcggcatctcctccaaggccatgtccatcatgaactccttcatcaacgacatcttcgagaagctggccggcgagtcggccaagctggcgcgctacaacaagaagcccaccatcacgtcccgcgagatccagacctccgtccgcctcgtcctccccggcgagctcgccaagcacgccgtctccgagggcaccaaggccgtcaccaagttcacctccgcctgattcggtcctgtccctgtgtgtgtcttcctggtggatggatcgatgtcgccctgtagtttcctgctcggactttgtcctcttgtaacttgtgctggctgtgtcttgtgtgggatcatatttcatgatctggagaaatagtagcggtgcttatttcagttcttgcc

SEQ ID NO: 26237 - protein, 186 aa, Triticum aestivum
VHHSSHLQAHPHTHTPQTTSPRPSIPIRILIHGPQGSREEAGGEDPGGEEAQGGEEGAGVQGGRRGQEGQEEGQEERGDVQDLHLQGAEAGAPGHRHLLQGHVHHELLHQRHLREAGRRVGQAGALQQEAHHHVPRDPDLRPPRPPRRARQARRLRGHQGRHQVHLRLIRSCPCVCLPGGWIDVAL

SEQ ID NO: 26238 - protein, 167 aa, Triticum aestivum
STIPPTFKRIHTHTHHRPPLPAQASPSASSSMAPKAAEKKPVEKTPAGKKPKAEKKVPASKEGGGDKKGKKKAKKSVETYKIYIFKVLKQVHPDIGISSKAMSIMNSFINDIFEKLAGESAKLARYNKKPTITSREIQTSVRLVLPGELAKHAVSEGTKAVTKFTSA

SEQ ID NO: 26239 - protein, 136 aa, Triticum aestivum
MAPKAAEKKPVEKTPAGKKPKAEKKVPASKEGGGDKKGKKKAKKSVETYKIYIFKVLKQVHPDIGISSKAMSIMNSFINDIFEKLAGESAKLARYNKKPTITSREIQTSVRLVLPGELAKHAVSEGTKAVTKFTSA

SEQ ID NO: 26240 - DNA, 756 bp, Triticum aestivum
acgcagcagagcacaagcaacatcttgcagtcacctgctacacaaaagagagagagagaaccatctctcaacagttctccttcgctagttctagcgatatggcttccaacgcgagcatgttggccgtgatcatggcgtgcgcgctcctcctcgccggcagcatgtgccacgccgcccgcaacctggccgacactacgccggcggctgccgctccggctgctagcgccgtccctggcctgccggccatgccgaccttgcctgccgtgcccacggacacggtcaccctgatgccacccatgccgtccgtcaccctaccaacggtgccgcaggtgacactaccgcccatgccctccatcgtcgtgcccaaggcggtcctgccgcccatgcccaaggtcaccctccccaccgtgccgcaggtgacgatggcgccgatgcccgcgattgttgtgcccaaggtgaccctgccgccgttgccattcatcccgaatgtgaacgtgcctatgccgttcgcggcaccacccccgtcagcgtagacgcacccacgcggcggtgctcttgccctgtccacgatagggcgccgttcatctgagtgtggcgtcaggtcactccgtggacatggcgtacatttccttacatggaagctcggtgttttgtatgcgatgtatcacagtatcagtaattcttgcttttttttacgtctcagtagtatatgtattggtagtgtttgaatgttgagggttttgtcccattgtatgc

SEQ ID NO: 26241 - protein, 176 aa, Triticum aestivum
AAEHKQHLAVTCYTKERERTISQQFSFASSSDMASNASMLAVIMACALLLAGSMCHAARNLADTTPAAAAPAASAVPGLPAMPTLPAVPTDTVTLMPPMPSVTLPTVPQVTLPPMPSIVVPKAVLPPMPKVTLPTVPQVTMAPMPAIVVPKVTLPPLPFIPNVNVPMPFAAPPPSA

SEQ ID NO: 26242 - protein, 144 aa, Triticum aestivum
MASNASMLAVIMACALLLAGSMCHAARNLADTTPAAAAPAASAVPGLPAMPTLPAVPTDTVTLMPPMPSVTLPTVPQVTLPPMPSIVVPKAVLPPMPKVTLPTVPQVTMAPMPAIVVPKVTLPPLPFIPNVNVPMPFAAPPPSA

SEQ ID NO: 26243 - protein, 138 aa, Triticum aestivum
MLAVIMACALLLAGSMCHAARNLADTTPAAAAPAASAVPGLPAMPTLPAVPTDTVTLMPPMPSVTLPTVPQVTLPPMPSIVVPKAVLPPMPKVTLPTVPQVTMAPMPAIVVPKVTLPPLPFIPNVNVPMPFAAPPPSA

SEQ ID NO: 26244 - DNA, 584 bp, Triticum aestivum
aaatcgatagatagatagataagtaaaaatggcgcagtgtgtgaccaaaaacacattcgtgcaaggaaaacccttccttccagttccagcagctcccactaaaaatgttcggagagtggttcagtgcggtgtgtggtgcaggaagaaggagatacacccgcaattccacgaggaagcgaaggtgtactgcaacggggagctggtgctgacgacaggtgggacccagaaggagtacgtggtcgacgtgtggtcggggaaccaccctttctacctcggaagccggtcggcgtctatggtcagcgacgaccaggtcgagaagttccgcaagaagttcggagagctaaaagagatcatggagattcctgttctcaagggagagattgttatcccctcaagacgcaagggcgtttccaaaggaggcaagaaaaaataatttattcgattcaaacatgattgtcttttttcttcttcttaatttcaattcctgtaatgtaatatgataaaacgctttaagcctgtgctatggatattgttttgagcaagcccctgaatgtgctaatgtgattgatttggtgattctgtcc

SEQ ID NO: 26245 - protein, 134 aa, Triticum aestivum
MAQCVTKNTFVQGKPFLPVPAAPTKNVRRVVQCGVWCRKKEIHPQFHEEAKVYCNGELVLTTGGTQKEYVVDVWSGNHPFYLGSRSASMVSDDQVEKFRKKFGELKEIMEIPVLKGEIVIPSRRKGVSKGGKKK

SEQ ID NO: 26246 - DNA, 791 bp, Triticum aestivum
gccgaggactgtgtggttggcaactactctgtgccccagggctcgagcgtcaatatcaatgtcttcgcaatgggccgcgacgacagggtgtggaaggacgccgacacattccgtccgtcacggttcatgatgggtgaaggggaggcagccggggtcgacttcaagggcgggtgcttccagttcctgccgtttgggtctggtcgtcgctcgtgcccggggatggcgctcggcctgtactcgctggagctcgttattgcgcggctcgcccatgggttcaactgggcgctgcccgacggtaagaagccgtcggagctcgacatgggtgacattttcggcctcaccgcaccgcgtgccacaaggctctgggtcgtgcccacgccccgacttacctgccctttggttgttgatgtcgacgccgcgtgccagacatgatgtcgtgcgcgcacagctgatggtatctaccagctgcgcagggtgtgaaggtgtttgattagcgtgttagttaatctagttgtagctatagctatttcccctttcgtgttagatatttcctagtttcgttcatacaagatcgcacccctataaatcggttgccttgcatgtggaatagcacgacctgttgttggcatcgtggagctgtgggtcacgatcgttcctttcatcatgaataaaaaggagagccctacttcagtgctcccctaactcaatttccagggggtattcttaaccccgccaaaaaaaaaaaaaaaaaagcttatcgataccgtcgacctcgagggggggcccggtac

SEQ ID NO: 26247 - protein, 143 aa, Triticum aestivum
AEDCVVGNYSVPQGSSVNINVFAMGRDDRVWKDADTFRPSRFMMGEGEAAGVDFKGGCFQFLPFGSGRRSCPGMALGLYSLELVIARLAHGFNWALPDGKKPSELDMGDIFGLTAPRATRLWVVPTPRLTCPLVVDVDAACQT

SEQ ID NO: 26248 - protein, 120 aa, Triticum aestivum
MGRDDRVWKDADTFRPSRFMMGEGEAAGVDFKGGCFQFLPFGSGRRSCPGMALGLYSLELVIARLAHGFNWALPDGKKPSELDMGDIFGLTAPRATRLWVVPTPRLTCPLVVDVDAACQT

SEQ ID NO: 26249 - protein, 101 aa, Triticum aestivum
MMGEGEAAGVDFKGGCFQFLPFGSGRRSCPGMALGLYSLELVIARLAHGFNWALPDGKKPSELDMGDIFGLTAPRATRLWVVPTPRLTCPLVVDVDAACQT

SEQ ID NO: 26250 - DNA, 604 bp, Triticum aestivum
acaatcgaaaattttgttgccatgtctagctttccccactcaaaagtttatcgcatgcgatcacaggtcctacaagcagcaatcaaggctcttgatgataagaaaagggctgttcgccaagaggctgttcgatgtcgacaaacatggcaatcatcatttgcttaaggtagtctttctcccgccactgcatcatagtttggaattagtcactgaacagatcatgttagagcttgataagcattgagatgtgtgataggttgtggtagcccgtagggtggtagaggacaatgcggctcattctgcctttgaaatgcttttggactgtgtaagttctggcgggaggtgagttcttaggaggaaatttggcgaaccacagttggatggtgtatgtcagtgcattgggttcaatctggctgaccgctcttccgtccccttttccttgtatttatcatgaatggacatttataggaccagttcgtgaatgtatccccggttctcctcactatgcattgcatttgtctctcaagtcgggagaatgcaagtcagatatggcccgagtgctgattatcatgtaaagttgttcaacatacccaaatagtttttc

SEQ ID NO: 26251 - protein, 80 aa, Triticum aestivum
QSKILLPCLAFPTQKFIACDHRSYKQQSRLLMIRKGLFAKRLFDVDKHGNHHLLKVVFLPPLHHSLELVTEQIMLELDKH

SEQ ID NO: 26252 - protein, 64 aa, Triticum aestivum
MVYVSALGSIWLTALPSPFPCIYHEWTFIGPVRECIPGSPHYALHLSLKSGECKSDMARVLIIM

SEQ ID NO: 26253 - protein, 54 aa, Triticum aestivum
TIENFVAMSSFPHSKVYRMRSQVLQAAIKALDDKKRAVRQEAVRCRQTWQSSFA

SEQ ID NO: 26254 - protein, 49 aa, Triticum aestivum
MIRKGLFAKRLFDVDKHGNHHLLKVVFLPPLHHSLELVTEQIMLELDKH

SEQ ID NO: 26255 - DNA, 1352 bp, Triticum aestivum
aaaccaatgcaaagcaatccatttgagcttcacaaaactagtactccaacatgtgctcctctctcaagtgtgtgtccgtgtgctagtagctagcctacagcaccgtttctctcgggaggaatttcatatatacacacgcgattaacacgtacgtacagtacagacatccttcaacgacggtcgatgatggccggcgctcaagagcaagggctgaagctgctggtgccgcggagcggcgtgagcatatacgccatccgcgtccagatggcgcttgccatgaagggtctggcttacgactaccttcccgaggaccccggatgcaagagcgacctcctcctcgcgtccaaccccgtgcacaagacgctgcccgtcctcatccacgccggcaggcccgtctgcgagtcgctgatcatcatggagtaccttgacggcgcatttcccggcgacggcgcctccatactccccgccgacccgtaccgccgcgccgtcgctcgcttctgggccgcctatatcgacgacaaggtttgttcccttccctctcgtctagctagtttgagcttgaagaattgaagttgcatcccacgggcgccgttttgttgccgcagatgttcccttcgtgcatcggcattctcaatacggcgaagcagcaggagagagccgacaaggtggaggagaccttggcggcgttcgagctcctagagaccgccctggtggagtcctccaaagaaggggaggcggaggcgctgttcttcggcggtgtatccctcgggctgctcgacctcgcgctcgggtgctatcttccctggttcgaagcgataggccgcctcgctggcacgccgccattcctagacgcggcgaggacaccaaagttggccgcgtgggcagggcgtttcagcgccgccgagccggtcattgcgctgctgactgcggtggacaaggtggaggagtacatcactaaggtgctttatccaaagtgggaagttgcactaactgcaccgccaactaattagagatcgtgtcgtctccttaattagtcgttacatacattgcagttgcggtgcttgccttctaattaattgagttggtgttttcacgagttgttgtgctcgttgaactattgatactttgtttttagtgtctcgtcgtcatcgatggtgcgcacgcgtgcactgtatttgatctgagctgttgtttcatgaataaaccgtagcttcttgcttcttgcatctctttggcaaggtctcaaggatgacactagttgtactctttttactttgtatattaggtttgtcttttttgattgtatagtcaccctattctattcttaaaatatattgtaatttcatgatgcc

SEQ ID NO: 26256 - protein, 134 aa, Triticum aestivum
MFPSCIGILNTAKQQERADKVEETLAAFELLETALVESSKEGEAEALFFGGVSLGLLDLALGCYLPWFEAIGRLAGTPPFLDAARTPKLAAWAGRFSAAEPVIALLTAVDKVEEYITKVLYPKWEVALTAPPTN

SEQ ID NO: 26257 - protein, 128 aa, Triticum aestivum
MMAGAQEQGLKLLVPRSGVSIYAIRVQMALAMKGLAYDYLPEDPGCKSDLLLASNPVHKTLPVLIHAGRPVCESLIIMEYLDGAFPGDGASILPADPYRRAVARFWAAYIDDKVCSLPSRLASLSLKN

SEQ ID NO: 26258 - protein, 127 aa, Triticum aestivum
MAGAQEQGLKLLVPRSGVSIYAIRVQMALAMKGLAYDYLPEDPGCKSDLLLASNPVHKTLPVLIHAGRPVCESLIIMEYLDGAFPGDGASILPADPYRRAVARFWAAYIDDKVCSLPSRLASLSLKN

SEQ ID NO: 26259 - DNA, 1267 bp, Triticum aestivum
atttttccccgattctcagcaacgagagccgacctcgtgacggcgccggccagccaggatccatagcgacgcggtggcgccgttcgccggagtagcgcgcctcgacaagaggccgcgcgctgctccttcgaacggcgctgagcccagcgcagaggcggggtgtcgtcttcctccgtaagtacggcacatcggtgtcaacttcccgtgcgtcgtcccgagagaccacgacatcctggtcctcgtgcggcgtcgtcgcgcgggatcccggacgtgaggcaccaacgcggcgccatcagtttcatctttaaatcttgagttcatcaactgaaggagatgtctgtggttaggttacaaggcggcagtccagagcatttgggcagtggtttcgttgcttactgcaacggatgttcatgtctagtaatgacatcttaccatgttgttaaatcagccttcattaatggtcttatgattacggttatctttcctggtggacaaccgcgctttcaagccgatgtacaaaatttatccgagcctggggatcttgctatacttcagtttgattgtgagggctatatgtttgaacctctgctgttcgctgaaatatctaccaatcctgatttatttccatggacggtttatttgcatggatattacaatggtaaacgtggacaacttatcagaccttcgacattacctggccaaattgacggtatgtacgtaaatcaagaaactggtgttcatatgctttatgcaaattacaccagtaaccctggaatgtctggtggaccaattattatgggaggtagagtcttggagtcaacaaaggggctgaggcaggaacgagacttgctgtttcagtcctgggtgtacaccatgctagaggattggactggcggagcagaaacaattgctgagatgcttgaaatgcttgaagagcttgactattaaaataatcaatcttgcagcaccaagtattaaagccttcaatgaagtatcagttacttggagtgaatgtttgatacgctgctggagcctcagggtggagtgaaagatggtttattgcttccatacattaagccgtcgtttattttggaagttgtctgagtgcgatgtgtaatttgtatctctatacggttgttatttaagttattcttgtccgagtgactacatcagactatcaaggattgttatttgttatgtaccaatgtggagtcacataggttatttgtgcctgtagagtaagaattatattaatgtgatggactcc

SEQ ID NO: 26260 - protein, 204 aa, Triticum aestivum
MSVVRLQGGSPEHLGSGFVAYCNGCSCLVMTSYHVVKSAFINGLMITVIFPGGQPRFQADVQNLSEPGDLAILQFDCEGYMFEPLLFAEISTNPDLFPWTVYLHGYYNGKRGQLIRPSTLPGQIDGMYVNQETGVHMLYANYTSNPGMSGGPIIMGGRVLESTKGLRQERDLLFQSWVYTMLEDWTGGAETIAEMLEMLEELDY

SEQ ID NO: 26261 - protein, 175 aa, Triticum aestivum
MTSYHVVKSAFINGLMITVIFPGGQPRFQADVQNLSEPGDLAILQFDCEGYMFEPLLFAEISTNPDLFPWTVYLHGYYNGKRGQLIRPSTLPGQIDGMYVNQETGVHMLYANYTSNPGMSGGPIIMGGRVLESTKGLRQERDLLFQSWVYTMLEDWTGGAETIAEMLEMLEELDY

SEQ ID NO: 26262 - protein, 160 aa, Triticum aestivum
MITVIFPGGQPRFQADVQNLSEPGDLAILQFDCEGYMFEPLLFAEISTNPDLFPWTVYLHGYYNGKRGQLIRPSTLPGQIDGMYVNQETGVHMLYANYTSNPGMSGGPIIMGGRVLESTKGLRQERDLLFQSWVYTMLEDWTGGAETIAEMLEMLEELDY

SEQ ID NO: 26263 - DNA, 844 bp, Triticum aestivum
atcaccctagcccccacccccacactcccccagcgctctcactctcccctcgcagcagagcttgctcgcaagaagcagagcaagtggccggcggcgacatgaagcggaccagggcgcagaaccccaaggcccaggacccggagccgcaggaccccgcggccgccgggagcaaccccaccccgaagccgcagcgccgcgcgaagcagccccggcagcccaaggcggcgacggcgggtggcaagaagaccgccgcggctcgcgaggccgctgcggtgaccgcgacggcagccgctgctgcctccgtcgccgcagcgtcccccgcagcggagacggcgccggtcgtccccgacgtctgcgtcggcgcgggaggaggaggggatgtggcgtgcggcctgccggcggagtgggacgagatggacgggtcgccgtggtggacgttcggggtggaggaggagaagctgctggggtggttcccgttcgtggaggaggacttcctgtccgtcggcagcggcgtcggccccgccgccgccgagcccttcgacgacgacatctggcggatccaccagatctacgagatccccagctacgccgccaagtgaagaagcgacggacgcaaaatgcgggcggcattccaccacttggagagagaaactactactaatctatgaggttaccatctcatagatttgtgctaccagcagcagtagtgcttttgcggtacaggaacaggggaacggactaatctatgaggttaccatctactactaatcccagtttaggcgagtgagcgaagctagttttaacgccttgttatgcaagcaaagaacaaagaaaaatttcgacg

SEQ ID NO: 26264 - protein, 198 aa, Triticum aestivum
HPSPHPHTPPALSLSPRSRACSQEAEQVAGGDMKRTRAQNPKAQDPEPQDPAAAGSNPTPKPQRRAKQPRQPKAATAGGKKTAAAREAAAVTATAAAAASVAAASPAAETAPVVPDVCVGAGGGGDVACGLPAEWDEMDGSPWWTFGVEEEKLLGWFPFVEEDFLSVGSGVGPAAAEPFDDDIWRIHQIYEIPSYAAK

SEQ ID NO: 26265 - protein, 166 aa, Triticum aestivum
MKRTRAQNPKAQDPEPQDPAAAGSNPTPKPQRRAKQPRQPKAATAGGKKTAAAREAAAVTATAAAAASVAAASPAAETAPVVPDVCVGAGGGGDVACGLPAEWDEMDGSPWWTFGVEEEKLLGWFPFVEEDFLSVGSGVGPAAAEPFDDDIWRIHQIYEIPSYAAK

SEQ ID NO: 26266 - protein, 101 aa, Triticum aestivum
MWRAACRRSGTRWTGRRGGRSGWRRRSCWGGSRSWRRTSCPSAAASAPPPPSPSTTTSGGSTRSTRSPATPPSEEATDAKCGRHSTTWREKLLLIYEVTIS

SEQ ID NO: 26267 - DNA, 861 bp, Triticum aestivum
aaattatcttacgtacattttactctttagctagctccaccttgcatcttcaaacagttctcaactaaaaattatggctagttcgttgcctttgcaatcttccttgttcattctcttccttgcatctactgtttttgctatcaataatatcacccatgccacttcagtggcaaaagccttagttccatgcacaatgtgcactgagtgtgagaacccatgccaacccctgctgccacctccaccgccacccgtggtagagtgcccgccaccaccatcacctccaccgccaccagcggtcaatgaatgccctccaccaccaaagtcaccatgcccagataattgtgaagtgccacaaggaccagtgccccggccaccgtacccaccggtattgtactttccaacgggaacgccgtatccaaactatgtgccagataatatcaacaacagcggtggaaagatgaagccttactcgatctatttcacaaagtccttgattatttatgtggcatgtctttaccttattacttgtttatttagtgaattgttttgagtaatcctttgctcctattattagtgttttcactggattaactctagtagagtctcagatttgcagatttgcactacaaaaatgaattctaaaaaattaagacgaaaaagaaatgtactcatcatatgcggtacgtataggagcgaaaagaagccacgatatttgagcagaagcacggtaatatgtaatgtgtcgtttctgcaattcttctatatctccatatttagtgttaacggctgttttggctttgtgccattgattagtcctcaatgttgaaataattgtgtcttattagtgaattttttgtgtct

SEQ ID NO: 26268 - protein, 158 aa, Triticum aestivum
MASSLPLQSSLFILFLASTVFAINNITHATSVAKALVPCTMCTECENPCQPLLPPPPPPVVECPPPPSPPPPPAVNECPPPPKSPCPDNCEVPQGPVPRPPYPPVLYFPTGTPYPNYVPDNINNSGGKMKPYSIYFTKSLIIYVACLYLITCLFSELF

SEQ ID NO: 26269 - protein, 118 aa, Triticum aestivum
MCTECENPCQPLLPPPPPPVVECPPPPSPPPPPAVNECPPPPKSPCPDNCEVPQGPVPRPPYPPVLYFPTGTPYPNYVPDNINNSGGKMKPYSIYFTKSLIIYVACLYLITCLFSELF

SEQ ID NO: 26270 - DNA, 1401 bp, Triticum aestivum
aaagctgagagcagttcgtcaataaataagttctccagaaaccccgaaaccccgcgaccaccgcctcgccgcttacacgaccgagtgcgccgacggacgacacctccactaccgcctgtcgcccctcgccgcgcgcgaccgacgcccaccgcgttacgatggtgaccgacgcggccgcgctggcggtcgtgaaggccgcgcgccccgtcttccgcggcgcccacgacggcgtggcgttcgccgcaaacgccgccttcctcgccgccggatactccttatgcgccgtcggccctgccgcgctcgccgaccccctccccgcagttgacgaggaggtgggaattgatgggtggaacactatggacaattgctatgcctttctgtactccaaggaggaggagggcaagaagaagcgcattttagtgaaatgtctagtgattgatgacttccttgctattgatgcgctggatcttgaggcacaacacaaggaaccctgcaatgttcagataaatgtgaaggatttcttctctgaagaacagcccaagaattataaggatatgtacaagaattttgcgggcttcatcaatacccttaactcaagcttgttagttgaattggatggtaagaatgctgctgctgctgccgcccagaagcctgatcttgagggcagttcatcaataaacagttctgaaaatgttctgccggatacaaggactactgaacctgctggcctgatatatcctccagtagctccgtttggtcatgatgacaccttccctgctcctggtgctggcttctaccctcacagtggtgggccgggtggtagtatgcacgttggcccaaatgatccacgcttctttccttcaaatccttttcctgctccttttggtggccctgggagtgttccacctggtgtccgttacgatccaatcggcccgcccgatgttccaggatttgaaccatctcgctttgtgaggcgttcgaggcatccaggtggaagcactcacccagacctcgagttcttccagcaaggcccagacttctgagactcggcttcatgccacctgcaccctgcgctgaatgactctgctttgtttgtgctgcgctcatgaactttttttcagtagaccctgcttgggaagttggaaacatgaatgtaaacttttgtatttaccttccagacaatgctttgtgacggttgactgtacaattgtatatagacctgtcttcgtatccctctgtgcttcttacctaaactattggtgcgactaccaacatctgcaatgtctgcctcgtagttatccagtagccccaaaatttgctcgcagtttctccgtatgcagtatcaccgcaaaatgttcctctgtatctacgggcgctccaagcgaaatcttgttttaatat

SEQ ID NO: 26271 - protein, 294 aa, Triticum aestivum
MVTDAAALAVVKAARPVFRGAHDGVAFAANAAFLAAGYSLCAVGPAALADPLPAVDEEVGIDGWNTMDNCYAFLYSKEEEGKKKRILVKCLVIDDFLAIDALDLEAQHKEPCNVQINVKDFFSEEQPKNYKDMYKNFAGFINTLNSSLLVELDGKNAAAAAAQKPDLEGSSSINSSENVLPDTRTTEPAGLIYPPVAPFGHDDTFPAPGAGFYPHSGGPGGSMHVGPNDPRFFPSNPFPAPFGGPGSVPPGVRYDPIGPPDVPGFEPSRFVRRSRHPGGSTHPDLEFFQQGPDF

SEQ ID NO: 26272 - protein, 228 aa, Triticum aestivum
MDNCYAFLYSKEEEGKKKRILVKCLVIDDFLAIDALDLEAQHKEPCNVQINVKDFFSEEQPKNYKDMYKNFAGFINTLNSSLLVELDGKNAAAAAAQKPDLEGSSSINSSENVLPDTRTTEPAGLIYPPVAPFGHDDTFPAPGAGFYPHSGGPGGSMHVGPNDPRFFPSNPFPAPFGGPGSVPPGVRYDPIGPPDVPGFEPSRFVRRSRHPGGSTHPDLEFFQQGPDF

SEQ ID NO: 26273 - protein, 162 aa, Triticum aestivum
MYKNFAGFINTLNSSLLVELDGKNAAAAAAQKPDLEGSSSINSSENVLPDTRTTEPAGLIYPPVAPFGHDDTFPAPGAGFYPHSGGPGGSMHVGPNDPRFFPSNPFPAPFGGPGSVPPGVRYDPIGPPDVPGFEPSRFVRRSRHPGGSTHPDLEFFQQGPDF

SEQ ID NO: 26274 - DNA, 669 bp, Triticum aestivum
gagtttacccgacgccaccccctcttttctttcccccttcctcttcaactcccgtctcacctctcccgacgccgaaccgaatcgcagcagcggcagccggagaagaagagatcgagcgccagcagccatgtccggcatggaggaggaggagaacgccgccgagctcaagatcggcgaagagttcctgaaggccaagtgcctgatgaactgcgaggtggcgataatcctggagcacaagtgggagcagctgcagcacatgtcggacggcggcgccgaccaggtctcgcaggtcttcgagaagtcgcaggcctacgtcaagcgcttcagccgctacaagaaccccgacgcggtccgccaggtccgcgagacgctctcccgctacagcctcgtcgagttcgagctctgcaccctcgggaacctctgccccgacaccgccgacgaggccaaggcgctcgtcccctccctcgtccccggcggcaggttcgacagcgacgaccgggtcgacaagatgctcaacgacctctccctcatcaagaagttcgagtagtagcccccataatatgctcttcttgtcttcctccagtgatatgtttaagcttcagattatctccttttattgcgctatgatcataagacatcagtgtcagtctcaaatgaatggagttaatt

SEQ ID NO: 26275 - protein, 208 aa, Triticum aestivum
EFTRRHPLFSFPLPLQLPSHLSRRRTESQQRQPEKKRSSASSHVRHGGGGERRRAQDRRRVPEGQVPDELRGGDNPGAQVGAAAAHVGRRRRPGLAGLREVAGLRQALQPLQEPRRGPPGPRDALPLQPRRVRALHPREPLPRHRRRGQGARPLPRPRRQVRQRRPGRQDAQRPLPHQEVRVVAPIICSSCLPPVICLSFRLSPFIAL

SEQ ID NO: 26276 - protein, 181 aa, Triticum aestivum
SLPDATPSFLSPFLFNSRLTSPDAEPNRSSGSRRRRDRAPAAMSGMEEEENAAELKIGEEFLKAKCLMNCEVAIILEHKWEQLQHMSDGGADQVSQVFEKSQAYVKRFSRYKNPDAVRQVRETLSRYSLVEFELCTLGNLCPDTADEAKALVPSLVPGGRFDSDDRVDKMLNDLSLIKKFE

SEQ ID NO: 26277 - protein, 139 aa, Triticum aestivum
MSGMEEEENAAELKIGEEFLKAKCLMNCEVAIILEHKWEQLQHMSDGGADQVSQVFEKSQAYVKRFSRYKNPDAVRQVRETLSRYSLVEFELCTLGNLCPDTADEAKALVPSLVPGGRFDSDDRVDKMLNDLSLIKKFE

SEQ ID NO: 26278 - DNA, 1072 bp, Triticum aestivum
agaacatcctaatcgaaaagcaaaagctactcaagaattgacccaacccacccggccttctcctaccaaccaagcagctccaaacaccaagaaatccacagaaaccgagatctctctctccccgacccgacggatccctggttgttgttgtagctgggcaatggcgaccgacgcgatcctggagaccatcaagcctcggcggagcccgtggctggaggacctcccagtgacgaatgggggcgcagcgaagggcggcaaggtcaacctgtccgggatgcgccggcgcgtgtcgtcgtccttgtcattgagcctccagccgctgtcctcgtcttcgtccgcggcgttccggcgcgcgcggtcgatgccgtcgatcaaggcgctggcggcggcgggcgcggtgcggcagtggtgggagtgggggctcggttgggtgatgacccggaagccctccttcgcgcgtggcctcgagatgagcgatgacgaggccgccctgctcgggtgccactgccgcggcacgctccggcacgtcttctacaaggcacgcgccgaggtgcgccgcctccttggccgcgacggccgcccgctcggaggcgtcgccgcgcaggacttcaggtacgactccgtcagctacgctcagaacttcgacaacggcgacgtcgacgccagatgctagctgctgcgccggcgcacgcatggattcggacgccgccaatcgtgccgaaagtgaaggtatacatggctcgattaatggctacgaactatatcttcttggacgtggcaataaaccgaattgtttgcaagacactagcagcatatagcacggcgtgtgtgtgtgtgtgttttggcggaacgatcgcagatgatccagcagcgagtgatgcgcactgttcagggaccagatgtatatttcttccactcttctttcttgtgtttttccgagtcttttcttggatacatccgtccctacaatgtaatcgagcccgtggatcgggatggggatcctgagctggctaaatgtacatgttgctgtaacacattgcaaaagcaaatcaataagcattcctggaacctg

SEQ ID NO: 26279 - protein, 223 aa, Triticum aestivum
EHPNRKAKATQELTQPTRPSPTNQAAPNTKKSTETEISLSPTRRIPGCCCSWAMATDAILETIKPRRSPWLEDLPVTNGGAAKGGKVNLSGMRRRVSSSLSLSLQPLSSSSSAAFRRARSMPSIKALAAAGAVRQWWEWGLGWVMTRKPSFARGLEMSDDEAALLGCHCRGTLRHVFYKARAEVRRLLGRDGRPLGGVAAQDFRYDSVSYAQNFDNGDVDARC

SEQ ID NO: 26280 - protein, 170 aa, Triticum aestivum
MATDAILETIKPRRSPWLEDLPVTNGGAAKGGKVNLSGMRRRVSSSLSLSLQPLSSSSSAAFRRARSMPSIKALAAAGAVRQWWEWGLGWVMTRKPSFARGLEMSDDEAALLGCHCRGTLRHVFYKARAEVRRLLGRDGRPLGGVAAQDFRYDSVSYAQNFDNGDVDARC

SEQ ID NO: 26281 - protein, 132 aa, Triticum aestivum
MRRRVSSSLSLSLQPLSSSSSAAFRRARSMPSIKALAAAGAVRQWWEWGLGWVMTRKPSFARGLEMSDDEAALLGCHCRGTLRHVFYKARAEVRRLLGRDGRPLGGVAAQDFRYDSVSYAQNFDNGDVDARC

SEQ ID NO: 26282 - DNA, 545 bp, Triticum aestivum
gcaccaacaaccccacccaacaccgagataccccaaaggcccaaagacccgacagattcgcgagagctcgagagagtgcgaccaaaatggcgatgagatgcgcgctgacctcgctccccgcgcgcctccggtccccggcggtggtagccagcgggacgcggcgccttctgagtgacgggaaggggcgcgtgctcagcgaggaggagcgcgccaaggagaacgtctacatccagaagatggagagggagaggcaggagaagctcaagaaaaagctcgaacaggagaaggatgcggccgacaaggctaagtccggcgccgacggcaagaaggccgagggaactaactaggagcgatcttcgcctgcctgaaggtgaccccatcttggacgcatccgggggacatttgtgtttatagatgtccagagatggaagaataaattctgtaaagcgttgatagcgctatctttgctttgttttcggtttgccgcgcttgttcaggatataatccagggaccataaacattgataactgggaactttgtatct

SEQ ID NO: 26283 - protein, 114 aa, Triticum aestivum
TNNPTQHRDTPKAQRPDRFARARESATKMAMRCALTSLPARLRSPAVVASGTRRLLSDGKGRVLSEEERAKENVYIQKMERERQEKLKKKLEQEKDAADKAKSGADGKKAEGTN

SEQ ID NO: 26284 - protein, 86 aa, Triticum aestivum
MAMRCALTSLPARLRSPAVVASGTRRLLSDGKGRVLSEEERAKENVYIQKMERERQEKLKKKLEQEKDAADKAKSGADGKKAEGTN

SEQ ID NO: 26285 - protein, 84 aa, Triticum aestivum
MRCALTSLPARLRSPAVVASGTRRLLSDGKGRVLSEEERAKENVYIQKMERERQEKLKKKLEQEKDAADKAKSGADGKKAEGTN

SEQ ID NO: 26286 - DNA, 618 bp, Triticum aestivum
gacagatcaacacatccccaaaggccacgtctctagggttttcgtccagcgaatcgaagaatcaagaggagtcgccatggcgtcgcggccgtcgctgaagccgaagccgaagggcaagggtgggaagaggggctcgtccgcggccgaggacgagcagtccacggcggcggtggcggtgcagctcgccaaggagtggagcacgtggacgatgaagacggcgaaggtggtggcgcactggggcttcatcccgctcatcatcgtcgtcggcatgactaagggagacgagcccaaacctagcttgttccagcttctgtcccccgtctgatcccatccccggcgagccctagactggatcgatccagctccttttagttactactagtagatgtttttgctgtttattgaatcctggtggttgagttcttgatccctgggtggtgatcttctatctgatctgtgtcgaataatgttatgtcggtggatcgatcctggattggatcggatcttgttagatacctgagatgctacggatctgctattaatatattgtgctatgttgaactttcaaaaaaaaaaaaaaaaaaaaaaaaaaaaaaaaaaaaaaaaaaaaaaaaaaag

SEQ ID NO: 26287 - protein, 107 aa, Triticum aestivum
TDQHIPKGHVSRVFVQRIEESRGVAMASRPSLKPKPKGKGGKRGSSAAEDEQSTAAVAVQLAKEWSTWTMKTAKVVAHWGFIPLIIVVGMTKGDEPKPSLFQLLSPV

SEQ ID NO: 26288 - protein, 82 aa, Triticum aestivum
MASRPSLKPKPKGKGGKRGSSAAEDEQSTAAVAVQLAKEWSTWTMKTAKVVAHWGFIPLIIVVGMTKGDEPKPSLFQLLSPV

SEQ ID NO: 26289 - DNA, 1340 bp, Triticum aestivum
cacacccgccgccgccgccgccgtctccctccctccctctctctcccccccgacgccgccggctccaagccacatcccaccccgccccgccgtcacccggtctctcgtctcctgcggcggtccgcctccattcgcctctcgttcgcttcgcagacgcgttcttccgtccgcctagcgggctcgctggggagagcggcagcagccatggccatcgggtctctcgtcgcagccgcgtccaggtccagccgccacgccctcgcctccgccgccatctcccaggcggcttacagggcgcgccagcacgccggagtgcctcctctgctctcgcggcttgcaccactcgcccgcgccttcagctcaagccctgcagcagccgatgtcgattcagatctccctgtcatggaagtgcagaaacggcgggtgggcaaaaaggccaagggcgcgaaaagcggaaaagccatgatgttcccactccatttccactatgaagatgtgttgcgtgaggatctgttgctcaaactgaaccacaccaacaccatggaggtccctggattgtttgagatccgactggtgcccaagtctaccaccggtgccaaaatccagtttgggaaactggccatggagattctgtgcggccagaggtgcatacaggcagaactgcctgcccatctgaaagggaaggcgaccaacgcatacctggggtcccagaaagacgccgtgtccctgaggcagagcatcatccgagggcacgggatgtacaacttcctggtcagggtcctgacggtgatgtctatgctggactccaaggtggcgatcgagcaggggaactgcgtaaagttcttcatggccacggagttctgcgagttctcccccgagatagaggaccactttgagatctttgagaccatcggagggttcaacgtgaccatcgtcaccacggcctgctcgaaggaggagacctcgctgctgtggagcggcttcttgctcaaggatgaaggtgagatcagctaagtaagatgctggatgagatcatgagcattgtgactaaagacaaactctggtggaagcttctatcgttttgtgatccgatctttgctagctagagtcaatggccagcttttctttctagagcaatcttgttccggaatgaaactgagttcccctgttatgtctatcttcagaagaggctcgtttttcttctgatatgcagagattcattggtttctacggtttcaaaaaaattctagatggtgatcctcctagttttgtatcctgataggctttggtcatcctcttcatgtgaagagaactaaataataatgcatttgattaaatctgcg

SEQ ID NO: 26290 - protein, 336 aa, Triticum aestivum
HTRRRRRRLPPSLSLPPDAAGSKPHPTPPRRHPVSRLLRRSASIRLSFASQTRSSVRLAGSLGRAAAAMAIGSLVAAASRSSRHALASAAISQAAYRARQHAGVPPLLSRLAPLARAFSSSPAAADVDSDLPVMEVQKRRVGKKAKGAKSGKAMMFPLHFHYEDVLREDLLLKLNHTNTMEVPGLFEIRLVPKSTTGAKIQFGKLAMEILCGQRCIQAELPAHLKGKATNAYLGSQKDAVSLRQSIIRGHGMYNFLVRVLTVMSMLDSKVAIEQGNCVKFFMATEFCEFSPEIEDHFEIFETIGGFNVTIVTTACSKEETSLLWSGFLLKDEGEIS

SEQ ID NO: 26291 - protein, 268 aa, Triticum aestivum
MAIGSLVAAASRSSRHALASAAISQAAYRARQHAGVPPLLSRLAPLARAFSSSPAAADVDSDLPVMEVQKRRVGKKAKGAKSGKAMMFPLHFHYEDVLREDLLLKLNHTNTMEVPGLFEIRLVPKSTTGAKIQFGKLAMEILCGQRCIQAELPAHLKGKATNAYLGSQKDAVSLRQSIIRGHGMYNFLVRVLTVMSMLDSKVAIEQGNCVKFFMATEFCEFSPEIEDHFEIFETIGGFNVTIVTTACSKEETSLLWSGFLLKDEGEIS

SEQ ID NO: 26292 - protein, 203 aa, Triticum aestivum
MEVQKRRVGKKAKGAKSGKAMMFPLHFHYEDVLREDLLLKLNHTNTMEVPGLFEIRLVPKSTTGAKIQFGKLAMEILCGQRCIQAELPAHLKGKATNAYLGSQKDAVSLRQSIIRGHGMYNFLVRVLTVMSMLDSKVAIEQGNCVKFFMATEFCEFSPEIEDHFEIFETIGGFNVTIVTTACSKEETSLLWSGFLLKDEGEIS

SEQ ID NO: 26293 - DNA, 1056 bp, Triticum aestivum
cttcgcgtttcttccccccacagtctcttttactctccccttctccttccccaagccaagcaaaggcagcagaggccaagaaatgggcgaccgggcgtacgggccgtcctccaagccggtccctgtggcggcaccgcggtccgccaacggcacggcgaacggcggcggtgtagggacacctcggcctccgtccatggtgcccggtcgcgtcccgccgccgccgatgtaccgaccaaagccgatgcaaccgccaccgggccgtcggcggagcgggcgcgggtggtgctgcgcgtgttgcctgtggctgacgctggtgttggtggggctggtgttccttggagcaatagcgttgggggtgttctacgtgatttaccacccggagcttccgaccttcgccgtgacgtcgctccgtctggcggcgctgaacgtctccgactccgactccgtcacctcccgcatcgagttcacggtgaccgcgcgcaaccccaacgagaagatcgcgttcgtgtacggcgacatcggggctgccttcgcggccgacggcacggacatcggggacggcaccgtgccgggcttcctccaccccagccgcaacacgacggtcatcaaggggtcggcttcggcggccgccgcgacggtggacccggtgcaggcggccagtctcagatccaagaagtcccatgcgatgtcagtggagatggactccaaggtgggtttccagatcgggcagttcaagtcgaagcgcatcagcgtccgtgtgctgtgcggtggcttcagcgcggggctggccaagccggcgccctccccggcgccgatcatcgtggccgcggcgcctgcgccgacccggtcaaaaatcaggctgtcgtcgtcttccaccggaggcggcgggtcggcgacgacggacgcaaagtgtaagctccgcgtcaagatctggatttggacgttttgatgcatctgcgggtagggagaggagggatttttttcggtttggtttaacctttttcacactgtatgtggatttattggagtatagtctatatgattttatcttcctct

SEQ ID NO: 26294 - protein, 315 aa, Triticum aestivum
FAFLPPTVSFTLPFSFPKPSKGSRGQEMGDRAYGPSSKPVPVAAPRSANGTANGGGVGTPRPPSMVPGRVPPPPMYRPKPMQPPPGRRRSGRGWCCACCLWLTLVLVGLVFLGAIALGVFYVIYHPELPTFAVTSLRLAALNVSDSDSVTSRIEFTVTARNPNEKIAFVYGDIGAAFAADGTDIGDGTVPGFLHPSRNTTVIKGSASAAAATVDPVQAASLRSKKSHAMSVEMDSKVGFQIGQFKSKRISVRVLCGGFSAGLAKPAPSPAPIIVAAAPAPTRSKIRLSSSSTGGGGSATTDAKCKLRVKIWIWTF

SEQ ID NO: 26295 - protein, 304 aa, Triticum aestivum
LRVSSPHSLFYSPLLLPQAKQRQQRPRNGRPGVRAVLQAGPCGGTAVRQRHGERRRCRDTSASVHGARSRPAAADVPTKADATATGPSAERARVVLRVLPVADAGVGGAGVPWSNSVGGVLRDLPPGASDLRRDVAPSGGAERLRLRLRHLPHRVHGDRAQPQREDRVRVRRHRGCLRGRRHGHRGRHRAGLPPPQPQHDGHQGVGFGGRRDGGPGAGGQSQIQEVPCDVSGDGLQGGFPDRAVQVEAHQRPCAVRWLQRGAGQAGALPGADHRGRGACADPVKNQAVVVFHRRRRVGDDGRKV

SEQ ID NO: 26296 - protein, 288 aa, Triticum aestivum
MGDRAYGPSSKPVPVAAPRSANGTANGGGVGTPRPPSMVPGRVPPPPMYRPKPMQPPPGRRRSGRGWCCACCLWLTLVLVGLVFLGAIALGVFYVIYHPELPTFAVTSLRLAALNVSDSDSVTSRIEFTVTARNPNEKIAFVYGDIGAAFAADGTDIGDGTVPGFLHPSRNTTVIKGSASAAAATVDPVQAASLRSKKSHAMSVEMDSKVGFQIGQFKSKRISVRVLCGGFSAGLAKPAPSPAPIIVAAAPAPTRSKIRLSSSSTGGGGSATTDAKCKLRVKIWIWTF

SEQ ID NO: 26297 - DNA, 1181 bp, Triticum aestivum
ctttttttaggaagtaccatctagataagtatatctatgccttagtagatttgacctaagaggttttttatagcaagcaggcagttctttaatacagtagtttacagaccttgttttacatggcccattccatgatcgtccttgtatttttgtcatcaagatctgtctgtttttgtcgttcagatttgatttcgtgcaaagccttaaccaagcagcatgttctcatcagtcgggtagtgaatggagctttattagccttgtctgtaaccaatgctgctcccctataatctgcatgtggacacgatcttgcaatcagccaaattggcaagcgatagcatttgatattgagcttggctgtggtgactagggagtcgtactgaaccccatgtgctatttgttgtttggtggcctacatgcgatgctttgatggatggaaggttgcaagtgcaacagcaacatttgtcatgatgttctcctcgtctctctctgtggtcgagttctactttctgggcaggttcccaattccttatgctctctacttgatcttcatttccatattggctgggttctggggccagtgcttggtcaggaagatcgtgcatgtgctcaagagggcctcgctgatcgtcttcatcctctcctctgtcatcttcgccagtgctcttaccatgggtgttgttgggaccgagaagagcatctcgatgatccacaatcacgaatacatggggttcctcagcttctgctgagtgaacaaaccaagcagacgaccaccagacccggggagaacccaaaccaggccaatacctaattgacctcacctctcccccagtccagttaagtccaaggatgaaataaaagaagcctgacgcgtgcccgtcgttagctcctcgctaacctgcaagcacctgcccggccaagcaaattctcctagtagtatagtgtcatggtcttgtggcgcggcgtcgtgccgtgtgctggatgttcttttttgttgtgttcatgtgctggttagctcctggttaacctgcagtgaagcattcgtcgtagggtttacgccgattcattcatgcgctagctagctcttggctggctggctacctgcaaacattggttgtattgggtgatgtaaatatatcagccggccaattggttgctgatttgtctatatagcttgttttgct

SEQ ID NO: 26298 - protein, 125 aa, Triticum aestivum
MEGCKCNSNICHDVLLVSLCGRVLLSGQVPNSLCSLLDLHFHIGWVLGPVLGQEDRACAQEGLADRLHPLLCHLRQCSYHGCCWDREEHLDDPQSRIHGVPQLLLSEQTKQTTTRPGENPNQANT

SEQ ID NO: 26299 - protein, 110 aa, Triticum aestivum
MRCFDGWKVASATATFVMMFSSSLSVVEFYFLGRFPIPYALYLIFISILAGFWGQCLVRKIVHVLKRASLIVFILSSVIFASALTMGVVGTEKSISMIHNHEYMGFLSFC

SEQ ID NO: 26300 - protein, 93 aa, Triticum aestivum
MMFSSSLSVVEFYFLGRFPIPYALYLIFISILAGFWGQCLVRKIVHVLKRASLIVFILSSVIFASALTMGVVGTEKSISMIHNHEYMGFLSFC

SEQ ID NO: 26301 - DNA, 510 bp, Triticum aestivum
aatcgaacacacaacgctaggcttccaaaggaaactaactagctacagagaagctaggtcgtcggcaccggcgagggtcgatctcacctttgacgccggccggctggccggccaaccgatgccgtccatggactgcgcgatccacgtggtgctgcgggtggtcatgcggaggagcatctgccggctgcacgaggtcgtcgccatggccgtggagctcggcacggcgctgctcgtggccgtgcggttctccggcatggccttccgccgcacgccagccccgactcaggtggtctccgggtcgactcactattactactacgcccccgtggcggcctccatggttggcatgtccaggctcgacaggcactagtcaccggtgagctacatcccgctggatttgatggctaatcaatcgtattttttttattttgtgagtaataatgaaattcagtacttgattagctacatacacacatgtgcactgtatattaagcagtatatgtgttcatc

SEQ ID NO: 26302 - protein, 122 aa, Triticum aestivum
IEHTTLGFQRKLTSYREARSSAPARVDLTFDAGRLAGQPMPSMDCAIHVVLRVVMRRSICRLHEVVAMAVELGTALLVAVRFSGMAFRRTPAPTQVVSGSTHYYYYAPVAASMVGMSRLDRH

SEQ ID NO: 26303 - protein, 83 aa, Triticum aestivum
MPSMDCAIHVVLRVVMRRSICRLHEVVAMAVELGTALLVAVRFSGMAFRRTPAPTQVVSGSTHYYYYAPVAASMVGMSRLDRH

SEQ ID NO: 26304 - protein, 80 aa, Triticum aestivum
MDCAIHVVLRVVMRRSICRLHEVVAMAVELGTALLVAVRFSGMAFRRTPAPTQVVSGSTHYYYYAPVAASMVGMSRLDRH

SEQ ID NO: 26305 - DNA, 524 bp, Triticum aestivum
acgaaccaacccagtccctcctacatattcagtcagtctttgcaaccaatcctcgccaaccagacgcaagcatgaggccacaggtgctgctcgccgcgctggccgtcatcgccgtcctcgcagcagctctgcctctcgcccatagccaaggcgcgacgctgtgctgcgacaactgcggctcctgcaccaggtccatcccacctcagtgcacatgcatggacacctcaccaaccgggtgcaacccggcctgcaagacctgctcgaggtccaccgtcggcggccgcaacagcttccagtgcaaggaccgcgtcgccaacttctgcaagacccgctgcactaacgccgcgtgattggacctgttgtcgcccgaataatgccgattagcttgtgcttttcctttattttttgcagtctttaagagttccctctgcatcttgatctggtagatgcagagaagaaatgagggttcgatgcatgctcatcattccttcttgtgtctgaaataaagagcatattctttgctt

SEQ ID NO: 26306 - protein, 115 aa, Triticum aestivum
EPTQSLLHIQSVFATNPRQPDASMRPQVLLAALAVIAVLAAALPLAHSQGATLCCDNCGSCTRSIPPQCTCMDTSPTGCNPACKTCSRSTVGGRNSFQCKDRVANFCKTRCTNAA

SEQ ID NO: 26307 - protein, 92 aa, Triticum aestivum
MRPQVLLAALAVIAVLAAALPLAHSQGATLCCDNCGSCTRSIPPQCTCMDTSPTGCNPACKTCSRSTVGGRNSFQCKDRVANFCKTRCTNAA

SEQ ID NO: 26308 - DNA, 904 bp, Triticum aestivum
  misc_feature (529)..(529): n is a, c, g, or t
  misc_feature (612)..(612): n is a, c, g, or t
  misc_feature (618)..(618): n is a, c, g, or t
  misc_feature (754)..(754): n is a, c, g, or t
cctaatcgaaaaaaaaccctaagtcaccacactccgtttcccgccgcctccgccctctgccgccgcagccgcagccatgggcgcgtacaagttcgtgtcggagctatggaggaggaagcagtccgacgtgatgaggttcgtgcagcgcgtgcgttgctgggagtacaggcagcagcccgccatcgtccgcatcaccaggcccacccgccccgacagggcacgccgtctcggcttcaaggccaaacagggttatgtgatctaccgtatccgtgtgagacgtggtggcaggaagcgcccagtgcccaagggtattgtttatggcaagcccaagcaccagggtattacccaactcaagttccagaggaacaagaggtctgttgctgaggaaagagctgggcgcaggcttggtggtcttcgtgtcctcaactcctactgggtgaatgaggactccacctacaagtactttgaggtcatccttgttgacgttgctcacagcgctgtccgcaacgatccaaggatcaactggctntgcaagcctgtgcacaagcaccgtgagctgcgtggtctcacctctgcgggaaagaaattccgtggtctgcgtggcaagggtcnccgccnccacaagaacaggccctcaaggagagccacctggaagaggaaccagaccgtctccctccgccgctaccgttaagcttatgtgctgttatgttctgtggaacctgccctatgcttaccttgatagtatctgtttgcnccgtcaaattttgctaccttcgttctgtggctgaacctccaggcatgtctgttgaactatttgctatgtgcctgtgttacctggaattcgaatgattgaagtagtcctcgatgtgtgctgattattgttttaatgctttgatgttttttt

SEQ ID NO: 26309 - protein, 204 aa, Triticum aestivum
  misc_feature (151)..(151): Xaa can be any naturally occurring amino acid
  misc_feature (179)..(179): Xaa can be any naturally occurring amino acid
  misc_feature (181)..(181): Xaa can be any naturally occurring amino acid
MGAYKFVSELWRRKQSDVMRFVQRVRCWEYRQQPAIVRITRPTRPDRARRLGFKAKQGYVIYRIRVRRGGRKRPVPKGIVYGKPKHQGITQLKFQRNKRSVAEERAGRRLGGLRVLNSYWVNEDSTYKYFEVILVDVAHSAVRNDPRINWXCKPVHKHRELRGLTSAGKKFRGLRGKGXRXHKNRPSRRATWKRNQTVSLRRYR

SEQ ID NO: 26310 - protein, 186 aa, Triticum aestivum
  misc_feature (133)..(133): Xaa can be any naturally occurring amino acid
  misc_feature (161)..(161): Xaa can be any naturally occurring amino acid
  misc_feature (163)..(163): Xaa can be any naturally occurring amino acid
MRFVQRVRCWEYRQQPAIVRITRPTRPDRARRLGFKAKQGYVIYRIRVRRGGRKRPVPKGIVYGKPKHQGITQLKFQRNKRSVAEERAGRRLGGLRVLNSYWVNEDSTYKYFEVILVDVAHSAVRNDPRINWXCKPVHKHRELRGLTSAGKKFRGLRGKGXRXHKNRPSRRATWKRNQTVSLRRYR

SEQ ID NO: 26311 - protein, 127 aa, Triticum aestivum
PNRKKTLSHHTPFPAASALCRRSRSHGRVQVRVGAMEEEAVRRDEVRAARALLGVQAAARHRPHHQAHPPRQGTPSRLQGQTGLCDLPYPCETWWQEAPSAQGYCLWQAQAPGYYPTQVPEEQEVCC

SEQ ID NO: 26312 - DNA, 760 bp, Triticum aestivum
gtggaccttttgtactagtacttcagacagacagaagcagaagcaaccagccgaagctcgttcctcgtagacagttggacagtcgtctcgatccatcgtccatcccgtctcgccagcagccgaccatggccgcgcaggcgccgccgccgccgccgccggagcagaagatgatggtggccatcgacgagagcgagtgcagccactacgcgctcgagtgggccctgcgcaacctcgcgccccgccgcctcatcctcttcaccgtccagcccttctcccctctcagctacctccccgtcggctccccgcttggcccgtcggtggcgtcgccggagctcatcaggtcggtgaccgagcaccagcggcagctcgcccaggcgctcgtcgacaaggccaaggccatctgcgccgagcacggggttgatgcagagaccgtcatcgaggtgggtgatcccaaggaaaccatatgcgaagctgcggagaagttgaatgttgatctgctcatcctgggaagccacagccgtgggcctgtacaaaggtttttccttggcagtgtgagcaactactgtagccaccacgcgaagtgcccggttcttgttgtgaagaagaaagaatgaaactccgctatctactgtattcatggacatcgtgtgaagaacccttgagatgtgtatctacatgttgtttgtcacagcatctagttgcatacttgcatatgaataaacatactttgccaatttgaaaacaactatatattcagtct

SEQ ID NO: 26313 - protein, 203 aa, Triticum aestivum
GPFVLVLQTDRSRSNQPKLVPRRQLDSRLDPSSIPSRQQPTMAAQAPPPPPPEQKMMVAIDESECSHYALEWALRNLAPRRLILFTVQPFSPLSYLPVGSPLGPSVASPELIRSVTEHQRQLAQALVDKAKAICAEHGVDAETVIEVGDPKETICEAAEKLNVDLLILGSHSRGPVQRFFLGSVSNYCSHHAKCPVLVVKKKE

SEQ ID NO: 26314 - protein, 162 aa, Triticum aestivum
MAAQAPPPPPPEQKMMVAIDESECSHYALEWALRNLAPRRLILFTVQPFSPLSYLPVGSPLGPSVASPELIRSVTEHQRQLAQALVDKAKAICAEHGVDAETVIEVGDPKETICEAAEKLNVDLLILGSHSRGPVQRFFLGSVSNYCSHHAKCPVLVVKKKE

SEQ ID NO: 26315 - protein, 148 aa, Triticum aestivum
MMVAIDESECSHYALEWALRNLAPRRLILFTVQPFSPLSYLPVGSPLGPSVASPELIRSVTEHQRQLAQALVDKAKAICAEHGVDAETVIEVGDPKETICEAAEKLNVDLLILGSHSRGPVQRFFLGSVSNYCSHHAKCPVLVVKKKE

SEQ ID NO: 26316 - DNA, 769 bp, Triticum aestivum
ttttttttgaacacccaatgttgaattcctggatctgccactgccctagccccttttcacttgctacctctgtttcagtgttcacattttcttgtctggtaaagctagtataaccacagcaaaacatatacttcgtttttgcattgagttctgagtagtagactgtttctctggttaggcgctgcatgtagctggccaggttgcagggtcatccgtttctacctcccccctcccatacggcacaatgactagtcaatgtgaggccctgggatcgggcactaggaagaagctatcaagctggctcgtgaatggccacaactcgactccagacaatcctgtgccaagccttcccgctgccgaccatttcatccttcctaaggtaaatttgtgtggcttcgagatcaaccgcacgtcatcggagccgtgctccatggtgaagcttccaccggctagcccattcgacaacttcctgaaggcagcttatcgcaccccgcaggagatgtgattacccttgcggatcacagctaaccgtcggaagaagtgctagactgtagtatctaagctttgaacactgcctcctgtctgcgagtaacatggtatcagttgttgtagcgtatgtatgaccacgtgtatctatctatgtactaaaacgcctgtagcgtgtgtgtgatcatgtgcaccgcagtactagatgtctgtaacctagcgtgtcgtgtctgttgtctgtagcgagaagacttgtgatcgagactaatgccatgatctgggc

SEQ ID NO: 26317 - protein, 86 aa, Triticum aestivum
MTSQCEALGSGTRKKLSSWLVNGHNSTPDNPVPSLPAADHFILPKVNLCGFEINRTSSEPCSMVKLPPASPFDNFLKAAYRTPQEM

SEQ ID NO: 26318 - DNA, 1412 bp, Triticum aestivum
gaaaatcccccttccattcctcctcccctccttgtccccaccctctctctctctctctccctccgtctgtccgtccgcgcgcgctctgcgttcttggggagggaggaaatggcggcaaagcgcgagctggtggtcagcttcggggagatgctgatagacttcgtgccgacggtggccggggtgtcgctggcggaggcgccggccttcgtcaaggcgcccgggggcgcccccgccaacgtcgccatcgccgtcgcgcgcctcggcggcggggccgccttcgtcggcaagctcggcgacgacgagttcggccgcatgctcgccaaaatcctccgcgaaaacggcgtcgacgccggcggcgtcgtcttcgactcgggcgcgcgcaccgcgctcgccttcgtcacgctccgcgccgacggggagcgcgagttcatgttctaccgcaaccccagcgccgacatgctcctcaccgccgacgagctcaaggtcgacgtcatcaagagggctgcagtcttccactatggatcaataagcttgatcgccgagccttgccggacagcgcatctgcacgccatgaaggttgccaaagaggccggcgcgcttctctcgtatgacccgaacctgagggaggcattgtggccctcccttgaggaggctcgcaccaagatcttgagcatctgggaccaggcagacattgtcaaggtcagcgaggtcgagcttgagtttttgactggcatcaactcggtggaggatgatgttgccatgaagctgtggcgccctacctttaagctcatgcttgtcactcttggagatcaaggatgcaagtactataccaaggatttccgtggaactgtcccatcctacaaggtacagcaagttgatacgacaggtgctggtgatgcatttattggttctctgctccgaaaaattgtccaagatccatcggcattgcaagataaaacaaagcttgagggggcgatcaaatttgccaatgcatgtggagcaatcaccgccacgaagaaaggggcaatcccttcattgcccaaggaagacgaggtgttgcggctgatggagaaggcgtagacgcggcttatgatttccagtagcttcgaattctgcaaattgtattgtaagctgttctggatcaggagcaaggtgtactcctcccaggatgcccctgcctttttgtttgctcccctttacgaaagggtttttgttttggaattcttctcatctgaataagcagatccttcaatattactgtgtcatttctgtaccaagtccttgatggtagtgttcttttttccttgttctgtcatcttatttgggttccaactgtattgggaatttgtggtttagcccctgaggtggtttctgttctcaattttcgacaagtgaaacgcatgtacaacgcc

SEQ ID NO: 26319 - protein, 359 aa, Triticum aestivum
ENPPSIPPPLLVPTLSLSLSLRLSVRARSAFLGREEMAAKRELVVSFGEMLIDFVPTVAGVSLAEAPAFVKAPGGAPANVAIAVARLGGGAAFVGKLGDDEFGRMLAKILRENGVDAGGVVFDSGARTALAFVTLRADGEREFMFYRNPSADMLLTADELKVDVIKRAAVFHYGSISLIAEPCRTAHLHAMKVAKEAGALLSYDPNLREALWPSLEEARTKILSIWDQADIVKVSEVELEFLTGINSVEDDVAMKLWRPTFKLMLVTLGDQGCKYYTKDFRGTVPSYKVQQVDTTGAGDAFIGSLLRKIVQDPSALQDKTKLEGAIKFANACGAITATKKGAIPSLPKEDEVLRLMEKA

SEQ ID NO: 26320 - protein, 323 aa, Triticum aestivum
MAAKRELVVSFGEMLIDFVPTVAGVSLAEAPAFVKAPGGAPANVAIAVARLGGGAAFVGKLGDDEFGRMLAKILRENGVDAGGVVFDSGARTALAFVTLRADGEREFMFYRNPSADMLLTADELKVDVIKRAAVFHYGSISLIAEPCRTAHLHAMKVAKEAGALLSYDPNLREALWPSLEEARTKILSIWDQADIVKVSEVELEFLTGINSVEDDVAMKLWRPTFKLMLVTLGDQGCKYYTKDFRGTVPSYKVQQVDTTGAGDAFIGSLLRKIVQDPSALQDKTKLEGAIKFANACGAITATKKGAIPSLPKEDEVLRLMEKA

SEQ ID NO: 26321 - protein, 310 aa, Triticum aestivum
MLIDFVPTVAGVSLAEAPAFVKAPGGAPANVAIAVARLGGGAAFVGKLGDDEFGRMLAKILRENGVDAGGVVFDSGARTALAFVTLRADGEREFMFYRNPSADMLLTADELKVDVIKRAAVFHYGSISLIAEPCRTAHLHAMKVAKEAGALLSYDPNLREALWPSLEEARTKILSIWDQADIVKVSEVELEFLTGINSVEDDVAMKLWRPTFKLMLVTLGDQGCKYYTKDFRGTVPSYKVQQVDTTGAGDAFIGSLLRKIVQDPSALQDKTKLEGAIKFANACGAITATKKGAIPSLPKEDEVLRLMEKA

SEQ ID NO: 26322 - DNA, 961 bp, Triticum aestivum
ctatcctctctctctctccagcatcctctttctctccttcctcccatggagtcggcatagccactagccggttctgcccgttgagagcgctcatataccctccacacctccagatctgtggcctgttgtagtctctgcctcctcagaacaacaagcccccgcagccgcgcccggatcggatggacaccgccatgcaccccgccggcgccgacgacggcggcctcgccgacccgctcaccggcaacgcgggcacaggcaccgagggcattatttgtggtatgccagacttcaagatgggtggaaagaggggcgatgaatctgcccctactgatgctggtgatgaagacggcgaagatgatgacggggatgaggatggtgacttcgcggagggcgaagaggaaatctcggaaggagaggagtatgacaaccccaaggccagtgacgccaagaagaaacaaataggcgagggtgaggagaatggcgaggatgatgaggaagaacaagaggagcaggagggtggaggaggtgacgacgatgatgatgacgacgacaacgacgatgacaatgaggacgacgacgatgatgacgatgatgtcgctgctgaagacgatggagatggagtagaagaggaggatgatgacgatgatgaggaggaggacgatgaggactcgctccagcccccgaagaagaggaagaagtgaagcccttcgacgcggctgctttagtcaccatgcgacgagatgtgcctgtccttcactgtgttctggaaactttccttagagttaaaaatgcccccacacgatcacaatgtgtgggcttgtaggagcgattagagggaactttgttgtcaccgttgctttgcttctgtggagttgatcgaacagatgtttcgctaacataattgtacctgagtggcgaaagcctcaagatttgaatatgtcagtcaactctttttatctcc

SEQ ID NO: 26323 - protein, 173 aa, Triticum aestivum
MDTAMHPAGADDGGLADPLTGNAGTGTEGIICGMPDFKMGGKRGDESAPTDAGDEDGEDDDGDEDGDFAEGEEEISEGEEYDNPKASDAKKKQIGEGEENGEDDEEEQEEQEGGGGDDDDDDDDNDDDNEDDDDDDDDVAAEDDGDGVEEEDDDDDEEEDDEDSLQPPKKRKK

SEQ ID NO: 26324 - protein, 169 aa, Triticum aestivum
MHPAGADDGGLADPLTGNAGTGTEGIICGMPDFKMGGKRGDESAPTDAGDEDGEDDDGDEDGDFAEGEEEISEGEEYDNPKASDAKKKQIGEGEENGEDDEEEQEEQEGGGGDDDDDDDDNDDDNEDDDDDDDDVAAEDDGDGVEEEDDDDDEEEDDEDSLQPPKKRKK

SEQ ID NO: 26325 - protein, 140 aa, Triticum aestivum
MPDFKMGGKRGDESAPTDAGDEDGEDDDGDEDGDFAEGEEEISEGEEYDNPKASDAKKKQIGEGEENGEDDEEEQEEQEGGGGDDDDDDDDNDDDNEDDDDDDDDVAAEDDGDGVEEEDDDDDEEEDDEDSLQPPKKRKK

SEQ ID NO: 26326 - DNA, 506 bp, Triticum aestivum
  misc_feature (477)..(477): n is a, c, g, or t
aaaccccttcttccctttaaacccctaccctccctttccgccgctttgctgctacctatccccttccctcccctccccacgccgcacggccccgccagtcctcgcttccacgctcctagggtttttagccgccgccgcgcctccccgagcatgtcggcgccgccctctctcaagtccccggccaccgccgccttcctcgcctccccatgcttggccgtcgccccgagagccgccgtgctcggcgccactgcgcagccgccgcgacgcctaagctgctctgcagccgttggagccgaagccagggatctcgagatgagtgctcccctggactgggcggcgaggtcggtgggggagctggagcaagcgacagacctggacactttctgtatgatggcgctatcacctctggacggccgatacttcagatttattaaggacttgatgcccttcttcagtgagttcggcctcatcagatwncgcgtcttagtcgaggtcagatggttgct

SEQ ID NO: 26327 - protein, 168 aa, Triticum aestivum
  misc_feature (159)..(159): Xaa can be any naturally occurring amino acid
KPLLPFKPLPSLSAALLLPIPFPPLPTPHGPASPRFHAPRVFSRRRASPSMSAPPSLKSPATAAFLASPCLAVAPRAAVLGATAQPPRRLSCSAAVGAEARDLEMSAPLDWAARSVGELEQATDLDTFCMMALSPLDGRYFRFIKDLMPFFSEFGLIRXRVLVEVRWL

SEQ ID NO: 26328 - protein, 118 aa, Triticum aestivum
  misc_feature (109)..(109): Xaa can be any naturally occurring amino acid
MSAPPSLKSPATAAFLASPCLAVAPRAAVLGATAQPPRRLSCSAAVGAEARDLEMSAPLDWAARSVGELEQATDLDTFCMMALSPLDGRYFRFIKDLMPFFSEFGLIRXRVLVEVRWL

SEQ ID NO: 26329 - protein, 89 aa, Triticum aestivum
NPFFPLNPYPPFPPLCCYLSPSLPSPRRTAPPVLASTLLGFLAAAAPPRACRRRPLSSPRPPPPSSPPHAWPSPREPPCSAPLRSRRDA

SEQ ID NO: 26330 - DNA, 1277 bp, Triticum aestivum
aacatcctaatcgaaaagaaagaaaaaaaaaactcctactagggaatctgctccgggcgcacgccggccggatcgccggcctcccgccgtcggcgcaccccaggaagagagatcggctcggctcatctgaggatttgcggagggcggccatggagggggcggaagctcctctccccgtccccacggagaagctctccatggatccaaatcgggatggggggaatcgaggtggtgtggtgctggtggccaccggcagcttcaatccccccacctacatgcacctgcgcatgttcgagcttgcaaaggacgagctgcagcagcgagggtactgtgttttgggtggatacatgtcgccggtgaacgacgcctacaagaagaaggacctcttgccggctgctcaccgggttcgcctctgcgaattggcgtgccgaagctcatctttcgtgatggttgatccctgggaggcaatgcagaaaggttatcagcgcaccttgaccgttctatctcgagttaagaactctctatgcaaggatggcttagctgatcaaggtggtgtcaaggtaatgcttttgtgtggttctgaccttctcgagtcattcagcacgccaggggtttggattccagatcaggtcagggccatatgtaaagactttggtgttgtctgtattcgtagggaaggaaaagatgttcaaaagctaatatccagcagcgagacactgcaagaatgcagggataacatcatttcggttgatgagattgtgccaaatcagatcagttcatccagagtaagagaatgtataagaaaacatctctcgataaagtatcttacttgcgacgaagtaatcgggtacattagagagcacagactgtacatggaaactggagagagtgataccagatcatgacaatgttgcaagcctttcggaacgaccgtcgagcatggactgtgccgccttgggcttcaatgttatgataaaatctgaactatcagcgacaagctgcgattatcatgaatgggtccgactgcctttgaagcatcatgaatggatgcaaatgtatggagaccagtaggctatacacaatacttgctactagaaggttcttgaatcttccttacattgttgtcaatgtatcggtctttcgaccaacagaatatatcgctaataaagcatttatatgacatgaaactctttgtcacagtaatattctgccatttgtttcatcctctatatgtaccaagatattattcagtaagtaatttgatgtgctacaaattc

SEQ ID NO: 26331 - protein, 300 aa, Triticum aestivum
HPNRKERKKKLLLGNLLRAHAGRIAGLPPSAHPRKRDRLGSSEDLRRAAMEGAEAPLPVPTEKLSMDPNRDGGNRGGVVLVATGSFNPPTYMHLRMFELAKDELQQRGYCVLGGYMSPVNDAYKKKDLLPAAHRVRLCELACRSSSFVMVDPWEAMQKGYQRTLTVLSRVKNSLCKDGLADQGGVKVMLLCGSDLLESFSTPGVWIPDQVRAICKDFGVVCIRREGKDVQKLISSSETLQECRDNIISVDEIVPNQISSSRVRECIRKHLSIKYLTCDEVIGYIREHRLYMETGESDTRS

SEQ ID NO: 26332 - protein, 251 aa, Triticum aestivum
MEGAEAPLPVPTEKLSMDPNRDGGNRGGVVLVATGSFNPPTYMHLRMFELAKDELQQRGYCVLGGYMSPVNDAYKKKDLLPAAHRVRLCELACRSSSFVMVDPWEAMQKGYQRTLTVLSRVKNSLCKDGLADQGGVKVMLLCGSDLLESFSTPGVWIPDQVRAICKDFGVVCIRREGKDVQKLISSSETLQECRDNIISVDEIVPNQISSSRVRECIRKHLSIKYLTCDEVIGYIREHRLYMETGESDTRS

SEQ ID NO: 26333 - protein, 235 aa, Triticum aestivum
MDPNRDGGNRGGVVLVATGSFNPPTYMHLRMFELAKDELQQRGYCVLGGYMSPVNDAYKKKDLLPAAHRVRLCELACRSSSFVMVDPWEAMQKGYQRTLTVLSRVKNSLCKDGLADQGGVKVMLLCGSDLLESFSTPGVWIPDQVRAICKDFGVVCIRREGKDVQKLISSSETLQECRDNIISVDEIVPNQISSSRVRECIRKHLSIKYLTCDEVIGYIREHRLYMETGESDTRS

SEQ ID NO: 26334 - DNA, 1088 bp, Triticum aestivum
agtcagccatacaggtcgatcacgggagttttgactcttgaacccgatttggagcaaccgagcggcgagcggcgcgggcgcgggagcggccaaggagtgcgacagtgcgaccggcaaccggcagccggcgcggcttgctgtcgtctcggcgaaggcgcgcccagatctactaaagcaatcacatggcaactctgaaagatgcagtagcacggaagcctatactggcaacaatccgcctgcttgttccagctggtgctgcacgtcctgcaccaccagttggtccggcactcggtttttataggctcaatttgatggcgttctgcaaggatttcaatgcaaggacccagaaatacaaggcagaaactcctatgcaggtcacgctaactgcctacaaagatagcactttcgagtttgtagtcaagtcgccgtccgtttcatggttcctcaagaaggcagcaggaattgagaccgccagcactcgtcctggtcacaacgttgtgtcatccctaacactccgccacgtttacgagattgcaaaacttaaacaagctgaccccttctgcaagcatatgtcactcgaggcgttgtgcaaatctatcattggcacagctaactcaatgggcattgagattgtcaaggatctctgagtggattggctcgtctccaatactaccaagctcctaccttcccaggtgacatttgtgagctgtagtttctcattgatgtgggagaagatgggagtttttcaactgttgatccttactgagctcttcagcccaggcaatattttcattttcttcatacccagtcttcagctgttcctgctgcaatgttgatctcttccatgggagatatttcacggaaaataatgttacttctaagcttgcgccagacgaacaatattatccatttctgttaccttgccaagttgctagttgtttgtttacttttggtatcattgtcatttctcgtgtaatggcaatgtatttgaaacacaaatatgtaatggttaattttggtgcttttacatgacttttacttgcaactttaaaaaaaaaaaaaaaaaacggcacgagaagcttatcgat

SEQ ID NO: 26335 - protein, 154 aa, Triticum aestivum
MATLKDAVARKPILATIRLLVPAGAARPAPPVGPALGFYRLNLMAFCKDFNARTQKYKAETPMQVTLTAYKDSTFEFVVKSPSVSWFLKKAAGIETASTRPGHNVVSSLTLRHVYEIAKLKQADPFCKHMSLEALCKSIIGTANSMGIEIVKDL

SEQ ID NO: 26336 - protein, 111 aa, Triticum aestivum
MAFCKDFNARTQKYKAETPMQVTLTAYKDSTFEFVVKSPSVSWFLKKAAGIETASTRPGHNVVSSLTLRHVYEIAKLKQADPFCKHMSLEALCKSIIGTANSMGIEIVKDL

SEQ ID NO: 26337 - protein, 92 aa, Triticum aestivum
MQVTLTAYKDSTFEFVVKSPSVSWFLKKAAGIETASTRPGHNVVSSLTLRHVYEIAKLKQADPFCKHMSLEALCKSIIGTANSMGIEIVKDL

SEQ ID NO: 26338 - DNA, 1031 bp, Triticum aestivum
atttgcatttgatcacgcctctcaagtctacgcccatccgtctcacagcctctcggtctgggagacatcggctcaaagattactggagaaatggagacgagcgtgatcgtcctgtccgtcgtggtaggattgctcggggtcggaagcgccgtgctggggttcatcgccgagggcaccaagctcgagcggaatgacatcggggtgtccaagaccgagtgcgtgtaccccggcaacccggcgttcgcgctggggctggtcgcggcgctcctgctgctggcggcccagatcaccgtctcggccgccggccgctgctgcggctgctgcaagccccggggcgccgccttctccgcgtccaggcggaacatcggcgtcgtcttcgccgtcctctcatgggtggcgacggtgatcgcggagatctacttcgtgcagggcgcggcgtggaacgcgccggtgacgcgcgaggtcaacacggggtgctacttcgtcagggacggcgtgttcaggagggcggccatcctgagcatcatcgcaaccgtgctcgggatcaagtcctacttcttgcttcgcgccgctgcggccacggcggcggcggcggctgctgctgtgccaggatacccgggggccgtggcggggccgtcgttggcgggcgagcccaagcccgacgggatcgcgatgggtcaccctgctccgatgtacgggcaggcgccgtacgcgcactaccctccgcctccgaacgcgcaggggtacgggcagtacccgccccctccaaacgcgcaggggtatggacagtaccctcctcctgctcaggggtacgggcacggacactgattccagcccgctgctccccctcagggtcaaggatacgggcaagccgtgtagattgatcactggcctatgtgcaggcgtgctatgttcttctgtctctagtagaattctgctgcgtaaatcaccacacgggtcacggctcgtaggctgttcccgttgtggtgaatgatgatcgtctctgcttggaagtgcaaatttgagctttg

SEQ ID NO: 26339 - protein, 245 aa, Triticum aestivum
METSVIVLSVVVGLLGVGSAVLGFIAEGTKLERNDIGVSKTECVYPGNPAFALGLVAALLLLAAQITVSAAGRCCGCCKPRGAAFSASRRNIGVVFAVLSWVATVIAEIYFVQGAAWNAPVTREVNTGCYFVRDGVFRRAAILSIIATVLGIKSYFLLRAAAATAAAAAAAVPGYPGAVAGPSLAGEPKPDGIAMGHPAPMYGQAPYAHYPPPPNAQGYGQYPPPPNAQGYGQYPPPAQGYGHGH

SEQ ID NO: 26340 - protein, 164 aa, Triticum aestivum
MGGDGDRGDLLRAGRGVERAGDARGQHGVLLRQGRRVQEGGHPEHHRNRARDQVLLLASRRCGHGGGGGCCCARIPGGRGGAVVGGRAQARRDRDGSPCSDVRAGAVRALPSASERAGVRAVPAPSKRAGVWTVPSSCSGVRARTLIPARCSPSGSRIRASRVD

SEQ ID NO: 26341 - DNA, 1945 bp, Triticum aestivum
atcactcgacacatcgacccttgactcgagtagacgcaacaacagcaccgacttgaccaaagtaacttccttctcggcatgagcggctcatcagccattgcccttgcaatccgcccaacctcgcatccctttccccgaggagtggcagagctcgcctccctcgcgtcgtcgtcctcgtcggcatgagcggtttcctcgctgtggccggcaagattgtcacgttcctgctgtgggtgctcttcctggtcctgcagacagccaccaaggttgtcgggggcctcctgcaggttgcaccgccagccgagccacaagaagagccgcaaccagaagcagcaccacgacccagatcgccgccggctgcgaggaaccgcgccggcggcggccccgcggatccatacggtccgcagtcacagctgtgggacccaccaccgcccccccacaccgctccggtgacggatgagtatcactcgtcctcgatctaccggcggcgggtgagcgccccgcaggccgctgaagatttggtggtttcctccagcagttactctcattcggccgtggcagcagcgccagcctctccggctcatgccgtctcagtgccaccagtgtcgcggacaattaagacaccggcagttgccagtaagcggcccaagctggagaggaagtactccaagattgtggaccagtaccgctccttggatgaggttattgaagcattagcgcaagctggcctcgagtcttccaatttaatcattggaattgatttcacgaaaagtaatgaatggacaggaaagagttcattcaatggtgtgagcctgcatcatattggtgatgcccccaatccttacgagcaggcaatctccatcattggacaaacactgtcagcttttgatgaggataacttaattccgtgctatggttttggagatgcatctacacatgaccaagatgtatttgccttcaaccctgacgaaagaccatgctatgggtttcaggaggctttggctcgatatagagaaattgttcctcatcttcgtctttccggtcctacatcattttctccaataattgaaatggccacaaccattgttgagcaaagcggtggccaataccatgttttagtaataattgccgatggacaagtcacacgaagtgttaacactgaatttggtcaattaagtacccaagagcagatgactgtagatgctattgtgcaagccagtgaatttcctttgtctataattctggtcggagttggagatggtccttgggacatgatgaatgaatttgatgacaacattcctgctagatcttttgacaatttccagtttgtcaacttcaccggaatcatgtcaaaaaagatcagtcaaagcaacaaggagacagagtttgctctttcagcactcatggaaatacctttgcagtacaaagcaacattacagcttggaatactggggcgtcgacttgcaaagtctccagagcgagttccacttcctcctccttttgcaagttataataccacctcaagagcagcaccatcttgggcaaataacttccgaagtgtgccttctaatcttagggaggaggcgactttagattcaacaatcacaccgtcagttacacccccaccagctgcagatgctagagcatcagaactccaattctgcccagtttgccttgccaaaccccgggacatggcatttggttgtggtcatcagacttgttcagggtgtggaccgcaggtcgtggattgccctatctgtcgaaggccaattgatacaagagtaaaactatactaacagcctcacatgcctgactaggtttgactgaagtacgctggagtgttgaaagtagaatccatggaaaagaaaaagaactccgtttgcactgtagcttgtaccataaagaaaatgaataacagttgtgtactgcacaaaaaaaaaaaaaa

SEQ ID NO: 26342 - protein, 537 aa, Triticum aestivum
MSGFLAVAGKIVTFLLWVLFLVLQTATKVVGGLLQVAPPAEPQEEPQPEAAPRPRSPPAARNRAGGGPADPYGPQSQLWDPPPPPHTAPVTDEYHSSSIYRRRVSAPQAAEDLVVSSSSYSHSAVAAAPASPAHAVSVPPVSRTIKTPAVASKRPKLERKYSKIVDQYRSLDEVIEALAQAGLESSNLIIGIDFTKSNEWTGKSSFNGVSLHHIGDAPNPYEQAISIIGQTLSAFDEDNLIPCYGFGDASTHDQDVFAFNPDERPCYGFQEALARYREIVPHLRLSGPTSFSPIIEMATTIVEQSGGQYHVLVIIADGQVTRSVNTEFGQLSTQEQMTVDAIVQASEFPLSIILVGVGDGPWDMMNEFDDNIPARSFDNFQFVNFTGIMSKKISQSNKETEFALSALMEIPLQYKATLQLGILGRRLAKSPERVPLPPPFASYNTTSRAAPSWANNFRSVPSNLREEATLDSTITPSVTPPPAADARASELQFCPVCLAKPRDMAFGCGHQTCSGCGPQVVDCPICRRPIDTRVKLY

SEQ ID NO: 26343 - DNA, 1140 bp, Triticum aestivum
aatcgagcacgccgtccacttccgaggtcgcgtgcgtggatagggtttgcttcgccgccgtcccgccgactgcgcctccccggccctcatcgtcgcgccaccgccggggagaccaggccaccaccagccgagccaccgatcgatcgatcgaccgaggcggtgatggcgcaccagatccccaaggtcgcgcacaccctcgtcgagatcgccgaggtcgcgcgctacgcctacgagcaccgctccggccacgctccggaccacgacggcgccacggcgctggccgccgacggggaggaggccgcgcggctgcgggcggagaacgccgtcctccgcgcccgcctcgcggacgacctcgccctccttcgcgagcttcagggcgcgccctttgtttcccaggagtgccctcccgacttgcataatcgtcttgtagcatcagtcaacaatgctggcttccttgctcatcttgagaaagtacgagacgagccgctgcatcaacataccaaactatctattggcggtgtgacagaggtggatattggagatattccttacactaaagatgaggggaagactgggtcatggctcttggtttcctgtgacactgctgggggcaatttggaggaaattagtggaattgatgacgaaaattatgtgatggttaatgaagatgacatcgtcgatgctattgctacctttgttgctaggtgcattcttgaagatccaaagtccaagtcattatcatcgaaagagctgcaaaaagctgttgcatcggcattgagcagcatgacagaccggaagaaatggataagtttctgggaggctggaaaggtgatttacatactggcaacttgggggatcacaatagcagggctgtacaggagtcgtgctgtcctgaagatggcagccaaaggagctgtcgtctccaccaaatttatcatgaaggcattgtgaggtgccaagtgccgaatagtggcatcatgatcacacgcaacggtcagcaagttgtaaatacaaactcatcgtgtcaactgtacatatgtgttgtgtgatatgatttatctgagaactattcgttggtcagatgtgctgtaacttctgaaatgataacgatttctctcatcgtgtatgaataatgggggc

SEQ ID NO: 26344 - protein, 316 aa, Triticum aestivum
NRARRPLPRSRAWIGFASPPSRRLRLPGPHRRATAGETRPPPAEPPIDRSTEAVMAHQIPKVAHTLVEIAEVARYAYEHRSGHAPDHDGATALAADGEEAARLRAENAVLRARLADDLALLRELQGAPFVSQECPPDLHNRLVASVNNAGFLAHLEKVRDEPLHQHTKLSIGGVTEVDIGDIPYTKDEGKTGSWLLVSCDTAGGNLEEISGIDDENYVMVNEDDIVDAIATFVARCILEDPKSKSLSSKELQKAVASALSSMTDRKKWISFWEAGKVIYILATWGITIAGLYRSRAVLKMAAKGAVVSTKFIMKAL

SEQ ID NO: 26345 - protein, 262 aa, Triticum aestivum
MAHQIPKVAHTLVEIAEVARYAYEHRSGHAPDHDGATALAADGEEAARLRAENAVLRARLADDLALLRELQGAPFVSQECPPDLHNRLVASVNNAGFLAHLEKVRDEPLHQHTKLSIGGVTEVDIGDIPYTKDEGKTGSWLLVSCDTAGGNLEEISGIDDENYVMVNEDDIVDAIATFVARCILEDPKSKSLSSKELQKAVASALSSMTDRKKWISFWEAGKVIYILATWGITIAGLYRSRAVLKMAAKGAVVSTKFIMKAL

SEQ ID NO: 26346 - DNA, 546 bp, Triticum aestivum
acatcctaatcgaaaaatcggcgcgcgcacagacacagtcacgcactaggcatttctttctttccccgtccgtccgtgcgtgctctccggagcccacgcaccacgacgtagtacgcctctcctcccctcccctcccctcccgctttctctttctctttctcgctcgcgggatggggataaagcggccgggccaatgcggcgcggcggcgtcgctggccctgcttctcctcctagtcgccgcgccgccgcggggatgcgttgcggctgcggggagcggcgggggagggctcacgaggggcagcttccccaaggggttcgtcttcggcacagcctccgccgcgtaccaggttcgttggctcctgcttcctcgatttgttcccctggtccgccggcgccattgattctttagctctttctgcatgcatgccacactgcgcgcgtcagttctagtgccatgttgagtcttggaaacgaacgatcgatcatatacgtgcgtctataatttttaagccatgcatctccgttaagcacatggcatttacccgc

SEQ ID NO: 26347 - protein, 132 aa, Triticum aestivum
ILIEKSARAQTQSRTRHFFLSPSVRACSPEPTHHDVVRLSSPPLPSRFLFLFLARGMGIKRPGQCGAAASLALLLLLVAAPPRGCVAAAGSGGGGLTRGSFPKGFVFGTASAAYQVRWLLLPRFVPLVRRRH

SEQ ID NO: 26348 - protein, 76 aa, Triticum aestivum
MGIKRPGQCGAAASLALLLLLVAAPPRGCVAAAGSGGGGLTRGSFPKGFVFGTASAAYQVRWLLLPRFVPLVRRRH

SEQ ID NO: 26349 - protein, 71 aa, Triticum aestivum
MRRGGVAGPASPPSRRAAAGMRCGCGERRGRAHEGQLPQGVRLRHSLRRVPGSLAPASSICSPGPPAPLIL

SEQ ID NO: 26350 - DNA, 630 bp, Triticum aestivum
acaactcgctgctcaagcacatcttctagccttgtacacacagagctaagcgtctgcttgcttcatctcatctcggcctctcccgatcaccatcggcggctaccagatggctcgcttcgccgtggtcgccgcaatcatcgccctccttgccgtcgccaccgccgcgcagggccccatgccggcgcccaggatggccccactaccggcgcctccggcgaggtccccggccactgcccctgcgcctgtcgccacctcgcccaccgccgcgtcgccgtccccgatggcctctcccccggccccgcccaccgacgcgccgactgacgctccctcagcgatgacgccgtccgcggtctccgccacaccctccggtgcccccaccggcactcccgcaagctctgcagtgtactcgtccgccgccagcttcgtcgcagtcgccggagcggtcgccgtagccgtcatgttctagatggagggacgactctgcttcgtcttgtccatagaatttagattgtttctgcggattctttattagagaccgaatggagattacacgacattgctatgtaatcttgttacacatgcatgagattattatgaatatacaattctttcatttgtttcctcatgttt

SEQ ID NO: 26351 - protein, 119 aa, Triticum aestivum
MARFAVVAAIIALLAVATAAQGPMPAPRMAPLPAPPARSPATAPAPVATSPTAASPSPMASPPAPPTDAPTDAPSAMTPSAVSATPSGAPTGTPASSAVYSSAASFVAVAGAVAVAVMF

SEQ ID NO: 26352 - protein, 106 aa, Triticum aestivum
TTRCSSTSSSLVHTELSVCLLHLISASPDHHRRLPDGSLRRGRRNHRPPCRRHRRAGPHAGAQDGPTTGASGEVPGHCPCACRHLAHRRVAVPDGLSPGPAHRRAD

SEQ ID NO: 26353 - protein, 96 aa, Triticum aestivum
MPAPRMAPLPAPPARSPATAPAPVATSPTAASPSPMASPPAPPTDAPTDAPSAMTPSAVSATPSGAPTGTPASSAVYSSAASFVAVAGAVAVAVMF

SEQ ID NO: 26354 - DNA, 633 bp, Triticum aestivum
attgctcgcatcggtgcagcctcctcagtcctcactcgtccgatagcaacatacaaaatgaggtcgctgccgctgccgctgctgctactcggagcggtcctcctcgtggccgccatgctcccggagggggcggcggccaagtggacggcggtgaacccgaacggtggggtggtccagcaggtggggcggttcgcggtgatcgtgtacgacctggcgcaccgcgcgggcctgacgtacgtgggggtggcgcgcggcgagacggaggaggcggtgggcggcggcaccatctaccggctggttgtggcggcggcgacgcccgacgggagcagggctcagtacgagtgcctggtgtggggcgtgccggcgtccagtctcagcacctggaagctccgccggttcaggaagatcgcaatggcatagggtcaagtatcagccgtacgttctaacgtcggagagtatgtcttggttggttcatgcgtatgctttgcaagtttgtttctctcgtctttcttcggagtgccggtgtaagtggccgtgtaataaggtttctccctagcacaatgtgtttcacatatgtttatttaacgtgttatatgcctgaatccaataaatgatttagcgcgagtttatctc

SEQ ID NO: 26355 - protein, 147 aa, Triticum aestivum
CSHRCSLLSPHSSDSNIQNEVAAAAAAATRSGPPRGRHAPGGGGGQVDGGEPERWGGPAGGAVRGDRVRPGAPRGPDVRGGGARRDGGGGGRRHHLPAGCGGGDARREQGSVRVPGVGRAGVQSQHLEAPPVQEDRNGIGSSISRTF

SEQ ID NO: 26356 - protein, 139 aa, Triticum aestivum
IARIGAASSVLTRPIATYKMRSLPLPLLLLGAVLLVAAMLPEGAAAKWTAVNPNGGVVQQVGRFAVIVYDLAHRAGLTYVGVARGETEEAVGGGTIYRLVVAAATPDGSRAQYECLVWGVPASSLSTWKLRRFRKIAMA

SEQ ID NO: 26357 - protein, 120 aa, Triticum aestivum
MRSLPLPLLLLGAVLLVAAMLPEGAAAKWTAVNPNGGVVQQVGRFAVIVYDLAHRAGLTYVGVARGETEEAVGGGTIYRLVVAAATPDGSRAQYECLVWGVPASSLSTWKLRRFRKIAMA

SEQ ID NO: 26358 - DNA, 983 bp, Triticum aestivum
aggaataggattcaggcccgggcggccgcgtcaaaatcgtctctttgctcctcctcctgtccgtccgtctccgtccgtccgcccgcccgccccgaagcgtctcgccgccccctccaccggagaaccccctcgaaggcgagcacccgccctccccttcctcccggattcttgtctgccatgggtgactacacaatccggataagcaccagcttgatcgagcagctcgcgcgcgatgacgagaagcagatgaagaggaggaccaggaaacccaagccgaggaaggtcgtggagcaaccagaggagcctcaggacaatggcagggaacttccaactgaacccaagagcagccctgctcctgttttgccttttccgccacccatgtacctgccagtgacccccgctcctccaccgcccccgcccgtgatccaggaggtggaagccatacgcgccgtggttgtggagagcgagaaggtgctggagaagctgcagaagaaggaggcgacgatgcgcgaggagctcaccaagagggccaaggagctgcacgacaaggagttcaagctgccctaccagaacccctcgccgtgcaccgacgagagggcaggctgcgctgagtgctacaggagcaacgtgcaggacccgctcaagtgcgccgaggcggtcaagaggttcgaggcgtgcgttcgcatggcgattcggggcggtaccaccatgggagctgctcagtaggcagtggcgctgggagtcggggctgagtgagcgaggtgtcgagcacacgattttgcttctgtcgggatgattgattgaataacctgcctggatttttgtttggtgagacctgaaacaccatcagttgtagattaattctggtaacgggttgctactggtgttggcaacaagaggccatgagtgtccttgaatttaggggagtggctccatgctacttgcatacatattacaaaatgagacatgaaatttgcagggtc

SEQ ID NO: 26359 - protein, 241 aa, Triticum aestivum
RNRIQARAAASKSSLCSSSCPSVSVRPPARPEASRRPLHRRTPSKASTRPPLPPGFLSAMGDYTIRISTSLIEQLARDDEKQMKRRTRKPKPRKVVEQPEEPQDNGRELPTEPKSSPAPVLPFPPPMYLPVTPAPPPPPPVIQEVEAIRAVVVESEKVLEKLQKKEATMREELTKRAKELHDKEFKLPYQNPSPCTDERAGCAECYRSNVQDPLKCAEAVKRFEACVRMAIRGGTTMGAAQ

SEQ ID NO: 26360 - protein, 182 aa, Triticum aestivum; identical to SEQ ID NO: 16098

SEQ ID NO: 26361 - protein, 159 aa, Triticum aestivum; identical to SEQ ID NO: 16099

SEQ ID NO: 26362 - DNA, 909 bp, Triticum aestivum
ctcctaccccgccgcctcattgattttcctcctcttcccctccaccgcccgcccttgccgccgccgcgtaacccaacaacgccggggcaagagaaggagcagctatccaagcttacaagggctcggagagccatgtcgtcgtcgtcggcggcgccgatcggcctgtcgtgggcgccccagctgccatcccttgcggcggccggcggcagcaagaagggctcggcgccgacatcgagcattgacgcgcaggagtccctctggaagcccagcaacgagctcgtggacgggctctacgtgcccccgagggaccccaggaaggtcaacaagatggcgaggaagaacgtcaaggacaccaccggcaagggctggttcgacatgccggcgccgagcatcactcccgagttgaagaaagaccttgagattttgcagctgaggcatgtaatggaccctaaaaggcatttcaagaggtctggtaaatccaaggctcttccgaagtatttccaagttggaacggttattgagcctgcatctgagttctactcaagtaggttgacaaagcatgaacggaagcagaccttggttgatgagctgttatctgaccaaaaactcaagaactacaggatgcgtaaggtaagggaaattcaggtggcccggacacccggaggcaaccagaagtggaagaacaagggcaagcaaacgttcaaaagggccaaggacaggcggaaataggatcaatgtaaaacaaggaagaacagaagaacggagccaaggagaaatgggcgagcacggctataggttgtgcactccactgtaatgtgttgaattcatgtaactgaacgtatggaacttttctccccgcacttagagagatgagatcagtgtttgaggggatgatggtcaaagcattgt

SEQ ID NO: 26363 - protein, 242 aa, Triticum aestivum
LLPRRLIDFPPLPLHRPPLPPPRNPTTPGQEKEQLSKLTRARRAMSSSSAAPIGLSWAPQLPSLAAAGGSKKGSAPTSSIDAQESLWKPSNELVDGLYVPPRDPRKVNKMARKNVKDTTGKGWFDMPAPSITPELKKDLEILQLRHVMDPKRHFKRSGKSKALPKYFQVGTVIEPASEFYSSRLTKHERKQTLVDELLSDQKLKNYRMRKVREIQVARTPGGNQKWKNKGKQTFKRAKDRRK

SEQ ID NO: 26364 - protein, 198 aa, Triticum aestivum
MSSSSAAPIGLSWAPQLPSLAAAGGSKKGSAPTSSIDAQESLWKPSNELVDGLYVPPRDPRKVNKMARKNVKDTTGKGWFDMPAPSITPELKKDLEILQLRHVMDPKRHFKRSGKSKALPKYFQVGTVIEPASEFYSSRLTKHERKQTLVDELLSDQKLKNYRMRKVREIQVARTPGGNQKWKNKGKQTFKRAKDRRK

SEQ ID NO: 26365 - protein, 134 aa, Triticum aestivum
SYPAASLIFLLFPSTARPCRRRVTQQRRGKRRSSYPSLQGLGEPCRRRRRRRSACRGRPSCHPLRRPAAARRARRRHRALTRRSPSGSPATSSWTGSTCPRGTPGRSTRWRGRTSRTPPARAGSTCRRRASLPS

SEQ ID NO: 26366 - DNA, 565 bp, Triticum aestivum
gacggaaagagaaacggtaccacatggacgcgctcttcgagcaactctctgccgtcgcggacatggctctcgacggccggggcttcgacccggcgcggcttgccggcgtcctcgcgctcttcgagggcgaggcgcacgcctcgtgggcggcggccgaggcggagcacgaggcggtggcccggggcaccgaggcggccgtggagaccgctcagggccacctgaacgccgtcatgggcgcggccgtcggcaagtaccgcggctcgtccggcgaggccgacgcgctgtccgcggccagggcggccatggatatggccttcaaggcgacgtccgggacacgcccctcgtgagatcgagcgggaaagatctgtgcgcgcacgcaccgcaagatcgatcggtacactcccatgagcatgcatgtactcctatgtgcctggctgcatggctgggctatgagactatgactatgatgatgtactatactcgtatggacaccagagctagtgagcagagcaaaaaaaaaaaaaaaaaagcttatcgataccgtcgacctcgagggggggcccgg

SEQ ID NO: 26367 - protein, 188 aa, Triticum aestivum
TERETVPHGRALRATLCRRGHGSRRPGLRPGAACRRPRALRGRGARLVGGGRGGARGGGPGHRGGRGDRSGPPERRHGRGRRQVPRLVRRGRRAVRGQGGHGYGLQGDVRDTPLVRSSGKDLCAHAPQDRSVHSHEHACTPMCLAAWLGYETMTMMMYYTRMDTRASEQSKKKKKKAYRYRRPRGGAR

SEQ ID NO: 26368 - protein, 114 aa, Triticum aestivum
RKEKRYHMDALFEQLSAVADMALDGRGFDPARLAGVLALFEGEAHASWAAAEAEHEAVARGTEAAVETAQGHLNAVMGAAVGKYRGSSGEADALSAARAAMDMAFKATSGTRPS

SEQ ID NO: 26369 - protein, 107 aa, Triticum aestivum
MDALFEQLSAVADMALDGRGFDPARLAGVLALFEGEAHASWAAAEAEHEAVARGTEAAVETAQGHLNAVMGAAVGKYRGSSGEADALSAARAAMDMAFKATSGTRPS

SEQ ID NO: 26370 - DNA, 1993 bp, Triticum aestivum
ttcagactcctccctctttcggtctctacgacacgtttctttctctctccctctcccctcggctaccaaggcgtctctctcttctccaaggaggctctcgatttgcatggacaagggccacctcggtggtggcggaggaggaggaggactgctagccctggacgcctcgccgcggcagctcggcttcttgaacttgctgtcgccggcgccgttccataggagcatggaggcggacgacggcggaggcggtggcggcggcggcagggggaggaggtccatcgaggttgacttcttttccgacgagaagaagaacatgaagaagagccgggcttcgtccggggccgacgcggaggaccacaaggatcaagcctccgccgccggactcgccatcaagaaggaggacctcaccattaacctccttcccgggaacaacacgaggagcgaccggtccatggtggtcgacgacgacggagcgtcccgggccgaccaagacaggaacggcaggaacaccggcgagctggcggtgatacaggccgagctgagccgcatgaacgaggagaaccagcggctgcgagggatgttgacccaggtcaacaacagctaccatgcgctgcagatgcatctcgtcgcgctcatgcagcaaaggacccagatgcctccggtccagccgcaacaacctccgacccacgaggatggcaagaacgagagtgccatcgtgccgaggcagttcctgggtctgggcccgtcgggagccagcgctgacgtggcggaagagccctccaactcgtccacggaggtcgggagcccgcggcggtcgtcgtccaacggaaacgaggaccctgagcgcggcgaaaaccctgacggcccgtccaccgcggggtggttgcccggacgcgggatgagccagcagcagcagcagcagctgggggcggcggcgaagggccacgaccagcaagcgcaggaggccaccatgaggaaggcccgtgtctccgttcgcgcccgatccgaagccccgattatcgccgatggatgccaatggaggaagtacggtcagaagatggccaagggaaacccttgcccacccgcctactaccggtgcaccatggccaccggctgcccggtgcgcaagcaggtgcaacgatgcgccgaggaccggaccatcctcatcaccacgtacgagggcacgcacaaccacccgctcccgccggccgccatggccatggcgtctaccacgtcggccgctgcgtccatgctgctctccggctccatgcccagcgccgacggcgcggggctcatgagctccaacttcctcgcgcgcaccgtgcttccgtgctcgtccagcatggccaccatctcggcgtccgcgccgttcccgacggtcacgctcgacctcacccacgccccgcccggggcgcccaacgccatgccgctaaacgtcgcccgaccgcatgcaccggggcagttccatgttccgatgcccggcggtgggatggccccggccttcgcgatgccgccgcacatgctgtacaaccagtccaagttctctgggctgcagatgtcctccgactcggtggacgccgggcagttcgcgcagcctaggccgccgatgggcctgccaggccagctgtcagacaccgtcagcgcagcggcggctgcgatcaccgcggacccgaacttcaccgtggcgctcgcggcggccatctcgtcgatcatggccggccagcacgccgccggcaacagcaacgctaacaacagcaataataacaccagtaacaacaacgtgacgacgaccagtaacaacacgacgagcaacaacaccaacagcgagactcaatgaacggcttcgtcaagttcggaaagagttgagaaaccagatagctaggttgcaagttatacacggatggtgttccattcttctttggtcaggattagcttctcgagacgtttctttggttttgataccaagcattatatacgatcaccctttttcttt

SEQ ID NO: 26371 - protein, 611 aa, Triticum aestivum
SDSSLFRSLRHVSFSLPLPSATKASLSSPRRLSICMDKGHLGGGGGGGGLLALDASPRQLGFLNLLSPAPFHRSMEADDGGGGGGGGRGRRSIEVDFFSDEKKNMKKSRASSGADAEDHKDQASAAGLAIKKEDLTINLLPGNNTRSDRSMVVDDDGASRADQDRNGRNTGELAVIQAELSRMNEENQRLRGMLTQVNNSYHALQMHLVALMQQRTQMPPVQPQQPPTHEDGKNESAIVPRQFLGLGPSGASADVAEEPSNSSTEVGSPRRSSSNGNEDPERGENPDGPSTAGWLPGRGMSQQQQQQLGAAAKGHDQQAQEATMRKARVSVRARSEAPIIADGCQWRKYGQKMAKGNPCPPAYYRCTMATGCPVRKQVQRCAEDRTILITTYEGTHNHPLPPAAMAMASTTSAAASMLLSGSMPSADGAGLMSSNFLARTVLPCSSSMATISASAPFPTVTLDLTHAPPGAPNAMPLNVARPHAPGQFHVPMPGGGMAPAFAMPPHMLYNQSKFSGLQMSSDSVDAGQFAQPRPPMGLPGQLSDTVSAAAAAITADPNFTVALAAAISSIMAGQHAAGNSNANNSNNNTSNNNVTTTSNNTTSNNTNSETQ

SEQ ID NO: 26372 - protein, 576 aa, Triticum aestivum
MDKGHLGGGGGGGGLLALDASPRQLGFLNLLSPAPFHRSMEADDGGGGGGGGRGRRSIEVDFFSDEKKNMKKSRASSGADAEDHKDQASAAGLAIKKEDLTINLLPGNNTRSDRSMVVDDDGASRADQDRNGRNTGELAVIQAELSRMNEENQRLRGMLTQVNNSYHALQMHLVALMQQRTQMPPVQPQQPPTHEDGKNESAIVPRQFLGLGPSGASADVAEEPSNSSTEVGSPRRSSSNGNEDPERGENPDGPSTAGWLPGRGMSQQQQQQLGAAAKGHDQQAQEATMRKARVSVRARSEAPIIADGCQWRKYGQKMAKGNPCPPAYYRCTMATGCPVRKQVQRCAEDRTILITTYEGTHNHPLPPAAMAMASTTSAAASMLLSGSMPSADGAGLMSSNFLARTVLPCSSSMATISASAPFPTVTLDLTHAPPGAPNAMPLNVARPHAPGQFHVPMPGGGMAPAFAMPPHMLYNQSKFSGLQMSSDSVDAGQFAQPRPPMGLPGQLSDTVSAAAAAITADPNFTVALAAAISSIMAGQHAAGNSNANNSNNNTSNNNVTTTSNNTTSNNTNSETQ

SEQ ID NO: 26373 - protein, 537 aa, Triticum aestivum
MEADDGGGGGGGGRGRRSIEVDFFSDEKKNMKKSRASSGADAEDHKDQASAAGLAIKKEDLTINLLPGNNTRSDRSMVVDDDGASRADQDRNGRNTGELAVIQAELSRMNEENQRLRGMLTQVNNSYHALQMHLVALMQQRTQMPPVQPQQPPTHEDGKNESAIVPRQFLGLGPSGASADVAEEPSNSSTEVGSPRRSSSNGNEDPERGENPDGPSTAGWLPGRGMSQQQQQQLGAAAKGHDQQAQEATMRKARVSVRARSEAPIIADGCQWRKYGQKMAKGNPCPPAYYRCTMATGCPVRKQVQRCAEDRTILITTYEGTHNHPLPPAAMAMASTTSAAASMLLSGSMPSADGAGLMSSNFLARTVLPCSSSMATISASAPFPTVTLDLTHAPPGAPNAMPLNVARPHAPGQFHVPMPGGGMAPAFAMPPHMLYNQSKFSGLQMSSDSVDAGQFAQPRPPMGLPGQLSDTVSAAAAAITADPNFTVALAAAISSIMAGQHAAGNSNANNSNNNTSNNNVTTTSNNTTSNNTNSETQ

SEQ ID NO: 26374 - DNA, 1121 bp, Triticum aestivum
aaccatccagatccaggtccttcctcgttatctttcaccatgccttcagcagcttcccgactcgtgcggatcggccgtgccgctcgctcagctgcggcgaccacatctcgcttcgcccaattcgttgaagcagcgaccctctccacgaaggcggtggcgaccaaacctcacgctatcttaggttcagatcgtgccgcctccgtagatctgcgtatgaaccaatccactgtccatgctcctccacgcgccatggcacctgcctccctgacactcagtcacccagaagaacaaaggcaggaaggtaaggtgaagtttgtggtagaggagaaagaccttgagtcagaagcagccctttgggccttgtatgagcgctggtgcaaagatttcaaccaaaagcgtgatcatgatgagatggttcactggttcaacacattcaaggagactgtcctgcttgtccaccgtcggaacaatgctaatctgccctacaaattgggaataaacaaattcgcggatgggaagctaaggaagctctgttgctgtcatgatcctattcttaaaaagattgatgaggagtttggcgacaaaccaggtgaatttattctaggtgatggtgacaaacttctcaagcgagtcttcgctgattataaggtggttcatggcagactgtatgttcatttaccaaagggagttgatgtggaaaccatcaccaccaatcctgaatgggtcgagctggaagcgaccaccaaccctccataccgataccctacttacatctagtggtgctatcattattgctactaagctgtgcttctgccaacggttgcatactaggacttggatgttgtccttcttgctaataaaacatactccctccgtccggaaatacttgtcatcgaaatggataaaagagatgtatttagacgtattttagttttagatacatctcttttgatccattttgatgacaagtattttaggacggagggcgtatgcataataagctaaccgtgagcatatgaggattacgttaatgcttttgtaagatattttaaactttgactaaggtgttgtaatattccagattcatcgttatgtgctcattagtcaggttttttcctctc

SEQ ID NO: 26375 - protein, 258 aa, Triticum aestivum
NHPDPGPSSLSFTMPSAASRLVRIGRAARSAAATTSRFAQFVEAATLSTKAVATKPHAILGSDRAASVDLRMNQSTVHAPPRAMAPASLTLSHPEEQRQEGKVKFVVEEKDLESEAALWALYERWCKDFNQKRDHDEMVHWFNTFKETVLLVHRRNNANLPYKLGINKFADGKLRKLCCCHDPILKKIDEEFGDKPGEFILGDGDKLLKRVFADYKVVHGRLYVHLPKGVDVETITTNPEWVELEATTNPPYRYPTYI

SEQ ID NO: 26376 - protein, 245 aa, Triticum aestivum
MPSAASRLVRIGRAARSAAATTSRFAQFVEAATLSTKAVATKPHAILGSDRAASVDLRMNQSTVHAPPRAMAPASLTLSHPEEQRQEGKVKFVVEEKDLESEAALWALYERWCKDFNQKRDHDEMVHWFNTFKETVLLVHRRNNANLPYKLGINKFADGKLRKLCCCHDPILKKIDEEFGDKPGEFILGDGDKLLKRVFADYKVVHGRLYVHLPKGVDVETITTNPEWVELEATTNPPYRYPTYI

SEQ ID NO: 26377 - protein, 187 aa, Triticum aestivum
MNQSTVHAPPRAMAPASLTLSHPEEQRQEGKVKFVVEEKDLESEAALWALYERWCKDFNQKRDHDEMVHWFNTFKETVLLVHRRNNANLPYKLGINKFADGKLRKLCCCHDPILKKIDEEFGDKPGEFILGDGDKLLKRVFADYKVVHGRLYVHLPKGVDVETITTNPEWVELEATTNPPYRYPTYI

SEQ ID NO: 26378 - DNA, 882 bp, Triticum aestivum
ctagctcgattcgattccgccgccgccgcccaagcccgaggaggacgattcgattccgccgccgccgcccaagccgcccaagcccgaggaggacgattcgattccgccgccgccgcccaagccgcccaagcccgaggaggacgattcgattccaccgccgccgccgccgcccaagcccgaggaggagaggagaggagaggagaggatggcgtccgtggggccgacgctcgagtccctcgtcgaccgtgagcctcccttccccttccttccttcctccctccctaaacctagcagcttgtttcagtttcaatctcaccgtctttctttcttgttttctgtatgtatgtatgtatgtatgtatgtagaagtgatctccgtcatcaccaacgacggccgcaacatcgtggggactctgcggggcttcgaccaggccaccaacataatcctcgacgagtcccacgagagggtctactccactaaggagggagtacagcagcttgtccttggtctgtacatcatcaggggtgataacataggcgtggtgggtgaggtggacgaggagctggacgcggcgctggacatgtcgaagctgagagcgcagcccctcaagccagtcatccactgaagatgatgaaatgttctatcgatctgatcctgatcgcgcaagccgaagctgatgttgctcagtcaatctgtaccgtaggttaatcgattgatcgctcactcatatctcatatctcatatcatggacccttgtatgatgaaaaaaaacagggtttgctgcgtcgatggaccggtcatgttcttgtatgagagagtgatacatgcatctctgtgcacgtaagtaatgaatgaatgaatgaagtaggcaattgatgttgg

SEQ ID NO: 26379 - protein, 139 aa, Triticum aestivum
MASVGPTLESLVDREPPFPFLPSSLPKPSSLFQFQSHRLSFLFSVCMYVCMYVEVISVITNDGRNIVGTLRGFDQATNIILDESHERVYSTKEGVQQLVLGLYIIRGDNIGVVGEVDEELDAALDMSKLRAQPLKPVIH

SEQ ID NO: 26380 - protein, 120 aa, Triticum aestivum
SSIRFRRRRPSPRRTIRFRRRRPSRPSPRRTIRFRRRRPSRPSPRRTIRFHRRRRRPSPRRRGEERRGWRPWGRRSSPSSTVSLPSPSFLPPSLNLAACFSFNLTVFLSCFLYVCMYVCM

SEQ ID NO: 26381 - protein, 93 aa, Triticum aestivum
MYVCMYVEVISVITNDGRNIVGTLRGFDQATNIILDESHERVYSTKEGVQQLVLGLYIIRGDNIGVVGEVDEELDAALDMSKLRAQPLKPVIH

SEQ ID NO: 26382 - DNA, 588 bp, Triticum aestivum
acaaccgaaccaagaagaccccgcttctcccacgcccaccccgctccagccatccgtcgatgcaaccggcgcagcctccgtgtggcagccggagaggagggagaggagccccgtcgcgggcggcgccactcccacgctgcaaccaccaccggctgctcgtcctcgtcgtcatcgtctacctggttggcggcagcgacgttcttcctctagccgctgatgcggcgccggcccgccgtctgggaccagcggaatccgtggcgtacgacgtcggctcacgcccggtacccaaagtggtcgctgcggcgagctcgccgtcgtcgacgccttctgccgtggggttcgccgacgacaaacggccggtcccgagctgccccgacgccctacacaacaggtaggaccgatacgatagttcaaaatagctagacagaacctgagaccacggtacggcaaagagccatgtttttacttgccggcgcacaataatgtctcgatttgtacagattcatcttgttcttgttcttatagggttatattatgattctgagtaattactggattcacggtaattataaaaaaaaaaaaaaaaaa

SEQ ID NO: 26383 - protein, 130 aa, Triticum aestivum
NRTKKTPLLPRPPRSSHPSMQPAQPPCGSRRGGRGAPSRAAPLPRCNHHRLLVLVVIVYLVGGSDVLPLAADAAPARRLGPAESVAYDVGSRPVPKVVAAASSPSSTPSAVGFADDKRPVPSCPDALHNR

SEQ ID NO: 26384 - protein, 111 aa, Triticum aestivum
MQPAQPPCGSRRGGRGAPSRAAPLPRCNHHRLLVLVVIVYLVGGSDVLPLAADAAPARRLGPAESVAYDVGSRPVPKVVAAASSPSSTPSAVGFADDKRPVPSCPDALHNR

SEQ ID NO: 26385 - protein, 71 aa, Triticum aestivum
QPNQEDPASPTPTPLQPSVDATGAASVWQPERRERSPVAGGATPTLQPPPAARPRRHRLPGWRQRRSSSSR

SEQ ID NO: 26386 - DNA, 1980 bp, Triticum aestivum
  misc_feature (1453)..(1453): n is a, c, g, or t
aaatatagcagagcagagcaacattcacactatcccccatgcctcccctctacgtattttcgctcgggcttctcctcctcttgcacattcctcattggtgcccctcgtccgcagctgcaagcgataccctcacggcgggccaatctctcgccgtcggcagcaagctcgtctcgagaaacggcaagttcgcgctcggcttctttcagccagcagcaggcatcaccagtaagtcccagaacaccaccagctccagctggtaccttggcatatggttcaacaagatcccagtttttactgctgtgtgggttgctaacagggaccagcccatcactggccccaacctcaacctaacacagctcaagatatcgagctatggcaatcttgtcatcgtgaacaacgattctgtagtttggtccactcacactgtcaataataggacacaaaccagcagcataaacaccactactggtgctgccgttctcttgaacagtggaaaccttgcccttacagtcacagagagcccatcatcatctgacctaccgttgtggcagagctttgattacccaacagatatttttcttcctggttccaagtttggccggaacaaggtcaccggcttgattcatcagagcatctcaaagaagagcctcattgatccgggtcttggctcatacagcattgaactagaagaaaccaaggggatcgtcctcaagcgccgcaaccccttggtagtgtattggcactgggcatcctccaaaacatcatcgttgagtcttataccaatactcaattccattctggatttggatccacggaccaaaggtttgattaacacaacatatgttgataacaaccaagaggagtactacacatacacttcaccgaatgaatcatctcccacatttgtctcactagacatctctggtctgataaagctgaatgtttggtcacaagccaaccagtcttggcaaattatatatacccagcctgccgatccctgcactccggctgctacctgtggacctttcacagtctgcaacggcattgcacagccattctgtgactgtatgatgaacttctctcagaagtcacctctggattgggagtttaatgatcgaacaggaggatgcatcagaagtacaccgttacactgcaacactagtagtaacaacaaaaacatcacaagttcaacagacatgttccactccattgctcaagttacattgccctacaacccgcaaagcatagactttgctaacacacagagcgaatgcgaagaagcttgtctcagttcctgctcctgcactgcttattcctataacagtagcagatgctctgtctggcatggggaattgcttagtgtaaatctgaatgatgggattgataatacttctgaagatgttctttaccttcgccttgctgtcaaagatttgctgccaagttccagaaatancaaaagaaaaccaaaggtcggagttactattgcaagtattattggttttgggttaataatggtcatgctgttgttactgatttggaggtacaaattcaagtgctgtggtttgcctatatacgacaatccaggtagtgctggtggaatcgtagccttcagatacactgacttggttcgtgctactaaaagcttctcagaaaagcttggaggaggtggttttggttctgtatacaagggggtgttaagtgactcaacgactactatagcagtgtaaaggctcgatggtgcccgtcaaggagagaagcaattcagggccgaggtgagctcaattggactgatccaacacataaacctagtcaaattgattggtttctgctgcgaaggtgatcacagattacttgtgtatgaacacatgttaaatgggtctcttgatggtcatctatttaagaagagcaatgcaaatgttgtcgtcctgaattggaacatcagatgtcagatatccctaggagttgctagaggattgtgct

SEQ ID NO: 26387 - protein, 562 aa, Triticum aestivum
  misc_feature (472)..(472): Xaa can be any naturally occurring amino acid
MPPLYVFSLGLLLLLHIPHWCPSSAAASDTLTAGQSLAVGSKLVSRNGKFALGFFQPAAGITSKSQNTTSSSWYLGIWFNKIPVFTAVWVANRDQPITGPNLNLTQLKISSYGNLVIVNNDSVVWSTHTVNNRTQTSSINTTTGAAVLLNSGNLALTVTESPSSSDLPLWQSFDYPTDIFLPGSKFGRNKVTGLIHQSISKKSLIDPGLGSYSIELEETKGIVLKRRNPLVVYWHWASSKTSSLSLIPILNSILDLDPRTKGLINTTYVDNNQEEYYTYTSPNESSPTFVSLDISGLIKLNVWSQANQSWQIIYTQPADPCTPAATCGPFTVCNGIAQPFCDCMMNFSQKSPLDWEFNDRTGGCIRSTPLHCNTSSNNKNITSSTDMFHSIAQVTLPYNPQSIDFANTQSECEEACLSSCSCTAYSYNSSRCSVWHGELLSVNLNDGIDNTSEDVLYLRLAVKDLLPSSRNXKRKPKVGVTIASIIGFGLIMVMLLLLIWRYKFKCCGLPIYDNPGSAGGIVAFRYTDLVRATKSFSEKLGGGGFGSVYKGVLSDSTTTIAV

SEQ ID NO: 26388 - DNA, 1446 bp, Triticum aestivum
ggttaccgcatcgtcgccaggacaagccgccagccagcccaacccaaaccaccggaccggagcagcagccgacgcctcacaaccgccgccgcgcaggcagacgagccagcgggagggagccatggatcggtaccagagggtggagaagccgcgggaggaggtgcccatcaaggagaacgagatccgcatcaccacccagggcaggatgcgcaactacatcacctacgccaccaccctcttccaggataagggttgcgatgaagttgtattcaaggcgatgggaagggccataaacaaaactgtgatgattgcagaattgatcaagaggagaattgtgggtctccatcaaaacactgccactgaatccactgatattactgacacatgggagccactggaggaaggcctacttccgcttgagacaacaaggcatgtgtctatgattactataactctttcaaagaaggagctggacacgtcatctgtcggataccaatctcctctgcctgctgacaaggtgaagccgtttgttgaatacgagaatgaagaagatgcgcactcacctcctgggcgaggaagaggccgtggccgaggccgtggaaggggaatgggaaggggtagagatgcacgtgggaatggatacatggagtatgctgatggtggatgggaaaatgagcatgctcctacctatgcaggcaatgggtatgctgaccatggtccagcttatgagggtaatgggtatgctcgtggtagaggccgtggtttcaggggccgtggcagaagaggtggctatggtggtcagcctgattatcagcatgatggagggtattatgatgaggcaccagcgccaccccgaggtgggggccgtggtttcagggggcgtggcaggagaggcggctatggtggtggccagcctgattatcagcaagacggaggttattacgaggaggctccttttcctgcaccagctggaggtcgtggtcgaggccgtggccgtgggagaggcggcccagctcggggcagagggcgcggtggcaatgccaatggcaacatggtgtatgccgccgcttcgggcgcataagcagtccgcagctcgctgccgtcgttagttggatgcctgctccaagcatgaatatgtatcatctgtgttgtttatctgtgatgacatatatactttgtataagcctgtcattcgttgggaatgaggccagattttgatctttgactagatttgtaggggtagcaccgttatgattgtgctttgttttctcaaagtagatgtcagactaattgtagctaccagttggtaaaggtttagagcagggcattctttcaatttttacataaacgaagtctttgttctctgttacattgtgccaatttcgtttggtgtcctgtctttgaaatgtaagttcaatttagtgggtacttacaatttgatttctg

SEQ ID NO: 26389 - protein, 359 aa, Triticum aestivum
VTASSPGQAASQPNPNHRTGAAADASQPPPRRQTSQREGAMDRYQRVEKPREEVPIKENEIRITTQGRMRNYITYATTLFQDKGCDEVVFKAMGRAINKTVMIAELIKRRIVGLHQNTATESTDITDTWEPLEEGLLPLETTRHVSMITITLSKKELDTSSVGYQSPLPADKVKPFVEYENEEDAHSPPGRGRGRGRGRGRGMGRGRDARGNGYMEYADGGWENEHAPTYAGNGYADHGPAYEGNGYARGRGRGFRGRGRRGGYGGQPDYQHDGGYYDEAPAPPRGGGRGFRGRGRRGGYGGGQPDYQQDGGYYEEAPFPAPAGGRGRGRGRGRGGPARGRGRGGNANGNMVYAAASGA

SEQ ID NO: 26390 - protein, 319 aa, Triticum aestivum
MDRYQRVEKPREEVPIKENEIRITTQGRMRNYITYATTLFQDKGCDEVVFKAMGRAINKTVMIAELIKRRIVGLHQNTATESTDITDTWEPLEEGLLPLETTRHVSMITITLSKKELDTSSVGYQSPLPADKVKPFVEYENEEDAHSPPGRGRGRGRGRGRGMGRGRDARGNGYMEYADGGWENEHAPTYAGNGYADHGPAYEGNGYARGRGRGFRGRGRRGGYGGQPDYQHDGGYYDEAPAPPRGGGRGFRGRGRRGGYGGGQPDYQQDGGYYEEAPFPAPAGGRGRGRGRGRGGPARGRGRGGNANGNMVYAAASGA

SEQ ID NO: 26391 - protein, 291 aa, Triticum aestivum
MRNYITYATTLFQDKGCDEVVFKAMGRAINKTVMIAELIKRRIVGLHQNTATESTDITDTWEPLEEGLLPLETTRHVSMITITLSKKELDTSSVGYQSPLPADKVKPFVEYENEEDAHSPPGRGRGRGRGRGRGMGRGRDARGNGYMEYADGGWENEHAPTYAGNGYADHGPAYEGNGYARGRGRGFRGRGRRGGYGGQPDYQHDGGYYDEAPAPPRGGGRGFRGRGRRGGYGGGQPDYQQDGGYYEEAPFPAPAGGRGRGRGRGRGGPARGRGRGGNANGNMVYAAASGA

SEQ ID NO: 26392 - DNA, 1484 bp, Triticum aestivum
gttgcttcctctccctttccatttccttccttgtcctttcctccaatcgaattggttccccaaatcttagggttagggtttcgtctattccgtaccttcctcccatattagcgcgtctggtccctgagcttgctttgcgcgtgggatgatgggcactgccgtggacctaggacggaggcagggcgacagccgcttctacgacgctgccagggctcgacgagggcaccatcacggccttcccaagtcgagacatatgatggacgacagtgatgaagatttccgtgattccagcagtgatggtagcagtgattatgaacatgtaagggccaaacactttgctcaggaaggcttctcaagggatgttggtgaatctggagttactcatggccgcttgctctttcagtacctcgagtttgattctccgttttgccgtgaacctttcactgataagatttctagcctttcagctagatttccaggattgaggacccttaggagttgtgatttatcagcgcggagttggatgagcatcgcttggtacccaatttatcgtatccctactggaccaacattaaaagatttagatgcctgctttctcactttccatcagctttcaaattgcccgcaaggagataatctgtgggctcctgatagcacaccaaacataccactcccagtttttggtttggcttcctacaagtttagcaactcagtctggtcctcaactgatggtgattggaaactggctagctgcttaaggcaagctgctgccgactggctgagagacagccgtgccggccatccagattatcagttctttgtctcccgtggtgcatacaacaggtagtgacaccaaatctgtgctttccgcagagctcatgaaagaatgtccgaagagtgtcttgtgaacatgattaagttctgagtgactgactggttgactgcttccaaatctcatgcatgttaccacaagatttgaagcttggatgcatacatccaaccgatgctggaaaaagaggtcgcggcagtttccccttctcctctcttccaccgccccttttgagagtcgctcatccccggctggcccgatctgatgcctcgtccgtcggcgacgctggctggcgatggctgctggaaaaagaggtcgcggcagtttccccttctcctctcttccaccgcccccttttgagagtcactcatccccggccggcccgatctggtgcctcgtccgtcggcgatgctggctggcgatggctgaggagaggtccctggttcttccatatgtatattagagtagcagtagacttagttagacttggctttatgccgtggtgtggcctcatgccagtcgggatacctgctgctagaccttgtgagcagagtctggtggtggctgtgattcacacttatatttgagcttaaagtctgagtgtataccgaattaggcttttccttcgatcggtttatgtcagagttcacactac

SEQ ID NO: 26393 - protein, 233 aa, Triticum aestivum
MMGTAVDLGRRQGDSRFYDAARARRGHHHGLPKSRHMMDDSDEDFRDSSSDGSSDYEHVRAKHFAQEGFSRDVGESGVTHGRLLFQYLEFDSPFCREPFTDKISSLSARFPGLRTLRSCDLSARSWMSIAWYPIYRIPTGPTLKDLDACFLTFHQLSNCPQGDNLWAPDSTPNIPLPVFGLASYKFSNSVWSSTDGDWKLASCLRQAAADWLRDSRAGHPDYQFFVSRGAYNR

SEQ ID NO: 26394 - protein, 232 aa, Triticum aestivum
MGTAVDLGRRQGDSRFYDAARARRGHHHGLPKSRHMMDDSDEDFRDSSSDGSSDYEHVRAKHFAQEGFSRDVGESGVTHGRLLFQYLEFDSPFCREPFTDKISSLSARFPGLRTLRSCDLSARSWMSIAWYPIYRIPTGPTLKDLDACFLTFHQLSNCPQGDNLWAPDSTPNIPLPVFGLASYKFSNSVWSSTDGDWKLASCLRQAAADWLRDSRAGHPDYQFFVSRGAYNR

SEQ ID NO: 26395 - protein, 197 aa, Triticum aestivum
MMDDSDEDFRDSSSDGSSDYEHVRAKHFAQEGFSRDVGESGVTHGRLLFQYLEFDSPFCREPFTDKISSLSARFPGLRTLRSCDLSARSWMSIAWYPIYRIPTGPTLKDLDACFLTFHQLSNCPQGDNLWAPDSTPNIPLPVFGLASYKFSNSVWSSTDGDWKLASCLRQAAADWLRDSRAGHPDYQFFVSRGAYNR

SEQ ID NO: 26396 - DNA, 541 bp, Triticum aestivum
  misc_feature (361)..(361): n is a, c, g, or t
  misc_feature (437)..(437): n is a, c, g, or t
  misc_feature (462)..(462): n is a, c, g, or t
aactcccggtcccggacgacctgcttggctgcgcgcgtctcgataccacctaccccgtcgccgtcagagcctcttcccacgcgccgctcccctgtccccgcaccccccgccgccgccgccgccgctccccgggacgagatggaggtcgctgccgctgccgccgccgtcgccgtcccgaggcacaaggtgaagaagcagattaacctcttctactgcgccgagtgcgaggagctcgccctcaaggtcgccgccgcctccgacgccatccagctccagtctatcaactggaggaacttccccgacgggttcccgaacctcttcatcaacaacgcgcacgacatccgggggcaagacgttggcnttcttggcttctttaagttggccgggaatcatttttgaacagatttccgtattcttcgcgcttgcccaagctcttnatcgcctccttcacgctcgtgctgnccttcttcccaaccggtaccttcgagcgcgtcgaggaggagggcgacgtcgccaccggcttcacgctcgcgcgcatcct

SEQ ID NO: 26397 - protein, 132 aa, Triticum aestivum
  misc_feature (121)..(121): Xaa can be any naturally occurring amino acid
NSRSRTTCLAARVSIPPTPSPSEPLPTRRSPVPAPPAAAAAAPRDEMEVAAAAAAVAVPRHKVKKQINLFYCAECEELALKVAAASDAIQLQSINWRNFPDGFPNLFINNAHDIRGQDVGXLGFFKLAGNHF

SEQ ID NO: 26398 - protein, 86 aa, Triticum aestivum
  misc_feature (75)..(75): Xaa can be any naturally occurring amino acid
MEVAAAAAAVAVPRHKVKKQINLFYCAECEELALKVAAASDAIQLQSINWRNFPDGFPNLFINNAHDIRGQDVGXLGFFKLAGNHF

SEQ ID NO: 26399 - protein, 66 aa, Triticum aestivum
LPVPDDLLGCARLDTTYPVAVRASSHAPLPCPRTPRRRRRRSPGRDGGRCRCRRRRRPEAQGEEAD

SEQ ID NO: 26400 - DNA, 1098 bp, Triticum aestivum
aaacaacctagaacatcctaatcgaaaaaaaccctttcgaaagaatccccaaatctcgcacgctccaaaggcccgaaaccctagctctctgctttcatccccgccaccgtccccatggcgccagggctcaaacgcttcaccgacgtcgcggcagacggcacgccccgcctcgacgacgccgccggcgaggagctcgtgtgcgtggagcgcgccgcctcggtcgccctcggcagccgcgcgccggagcccccgggaaccctcttcatcaccaccaggagggtgatttggctcagcggggcggagaagggcaaaggatacgcggtgggcttcctggacatcacgctccacgcagtgtcgcgcgacccggaggcgtacccctcgccgtgcctctacactcagattgaagccaaagctgactctgatgaagaggatggtgattttgactctgaagcaggtggtgactcacagctaccaaaaatctctgagatgcgtattatattggcagatgctgcccaactagattcactttttaatgccttctgccattgtgctgaactgaaccctgatcctactgctgaagaaaatgaagacagtgacttgttccatggtggggatatgaccaatggtggttggattcatggcgatgaagatgaacacatggttgatggaatcgaccctgagttttttattcccaacccgataggtcaaaatggtggagatgacctcagttcttcagtacttgagcttcaaatcaatgaccagcgtttcgaggatgcggatgaagaggaggcccatgaaaatgggcattagaagcagatatatgctcgttttacttatcatgatcctcgtgaggaccatgtcattagtttggttgaagattgctgtagatgcagcttggttcgcctcatgctgttgtgtcccacactttccttttgtcctttaatagacgctgctataggatcgaggactctgagggcaaccgtgtagagttgcgtcgatggtaacttttatgggagaaggtcttgcttactggtcaagaatgtaacatgtagagcttggtggagaatccgattgatggatttcaataacttttgatct

SEQ ID NO: 26401 - protein, 231 aa, Triticum aestivum
MAPGLKRFTDVAADGTPRLDDAAGEELVCVERAASVALGSRAPEPPGTLFITTRRVIWLSGAEKGKGYAVGFLDITLHAVSRDPEAYPSPCLYTQIEAKADSDEEDGDFDSEAGGDSQLPKISEMRIILADAAQLDSLFNAFCHCAELNPDPTAEENEDSDLFHGGDMTNGGWIHGDEDEHMVDGIDPEFFIPNPIGQNGGDDLSSSVLELQINDQRFEDADEEEAHENGH

SEQ ID NO: 26402 - DNA, 1077 bp, Triticum aestivum
gcagctgcctcccttctgctctacccgcttctaacaaacgcacacgctccctctcgctctcgcggcgcaggtcggaggctaaaaccctagagacaggcgactatgacggcgccggcggacaaggggaagaaggccaagaccgacaccgacgtcggcgaggagaacgagcagatcgacggtgccctcgtcctctccatcgagaggctccaggagatccaggacgagctcgagaaggttaatgaagaagcaagtgataaggttttggaggttgagcagaagtacagtgagattcgcagacctgtctatcttcggaggtgtgacatcatcaaaacaattccagacttttggctgacagcgtttctaagtcatcctcttctcagtgagcttttgactgaagaggatcaaaagatgttcaagtacttggaatctgttgatgttgatgattctaaagatgtcaagtcaggctactccatcactcttaacttctctgagaatccgtactttgaagacagaaagcttaccaagtcatatgcctttgctgatgatggaacaaccacaataaatgccacttccattaagtggaaggaaggaatggaaattaatgggaatgccattaagaagaaaggaagcaagcgcccattggttgaagaaagtttcttcacctagttcactgatacagagcacaagagccttgctgacggggtgcaagatgaggtggcagagatcatcaaagaagatttgtggccgaacccattgaaatatttcaacaatgaggttgaagagtttgaaggagatgacgaggatgaagagggatctgatggggaggatgctgaggaggatgaggacgaggagaactgaggccttggttggctttggtgggtcctgatgaatcgttgtctgcagaggctgtgggtgtctgaagggtgtagtcatgtgaccctttcgagactgttttgttttgtgtttgacttagctggaacttagccttaggagctgttgaatgcgttatcgagtacgtactgtcgtattttcgacttaaaggagacctctatatatcataatctggcgatatctatg

SEQ ID NO: 26403 - protein, 187 aa, Triticum aestivum
MTAPADKGKKAKTDTDVGEENEQIDGALVLSIERLQEIQDELEKVNEEASDKVLEVEQKYSEIRRPVYLRRCDIIKTIPDFWLTAFLSHPLLSELLTEEDQKMFKYLESVDVDDSKDVKSGYSITLNFSENPYFEDRKLTKSYAFADDGTTTINATSIKWKEGMEINGNAIKKKGSKRPLVEESFFT

SEQ ID NO: 26404 - DNA, 511 bp, Triticum aestivum
tattgatgtattcaattcaatacaggttgcgatgacaacagtcaagtacatccctcaggctgtgatgaacttcaggcggaagagtacagttggttggagtattggcaatattttacttgatcttacagggggggtgctgaactttggtcagatgggtgtgcaatctattgatcagcacactttagtgaatttctatggaaatatcggcaagactcttctttcattggaaactgttttcttcgatgttctcttcataattcaacactatgtgttgtaccctgtcaaacgggatgagaatggtaaggccatcatttctgagagggtagctcctctgattaggccctcagataagcctgaagaagatagtgtatgatatatgtacagtacacacagtgctgtctcaatttctatctgttttaacaaagataaaccacgattatttttcatgtattgtgaattaactgctgtacatatttcttcacggattactgtaaaaatttaaatattgcag

SEQ ID NO: 26405 - protein, 123 aa, Triticum aestivum
IDVFNSIQVAMTTVKYIPQAVMNFRRKSTVGWSIGNILLDLTGGVLNFGQMGVQSIDQHTLVNFYGNIGKTLLSLETVFFDVLFIIQHYVLYPVKRDENGKAIISERVAPLIRPSDKPEEDSV

SEQ ID NO: 26406 - protein, 113 aa, Triticum aestivum
MTTVKYIPQAVMNFRRKSTVGWSIGNILLDLTGGVLNFGQMGVQSIDQHTLVNFYGNIGKTLLSLETVFFDVLFIIQHYVLYPVKRDENGKAIISERVAPLIRPSDKPEEDSV

SEQ ID NO: 26407 - protein, 102 aa, Triticum aestivum
MNFRRKSTVGWSIGNILLDLTGGVLNFGQMGVQSIDQHTLVNFYGNIGKTLLSLETVFFDVLFIIQHYVLYPVKRDENGKAIISERVAPLIRPSDKPEEDSV

SEQ ID NO: 26408 - DNA, 847 bp, Triticum aestivum
aatcgatctcgagtcacctactagctaatcatggcatcttccaagagcagtcttgcaatgttcgcgctggccatagtcatggccgtggtggccggcgtctcggcgcagaacaccccgcaggacttcgtcaacctgcacaaccgcgcccgcgccgcggacggcgtcggcgcggtgacatgggacaacagcgtggccaggttcgcgcaggactacgcgaacaagcgcgccgccgactgccggctgcagcactccggcgggccgttcggcgagaacatcttctggggttccgggcagtcgtggacggccgcgaacgcccgtgaagtcgtgggtggacgagaagcggaactacccacctcaacaccaacaccttgcgacgccggcaaagtgtgcgggcactacacgcaggtggtgtggggcaagtcgacccgcatcggctgcgcgcgcgtggtctgcgccgggaaccggggcgtcttcatcatctgcaactacaaccccccgggcaacttcaacggcgaccgcccgttcgcgttcctcacccttgacgccgaagccaagtagtatgtacgtgtgaatgtgatcatacatgcataggtgtgtgtgtttatgtgtgtggattttgaatatttacttctataaatatgttatacgtactgtacgtacgtaaataagcgcacattccggcctgcatgtatccatgcggctctgtggagcgtgtaagtgcaatcttttttttttaagaatgcgtgtaagtgtaatcatatacacctccatgcaaatgtctttccttttgttttcttgttcaaatcttggaaaataaatgacgataacaataatattgtgaacccct

SEQ ID NO: 26409 - protein, 175 aa, Triticum aestivum
MASSKSSLAMFALAIVMAVVAGVSAQNTPQDFVNLHNRARAADGVGAVTWDNSVARFAQDYANKRAADCRLQHSGGPFGENIFWGSGQSWTAANAREVVGGREAELPTSTPTPCDAGKVCGHYTQVVWGKSTRIGCARVVCAGNRGVFIICNYNPPGNFNGDRPFAFLTLDAEAK

SEQ ID NO: 26410 - protein, 166 aa, Triticum aestivum
MFALAIVMAVVAGVSAQNTPQDFVNLHNRARAADGVGAVTWDNSVARFAQDYANKRAADCRLQHSGGPFGENIFWGSGQSWTAANAREVVGGREAELPTSTPTPCDAGKVCGHYTQVVWGKSTRIGCARVVCAGNRGVFIICNYNPPGNFNGDRPFAFLTLDAEAK

SEQ ID NO: 26411 - protein, 159 aa, Triticum aestivum
MAVVAGVSAQNTPQDFVNLHNRARAADGVGAVTWDNSVARFAQDYANKRAADCRLQHSGGPFGENIFWGSGQSWTAANAREVVGGREAELPTSTPTPCDAGKVCGHYTQVVWGKSTRIGCARVVCAGNRGVFIICNYNPPGNFNGDRPFAFLTLDAEAK

SEQ ID NO: 26412 - DNA, 770 bp, Triticum aestivum
agagagagaggcatcgcatcgcggatcggccattgagagagaacgaagggagagcggcggaggaggcgaaggcatcatccatggccgcggtggtccggagcgtgtggcagggcatcagggagaagggcctcaccaacttcctccgccacgcccgcgaagagggatacctaaaatgccttggggacggaaacctattgcaaaccaaaattcacaacattggtgcaacccttgtaggagttgacacttttggaaacaagtactatgagaaactacatgacactcagtatggaaggcataggtgggtagagtatgcggacaagggtcgctacaatgcatcccaagtgcctgctgaatggcatggatggctgcaccacattacagacagcactggagataagctgctggaggagaagactaaaaagttcattagggagcacagacagaactacaccggacagggtgacgacttgatctaccactccaaggggcatgctctgaacccagggcaaagggactggacaaggtaccagccttgggaaccaaagaaagaagaggccacctgatctgtatgaatggtacctgataatcctcttctatgtttcgcatttggtttggtgtcgcggatctaaaaccgccagtcaccttggtttcatggactggacctgaataatgtactctatctgatactgaatacctgccactgaacaattttaatctctgtggctgtggcaattgagaaactggcgattcggtcgtcggtgtttgcattg

SEQ ID NO: 26413 - protein, 186 aa, Triticum aestivum
RERHRIADRPLRENEGRAAEEAKASSMAAVVRSVWQGIREKGLTNFLRHAREEGYLKCLGDGNLLQTKIHNIGATLVGVDTFGNKYYEKLHDTQYGRHRWVEYADKGRYNASQVPAEWHGWLHHITDSTGDKLLEEKTKKFIREHRQNYTGQGDDLIYHSKGHALNPGQRDWTRYQPWEPKKEEAT

SEQ ID NO: 26414 - protein, 160 aa, Triticum aestivum
MAAVVRSVWQGIREKGLTNFLRHAREEGYLKCLGDGNLLQTKIHNIGATLVGVDTFGNKYYEKLHDTQYGRHRWVEYADKGRYNASQVPAEWHGWLHHITDSTGDKLLEEKTKKFIREHRQNYTGQGDDLIYHSKGHALNPGQRDWTRYQPWEPKKEEAT

SEQ ID NO: 26415 - DNA, 712 bp, Triticum aestivum
aatcgaaaagccgttcttcatccatcacattcacatcggtccaggaagagtctgaggtgaagctagaggcagagagatcagaggcgggaaggagcgggaagagagcaaggggcggccatggcgggcctgttggacaaggccaaggggttcgtcgccgacaagatcgcgcacatgcccaagccggaggcgtcgctggacaaggtgagcttcaagggcatgacccgcgaggccatcaccgtgcacagccacgtcaacgtcaccaacccctactcccaccgcatccccatctgcgacatcgccttcaccctcaagtgcggcggcaaggaggtggcgagcggcacgatcccggacccggggtggatcgaggacagcggcgaggtgaccaagctggaggtgccggccaaggtgccctacgacttcctcatctcgctcatgaaggacctgggcagggactgggacatcgactacgagctcctcgtcaagctcaccatcgacctccccatcatcggcaacttcaccatcccgctccagaccgccggcgagttcaagctgcccaccctcagcgacttcttcggcggctccgccaagacagaggaggccaccgcctagacatcagaagctcgatctagtagcttgcagcttgctctgcatccgcatgcctgtactctgtctacggtcgccgcaataatgagagcaaatattttcggatttc

SEQ ID NO: 26416 - protein, 208 aa, Triticum aestivum
SKSRSSSITFTSVQEESEVKLEAERSEAGRSGKRARGGHGGPVGQGQGVRRRQDRAHAQAGGVAGQGELQGHDPRGHHRAQPRQRHQPLLPPHPHLRHRLHPQVRRQGGGERHDPGPGVDRGQRRGDQAGGAGQGALRLPHLAHEGPGQGLGHRLRAPRQAHHRPPHHRQLHHPAPDRRRVQAAHPQRLLRRLRQDRGGHRLDIRSSI

SEQ ID NO: 26417 - protein, 163 aa, Triticum aestivum
MAGLLDKAKGFVADKIAHMPKPEASLDKVSFKGMTREAITVHSHVNVTNPYSHRIPICDIAFTLKCGGKEVASGTIPDPGWIEDSGEVTKLEVPAKVPYDFLISLMKDLGRDWDIDYELLVKLTIDLPIIGNFTIPLQTAGEFKLPTLSDFFGGSAKTEEATA

SEQ ID NO: 26418 - protein, 145 aa, Triticum aestivum
MPKPEASLDKVSFKGMTREAITVHSHVNVTNPYSHRIPICDIAFTLKCGGKEVASGTIPDPGWIEDSGEVTKLEVPAKVPYDFLISLMKDLGRDWDIDYELLVKLTIDLPIIGNFTIPLQTAGEFKLPTLSDFFGGSAKTEEATA

SEQ ID NO: 26419 - DNA, 825 bp, Triticum aestivum
  misc_feature (91)..(91): n is a, c, g, or t
  misc_feature (125)..(125): n is a, c, g, or t
  misc_feature (252)..(252): n is a, c, g, or t
agagagagagagagagatgggcggtgccgtgaaggtgtacggggtgggggcgtctccgttcgtggcgacggtgctgttgtgcctggagganacgggcgcagactacgagctcgtccccctcgacntggcggcgcgagagcagaggactgagcaccacctctcccgaaaccctttcggcaagatcccagtgttggaggacggagagctgacactcttcgaatcgcgcgcgatttctcggtacgtgctccgcangtacgcatcgccaggaaccaagcccaccgatttcttaggagaatccagcgtcgaggaatcagccatggtgaacgtgtggacgaaggtgaaggcccaccagtaccagccggccatcgaacacatcgtccagcagtgcgtcatcctgccgttcatcggcggctcgcgagaccaggtcgtcgtcgacgagaacgtcgggaagctggagaaggtcctcgacgtgtacgaggcgcggctgtggacgcacgcatacctcgctggagatttcttcagcctcgccgacctcgtccacttcggtattacctactacctggtggccggcaccgagtacgcgacgctgctggagtcgcgcgcgaacgtgtgggcgtggtgggggcggatcatggccaggccgtcggtgaagaaggtggcgccgttaatccacctctggttgaagccgtcttcgtctgcttaaatttttgtattgcaattctattttgctagcttaccaacctgaccgcttggtcttcgtctggtaaaccgaacatcgtacattcagtctactagaattatatatgcgcgccttgctgcgcggtt

SEQ ID NO: 26420 - protein, 233 aa, Triticum aestivum
  misc_feature (30)..(30): Xaa can be any naturally occurring amino acid
  misc_feature (42)..(42): Xaa can be any naturally occurring amino acid
  misc_feature (84)..(84): Xaa can be any naturally occurring amino acid
EREREMGGAVKVYGVGASPFVATVLLCLEXTGADYELVPLDXAAREQRTEHHLSRNPFGKIPVLEDGELTLFESRAISRYVLRXYASPGTKPTDFLGESSVEESAMVNVWTKVKAHQYQPAIEHIVQQCVILPFIGGSRDQVVVDENVGKLEKVLDVYEARLWTHAYLAGDFFSLADLVHFGITYYLVAGTEYATLLESRANVWAWWGRIMARPSVKKVAPLIHLWLKPSSSA

SEQ ID NO: 26421 - protein, 228 aa, Triticum aestivum
  misc_feature (25)..(25): Xaa can be any naturally occurring amino acid
  misc_feature (37)..(37): Xaa can be any naturally occurring amino acid
  misc_feature (79)..(79): Xaa can be any naturally occurring amino acid
MGGAVKVYGVGASPFVATVLLCLEXTGADYELVPLDXAAREQRTEHHLSRNPFGKIPVLEDGELTLFESRAISRYVLRXYASPGTKPTDFLGESSVEESAMVNVWTKVKAHQYQPAIEHIVQQCVILPFIGGSRDQVVVDENVGKLEKVLDVYEARLWTHAYLAGDFFSLADLVHFGITYYLVAGTEYATLLESRANVWAWWGRIMARPSVKKVAPLIHLWLKPSSSA

SEQ ID NO: 26422 - protein, 128 aa, Triticum aestivum
MVNVWTKVKAHQYQPAIEHIVQQCVILPFIGGSRDQVVVDENVGKLEKVLDVYEARLWTHAYLAGDFFSLADLVHFGITYYLVAGTEYATLLESRANVWAWWGRIMARPSVKKVAPLIHLWLKPSSSA

SEQ ID NO: 26423 - DNA, 479 bp, Triticum aestivum
  misc_feature (421)..(423): n is a, c, g, or t
cttagcaggattcccatcatctcacactcgaagctagctagcccccaagtagctgctagctctgcagtacagcactgcgtacaaaggtagcaactgcagctcgtggtgcactggtagatcgagcagcacgatggggcagctcagcaagaagcttctgctggcgtccatggtggcggcggtgctggccgtggcagcggtggagctgtgcagcgccatcccgctggaggacaacgacctggagtcggaggaggcgctctgggacctgtacgagcggtggcagaccgcgcaccgcgtgccccgccaccacgccgagaagcaccgccgcttcggcaccttcaagtccaacgtccacttcatccactcccacaacaagcgcggcgaccgcccctaccgtctccgcctcaaccgcttcggcgacatnnnccaggccgagttccgcgccaccttcgccggctcccgcgtcagcgaccgccgacgcg

SEQ ID NO: 26424 - protein, 116 aa, Triticum aestivum
  misc_feature (97)..(98): Xaa can be any naturally occurring amino acid
MGQLSKKLLLASMVAAVLAVAAVELCSAIPLEDNDLESEEALWDLYERWQTAHRVPRHHAEKHRRFGTFKSNVHFIHSHNKRGDRPYRLRLNRFGDXXQAEFRATFAGSRVSDRRR

SEQ ID NO: 26425 - protein, 104 aa, Triticum aestivum
  misc_feature (85)..(86): Xaa can be any naturally occurring amino acid
MVAAVLAVAAVELCSAIPLEDNDLESEEALWDLYERWQTAHRVPRHHAEKHRRFGTFKSNVHFIHSHNKRGDRPYRLRLNRFGDXXQAEFRATFAGSRVSDRRR

SEQ ID NO: 26426 - DNA, 1216 bp, Triticum aestivum
atcgaaaagttgctcttatcttatcccatttcttcctctttcctctccctctctctctctcttacacaagttgctgctgagttggtgctgtccttgttcctggacggacacatcctacatgtcgacggcggtggcgcggccctacggcggcggcttccccggatcggggagggccaagggggacgagctgctcggcaagaagatgagcgacgggttcttcatcgaggaggaggaggaggaggaggaggaggaggcggaggaggtgctcacggagagctcctccatcggcgcgccgtcgccgtcgagctcctccatcggcgaggactcctcgtcggaggttggcggcgacggggaggacgaggaggtggagagcaagctcaaggaggagcccgggctcgggtgcctggacgccctggaggactccttgcccatcaagaacgggctgtcgagcttctacgccggaaagtcgaagtcattcaccagcctcgcggaggcggcggcgcgggacgccgtgaaggagctcgccaagccggagaaccccttcaacaagcgccgccgcatcctggccacctggtcccgccgcgcctcctgcagctcgctggccaccgccacctacctgcccccgctcctcgcccccgaccacgccctccccgagggggaggaaggcgaggaggacgacgactccgactccggctccgacgagcagcaccgcggcaagaacgggtgggaggcaccggcattgccgcccccgaggctgagcgtgaacacccagatgggcgcggcggcggcgaggaagggcggcagcttcagatcgccgaggtcctactcgctctcagatcttcgaaatggcggcgatgcgagatacaaccagtagctgcgaattcgcagccattgatctgtcttgtgtcccgtagatctgttactactacttactccttaattatatataagcaagtaatcgcaagagcatgtgtaagtgtctaagctaaattcgtcgtgctcttgtatccgtcagttggatcccgttgacctcgctcacccgacccgatgtacgcagacatgtatgaactgctccggcgaactgagttcaccgaactgatccaacaccccggccatcattaactaatgatgaaccgtcctcaagataagattagttagtttaatggcattgctcccgatccctttgtgtacaaacatatatacaatttgttgatcc

SEQ ID NO: 26427 - protein, 327 aa, Triticum aestivum
IEKLLLSYPISSSFLSLSLSLTQVAAELVLSLFLDGHILHVDGGGAALRRRLPRIGEGQGGRAARQEDERRVLHRGGGGGGGGGGGGGAHGELLHRRAVAVELLHRRGLLVGGWRRRGGRGGGEQAQGGARARVPGRPGGLLAHQERAVELLRRKVEVIHQPRGGGGAGRREGARQAGEPLQQAPPHPGHLVPPRLLQLAGHRHLPAPAPRPRPRPPRGGGRRGGRRLRLRLRRAAPRQERVGGTGIAAPEAEREHPDGRGGGEEGRQLQIAEVLLALRSSKWRRCEIQPVAANSQPLICLVSRRSVTTTYSLIIYKQVIARACVSV

SEQ ID NO: 26428 - protein, 290 aa, Triticum aestivum
SKSCSYLIPFLPLSSPSLSLLHKLLLSWCCPCSWTDTSYMSTAVARPYGGGFPGSGRAKGDELLGKKMSDGFFIEEEEEEEEEEAEEVLTESSSIGAPSPSSSSIGEDSSSEVGGDGEDEEVESKLKEEPGLGCLDALEDSLPIKNGLSSFYAGKSKSFTSLAEAAARDAVKELAKPENPFNKRRRILATWSRRASCSSLATATYLPPLLAPDHALPEGEEGEEDDDSDSGSDEQHRGKNGWEAPALPPPRLSVNTQMGAAAARKGGSFRSPRSYSLSDLRNGGDARYNQ

SEQ ID NO: 26429 - protein, 251 aa, Triticum aestivum
MSTAVARPYGGGFPGSGRAKGDELLGKKMSDGFFIEEEEEEEEEEAEEVLTESSSIGAPSPSSSSIGEDSSSEVGGDGEDEEVESKLKEEPGLGCLDALEDSLPIKNGLSSFYAGKSKSFTSLAEAAARDAVKELAKPENPFNKRRRILATWSRRASCSSLATATYLPPLLAPDHALPEGEEGEEDDDSDSGSDEQHRGKNGWEAPALPPPRLSVNTQMGAAAARKGGSFRSPRSYSLSDLRNGGDARYNQ

SEQ ID NO: 26430 - DNA, 579 bp, Triticum aestivum
ctcgcctcggcaccgcgtttctgtatcgactctacgccgcataggcagcggccagccatcgtcctcctccagtacctagagtaacccgctgaagtggcaatccagccgaacttgttttcgatcggagccgggcacggcgagggcgaatgggttcggcttctaagccatctccgacggcgggcgcgcctagccggcgtaaggtagcgctctgcctgacgctcctcaccctgcagtacggcgcccagcccctaatctccaagcgctgcgtcgggcaaggagtcatagtgacttcattagttcttgcaattgaattattaaaggttatatgtgcggtcattttattggtggcagagggtagtctgaaggcgcaattcagtaattggagtcttgttggatcactgactgcatcaggacttcctgctgccatctatgcacttcagaatagcctgttgcagatatcatacaagaatttggattccctgaccttttcaatccttaaccagaccaagctattattcacagcattcttcacatatcttattttggggcaaaaacaatcacccaaacaaattttagcat

SEQ ID NO: 26431 - protein, 144 aa, Triticum aestivum
MGSASKPSPTAGAPSRRKVALCLTLLTLQYGAQPLISKRCVGQGVIVTSLVLAIELLKVICAVILLVAEGSLKAQFSNWSLVGSLTASGLPAAIYALQNSLLQISYKNLDSLTFSILNQTKLLFTAFFTYLILGQKQSPKQILA

SEQ ID NO: 26432 - DNA, 614 bp, Triticum aestivum
cctcgttgaaatgcttagaagaggagaaacgccccctcgtggcacccagaacccagagcggaaaaactgtggtcctgctggagggatgaccaccttgctaggcgagccaaagcctcccccatgcagggacctggatgcctgctaggtttgctttgagttgcaagcacacaaataagtaggcccggtcgcactgtatgttgcggaaaccgcgaaagcgatttgatctcctgttgttctcaaagctttcttgtggccaacaatggacattcgatttgattgatcttgttgttgtcgaagctttcttttgtctgacaattggatgcgtctacctgtcacacaccatctcttcttttttccttatcatcagctagactgcccactgataagatagtgctattctgaagctgcagctttgtatccggcataagaatctggggcactagatcgattgctgttatgctactcctgcagtgttatattcctgttgttcatgcattaatgtttgaatgaacacggacctggtacattgccgattttcggggagaaactttttgatatactaattttcttattctgtcattgtattaaacatcaatttatgtggtgtgtactgc

SEQ ID NO: 26433 - protein, 58 aa, Triticum aestivum
MLRKPRKRFDLLLFSKLSCGQQWTFDLIDLVVVEAFFCLTIGCVYLSHTISSFFLIIS

SEQ ID NO: 26434 - protein, 47 aa, Triticum aestivum
LVEMLRRGETPPRGTQNPERKNCGPAGGMTTLLGEPKPPPCRDLDAC

SEQ ID NO: 26435 - protein, 44 aa, Triticum aestivum
MLRRGETPPRGTQNPERKNCGPAGGMTTLLGEPKPPPCRDLDAC

SEQ ID NO: 26436 - DNA, 1230 bp, Triticum aestivum
tcgagatctccccacgggccaaggccaggagccaacaaacgcaaggccaccgccgcctctgcgcctccgcagtcgccgttctgcgcccttgcccgccaccgcccggagagatggcgaaggcgttttacgcggtgggtttctggatccgggagaccggtcaggccctcgaccgcctcggctgtcgcctccaggggaactacttcttccacgagcagatttcaaggcatcgcacacttatgaacatctttgacaaagcccctcatgttcacaaagaggcatttgtcgctccaagtgcatcccttattggcgatgttgaagttgggcaagggtcttcaatttggtacggatgcattttaagaggtgatgcaaataacgttcaagttggatctgagaccaatatacaggacaattctgttgtgcatgtggcaaaatctaatctaagtggaaaagtctttccaactatcattggagacaatgtcacagtagggcatagtgctgtattacaaggatgcactgttgaggatgaagcttttgttggtatgggggctaccctgttagatggtgttgttgtggaaaagcatgggatggtcgctgctggagcccttgtaagacagaacacgaggatcccttgtggagaggtatggggtggaaaccctgcaaaatttctgaggaagctcacagacgaggagatcgcttttattgcggaatcagctgccaactattccaacttagccaaggcacatgctgttgagaatgctaaacccttggaaaagattgattttgagaaagtgctgcgcaagaaatttgctcaccaggacaatgaacacgattccatgcttagtgtcactcgagaggtccctccagagctggcgccccccagtcctactcctgcccaataagcttttcttatcaccaccttcagtttggattcttatatctctatctgtccagtgagtttggcagtttacttttacttaagtaattttgggtcgagcaatgttctaaagctgaccatgcacttcaatttctgtattccatatgttcaagatccatggaacaaatagatccatttcgcacaaatttaccagtagcatgcgctgcgtgcatagtttactctggctgaaattgcgagatgcactggaggcagcacatgaactgttggcctgtagttaaatgcttaattgaataaatattttgataacaaaaagtactgaaggacaaattttattg

SEQ ID NO: 26437 - protein, 298 aa, Triticum aestivum
EISPRAKARSQQTQGHRRLCASAVAVLRPCPPPPGEMAKAFYAVGFWIRETGQALDRLGCRLQGNYFFHEQISRHRTLMNIFDKAPHVHKEAFVAPSASLIGDVEVGQGSSIWYGCILRGDANNVQVGSETNIQDNSVVHVAKSNLSGKVFPTIIGDNVTVGHSAVLQGCTVEDEAFVGMGATLLDGVVVEKHGMVAAGALVRQNTRIPCGEVWGGNPAKFLRKLTDEEIAFIAESAANYSNLAKAHAVENAKPLEKIDFEKVLRKKFAHQDNEHDSMLSVTREVPPELAPPSPTPAQ

SEQ ID NO: 26438 - protein, 262 aa, Triticum aestivum
MAKAFYAVGFWIRETGQALDRLGCRLQGNYFFHEQISRHRTLMNIFDKAPHVHKEAFVAPSASLIGDVEVGQGSSIWYGCILRGDANNVQVGSETNIQDNSVVHVAKSNLSGKVFPTIIGDNVTVGHSAVLQGCTVEDEAFVGMGATLLDGVVVEKHGMVAAGALVRQNTRIPCGEVWGGNPAKFLRKLTDEEIAFIAESAANYSNLAKAHAVENAKPLEKIDFEKVLRKKFAHQDNEHDSMLSVTREVPPELAPPSPTPAQ

SEQ ID NO: 26439 - protein, 220 aa, Triticum aestivum
MNIFDKAPHVHKEAFVAPSASLIGDVEVGQGSSIWYGCILRGDANNVQVGSETNIQDNSVVHVAKSNLSGKVFPTIIGDNVTVGHSAVLQGCTVEDEAFVGMGATLLDGVVVEKHGMVAAGALVRQNTRIPCGEVWGGNPAKFLRKLTDEEIAFIAESAANYSNLAKAHAVENAKPLEKIDFEKVLRKKFAHQDNEHDSMLSVTREVPPELAPPSPTPAQ

SEQ ID NO: 26440 - DNA, 1563 bp, Triticum aestivum
aggacaccgcggacggagagcgtcaggtcctcccccgctccgctcatcttgggaaggaagcaaagcagagccgcgccgccgaggaggatatggccgaggccgacgacgccgccgccgcccgccggcgcacggtcatcacggagtaccgcaacaagctcctgaactgccgcgagctggagacgagggtccgcacaggtagggaaaacctaaagaaggcgaagaaagattacgatataactgaagatgatttgaagtccttgcagagtgtgggccaaatcattggtgaagtacttcgaccattggacagtgaaagatttatcgtcaaagccagtagtggcccacgttatgtggttggctgcagaagcaaagttgacaaagaaaagctgacagctgcaacacgagttgtccttgacatgacaacattaacaataatgcgcactctaccacgtgaggttgatcccgtggtctataacatgctacacgaagaccccggcaatgtcagttactcagctgtaggtggactgtcggatcaaataagggagctgcgggagtccatcgagttacctcttatgaatccagaattgtttcttcgtgttgggattaaaccaccaaagggcgttctgctctatggcccacctggaacgggaaagacattgcttgctagagccattgctagcaacatcgatgctaactttttaaagattgtttcaagtgctatcattgacaaatatattggtgaaagtgcacgtcttataagagaaatgtttaactatgcacgtgagcatcaaccatgtattattttcatggatgagattgatgccattggtggccgaagattcagtgagggcactagtgcagatcgtgaaatacaacggacattgatggagctcctaaatcagttggatggattcgatgagctcggaaaggtgaagatgatcatggcgacgaaccggcctgatgtcttggaccctgcgctccttcgtcctggacgcctagaccggaagatagagattccgctgccgaatgagcaatccaggacggaggtcctgaaaatccatgcagctggtatcgccaagcatggcgaaattgattacgaggctgtggttaagctggccgagggcttcaatggcgctgatcttcgcaatgtctgcactgaggctggcatggccgccattcgagcagagcgtgactacgtcatccacgaagacttcatgaaggcagttcggaagttgaatgacgccaagaagctcgagtccagcgcacactacagcgccgactttggcaaggactaagatgagagtaggagactatcaggcgacgcgctgtctgttttcttgtaccatggcggagtttgtcacaccgaccccgacgatatagaacatcatgtgtttctaccttttatatgttgtgggacgactgcctttgccgcgcaagttgatgtaatgaaaagttgaaacaggtctgaaaccgactggtttcttagatttacaaaattgtttccttcaagttactgtgccttgattgtggaatcaaaaaaatgtggaaacattcgcgatttcttcc

SEQ ID NO: 26441 - protein, 429 aa, Triticum aestivum
DTADGERQVLPRSAHLGKEAKQSRAAEEDMAEADDAAAARRRTVITEYRNKLLNCRELETRVRTGRENLKKAKKDYDITEDDLKSLQSVGQIIGEVLRPLDSERFIVKASSGPRYVVGCRSKVDKEKLTAATRVVLDMTTLTIMRTLPREVDPVVYNMLHEDPGNVSYSAVGGLSDQIRELRESIELPLMNPELFLRVGIKPPKGVLLYGPPGTGKTLLARAIASNIDANFLKIVSSAIIDKYIGESARLIREMFNYAREHQPCIIFMDEIDAIGGRRFSEGTSADREIQRTLMELLNQLDGFDELGKVKMIMATNRPDVLDPALLRPGRLDRKIEIPLPNEQSRTEVLKIHAAGIAKHGEIDYEAVVKLAEGFNGADLRNVCTEAGMAAIRAERDYVIHEDFMKAVRKLNDAKKLESSAHYSADFGKD

SEQ ID NO: 26442 - protein, 400 aa, Triticum aestivum
MAEADDAAAARRRTVITEYRNKLLNCRELETRVRTGRENLKKAKKDYDITEDDLKSLQSVGQIIGEVLRPLDSERFIVKASSGPRYVVGCRSKVDKEKLTAATRVVLDMTTLTIMRTLPREVDPVVYNMLHEDPGNVSYSAVGGLSDQIRELRESIELPLMNPELFLRVGIKPPKGVLLYGPPGTGKTLLARAIASNIDANFLKIVSSAIIDKYIGESARLIREMFNYAREHQPCIIFMDEIDAIGGRRFSEGTSADREIQRTLMELLNQLDGFDELGKVKMIMATNRPDVLDPALLRPGRLDRKIEIPLPNEQSRTEVLKIHAAGIAKHGEIDYEAVVKLAEGFNGADLRNVCTEAGMAAIRAERDYVIHEDFMKAVRKLNDAKKLESSAHYSADFGKD

SEQ ID NO: 26443 - protein, 292 aa, Triticum aestivum
MTTLTIMRTLPREVDPVVYNMLHEDPGNVSYSAVGGLSDQIRELRESIELPLMNPELFLRVGIKPPKGVLLYGPPGTGKTLLARAIASNIDANFLKIVSSAIIDKYIGESARLIREMFNYAREHQPCIIFMDEIDAIGGRRFSEGTSADREIQRTLMELLNQLDGFDELGKVKMIMATNRPDVLDPALLRPGRLDRKIEIPLPNEQSRTEVLKIHAAGIAKHGEIDYEAVVKLAEGFNGADLRNVCTEAGMAAIRAERDYVIHEDFMKAVRKLNDAKKLESSAHYSADFGKD

SEQ ID NO: 26444 - DNA, 667 bp, Triticum aestivum
agtaaattgatcaggtaccgagggtttcggcctcccgtgcactttatctaccaagctccgggcggcgaccatcaccaaccaggtgctcgaggaggtcgatcgatggcgtcggagaaagacgcggcgctcgcccccgtgcccaacgacaaccccaccatatttgacaagatcatcaaaaaggagataccttctacggtggtgtatgaggatgagaaggtcctcgctttcagagacataaatcctcaagctccgacccacattgtaatcattcccaaagtcaaggatggattaaccggcctttcaaaggcagaagagaggcatgtagagatacttggctgcctcctctacgctgcaaaagttatcgctaagcaggaaggacttgaagatggctaccgtattgtcatcaatgatggccctagtggatgtcaatctgtttaccacatccatgtccatctccttggagggaggcagatgaactggcccccaggctaaagaagctcttggttgtcggtcaatcttcatggcagctatgtcctttgcatctcaatcgaataattcctgtaattgacataacagtttgtgcgaggaacatttgctctatctatggaatagccgaaaccatcctgctgtgaatgtatggacaagaaacttgaagctgaatcgtctc

SEQ ID NO: 26445 - protein, 163 aa, Triticum aestivum
SKLIRYRGFRPPVHFIYQAPGGDHHQPGARGGRSMASEKDAALAPVPNDNPTIFDKIIKKEIPSTVVYEDEKVLAFRDINPQAPTHIVIIPKVKDGLTGLSKAEERHVEILGCLLYAAKVIAKQEGLEDGYRIVINDGPSGCQSVYHIHVHLLGGRQMNWPPG

SEQ ID NO: 26446 - protein, 129 aa, Triticum aestivum
MASEKDAALAPVPNDNPTIFDKIIKKEIPSTVVYEDEKVLAFRDINPQAPTHIVIIPKVKDGLTGLSKAEERHVEILGCLLYAAKVIAKQEGLEDGYRIVINDGPSGCQSVYHIHVHLLGGRQMNWPPG

SEQ ID NO: 26447 - DNA, 858 bp, Triticum aestivum
attaaaaggtggccgccgccgccgcccacccccaccacacacagagagaacacacgcaaggagcacgaggaggaggcaagggaagccgccgccgccgccccgtccctcctcgccggcccgccgcgacaggtttcaagatgtcaacctgcacgtttgcgacctcctgcgtgctcttgggcaatgctcgaacaaccgatgccccccagaaagcggtcaagagccgcctgagcttccttggccgaggcgccgtgcaggtgccgagcctgaggtcctcctctttcaagaagctggacgtctccgcggcggccacgtacaaggtgaagctggtgaccccggagggggacgagcacgagtttgaggcgccggacgacacctacatcctggactcggcggagacggcgggggtggagctgccctactcgtgccgggcgggggcatgctcgacctgcgcgggcaagattgaggcgggcgcggtggaccagtcggacgggtcgttcctggacgacgcgcagcaggagggctacgtgctgacgtgcgtcgcctaccccaagtcggactgcgtcatccacacccacaaggagggggacctgtattagggggcgtgccgtgctccgcccacatctctggtgccagttggttgtgtgttgggtagaagaagaaggtgtgtctgtctgtaaaaccttgatggttgtttatccccttcctggctgctgcctgtgtgcgtgcgtgctttggtcgttggtcggaggtggttaagattgttgggtgaagccactacacccacggatggagaaggcgaataaaatgagggaacagctcgctgtgactgtgacggcattataaagcggtttcatggtc

SEQ ID NO: 26448 - protein, 152 aa, Triticum aestivum
MSTCTFATSCVLLGNARTTDAPQKAVKSRLSFLGRGAVQVPSLRSSSFKKLDVSAAATYKVKLVTPEGDEHEFEAPDDTYILDSAETAGVELPYSCRAGACSTCAGKIEAGAVDQSDGSFLDDAQQEGYVLTCVAYPKSDCVIHTHKEGDLY

SEQ ID NO: 26449 - protein, 118 aa, Triticum aestivum
LKGGRRRRPPPPHTERTHARSTRRRQGKPPPPPRPSSPARRDRFQDVNLHVCDLLRALGQCSNNRCPPESGQEPPELPWPRRRAGAEPEVLLFQEAGRLRGGHVQGEAGDPGGGRARV

SEQ ID NO: 26450 - DNA, 2378 bp, Triticum aestivum
cgcggccgcgtcgacctaaccctagccgcctcccgcacgcttctcctccgcctcgagcagctcagggacgcgcgcagccatggcgacggagaccgagaccttcgccttccaggccgagatcaaccagctcctctcgctcatcatcaacacctcctactccaacaaggagatcttcctccgcgagctcatctccaactcctccgatgccttggacaagatcaggttcgagagcctcacggacaagagcaagctcgatgcgcagcccgagctcttcatccacatcatccccgacaaggcgaccagcacgctcacgatcgtcgacagcggcattggcatgaccaagtcggacctcgtcaacaacctcgggaccatcgccaggtcggggaccaaggagttcatggaggcactcgctgccggcgctgacgtgtccatgattgggcagttcggtgttgggttctactccgcctacctcgtcgccgagagggtcgtcgtcaccaccaagcacaacgacgacgagcagtacgtgtgggagtctcaggccggtggctccttcaccgtcactcgtgatacgtctggggagcagctcggcaggggtaccaagatggtgctctacctcaaggacgaccagatggaataccttgaggagcgccgcatcaaggatctagttaagaagcactctgagtttatcagctaccccatctccctgtggaccgagaagaccactgagaaggaaatttctgacgatgaagatgaggaggagaagaaggatactgaggagggcaaggttgaggatgttgatgaggagaaggaagagaaggaaaagaagaaaaagaagatcaaggaagtctctcatgagtggaacttggtcaacaagcagaagcctatctggatgaggaagccagaggagatcaacaaggaagagtatgctgctttctacaagagcttgaccaatgactgggaggagcatttggctgtcaagcacttctctgttgagggccagcttgagttcaaggctgtcctgtttgtgcccaagagggccccctttgacctcttcgacaacaagaagaaggccaacaacatcaagctgtatgtgcgccgtgtcttcatcatggacaactgtgaggagttgatccctgagtacctgagctttgtcaagggcattgttgattcagaggacttgcccctgaacatctcccgtgagaccctccagcagaacaagatcctcaaggtcatcaggaagaaccttttcaagaagtgcattgagctcttctttgagattgctgagaacaaggaggactacaacaatttctacgaggccttctccaagaacctcaagcttggcatccacgaggactcccagaacaggaccaagattgctgagcttctgaggtaccactccaccaagagtggtgatgagctgacgagcctcaaggactatgtgactaggatgaaggagggacagaacgagatctactacatcaccggtgagagcaagaaggctgtggagaactctcccttccttgagaagctgaagaagaagggctatgaggtcatctacatggttgacgccattgatgagtatgccattggtcagctcaaggagtttgagggcaagaagcttgtctctgccaccaaggagggtctgaagctcgatgagagcgaggacgagaagaagaaacaggaggagctcaaggagaagttcgaggggctgtgcaaggtcatcaaggaggtgctgggcgacaaggtggagaaggtcatcgtctctgaccgtgttgtggactccccttgctgtctggtgactggcgagaatgggtggacccccaacatggagaggatcatgaaggcccaggccttgagggactcgagcatggctggctacatgtcaagcaagaagaccatggagatcaaccctgagaacgccatcatggacgagctccccaagcgcgccgacgccgacaagagcgacaagtcagtcaaggacctggtgatgctgctcttcgagacctccctgctcacctccggcttcagcctggaggaccccaacaccttcggcaccaggatccaccgcatgctcaagcttggcctgagcattgacgaggacgatgaggcgcctgagaacgacaccgacatgccgcccctggaggacgacgctggtgagagcaagatggaggaggtcgactaagcgccaagtctgcctgtcgtcggatgttcatgccctgcaccgcctagttgtttttatctttagtgtcgacgttggatggtcgctgtatcggttttgtcttttggctggccaaacattaagcgcggctagctgtttgtggtactcgtggaacagttcgttattgttggttctattatatgttagctatatttctatt

SEQ ID NO: 26451 - protein, 700 aa, Triticum aestivum
MATETETFAFQAEINQLLSLIINTSYSNKEIFLRELISNSSDALDKIRFESLTDKSKLDAQPELFIHIIPDKATSTLTIVDSGIGMTKSDLVNNLGTIARSGTKEFMEALAAGADVSMIGQFGVGFYSAYLVAERVVVTTKHNDDEQYVWESQAGGSFTVTRDTSGEQLGRGTKMVLYLKDDQMEYLEERRIKDLVKKHSEFISYPISLWTEKTTEKEISDDEDEEEKKDTEEGKVEDVDEEKEEKEKKKKKIKEVSHEWNLVNKQKPIWMRKPEEINKEEYAAFYKSLTNDWEEHLAVKHFSVEGQLEFKAVLFVPKRAPFDLFDNKKKANNIKLYVRRVFIMDNCEELIPEYLSFVKGIVDSEDLPLNISRETLQQNKILKVIRKNLFKKCIELFFEIAENKEDYNNFYEAFSKNLKLGIHEDSQNRTKIAELLRYHSTKSGDELTSLKDYVTRMKEGQNEIYYITGESKKAVENSPFLEKLKKKGYEVIYMVDAIDEYAIGQLKEFEGKKLVSATKEGLKLDESEDEKKKQEELKEKFEGLCKVIKEVLGDKVEKVIVSDRVVDSPCCLVTGENGWTPNMERIMKAQALRDSSMAGYMSSKKTMEINPENAIMDELPKRADADKSDKSVKDLVMLLFETSLLTSGFSLEDPNTFGTRIHRMLKLGLSIDEDDEAPENDTDMPPLEDDAGESKMEEVD

SEQ ID NO: 26452 - protein, 615 aa, Triticum aestivum
MTKSDLVNNLGTIARSGTKEFMEALAAGADVSMIGQFGVGFYSAYLVAERVVVTTKHNDDEQYVWESQAGGSFTVTRDTSGEQLGRGTKMVLYLKDDQMEYLEERRIKDLVKKHSEFISYPISLWTEKTTEKEISDDEDEEEKKDTEEGKVEDVDEEKEEKEKKKKKIKEVSHEWNLVNKQKPIWMRKPEEINKEEYAAFYKSLTNDWEEHLAVKHFSVEGQLEFKAVLFVPKRAPFDLFDNKKKANNIKLYVRRVFIMDNCEELIPEYLSFVKGIVDSEDLPLNISRETLQQNKILKVIRKNLFKKCIELFFEIAENKEDYNNFYEAFSKNLKLGIHEDSQNRTKIAELLRYHSTKSGDELTSLKDYVTRMKEGQNEIYYITGESKKAVENSPFLEKLKKKGYEVIYMVDAIDEYAIGQLKEFEGKKLVSATKEGLKLDESEDEKKKQEELKEKFEGLCKVIKEVLGDKVEKVIVSDRVVDSPCCLVTGENGWTPNMERIMKAQALRDSSMAGYMSSKKTMEINPENAIMDELPKRADADKSDKSVKDLVMLLFETSLLTSGFSLEDPNTFGTRIHRMLKLGLSIDEDDEAPENDTDMPPLEDDAGESKMEEVD

SEQ ID NO: 26453 - protein, 594 aa, Triticum aestivum
MEALAAGADVSMIGQFGVGFYSAYLVAERVVVTTKHNDDEQYVWESQAGGSFTVTRDTSGEQLGRGTKMVLYLKDDQMEYLEERRIKDLVKKHSEFISYPISLWTEKTTEKEISDDEDEEEKKDTEEGKVEDVDEEKEEKEKKKKKIKEVSHEWNLVNKQKPIWMRKPEEINKEEYAAFYKSLTNDWEEHLAVKHFSVEGQLEFKAVLFVPKRAPFDLFDNKKKANNIKLYVRRVFIMDNCEELIPEYLSFVKGIVDSEDLPLNISRETLQQNKILKVIRKNLFKKCIELFFEIAENKEDYNNFYEAFSKNLKLGIHEDSQNRTKIAELLRYHSTKSGDELTSLKDYVTRMKEGQNEIYYITGESKKAVENSPFLEKLKKKGYEVIYMVDAIDEYAIGQLKEFEGKKLVSATKEGLKLDESEDEKKKQEELKEKFEGLCKVIKEVLGDKVEKVIVSDRVVDSPCCLVTGENGWTPNMERIMKAQALRDSSMAGYMSSKKTMEINPENAIMDELPKRADADKSDKSVKDLVMLLFETSLLTSGFSLEDPNTFGTRIHRMLKLGLSIDEDDEAPENDTDMPPLEDDAGESKMEEVD

SEQ ID NO: 26454 - DNA, 858 bp, Triticum aestivum
tgaggagtctaagaagcagccattgaagagaatgaaaagaggggcagaggcaagcaatccattgggaatacccctggaaaattgtgatacagagactcaacctagtatgcaagatacaaatatcgagcagacagttgatacaagggttccacggtccccaaacaaaggtaaattgcaaaaggaaggtcaaaggagaaagaagaggaaagaagtgaatagaaggaaaagcctgacagcatttggtcttgcgtggcaatctggcgtgagacgcagcacaagaatacggtccaggccattgcaggattggcttggcgaaaggctcctatatgggcgtatacatgacacaatggccacagtcatcggcgtgaaatcatattctcccagtcaagatggcaaggttgaattgagagtgaaatccttcgtgccagaacagtactcagatatggtagctcaagctgcaaagtattgaggttactggcctggacaagtctcactttgttccgggacaagtccttttgtggccaagagggtcggtagcctttcaggtgctttctcatgctctgccatctatctttctaaaagagatttgcacaatgtagtgcaaccatgctgttaacatccaagaccatgtagaaatatggatgtagtagtagagacagaagaattatcttcacctttgttagctgtttttagtgtcatctctggatgatatgatgtcaattgtctctagtttgtatatgcaggaagtcccttgtcgtatgataaaattatcgtactatgtttaaatgcgtcggaaccagctatggcctgccattttgtatgtctaggtgctatttgtataattgtgtcgcgttctcc

SEQ ID NO: 26455 - protein, 155 aa, Triticum aestivum
EESKKQPLKRMKRGAEASNPLGIPLENCDTETQPSMQDTNIEQTVDTRVPRSPNKGKLQKEGQRRKKRKEVNRRKSLTAFGLAWQSGVRRSTRIRSRPLQDWLGERLLYGRIHDTMATVIGVKSYSPSQDGKVELRVKSFVPEQYSDMVAQAAKY

SEQ ID NO: 26456 - protein, 145 aa, Triticum aestivum
MKRGAEASNPLGIPLENCDTETQPSMQDTNIEQTVDTRVPRSPNKGKLQKEGQRRKKRKEVNRRKSLTAFGLAWQSGVRRSTRIRSRPLQDWLGERLLYGRIHDTMATVIGVKSYSPSQDGKVELRVKSFVPEQYSDMVAQAAKY

SEQ ID NO: 26457 - protein, 120 aa, Triticum aestivum
MQDTNIEQTVDTRVPRSPNKGKLQKEGQRRKKRKEVNRRKSLTAFGLAWQSGVRRSTRIRSRPLQDWLGERLLYGRIHDTMATVIGVKSYSPSQDGKVELRVKSFVPEQYSDMVAQAAKY

SEQ ID NO: 26458 - DNA, 680 bp, Triticum aestivum
  misc_feature (587)..(587): n is a, c, g, or t
  misc_feature (589)..(589): n is a, c, g, or t
  misc_feature (640)..(640): n is a, c, g, or t
  misc_feature (649)..(649): n is a, c, g, or t
  misc_feature (666)..(666): n is a, c, g, or t
acacaaactcagagcattcccatccagcgcaaccgccgccaacaccactcctagcgagtcctcgccgccggagaagcagcaagcaagatggccggaaggaagggaggcgacaggaagaaggcggtgaccaggtccgtcaaggccgggctccagttccccgtcggccgcatcgggcgctacctcaagaagggccgctacgcgcagcgcgtcggctccggcgcccccgtctacctcgccgccgtcctcgagtacctcgccgctgaggttctggagcttgcaggcaacgcggccaaggacaacaagaagacccggatcatcccgcgacacctgctgctcgccgtccgcaacgaccaggagctcggaaggctgctcgccggcgtcaccatcgcccacggcggcgtgatccccaacatcaactccgtgctgctcccaaagaagtcccccgccgccgccgagaaggaggccaagtcgcccaagaagaagaccaccgccaagtcccccaagaagaaggtcgccgcccccatagcctagccagtgttgcttagatccattcctcatggactaagatgagatcctgtatgtaatgntntgtagtgcccgactgcccgttagtttcgtcgagcaaggatgacattgtatntgtgatttntatgacaatggcgaaanatgcaatcatttcg

SEQ ID NO: 26459 - protein, 147 aa, Triticum aestivum
MAGRKGGDRKKAVTRSVKAGLQFPVGRIGRYLKKGRYAQRVGSGAPVYLAAVLEYLAAEVLELAGNAAKDNKKTRIIPRHLLLAVRNDQELGRLLAGVTIAHGGVIPNINSVLLPKKSPAAAEKEAKSPKKKTTAKSPKKKVAAPIA

SEQ ID NO: 26460 - protein, 86 aa, Triticum aestivum
TNSEHSHPAQPPPTPLLASPRRRRSSKQDGRKEGRRQEEGGDQVRQGRAPVPRRPHRALPQEGPLRAARRLRRPRLPRRRPRVPRR

SEQ ID NO: 26461 - DNA, 932 bp, Triticum aestivum
  misc_feature (897)..(897): n is a, c, g, or t
aattcgcgaaatttcaaacccaatcgaacgcttccaaaccctaggcgagctgcgggcggcggccgctcgcgagcatccagccatcgatcgccatggcgccgcctcgcccccctccggcccgcggcggacgccgcccaccccctaagtccgcgcccctccgtccggaggaggagctgctcctcgaggcagcgtccgacggcgacctcgtcctcttcaaacggctggcgaggatgatggacggcgggcgcgggcgcgtcacggaggcggtagaggccgttgtggagtgcacggcgggggcgctgcacctcgccgccggccaaggggaattggcgatgtgcaggtacctggtcgaggagctccgggtggatatcaacgccatccacgacggaggtgaaacgcctctggcttatgcaattaatggtgcaaatatagctactgtgaagtatcttctggaccatggtgctgatccagataaagttgatgacaaaggatttacttctctccatattgcagctgaggaaggatattgcaatatagtggagctcttgctttctagaggggcttccgttgatgcattatctaatcgtggtacaccactgcaccttgctgctactaatggtcatcatcaaacagtgaagattttgttggaccacaacgctgattgcaataagattgtgaatggtgtctacacacctctccttgtatctatttatgctccgtcactaaaatgtgtgaagctactaatccaggctggtgctgatgtaaatggtgtgggtaatataacccccttaatagctgctgttgggttaactgagtgcatgaagtgcttattggaagctggtgctgacccaaacgtccctgatgaatttggcaggatgccaatagagtttgcggcantatgtggtacacgagaagatgttgagatcctattt

SEQ ID NO: 26462 - protein, 280 aa, Triticum aestivum
  misc_feature (269)..(269): Xaa can be any naturally occurring amino acid
MAPPRPPPARGGRRPPPKSAPLRPEEELLLEAASDGDLVLFKRLARMMDGGRGRVTEAVEAVVECTAGALHLAAGQGELAMCRYLVEELRVDINAIHDGGETPLAYAINGANIATVKYLLDHGADPDKVDDKGFTSLHIAAEEGYCNIVELLLSRGASVDALSNRGTPLHLAATNGHHQTVKILLDHNADCNKIVNGVYTPLLVSIYAPSLKCVKLLIQAGADVNGVGNITPLIAAVGLTECMKCLLEAGADPNVPDEFGRMPIEFAAXCGTREDVEILF

SEQ ID NO: 26463 - protein, 234 aa, Triticum aestivum
  misc_feature (223)..(223): Xaa can be any naturally occurring amino acid
MMDGGRGRVTEAVEAVVECTAGALHLAAGQGELAMCRYLVEELRVDINAIHDGGETPLAYAINGANIATVKYLLDHGADPDKVDDKGFTSLHIAAEEGYCNIVELLLSRGASVDALSNRGTPLHLAATNGHHQTVKILLDHNADCNKIVNGVYTPLLVSIYAPSLKCVKLLIQAGADVNGVGNITPLIAAVGLTECMKCLLEAGADPNVPDEFGRMPIEFAAXCGTREDVEILF

SEQ ID NO: 26464 - protein, 233 aa, Triticum aestivum
  misc_feature (222)..(222): Xaa can be any naturally occurring amino acid
MDGGRGRVTEAVEAVVECTAGALHLAAGQGELAMCRYLVEELRVDINAIHDGGETPLAYAINGANIATVKYLLDHGADPDKVDDKGFTSLHIAAEEGYCNIVELLLSRGASVDALSNRGTPLHLAATNGHHQTVKILLDHNADCNKIVNGVYTPLLVSIYAPSLKCVKLLIQAGADVNGVGNITPLIAAVGLTECMKCLLEAGADPNVPDEFGRMPIEFAAXCGTREDVEILF

SEQ ID NO: 26465 - DNA, 551 bp, Triticum aestivum
agaaaagaataccgcctccctaaaaaaactaggaaaaacagtctcctcaccggtccgtcgtcctcgccgtcgccctacccatctcgccggcgccgtcggggacccgcggggagcatggatgccatggaggaggatacgcctccagcgctaccgccaccgccaccgcctacgacgggcgcgaagcagccgccgtacaaggatcctgacgacgggaggcagcggttcctactggagctggagttcatccagtgcctcgccaaccccatctacatcaactatctagcgcagaatcggtactttgaggatgaggcgttcatcgggtatctcaagtacctcaagtattggcagcgtccggagtacatcaaatacataatgtatccgcactgccttttctttcttgagcttctccaaaatgcaaatttccgaaacgcaatggcacatccagcaaacaaggaagttgctcataggcagcaatatttcttctggaaaaactacaggaacaatagactgaagcacattctgccgcgttcttcttccgaaccaacttctgc

SEQ ID NO: 26466 - protein, 183 aa, Triticum aestivum
RKEYRLPKKTRKNSLLTGPSSSPSPYPSRRRRRGPAGSMDAMEEDTPPALPPPPPPTTGAKQPPYKDPDDGRQRFLLELEFIQCLANPIYINYLAQNRYFEDEAFIGYLKYLKYWQRPEYIKYIMYPHCLFFLELLQNANFRNAMAHPANKEVAHRQQYFFWKNYRNNRLKHILPRSSSEPTS

SEQ ID NO: 26467 - protein, 145 aa, Triticum aestivum
MDAMEEDTPPALPPPPPPTTGAKQPPYKDPDDGRQRFLLELEFIQCLANPIYINYLAQNRYFEDEAFIGYLKYLKYWQRPEYIKYIMYPHCLFFLELLQNANFRNAMAHPANKEVAHRQQYFFWKNYRNNRLKHILPRSSSEPTS

SEQ ID NO: 26468 - protein, 142 aa, Triticum aestivum
MEEDTPPALPPPPPPTTGAKQPPYKDPDDGRQRFLLELEFIQCLANPIYINYLAQNRYFEDEAFIGYLKYLKYWQRPEYIKYIMYPHCLFFLELLQNANFRNAMAHPANKEVAHRQQYFFWKNYRNNRLKHILPRSSSEPTS

SEQ ID NO: 26469 - DNA, 463 bp, Triticum aestivum
ccctactctttccctcgccgccgccgccgcctccttctcctcgggtttgcacagtcgtccaccatgccgaagcagatccacgagatcaaggacttcctgctgacggcgcgccggaaggacgcgcggtcggtgcggatcaagaggaccaaggacgccgtcaagttcaaggtgcgctgctccaggtacctctacacgctctgcgtcttcgacgccgacaaggccaacaagctcaagcagtccctcccaccaggtttgagcgtccaggaggtttaagcatcaagccagacaatgccttttctagtagcgggaatgttctatccatcttgctttagtaactgttagcaggctctccttgtttacccccattaagagagttttgatgtcccaagaatggaatgtaatgttgggagctatgtggttgaacctgtgaggatttttgtgttattttcacttgctggagaag

SEQ ID NO: 26470 - protein, 109 aa, Triticum aestivum
LLFPSPPPPPPSPRVCTVVHHAEADPRDQGLPADGAPEGRAVGADQEDQGRRQVQGALLQVPLHALRLRRRQGQQAQAVPPTRFERPGGLSIKPDNAFSSSGNVLSILL

SEQ ID NO: 26471 - protein, 90 aa, Triticum aestivum
PYSFPRRRRRLLLLGFAQSSTMPKQIHEIKDFLLTARRKDARSVRIKRTKDAVKFKVRCSRYLYTLCVFDADKANKLKQSLPPGLSVQEV

SEQ ID NO: 26472 - protein, 69 aa, Triticum aestivum
MPKQIHEIKDFLLTARRKDARSVRIKRTKDAVKFKVRCSRYLYTLCVFDADKANKLKQSLPPGLSVQEV

SEQ ID NO: 26473 - DNA, 864 bp, Triticum aestivum
gaaacaggaaacgataacgaaactcgcagagagggcggacatggcggcgaggagcgagaacgagtcggacggcgacgtgggcaccaaccccgccgaggggggctcgtccctgtccctgccgcctctagctgccggtccagccgtgtgcgtcctccggtccgccggggacttcgccggcggcgccttcgtcggatctatctttggatatggacaaggtttgctatctaagaagggtttgaagggctcactcggcaatgcagggtcttctgccaaaagttttgcagttctttctggcgtccagagtttggttttgtgcttgttgaggaagctgcgtgggaaagatgatatcatcaattccggcattgctggttgttgcacaggtcttgctttgagttttccaggtacaccacaagcgctgcttcagaactgcgccaccttcgcagcattctcatgcatcatggaggggctcaacaagcagcagaccgcgatggcgcacaccctcactgggaacgccttgacctttgcacacgacaatggcgcgggcgtcctccccccttcactctccccccaatcctcgatgcttccgatgctttcgcctcatgctgccaggccttggtcgccaagcctaagaagcactagacagcagcattaggagggagagagtgagatatgctcaggaaacctagctagctcctagcgttatgtaaattttgcttttggataatgtcgaaaatctagattgtttgctttttcagccgggtgttttttgtcgccgcgtttcgtggcgtgggcttgctttgttgatgatatgtcaaggatagattttgtttaccgggaagataagatgtcgtggaaaattttgcc

SEQ ID NO: 26474 - protein, 216 aa, Triticum aestivum
KQETITKLAERADMAARSENESDGDVGTNPAEGGSSLSLPPLAAGPAVCVLRSAGDFAGGAFVGSIFGYGQGLLSKKGLKGSLGNAGSSAKSFAVLSGVQSLVLCLLRKLRGKDDIINSGIAGCCTGLALSFPGTPQALLQNCATFAAFSCIMEGLNKQQTAMAHTLTGNALTFAHDNGAGVLPPSLSPQSSMLPMLSPHAARPWSPSLRSTRQQH

SEQ ID NO: 26475 - protein, 203 aa, Triticum aestivum
MAARSENESDGDVGTNPAEGGSSLSLPPLAAGPAVCVLRSAGDFAGGAFVGSIFGYGQGLLSKKGLKGSLGNAGSSAKSFAVLSGVQSLVLCLLRKLRGKDDIINSGIAGCCTGLALSFPGTPQALLQNCATFAAFSCIMEGLNKQQTAMAHTLTGNALTFAHDNGAGVLPPSLSPQSSMLPMLSPHAARPWSPSLRSTRQQH

SEQ ID NO: 26476 - DNA, 750 bp, Triticum aestivum
acatcctaatcgaaaagaaaaccagaaaccgcagaccgcaccaccaccgctccccatctcgatctaaagccgagggtttcgtccagctccgtcgccgcgacccaagccagagccagccccaccccagccagccagccatgccgaagaacaagggtaagggaggcaagaaccgcaagaggggcaagaacgaggccgacgacgacaagcgcgagctggtgttcaaggaggacgggcaggagtacgcgcaggtgacgcggatgctcggcaacgggcgctgcgaggccatctgcgtcgacggcaccaagcgcctctgccacatccggggcaagatgcacaagaaggtctggatcgccgccggggacatcgtcctcgtcggcctccgcgactaccaggacgacaaggccgacgtcatcctcaagtacatgaacgacgaggcccgcctgctcaaggcctacggggagctccccgacacgctccgcctcaacgagggcgtcgacgtcgacggccccgaggagggcgagggcgacagcgactacatccagttcgaggacgaggacatcgacaagatctaagcttttttcccctcctcctccctcgctcgatatactttgtgttctattctgttctaatagcgtccgtgtctgtctgtgtcggtcggtcggtgggctgttgtggattgatggatttggtaacgagaaatcgttgtgatttgaggtgcttaaataattgtcggattatagtgttcgtcgt

SEQ ID NO: 26477 - protein, 189 aa, Triticum aestivum
ILIEKKTRNRRPHHHRSPSRSKAEGFVQLRRRDPSQSQPHPSQPAMPKNKGKGGKNRKRGKNEADDDKRELVFKEDGQEYAQVTRMLGNGRCEAICVDGTKRLCHIRGKMHKKVWIAAGDIVLVGLRDYQDDKADVILKYMNDEARLLKAYGELPDTLRLNEGVDVDGPEEGEGDSDYIQFEDEDIDKI

SEQ ID NO: 26478 - protein, 144 aa, Triticum aestivum
MPKNKGKGGKNRKRGKNEADDDKRELVFKEDGQEYAQVTRMLGNGRCEAICVDGTKRLCHIRGKMHKKVWIAAGDIVLVGLRDYQDDKADVILKYMNDEARLLKAYGELPDTLRLNEGVDVDGPEEGEGDSDYIQFEDEDIDKI

SEQ ID NO: 26479 - protein, 104 aa, Triticum aestivum
MLGNGRCEAICVDGTKRLCHIRGKMHKKVWIAAGDIVLVGLRDYQDDKADVILKYMNDEARLLKAYGELPDTLRLNEGVDVDGPEEGEGDSDYIQFEDEDIDKI

SEQ ID NO: 26480 - DNA, 1591 bp, Triticum aestivum
ccttctcttgttggcgtcgcctccatccggctcggcttcttccacccgtacccgtagattgatttccatccgggtcccttccgttccacggcaagtatccgtcgcacgattcaggtcccccccctcgccgtcgtccatggcgctgcagtacgtggaggcgcagcggcaggcgcggccggacctcgccgactggtacgccgacctcgccgacctctaccagcgcaagctctggcaccagctcaccctcaagctcgaccaattcctccagatcccggccgcacagactggcgacacgctcatacagctctacaacaacttcatctccgatttcgaaacaaagatcaatttgctcaaacttgcccagtttgccgtcatagcctcgcgccaatatcccgacaaggatgccgccatcgccttcctcgaggggataatcgccaagcttcgcgaaaccagggagctgcggatcaatgagcctatccttcatgtcaagatgcagattgcggcaattcacctcgacaaagggaaccacaaggagtgcaagaacctgctggaggaagggaagaccaccctggatggcatgactgatgtggatcctacggtccacgctagcttctactggatatcgtctcagtaccataagtcgctccaagagtttgctgagttctataagaacgcgcttctctatctggcctacacaaccgtagggtctctctcagggtcattcaagctggacttggcatttgacctttcccttgcagccttgctgggggacaacatctacaacttcggggaattgttagctcaccctattatcaatagtcttattgggaccaaggtggagtgggtctatcacatgttacaagcgttcaacaccggcaacctagctctctaccaagagctttgtggggttcacaatgctgctcttagtgcacagcctgcattggtgcagaatgaacagaaactgcttgagaagatcaatattctgtgtctgatggagataatcttcagccggccatcagaagatagaactatcccattaagtgttattgccaagcagactaagctttcaaccagcgaagtggaatgtcttcttatgaagagcctctcggttcatctcatagaaggaatcatcgatgaagtcgacagcacggttcatgtttcgtgggtccagcctagagtacttggcatcccacaggtgaaggcgttgcgtgagcgcctggactcgtgggtcggcaaagtgcataccacactgttgtccatcgaggcagagacccccgatctcgtggcggcttagcttgttggccaaaaatgattctgaataggctttggttgtcagcaaggcggcggtgtaaaacgagagaccatctggctgtgctgcgcgtgctagctgctcttttcttgataacgaaaacttgttgccttgggtgtcctattggtctggacttgtaacttccttctatcatcacggatcgaaacagagaaatcataccggcagagggtgtcactagttttttcctgttgaactttataatctgtaatccagcggtttgacattttttcttcttccattgtgctatggacatggactcgc

SEQ ID NO: 26481 - protein, 430 aa, Triticum aestivum
LLLLASPPSGSASSTRTRRLISIRVPSVPRQVSVARFRSPPSPSSMALQYVEAQRQARPDLADWYADLADLYQRKLWHQLTLKLDQFLQIPAAQTGDTLIQLYNNFISDFETKINLLKLAQFAVIASRQYPDKDAAIAFLEGIIAKLRETRELRINEPILHVKMQIAAIHLDKGNHKECKNLLEEGKTTLDGMTDVDPTVHASFYWISSQYHKSLQEFAEFYKNALLYLAYTTVGSLSGSFKLDLAFDLSLAALLGDNIYNFGELLAHPIINSLIGTKVEWVYHMLQAFNTGNLALYQELCGVHNAALSAQPALVQNEQKLLEKINILCLMEIIFSRPSEDRTIPLSVIAKQTKLSTSEVECLLMKSLSVHLIEGIIDEVDSTVHVSWVQPRVLGIPQVKALRERLDSWVGKVHTTLLSIEAETPDLVAA

SEQ ID NO: 26482 - protein, 385 aa, Triticum aestivum
MALQYVEAQRQARPDLADWYADLADLYQRKLWHQLTLKLDQFLQIPAAQTGDTLIQLYNNFISDFETKINLLKLAQFAVIASRQYPDKDAAIAFLEGIIAKLRETRELRINEPILHVKMQIAAIHLDKGNHKECKNLLEEGKTTLDGMTDVDPTVHASFYWISSQYHKSLQEFAEFYKNALLYLAYTTVGSLSGSFKLDLAFDLSLAALLGDNIYNFGELLAHPIINSLIGTKVEWVYHMLQAFNTGNLALYQELCGVHNAALSAQPALVQNEQKLLEKINILCLMEIIFSRPSEDRTIPLSVIAKQTKLSTSEVECLLMKSLSVHLIEGIIDEVDSTVHVSWVQPRVLGIPQVKALRERLDSWVGKVHTTLLSIEAETPDLVAA

SEQ ID NO: 26483 - protein, 267 aa, Triticum aestivum
MQIAAIHLDKGNHKECKNLLEEGKTTLDGMTDVDPTVHASFYWISSQYHKSLQEFAEFYKNALLYLAYTTVGSLSGSFKLDLAFDLSLAALLGDNIYNFGELLAHPIINSLIGTKVEWVYHMLQAFNTGNLALYQELCGVHNAALSAQPALVQNEQKLLEKINILCLMEIIFSRPSEDRTIPLSVIAKQTKLSTSEVECLLMKSLSVHLIEGIIDEVDSTVHVSWVQPRVLGIPQVKALRERLDSWVGKVHTTLLSIEAETPDLVAA

SEQ ID NO: 26484 - DNA, 645 bp, Triticum aestivum
aaccaaaaccttctcttccaccctactgcgaaccaagtgggaagccatggccaccatcaccaccatggccttcatggccacctttccggctcccagaaccgttgcgcagcccccggccacgctgccatctcgcccgaacgtcgtgtcgttcgccgcccgggcgatgcgcgcgcacggccgacggctggtggccgtggctggctcgccgtccacgcccccggagctggcgcagaaggtgacggagagcatcaagcaggcggaggagacgtgcgcgggggacccggagggcggcgagtgcgtggcggcgtgggacgaggtggaggagctcagcacggcggccagccacgcgcgcgaccgcaagaaggagcacagcgacccgctggaggagttctgcgaggacaaccccgagaccgacgagtgccgcacctacgacagctagccgtgcgtagctgctcgtgccggcttctgccattgccggacgtcatcatgagcggtagcttctggcttagcttgcgcggcacattggcatcttgggcgtgtaagtttggtttgttgctttatttggcttagcttacaataaagcaagcagagatttgtttgtaaaattataagatactataatgtttattaggagttctgagtgtc

SEQ ID NO: 26485 - protein, 189 aa, Triticum aestivum
NQNLLFHPTANQVGSHGHHHHHGLHGHLSGSQNRCAAPGHAAISPERRVVRRPGDARARPTAGGRGWLAVHAPGAGAEGDGEHQAGGGDVRGGPGGRRVRGGVGRGGGAQHGGQPRARPQEGAQRPAGGVLRGQPRDRRVPHLRQLAVRSCSCRLLPLPDVIMSGSFWLSLRGTLASWACKFGLLLYLA

SEQ ID NO: 26486 - protein, 145 aa, Triticum aestivum
TKTFSSTLLRTKWEAMATITTMAFMATFPAPRTVAQPPATLPSRPNVVSFAARAMRAHGRRLVAVAGSPSTPPELAQKVTESIKQAEETCAGDPEGGECVAAWDEVEELSTAASHARDRKKEHSDPLEEFCEDNPETDECRTYDS

SEQ ID NO: 26487 - protein, 130 aa, Triticum aestivum
MATITTMAFMATFPAPRTVAQPPATLPSRPNVVSFAARAMRAHGRRLVAVAGSPSTPPELAQKVTESIKQAEETCAGDPEGGECVAAWDEVEELSTAASHARDRKKEHSDPLEEFCEDNPETDECRTYDS

SEQ ID NO: 26488 - DNA, 1241 bp, Triticum aestivum
gaccgcaaaacgaaagcaagccgccggccctagttcgtttcagtgcctccgcagtctccaccacacggacttgccaccatgacggcggctcctcttttatcgttgacggatgcggcgacggcgacggcgacggcggcgctggcccccggccgagcgcccgccagagcccgcattcaggccgccccccgccaccccgccaccgtctcgctgagatgccaccgcgctcggcccctaaccgcggccgccgccacgggcgactcgccgtcgtccgccgcgttccacggcgagtgcttcgtcgtcggggacaacatcgacaccgaccagatcatcccggccgagcacctgaccctggtgccgtccaagcccgacgagtaccgcaagctcggctccttcgccttcgtgggcctccccgccgcggcctacccgattccgttcgtggcccctggcgaggagtcgtcccgctacgccgtcatcatcggcggcgccaacttcgggtgcggctcctcccgcgagcacgcgcccgtcgcgctcggagccgccggcgcgcgcgccgttgtggccgagggctacgcccgcatcttcttccgcaattccgtggccaccggggaggtgtaccccctggagctcgcggacagtggtgccagcaaggagtgcaagacaggggatgtggtcacagtggacctcgataactcggtcttgattaaccacacatccggaaagcagtacaagctgaagcctattggtgatgcaggcccggttattgaggccggggggatcttcgcttatgctcggaagactgggatgatcgcgtccaaatctgcttgaacaaaaagtaagctttatctgctgtcagattggttgaggccttgcgggtggcaagtaagactggtttatgaataagagtcgctgcacctctcccttcggtggtgaggtgtgattgtccagcagttttgctactactttggcattggcttgcaccagtaattgtgcgcaaaaactcggtttgagagtgctgaactttgttgtattgaaatgttacacccatgtaatacagtagttttgtttgcacctgtcatctttgatgtcaagtgtactcatgcactagcttatgtttattgattgcagtggtggattgtatcagttacttctgatgttcctattcagtgacaaaaatcaaattcacctgcttttgtatttacgaaagcgattggcgaaacaataagttaatttcgtcttccctg

SEQ ID NO: 26489 - protein, 248 aa, Triticum aestivum
MTAAPLLSLTDAATATATAALAPGRAPARARIQAAPRHPATVSLRCHRARPLTAAAATGDSPSSAAFHGECFVVGDNIDTDQIIPAEHLTLVPSKPDEYRKLGSFAFVGLPAAAYPIPFVAPGEESSRYAVIIGGANFGCGSSREHAPVALGAAGARAVVAEGYARIFFRNSVATGEVYPLELADSGASKECKTGDVVTVDLDNSVLINHTSGKQYKLKPIGDAGPVIEAGGIFAYARKTGMIASKSA

SEQ ID NO: 26490 - protein, 228 aa, Triticum aestivum
PQNESKPPALVRFSASAVSTTRTCHHDGGSSFIVDGCGDGDGDGGAGPRPSARQSPHSGRPPPPRHRLAEMPPRSAPNRGRRHGRLAVVRRVPRRVLRRRGQHRHRPDHPGRAPDPGAVQARRVPQARLLRLRGPPRRGLPDSVRGPWRGVVPLRRHHRRRQLRVRLLPRARARRARSRRRARRCGRGLRPHLLPQFRGHRGGVPPGARGQWCQQGVQDRGCGHSGPR

SEQ ID NO: 26491 - protein, 158 aa, Triticum aestivum
MPPRSAPNRGRRHGRLAVVRRVPRRVLRRRGQHRHRPDHPGRAPDPGAVQARRVPQARLLRLRGPPRRGLPDSVRGPWRGVVPLRRHHRRRQLRVRLLPRARARRARSRRRARRCGRGLRPHLLPQFRGHRGGVPPGARGQWCQQGVQDRGCGHSGPR

SEQ ID NO: 26492 - DNA, 630 bp, Triticum aestivum
ttacctagaacatcctaatcgaaaatgatcaccaagggtgtgatcgaaccaatctccgacgttttcgtcaatctggtcaacgctgactttaccgcgaagcagaggggcatccgtgtcagcgaggagaaaatcgtgatggatggctcacccgagacacctctcgagtacattcaggttcagatagccaatgtggagtccaaattccccagtgcgatatgcgactccggactggtcacggtggaggggcgggtgaaggacggcatccctcaccttaccaaggtcggagcgttcgaggtggacgtgagcatggagggcagcctgatcctctgcaggcaggtcgaccagcccggcatgatcgggtcggtcggaagcgtcctgggcgaggagaacgtcaacgtcagcttcatgagcgtcgggaggatcgctcctcgcaagacggctgtcatggcgatcggtgttgatgaggagcccagcaaggccacgctgaccaagatcggggagatcccggcgatcgaagagtttgtcttcctcaagctctaggcgcatatgatttgcaagcttgattgtgcaattttggcgtagctagctggttggtcagggtctaggtgttgtgtggtcgttgggcggaat

SEQ ID NO: 26493 - protein, 171 aa, Triticum aestivum
MITKGVIEPISDVFVNLVNADFTAKQRGIRVSEEKIVMDGSPETPLEYIQVQIANVESKFPSAICDSGLVTVEGRVKDGIPHLTKVGAFEVDVSMEGSLILCRQVDQPGMIGSVGSVLGEENVNVSFMSVGRIAPRKTAVMAIGVDEEPSKATLTKIGEIPAIEEFVFLKL

SEQ ID NO: 26494 - protein, 134 aa, Triticum aestivum
MDGSPETPLEYIQVQIANVESKFPSAICDSGLVTVEGRVKDGIPHLTKVGAFEVDVSMEGSLILCRQVDQPGMIGSVGSVLGEENVNVSFMSVGRIAPRKTAVMAIGVDEEPSKATLTKIGEIPAIEEFVFLKL

SEQ ID NO: 26495 - DNA, 853 bp, Triticum aestivum
  misc_feature (317)..(317): n is a, c, g, or t
  misc_feature (444)..(444): n is a, c, g, or t
  misc_feature (466)..(466): n is a, c, g, or t
tctacgagaactacaagaggatcttcgtgcctgagggccatccgctgaagggcgaggcgaacgagccgctgcgtgtcaatgtgctcttcaagcacatccaggacatgctgacgggtgatagtgcagtgctcgctgagaccggtgactcctggttcaactgccagaagctcaagctgcccgagggctgcgggtatgaattccaaatgcagtatggctcgattggatggtcagtgggtgcattgctcgggtacgcgcaagggacgagtgacaagcgtgtcatagcctgcattggtgatgggagcttccaggtgacagcncaggatgtgtcaactatgctgcggtgcgaacagaacagcataatcttcctgatcaacaatggcgggtacacgatcgaggtggagatccacgacgggccttacaatgtcatcaagaactggaactacnccgcccttgtggaggccatccncaacggggagggcaaatgctggactgccaaggtgaagtgcgaggaggagctgacggcggcgatagagacggcgctgggggagaagaaggactctctgtgcttcatcgaggtgatcgcgcacaaggacgacaccagcaaagagcttctggaatggggctccagggtctctgctgccaactccaggccacccaacccccagtagaccaagcacgcctgcatcactagtagtcgcatccagcagcacgttgccatcaaataatgttgaacagtttatctttgctcttctgttatgttcttagttttgtgcctactagttacttgtgagctgtggccatcgcctgtgttctatcctgccaatgctaagaagatcatgagatatttttagct

SEQ ID NO: 26496 - protein, 221 aa, Triticum aestivum
  misc_feature (105)..(105): Xaa can be any naturally occurring amino acid
  misc_feature (148)..(148): Xaa can be any naturally occurring amino acid
  misc_feature (155)..(155): Xaa can be any naturally occurring amino acid
YENYKRIFVPEGHPLKGEANEPLRVNVLFKHIQDMLTGDSAVLAETGDSWFNCQKLKLPEGCGYEFQMQYGSIGWSVGALLGYAQGTSDKRVIACIGDGSFQVTXQDVSTMLRCEQNSIIFLINNGGYTIEVEIHDGPYNVIKNWNYXALVEAIXNGEGKCWTAKVKCEEELTAAIETALGEKKDSLCFIEVIAHKDDTSKELLEWGSRVSAANSRPPNPQ

SEQ ID NO: 26497 - protein, 187 aa, Triticum aestivum
  misc_feature (71)..(71): Xaa can be any naturally occurring amino acid
  misc_feature (114)..(114): Xaa can be any naturally occurring amino acid
  misc_feature (121)..(121): Xaa can be any naturally occurring amino acid
MLTGDSAVLAETGDSWFNCQKLKLPEGCGYEFQMQYGSIGWSVGALLGYAQGTSDKRVIACIGDGSFQVTXQDVSTMLRCEQNSIIFLINNGGYTIEVEIHDGPYNVIKNWNYXALVEAIXNGEGKCWTAKVKCEEELTAAIETALGEKKDSLCFIEVIAHKDDTSKELLEWGSRVSAANSRPPNPQ

SEQ ID NO: 26498 - protein, 154 aa, Triticum aestivum
  misc_feature (38)..(38): Xaa can be any naturally occurring amino acid
  misc_feature (81)..(81): Xaa can be any naturally occurring amino acid
  misc_feature (88)..(88): Xaa can be any naturally occurring amino acid
MQYGSIGWSVGALLGYAQGTSDKRVIACIGDGSFQVTXQDVSTMLRCEQNSIIFLINNGGYTIEVEIHDGPYNVIKNWNYXALVEAIXNGEGKCWTAKVKCEEELTAAIETALGEKKDSLCFIEVIAHKDDTSKELLEWGSRVSAANSRPPNPQ

SEQ ID NO: 26499 - DNA, 824 bp, Triticum aestivum
atataaatatctttgcctgctggccctcatccctcccctctattgccgccgccgccgctcccagctcgcgctccctcgcccagctgccgccgccgccgcctcgtcggagttcttcctacccctttcgccaacatgggtaagacacgtggtatgggagctgggcgcaagctcaagacccaccgcaggaaccagaggtgggctgacaaggcatacaagaagagccacttgggtaacgagtggaagaaacccttcgccgggtcatctcacgccaagggcattgttttggagaagatcggtattgaggccaagcagcctaactctgccatccgtaagtgtgctcgtgtgcagcttgtgaagaacggaaagaagattgctgccttcgttcccaatgatggttgcctgaacttcatcgaggagaatgacgaggtgctgattgctggattcggtcgtaaggggcatgccgtgggagatattcccggtgtccggttcaaggtcgtcaaggtgtctggtgtgtctctgcttgccctcttcaaagagaagaaggagaagcccaggtcttagattgccgttgcatggagtagacagtatgtcggcctttagatgttgaaggaggagggtggttcctttgtgtttacagcacttttaagttgataacttatgatcgtgttggtgaaaactatgcctttgtcacattttgctcctgttaagggaaagtgctactgttgtgagttttgttccccagtttgagatgaaaaaaaaaaaaaaaaaagcttatcgataccgtcgaccttgttaaacacaataaagtgggaactggagggggg

SEQ ID NO: 26500 - protein, 142 aa, Triticum aestivum
MGKTRGMGAGRKLKTHRRNQRWADKAYKKSHLGNEWKKPFAGSSHAKGIVLEKIGIEAKQPNSAIRKCARVQLVKNGKKIAAFVPNDGCLNFIEENDEVLIAGFGRKGHAVGDIPGVRFKVVKVSGVSLLALFKEKKEKPRS

SEQ ID NO: 26501 - protein, 136 aa, Triticum aestivum
MGAGRKLKTHRRNQRWADKAYKKSHLGNEWKKPFAGSSHAKGIVLEKIGIEAKQPNSAIRKCARVQLVKNGKKIAAFVPNDGCLNFIEENDEVLIAGFGRKGHAVGDIPGVRFKVVKVSGVSLLALFKEKKEKPRS

SEQ ID NO: 26502 - protein, 117 aa, Triticum aestivum
YKYLCLLALIPPLYCRRRRSQLALPRPAAAAAASSEFFLPLSPTWVRHVVWELGASSRPTAGTRGGLTRHTRRATWVTSGRNPSPGHLTPRALFWRRSVLRPSSLTLPSVSVLVCSL

SEQ ID NO: 26503 - DNA, 1277 bp, Triticum aestivum
tacctttccaccccctccattccacccagacagcccgacccgctcctcagctcacctcacgccgtaacctaagccaggttttcctcctccacctccacctccaccggcatcacctcggacgcgcggcggcgtgcagccatggcgatggtggcacaggcgggcttcggcctcacccgcgtcgtcatgctcgtcggcgcgggcgtggccggctccgtcgtcctacgaaacggccgcctctcggagatcctcaccgagatacaggagtttctggagaagggggagatgggtaagggaggaggcggtggtgcggaccacggcatcaacgacgcgctcaacgaggtgcgccaacttgctatgcaggtacgcaatctaggttctccacgttcgataactgttctcagtggaggttctggacaaacaggagtatcaggactaatagtacctgcagcaactgttggagcactgggttatggttatatgtggtggaaaggcatctcctttggggacttaatgtatgtcaccaagcaaaacatggctaatgttgtttcaaatatgactaaacatctggagcaagttcagagctctcttgctgctgctaaaaagcatttgacacaacgcattgagaagttggatgacaaattggatcagcagaaggcgctttctgggcaaataaaagatgatgttactggcgcacgactgaagcttgagaatattggttcagagattaagaacatcaaagaattggtctggggactggatgagaagatggattcaatggaagccaaacagaatttttcatgcgctggtgtgatgtacctctgccaattcatagagcaaagtggtgggaaactccctgaacgcctggaaggcattgaaccatcagcgaagcgatttgaaacaattggcatacaggggttgcaactagccatagaaacagggaattttagtgatttcagcaatgctgattccactgacaagataagcaggtccaactcgttaaagtctgccaactaattttcttcggggttggcgagacatgtatccagattcgttacttagtggaacattgtaaagggagattcttgctggataaaatgtaaagagtcccagcctttttgttatttgcttgcaggaagtgctgtttgttaaatttgaaaacgtgtgcgaagtagtagctactatggaatctagaccagatgttattctggcatcacttatgccttgcatttttatgcaatacttgccgtaaataaatggacgacacttcagtttccttg

SEQ ID NO: 26504 - protein, 291 aa, Triticum aestivum
MAMVAQAGFGLTRVVMLVGAGVAGSVVLRNGRLSEILTEIQEFLEKGEMGKGGGGGADHGINDALNEVRQLAMQVRNLGSPRSITVLSGGSGQTGVSGLIVPAATVGALGYGYMWWKGISFGDLMYVTKQNMANVVSNMTKHLEQVQSSLAAAKKHLTQRIEKLDDKLDQQKALSGQIKDDVTGARLKLENIGSEIKNIKELVWGLDEKMDSMEAKQNFSCAGVMYLCQFIEQSGGKLPERLEGIEPSAKRFETIGIQGLQLAIETGNFSDFSNADSTDKISRSNSLKSAN

SEQ ID NO: 26505 - protein, 289 aa, Triticum aestivum
MVAQAGFGLTRVVMLVGAGVAGSVVLRNGRLSEILTEIQEFLEKGEMGKGGGGGADHGINDALNEVRQLAMQVRNLGSPRSITVLSGGSGQTGVSGLIVPAATVGALGYGYMWWKGISFGDLMYVTKQNMANVVSNMTKHLEQVQSSLAAAKKHLTQRIEKLDDKLDQQKALSGQIKDDVTGARLKLENIGSEIKNIKELVWGLDEKMDSMEAKQNFSCAGVMYLCQFIEQSGGKLPERLEGIEPSAKRFETIGIQGLQLAIETGNFSDFSNADSTDKISRSNSLKSAN

SEQ ID NO: 26506 - protein, 276 aa, Triticum aestivum
MLVGAGVAGSVVLRNGRLSEILTEIQEFLEKGEMGKGGGGGADHGINDALNEVRQLAMQVRNLGSPRSITVLSGGSGQTGVSGLIVPAATVGALGYGYMWWKGISFGDLMYVTKQNMANVVSNMTKHLEQVQSSLAAAKKHLTQRIEKLDDKLDQQKALSGQIKDDVTGARLKLENIGSEIKNIKELVWGLDEKMDSMEAKQNFSCAGVMYLCQFIEQSGGKLPERLEGIEPSAKRFETIGIQGLQLAIETGNFSDFSNADSTDKISRSNSLKSAN

SEQ ID NO: 26507 - DNA, 729 bp, Triticum aestivum
cattatagagggcgaggagcatcatcatctcctacagtcccaagatcccaaccccatctccaaccttcccccttcccctgttcccaaatccgcagtcccgcgcgccgcgatggaggcgagcaagctcaaggcggccaggctcctggagcagatgagcgctcacctcgccaccgacgccggcaaagagatcgccaacaaggtcggtttcgtctaccagctcaacatctcgcccaagaagatgggcgtcgacgaggagatcttcgtcgtggacctcaagaagggcgccgtctccacagggaagtacgaagggacgccggacgcggccttcaccttcacagacgacgacttcctcgccatcgccagcggcaagctgaacccgcagatggcgttcatccggggtaagctgaagatcaaggggagcataagcgccgcgcagaagttcacgccggacatcttccccaagccgtccaagttgtagaaggccggattgccatgccttgccctggtgatcggggagctccggtgatcggttaataaaagaatctagttgtgttcgcggtgacaatttggtgggattgttactggtaaggagtttgtttacctagaaccaccacacgaacaacagaggtttcagtcagtgtctggagtgaaattcgttttctttggttgagaaggagaatactaggtacgaatcgatgtgtattgtgacgatgatgataacctttctcg

SEQ ID NO: 26508 - protein, 158 aa, Triticum aestivum
IIEGEEHHHLLQSQDPNPISNLPPSPVPKSAVPRAAMEASKLKAARLLEQMSAHLATDAGKEIANKVGFVYQLNISPKKMGVDEEIFVVDLKKGAVSTGKYEGTPDAAFTFTDDDFLAIASGKLNPQMAFIRGKLKIKGSISAAQKFTPDIFPKPSKL

SEQ ID NO: 26509 - protein, 133 aa, Triticum aestivum
HYRGRGASSSPTVPRSQPHLQPSPFPCSQIRSPARRDGGEQAQGGQAPGADERSPRHRRRQRDRQQGRFRLPAQHLAQEDGRRRGDLRRGPQEGRRLHREVRRDAGRGLHLHRRRLPRHRQRQAEPADGVHPG

SEQ ID NO: 26510 - protein, 122 aa, Triticum aestivum
MEASKLKAARLLEQMSAHLATDAGKEIANKVGFVYQLNISPKKMGVDEEIFVVDLKKGAVSTGKYEGTPDAAFTFTDDDFLAIASGKLNPQMAFIRGKLKIKGSISAAQKFTPDIFPKPSKL

SEQ ID NO: 26511 - DNA, 535 bp, Triticum aestivum
gtcctttcttatcccaaacacaacaactcgtgtagctctcccctggtctaagcagaggcatttcaacgaacatgtcgctcgtcacagcttttctggcgggctcagcggcgccggcggtcgcgccacggtccgcccgcccgtcggtgggcttctttggggtcggcggagggtgcgcgctgtcggtggagtgctcgtcgcggccgcagaagaaagggaccaagcaccatatgaagacgcggcccaagaagacgcagcggtgggacatcaagcgccgccccattcagtacgagccgctgccggcgcttcccgatgactggacgctcgtcgccgccggtgagaaggaagatgcggcgccgcaggacgaggagaccacgcccgctgctgccgttgaggtcgaggtggtcgccgcccctgccgcccctgccgccgcagactgacgccgtgaagtccactgtgtcctctctgtattttatttccttcaactctccgcacgcatggtttttgcttgagattattaaccaatgctacactttgc

SEQ ID NO: 26512 - protein, 121 aa, Triticum aestivum
MSLVTAFLAGSAAPAVAPRSARPSVGFFGVGGGCALSVECSSRPQKKGTKHHMKTRPKKTQRWDIKRRPIQYEPLPALPDDWTLVAAGEKEDAAPQDEETTPAAAVEVEVVAAPAAPAAAD

SEQ ID NO: 26513 - protein, 103 aa, Triticum aestivum
SFLIPNTTTRVALPWSKQRHFNEHVARHSFSGGLSGAGGRATVRPPVGGLLWGRRRVRAVGGVLVAAAEERDQAPYEDAAQEDAAVGHQAPPHSVRAAAGASR

SEQ ID NO: 26514 - protein, 75 aa, Triticum aestivum
MTGRSSPPVRRKMRRRRTRRPRPLLPLRSRWSPPLPPLPPQTDAVKSTVSSLYFISFNSPHAWFLLEIINQCYTL

SEQ ID NO: 26515 - DNA, 620 bp, Triticum aestivum
gcacagactcgagtcgtcttcttcctctgctcttgctcggatcccctaccctgctcctcaccccaccccgcctctcgaggcgcggcacagcacggaggagtcggcggagatgtcgggcgtgacggcggatgaggacaagaagcccgcgggcgacggcggaggcgcccacatcaacctcaaggtcaaggggcaggatggcaatgaggttttcttccgcatcaagagatcgacacagctgaagaagctgatgaacgcctactgcgaccgtcagtctgtggatctcaactccattgctttccttttcgatggtcgtaggctccgtggtgagcagacccctgatgagctggagatggaggaaggcgacgagatcgacgccatgcttcaccagaccggagggtgctttcctcgcccttagaaggagcttgcttgcagcctggctgttctatgtcgtatgctacctttagaactagagtaaaatgtaagaagtgaaagaacttgtgaggctatggttctgtgccataacctgagggggtctggaggtgaaagaacatcggagtactgttgatgtcgtgactgaagtatcatccattgcctaatatatcatgccttgttgtgttcct

SEQ ID NO: 26516 - protein, 137 aa, Triticum aestivum
HRLESSSSSALARIPYPAPHPTPPLEARHSTEESAEMSGVTADEDKKPAGDGGGAHINLKVKGQDGNEVFFRIKRSTQLKKLMNAYCDRQSVDLNSIAFLFDGRRLRGEQTPDELEMEEGDEIDAMLHQTGGCFPRP

SEQ ID NO: 26517 - protein, 101 aa, Triticum aestivum
MSGVTADEDKKPAGDGGGAHINLKVKGQDGNEVFFRIKRSTQLKKLMNAYCDRQSVDLNSIAFLFDGRRLRGEQTPDELEMEEGDEIDAMLHQTGGCFPRP

SEQ ID NO: 26518 - DNA, 984 bp, Triticum aestivum
acctagaacatcctaatcgaaaaccagcccccactccccattccccattcccccctcccccgccgtctcgtcccagctcgccctccagaggttttagtcttcctccatggcggccctcatcaagctcggaagccttcttaggcagagtgctgtggctagcagtgcctccaccggctcggctcctgccctgttcaacgctgcccgcttcatgtgcgccggccagcctgctgatggctccaagcttttcgtcggtggtctcgcctgggctactgatgatcattcgctgaaggaggcgtttcaatgctttggtgaggtcgttgaagctcgtgttatcactgacagagagactggaaggtctagagggtttggttttgtgagcttcgccagcggcgaggatgcaaagagtgctgcagaaaacatggacggcaaggagcttgcggggaggaacgtccgtgtgaacttcgccaacgagcgaccttcgggtggtggcggcggcggcggcttctctcgtggcggcggtggctatggaggtggtggcggcggctatggtggcggtggctttggtggtggcggcggatacggtggtggccgtggtggtggtggcggcggctatggtggtgaccgtgagtcctactaagaagagcactggctatcaaatttaaaataatgagtttttaggacagtgtcttgattatgtggaacctaatgttacgtctgtctgttatctgcgatagttgaactcaataggggcagagatgtggttctatgttatttttggttttgcttttttcttgatgatgcaagagttaatttgtgtatgctgcttcgaggcttggatgagtctcaaggaagtttcatgcattttgccgtatgttgcgctgtgtacttgtagagaatgattgcgtatgttagtgtgatcataaattctcttcgcattacattcaaatattaagatcttagctataaatttggtaatggtaccag

SEQ ID NO: 26519 - protein, 176 aa, Triticum aestivum
MAALIKLGSLLRQSAVASSASTGSAPALFNAARFMCAGQPADGSKLFVGGLAWATDDHSLKEAFQCFGEVVEARVITDRETGRSRGFGFVSFASGEDAKSAAENMDGKELAGRNVRVNFANERPSGGGGGGGFSRGGGGYGGGGGGYGGGGFGGGGGYGGGRGGGGGGYGGDRESY

SEQ ID NO: 26520 - protein, 142 aa, Triticum aestivum
MCAGQPADGSKLFVGGLAWATDDHSLKEAFQCFGEVVEARVITDRETGRSRGFGFVSFASGEDAKSAAENMDGKELAGRNVRVNFANERPSGGGGGGGFSRGGGGYGGGGGGYGGGGFGGGGGYGGGRGGGGGGYGGDRESY

SEQ ID NO: 26521 - protein, 94 aa, Triticum aestivum
LEHPNRKPAPTPHSPFPPPPPSRPSSPSRGFSLPPWRPSSSSEAFLGRVLWLAVPPPARLLPCSTLPASCAPASLLMAPSFSSVVSPGLLMIIR

SEQ ID NO: 26522 - DNA, 686 bp, Triticum aestivum
atcacttcaccaccaccacaaaccctatccccattaacccgctccaaaaccctgagctgcgcacccaccggcgatgtcggcgacggccatccgctccggcgagctcctcgcttttcccgccgcgctgaggcgtggcctgcccgtggcttctgcctcggtggtcgcgttccggttgagggcgccagtggccgggcgcgtggcggtcagggttgtcgcggcggcggcggagggggcaggggcggaggcggaggcggaagggaagccgaagccgaagaagaagagggcagcgagcgggatcatgaagcctaagccgatttctccggagctaagggagtttgtcggaggcgcggcggagctgccccggacagaggcgctcaagatcatctgggcgcacatcaagggaaacaacctccaggatcccgagaacaagaagataatagtctgcgatgagaaactgaagaagatatttggagggcgtgaccgtgttgggtttcttgagatctctgggctcctcaatccccatttccagaaatgatagggtttatgtagatgttgcactttttctgtattagctaagacagttgtatcagcatatttagctgaacctggtatggagggtccgtaattctggtttgagaatggtacgtctagtatttgcagtaaatggctttgctggtttttggccc

SEQ ID NO: 26523 - protein, 153 aa, Triticum aestivum
MSATAIRSGELLAFPAALRRGLPVASASVVAFRLRAPVAGRVAVRVVAAAAEGAGAEAEAEGKPKPKKKRAASGIMKPKPISPELREFVGGAAELPRTEALKIIWAHIKGNNLQDPENKKIIVCDEKLKKIFGGRDRVGFLEISGLLNPHFQK

SEQ ID NO: 26524 - protein, 102 aa, Triticum aestivum
ITSPPPQTLSPLTRSKTLSCAPTGDVGDGHPLRRAPRFSRRAEAWPARGFCLGGRVPVEGASGRARGGQGCRGGGGGGRGGGGGGREAEAEEEEGSERDHEA

SEQ ID NO: 26525 - protein, 78 aa, Triticum aestivum
MKPKPISPELREFVGGAAELPRTEALKIIWAHIKGNNLQDPENKKIIVCDEKLKKIFGGRDRVGFLEISGLLNPHFQK

SEQ ID NO: 26526 - DNA, 1960 bp, Triticum aestivum
aaaaatccctctcccaaaacaagcggcataaaccacgacctcgacccgctccgtctccgctcccccgcttccagtccactccccttcctccccctccgctccgccccctcaagcgaaggcaccggatggcggcgtcccccacccccggcggcggcctcggggccatcctcgccgccggcgacagggactacctcgtccgcaactccggcgagcaggtgaagatcagcagcattgagggagacactgtagctatctatttctcggcctcatggtgcccgccatgccagcggtttacaccaaagcttattgaagcatacaaagaacttacctcaaatggcaagagctttgaggtgatctttgtttcaggcgaccgagatgaggaagcattcaatgcctattttgcaaagatgccgtggttggcagttcctttctccgactccgaaggccgtaaaagccttgatgagcggtttgacgtcaacggtattccacaccttgttttccttgatgcaaaaactggcgaagttcttactgacgaaggagttgagtttgtgagtgaatatggaatagaagcttatccttttacaactgagaggatcaatgaattgaaggaacaagaaaaggctgctaaggataaccaaactattcatagtgtgcttgctacaccaaatcgtaactatgtaatttcaaacacgggggagaaggtacccatcgttgatcttgaggggaagtatgttggtatatgctttgtagtgaacggctaccctccagttgaggaatttaccccagtgcttgccaagatatatgcgaaactcaaagaagtgggggagaagtttgaagttgtagctgtatccttggacagtgatgaggaatcattcaataacagtttttcaagcatgccttggctcgccattccccatggcgacaagatgtgtcagaagcttgtcagttactttgagcttagtgatcttcctacactagtgctgattggtcctgatgggaagacactgagcagcaatattgcagacataatcaatgagcatggtttggatgcatgggaggggttccccttcaatgcagagaagctggaaattctagctgagaaggcaaaggctaaagcagcctcacagacattggagtcccttctggttactggtgacgtggactttgtcatcgggaaagatggagcaaaggttcctgtagcagaacttgttgggaagactgtcctcctctacttttcagctaaatggtgtgggccatgcagagccttcctgcctacacttgtggatgtctacaacaagatcaaggagaagaacagcgatttcgagatcgtcttcgtctctagcgacagggaccagagctcattcgacgacttcttctctggcatgccatggctcgccatccccttggaagacgaaaggaaggcgtacctgaaaaagaagttcaagatccgtggaatcccttctctggtcgccattggccccgatgggaagacggtcaacacggacgcgaagacttcgctggcggtccatggcgccgacgcgtttccgttcaccgacgagaggatccaggagctggagaagaagatcgaggagatggcaaaggggtggcctgagaagctgaagcacgagctgcacgagcacgagctcgtgctgatccgccgccccaggccgtacggctgcgacgggtgcgaagagatgggcacctcctggtcctacaactgcgcggagtgcgacttcgatctgcacaccaagtgtgcgctgggtgaggagaagaagggagaggaggtgaatgggcaggagcatgctgctgccccagctgggtacgtgtgcgagggagacgtctgcaggaaggcctaggtatcgttgtgttgtgtgtgttccttgccagctgaggcgtgtctgaatcatgtgctgtgtggtgtgatgataaataaatcttgcatccgatggtttggcttggg

SEQ ID NO: 26527 - protein, 617 aa, Triticum aestivum
KSLSQNKRHKPRPRPAPSPLPRFQSTPLPPPPLRPLKRRHRMAASPTPGGGLGAILAAGDRDYLVRNSGEQVKISSIEGDTVAIYFSASWCPPCQRFTPKLIEAYKELTSNGKSFEVIFVSGDRDEEAFNAYFAKMPWLAVPFSDSEGRKSLDERFDVNGIPHLVFLDAKTGEVLTDEGVEFVSEYGIEAYPFTTERINELKEQEKAAKDNQTIHSVLATPNRNYVISNTGEKVPIVDLEGKYVGICFVVNGYPPVEEFTPVLAKIYAKLKEVGEKFEVVAVSLDSDEESFNNSFSSMPWLAIPHGDKMCQKLVSYFELSDLPTLVLIGPDGKTLSSNIADIINEHGLDAWEGFPFNAEKLEILAEKAKAKAASQTLESLLVTGDVDFVIGKDGAKVPVAELVGKTVLLYFSAKWCGPCRAFLPTLVDVYNKIKEKNSDFEIVFVSSDRDQSSFDDFFSGMPWLAIPLEDERKAYLKKKFKIRGIPSLVAIGPDGKTVNTDAKTSLAVHGADAFPFTDERIQELEKKIEEMAKGWPEKLKHELHEHELVLIRRPRPYGCDGCEEMGTSWSYNCAECDFDLHTKCALGEEKKGEEVNGQEHAAAPAGYVCEGDVCRKA

SEQ ID NO: 26528 - protein, 576 aa, Triticum aestivum
MAASPTPGGGLGAILAAGDRDYLVRNSGEQVKISSIEGDTVAIYFSASWCPPCQRFTPKLIEAYKELTSNGKSFEVIFVSGDRDEEAFNAYFAKMPWLAVPFSDSEGRKSLDERFDVNGIPHLVFLDAKTGEVLTDEGVEFVSEYGIEAYPFTTERINELKEQEKAAKDNQTIHSVLATPNRNYVISNTGEKVPIVDLEGKYVGICFVVNGYPPVEEFTPVLAKIYAKLKEVGEKFEVVAVSLDSDEESFNNSFSSMPWLAIPHGDKMCQKLVSYFELSDLPTLVLIGPDGKTLSSNIADIINEHGLDAWEGFPFNAEKLEILAEKAKAKAASQTLESLLVTGDVDFVIGKDGAKVPVAELVGKTVLLYFSAKWCGPCRAFLPTLVDVYNKIKEKNSDFEIVFVSSDRDQSSFDDFFSGMPWLAIPLEDERKAYLKKKFKIRGIPSLVAIGPDGKTVNTDAKTSLAVHGADAFPFTDERIQELEKKIEEMAKGWPEKLKHELHEHELVLIRRPRPYGCDGCEEMGTSWSYNCAECDFDLHTKCALGEEKKGEEVNGQEHAAAPAGYVCEGDVCRKA

SEQ ID NO: 26529 - protein, 482 aa, Triticum aestivum
MPWLAVPFSDSEGRKSLDERFDVNGIPHLVFLDAKTGEVLTDEGVEFVSEYGIEAYPFTTERINELKEQEKAAKDNQTIHSVLATPNRNYVISNTGEKVPIVDLEGKYVGICFVVNGYPPVEEFTPVLAKIYAKLKEVGEKFEVVAVSLDSDEESFNNSFSSMPWLAIPHGDKMCQKLVSYFELSDLPTLVLIGPDGKTLSSNIADIINEHGLDAWEGFPFNAEKLEILAEKAKAKAASQTLESLLVTGDVDFVIGKDGAKVPVAELVGKTVLLYFSAKWCGPCRAFLPTLVDVYNKIKEKNSDFEIVFVSSDRDQSSFDDFFSGMPWLAIPLEDERKAYLKKKFKIRGIPSLVAIGPDGKTVNTDAKTSLAVHGADAFPFTDERIQELEKKIEEMAKGWPEKLKHELHEHELVLIRRPRPYGCDGCEEMGTSWSYNCAECDFDLHTKCALGEEKKGEEVNGQEHAAAPAGYVCEGDVCRKA

SEQ ID NO: 26530 - DNA, 1590 bp, Triticum aestivum
  misc_feature (1575)..(1575): n is a, c, g, or t
atcccttcccccccgcctccacccctcccactgcccccacgcagcagcccgcgcccccaacccacccaacgcgccgccgccgctagggtttctccccctccccccgccgccgcccgcgcagagccccgaatctccctacccgcggcagccatgagcgacggcaaggacaccctcgacctctccgccctcggcgccgccgtccccaacgccgcagagctcagcgccgaggacaaggccaacctcgtggagtcgattaagaacacgctgcagggattggcggcgcggcacacggacgtgctcgagagcctggagcccaaggtcaggaagcgcgtcgaggcgctcagggagatccagagccaacatgatgaatttgaggcaaagttttttgaggagagagctgcacttgaagctaaatatcagaagatgtatgaaccactgtactcaaagcgtcatgatgttgtcaatggtgtggttgaggcagaaggcgtaaccaaagattcaggtgaagccgctccagatgagaaagaggaaaagggtgtgccagatttctggttgaatgcaatgaagaaccatgaaatccttgctgaggagattcaagagagggatgaggaagctctcaagtacctcaaggatatcaagtggtacagaattactgagccaaagggtttcaagcttgagttccacttcaatactaatccattcttcaagaatgaagtgctttcaaaaacgtaccacatgatcgatgaagatgaaccaatcctagagaaggctattggaactgaaattgaatggtatcctggaaagagcttgacacaaaaggtgctaaagaagaagccaaagaaggggtcgaagaacactaaacctatcacgaaaatcgaaaattgcgagagcttctttaatttcttcagtccacctcaagttcctgatgatgatgaggaaattgatgaggatacagctgagcagttgcagaaccagatggagcaagattatgatatcggatctaccatcagagacaagattattccacatgctgtttcatggtttactggagaggccgctcaagatgaggactttgatggcatcatggatgatgatgaagatgacgacgaagatgacgaggaggatgaagatgaggatgaggacgacgaggaagatgaagacgatgacgatggtgataagaagaagggcgggcgagttcctgcaggggaaggtcaggcaggggagcggcccgcagagtgcaagcaacagtgagatccttcccagacgaagactatttttcttggctgaagaatgtttggttctgcttgatgctatgtctttgagtttggttccgaggagccagtgggggattgattgagttgggttttgtggaagaaccggtggggggtttctttgtgggggacatggtattatatactggtagcatttcaattgttgtattgggttgaaatactttgtccgctgctgcgagtgatcatcgatggtgcccgtttggtagtcctacttgttttgccgggaaattttgatgtactaggtatttgtgcgcgctacattcattgtttcaaaatgcatatntgcattgccttggcc

SEQ ID NO: 26531 - protein, 416 aa, Triticum aestivum
IPSPPPPPLPLPPRSSPRPQPTQRAAAARVSPPPPAAARAEPRISLPAAAMSDGKDTLDLSALGAAVPNAAELSAEDKANLVESIKNTLQGLAARHTDVLESLEPKVRKRVEALREIQSQHDEFEAKFFEERAALEAKYQKMYEPLYSKRHDVVNGVVEAEGVTKDSGEAAPDEKEEKGVPDFWLNAMKNHEILAEEIQERDEEALKYLKDIKWYRITEPKGFKLEFHFNTNPFFKNEVLSKTYHMIDEDEPILEKAIGTEIEWYPGKSLTQKVLKKKPKKGSKNTKPITKIENCESFFNFFSPPQVPDDDEEIDEDTAEQLQNQMEQDYDIGSTIRDKIIPHAVSWFTGEAAQDEDFDGIMDDDEDDDEDDEEDEDEDEDDEEDEDDDDGDKKKGGRVPAGEGQAGERPAECKQQ

SEQ ID NO: 26532 - protein, 366 aa, Triticum aestivum
MSDGKDTLDLSALGAAVPNAAELSAEDKANLVESIKNTLQGLAARHTDVLESLEPKVRKRVEALREIQSQHDEFEAKFFEERAALEAKYQKMYEPLYSKRHDVVNGVVEAEGVTKDSGEAAPDEKEEKGVPDFWLNAMKNHEILAEEIQERDEEALKYLKDIKWYRITEPKGFKLEFHFNTNPFFKNEVLSKTYHMIDEDEPILEKAIGTEIEWYPGKSLTQKVLKKKPKKGSKNTKPITKIENCESFFNFFSPPQVPDDDEEIDEDTAEQLQNQMEQDYDIGSTIRDKIIPHAVSWFTGEAAQDEDFDGIMDDDEDDDEDDEEDEDEDEDDEEDEDDDDGDKKKGGRVPAGEGQAGERPAECKQQ

SEQ ID NO: 26533 - protein, 275 aa, Triticum aestivum
MYEPLYSKRHDVVNGVVEAEGVTKDSGEAAPDEKEEKGVPDFWLNAMKNHEILAEEIQERDEEALKYLKDIKWYRITEPKGFKLEFHFNTNPFFKNEVLSKTYHMIDEDEPILEKAIGTEIEWYPGKSLTQKVLKKKPKKGSKNTKPITKIENCESFFNFFSPPQVPDDDEEIDEDTAEQLQNQMEQDYDIGSTIRDKIIPHAVSWFTGEAAQDEDFDGIMDDDEDDDEDDEEDEDEDEDDEEDEDDDDGDKKKGGRVPAGEGQAGERPAECKQQ

SEQ ID NO: 26534 - DNA, 1190 bp, Triticum aestivum
attacctagaacatcctaatcgaaaaaacaccaaaccgcagcacacagcgccaccgcgactgcgccactccttgcgttccgagtgacagaggccatggcgctcgccacctcccaccaccgccacctcgtccgccccgccgccgcggcccctcgcgtgccgctgcgtcccctccgcttcgccgccccccgatctctcccgaggatttgttgccaatctatcaactcagctaacgtcttgggagcttcctcaatgacagctgacgacgcagttccacaaccagttgtactgatagaccaagactcagaccgtgatgcaaccattgtgcagctgagttttggagatcgtttgggggcactacttgatacgatgaaggcactcaaggacctgggccttgatgtgacgaaaggaagtgtggcaactgattcatctgtcacacaaacaaagttccacatcatgcgattagggcgtaaggttgaggaccctgacatgttggaaacaatacgactgaccatcattaacaaccttctgcagtatcatcccgaatcaagcgagaagctagctatgggtgaattttttggaattaaagcccctgagaagaaggttgatgttgacgttgcaacacatgtaattgtgcaagatgatggaccgaaaagaagcatgctttacatagagacagctgatcgaccaggcttactcttggaagtaatcaagatcattactgacgtaaacgttgatgtgggatcagctgagattgatactgagggcttggttgccaaggacaagtttcatgtgagttacagaggcgcaaaacttaacagctcgttatctcaggtgctggttaattgtttgcgctattacctccggaggcccgagacagatgaagacagctattgatgattgttctgtggcggctcgtttcgagttcctgcctatgaagccttttgcactgcaatttctgttgtaagcaaaacaaaatatggcacatgtgttccgaaaatgcattaaaactggggcgtctgatgcagttatgttctatggtcggacatgtggcccttgggagctttagcagccccatcccactggtttcctagaggaatcacattggaaagcattcacgcgtgtcgagtgtggtctgtaagttcatagtactataattcatgtgcatgtaaaaaaccaggttacgtatgtg

SEQ ID NO: 26535 - protein, 266 aa, Triticum aestivum
MALATSHHRHLVRPAAAAPRVPLRPLRFAAPRSLPRICCQSINSANVLGASSMTADDAVPQPVVLIDQDSDRDATIVQLSFGDRLGALLDTMKALKDLGLDVTKGSVATDSSVTQTKFHIMRLGRKVEDPDMLETIRLTIINNLLQYHPESSEKLAMGEFFGIKAPEKKVDVDVATHVIVQDDGPKRSMLYIETADRPGLLLEVIKIITDVNVDVGSAEIDTEGLVAKDKFHVSYRGAKLNSSLSQVLVNCLRYYLRRPETDEDSY

SEQ ID NO: 26536 - protein, 214 aa, Triticum aestivum
MTADDAVPQPVVLIDQDSDRDATIVQLSFGDRLGALLDTMKALKDLGLDVTKGSVATDSSVTQTKFHIMRLGRKVEDPDMLETIRLTIINNLLQYHPESSEKLAMGEFFGIKAPEKKVDVDVATHVIVQDDGPKRSMLYIETADRPGLLLEVIKIITDVNVDVGSAEIDTEGLVAKDKFHVSYRGAKLNSSLSQVLVNCLRYYLRRPETDEDSY

SEQ ID NO: 26537 - protein, 175 aa, Triticum aestivum
MKALKDLGLDVTKGSVATDSSVTQTKFHIMRLGRKVEDPDMLETIRLTIINNLLQYHPESSEKLAMGEFFGIKAPEKKVDVDVATHVIVQDDGPKRSMLYIETADRPGLLLEVIKIITDVNVDVGSAEIDTEGLVAKDKFHVSYRGAKLNSSLSQVLVNCLRYYLRRPETDEDSY

SEQ ID NO: 26538 - DNA, 908 bp, Triticum aestivum
attcaaccatggaagccatggcgtcatcgtcgtcggcggctaagcctaagcccagcaccaccctccgcgtggccgccttcagcggctccctccgcaagggctcgtggcacggcggcctcatccgcgcggccgaggagctgtgcgaggagtccatcccggagctgcaaatcgaccacgtcgacatctccggcctgcccatgtccaacccggacctggagacggacgacggcgacggcttcccgccggacgtcgaggcgttccgggacagggtccgcgccgccgactgctttctcttcgcctcgcccgagtacaactactccgtgaccgccacgctgaagaacgcgctggactgggcgtcgaggggcacgcacaagtgctgggcggacaaggccgcggccatcgtctccgcgggcggcagctgcggcgggggcagggcggcgttccacctccgccagatcggggtgttcctggacatccacttcatcaacaagccggagctccaggtcagggcgtacgaggacccgcccaagtttgacgccgacgggaacctcgtcgacgccgagacgagggagcggctcaagcaggtgctcctctcgctgcaggccttcgcgctccggctccagcactaactagcaggagcggaggactgagcgaagaagaaacttggcaccgtgcgattacctaaacgttaatctgcattttcctttgcgtgttggatatgtaggtacttttgactatttcactttcttttaggggttacttttcacttttgttgggcggaatacattttgctctgtattcgtgcaccagtctttatgtggttctgtaagaaagagtaagctgctgtaaacagtgtgtttgtaagaaatcacgcaagtaccctttttataaacgtttcgttaagtttt

SEQ ID NO: 26539 - protein, 208 aa, Triticum aestivum
STMEAMASSSSAAKPKPSTTLRVAAFSGSLRKGSWHGGLIRAAEELCEESIPELQIDHVDISGLPMSNPDLETDDGDGFPPDVEAFRDRVRAADCFLFASPEYNYSVTATLKNALDWASRGTHKCWADKAAAIVSAGGSCGGGRAAFHLRQIGVFLDIHFINKPELQVRAYEDPPKFDADGNLVDAETRERLKQVLLSLQAFALRLQH

SEQ ID NO: 26540 - protein, 206 aa, Triticum aestivum
MEAMASSSSAAKPKPSTTLRVAAFSGSLRKGSWHGGLIRAAEELCEESIPELQIDHVDISGLPMSNPDLETDDGDGFPPDVEAFRDRVRAADCFLFASPEYNYSVTATLKNALDWASRGTHKCWADKAAAIVSAGGSCGGGRAAFHLRQIGVFLDIHFINKPELQVRAYEDPPKFDADGNLVDAETRERLKQVLLSLQAFALRLQH

SEQ ID NO: 26541 - protein, 203 aa, Triticum aestivum
MASSSSAAKPKPSTTLRVAAFSGSLRKGSWHGGLIRAAEELCEESIPELQIDHVDISGLPMSNPDLETDDGDGFPPDVEAFRDRVRAADCFLFASPEYNYSVTATLKNALDWASRGTHKCWADKAAAIVSAGGSCGGGRAAFHLRQIGVFLDIHFINKPELQVRAYEDPPKFDADGNLVDAETRERLKQVLLSLQAFALRLQH

SEQ ID NO: 26542 - DNA, 634 bp, Triticum aestivum
gccccactccccccacttctcccccaagaaaaagccgaatcatggacaccaccggcgccgccgccgccgccgccggcggaggcagcgaggaggaggaacaggcccgcctggccgccatcaccgacaacctcaaggcccgtgactcgatccggctgtacgcctggctctcgcaccggtgcttctccgactgcgtcaccaccttctaccgcaagacgctgggcaagcgcgagggggactgcgtccgcgcctgcgtccgcaagtaccagctcgccaccgccgcgtccgccgcccgcttcaacaagctcgccgacccctccgccgcggccgacgacgacgacgaggacgactgattcgtgcggccctgcgctccactccaccctcggctgggggaacttttttgcctgctctggttagtcttctgcagtttgagttctgatgtagcgcttgtgatgcctgagagagacaccagtagtgacagagtagaacgaaccacggattctgaatttctgatgcgatattgattgcggctgtatcgaaccacaccacggattcggaacatgggtggatgcaaacatgaatggtttccatgctttacaaacttggtatcggtgaatgtttcactgaatgtcatgct

SEQ ID NO: 26543 - protein, 137 aa, Triticum aestivum
APLPPLLPQEKAESWTPPAPPPPPPAEAARRRNRPAWPPSPTTSRPVTRSGCTPGSRTGASPTASPPSTARRWASARGTASAPASASTSSPPPRPPPASTSSPTPPPRPTTTTRTTDSCGPALHSTLGWGNFFACSG

SEQ ID NO: 26544 - protein, 115 aa, Triticum aestivum
PTPPTSPPRKSRIMDTTGAAAAAAGGGSEEEEQARLAAITDNLKARDSIRLYAWLSHRCFSDCVTTFYRKTLGKREGDCVRACVRKYQLATAASAARFNKLADPSAAADDDDEDD

SEQ ID NO: 26545 - protein, 102 aa, Triticum aestivum
MDTTGAAAAAAGGGSEEEEQARLAAITDNLKARDSIRLYAWLSHRCFSDCVTTFYRKTLGKREGDCVRACVRKYQLATAASAARFNKLADPSAAADDDDEDD

SEQ ID NO: 26546 - DNA, 752 bp, Triticum aestivum
  misc_feature (345)..(345): n is a, c, g, or t
  misc_feature (421)..(421): n is a, c, g, or t
atataaatggccgcttcccccaaccttcccaacccctcgctctcgccgccgccgctgccttctctactgcaccgccgcagccatggtgaagtactcgacggatcccgccaatcccaccaagtccgccaaggccatgggccgggacctgcgtgttcatttcaagaacactagggaaacagcgtttgccctgaggaagatgtcgctcaacaaggccaagaggtaccttgaggatgtgttggcacacaagcaagccatccccttccggaggtactgccgtggtgttggacgcacagcccaggtgaagaaccgtcagcccaatggtcagggacgctggcctgccaagtntgctaagttcgttctggatcttctaaagaatgctgagagcaatgctgaggtgaaaggtcttgatgttgatgctctntacatttcacacatccaagtgaaccaggcccagaagcagcggcgccggacctaccgtgcccatggacgcatcaacccctacatgtccaacccatgccacattgagctgatcttgtcggagaaggaagagccggtgaagaaggaggctgagtcccagattgccaggaaggcctagagaaggaagctctacataacctatctgcctattcgttagagcagtttgtagcatctggtctggctgagtcgaaatttttggcctattatctgtcgtctaaatactgctagctcatactttgtgaaaccttttgatgatcgtctcatgtactggattc

SEQ ID NO: 26547 - protein, 197 aa, Triticum aestivum
  misc_feature (115)..(115): Xaa can be any naturally occurring amino acid
  misc_feature (140)..(140): Xaa can be any naturally occurring amino acid
YKWPLPPTFPTPRSRRRRCLLYCTAAAMVKYSTDPANPTKSAKAMGRDLRVHFKNTRETAFALRKMSLNKAKRYLEDVLAHKQAIPFRRYCRGVGRTAQVKNRQPNGQGRWPAKXAKFVLDLLKNAESNAEVKGLDVDAXYISHIQVNQAQKQRRRTYRAHGRINPYMSNPCHIELILSEKEEPVKKEAESQIARKA

SEQ ID NO: 26548 - protein, 170 aa, Triticum aestivum
  misc_feature (88)..(88): Xaa can be any naturally occurring amino acid
  misc_feature (113)..(113): Xaa can be any naturally occurring amino acid
MVKYSTDPANPTKSAKAMGRDLRVHFKNTRETAFALRKMSLNKAKRYLEDVLAHKQAIPFRRYCRGVGRTAQVKNRQPNGQGRWPAKXAKFVLDLLKNAESNAEVKGLDVDAXYISHIQVNQAQKQRRRTYRAHGRINPYMSNPCHIELILSEKEEPVKKEAESQIARKA

SEQ ID NO: 26549 - protein, 153 aa, Triticum aestivum
  misc_feature (71)..(71): Xaa can be any naturally occurring amino acid
  misc_feature (96)..(96): Xaa can be any naturally occurring amino acid
MGRDLRVHFKNTRETAFALRKMSLNKAKRYLEDVLAHKQAIPFRRYCRGVGRTAQVKNRQPNGQGRWPAKXAKFVLDLLKNAESNAEVKGLDVDAXYISHIQVNQAQKQRRRTYRAHGRINPYMSNPCHIELILSEKEEPVKKEAESQIARKA

SEQ ID NO: 26550 - DNA, 1422 bp, Triticum aestivum
ctagaacatcctaatcgaaaaatatatctacccgtagcgtgcccacgaaccacaccacagcacaccaaccgcgcgccactgatccatcaactccactccactagctacgtaccttccgaccgagcagccagagagatggagaggatggtgatgaggctggtgaggaacaagcagtccctccgccagctgcaaggggccgccgccggcggcctagcgtcgtcgtcctccgcctcctcgaccgccggcgccgccgcgtcctccttctccaccctgcagcagcagcaggaggaccaccccggagtgctcaacatcagggacaccgccgcccacctcatcggccggacgccgctggtgtacctgaacaaggtgacggaggggtgcggcgcccgcgtcgccgccaagctcgagttcctccagccttccttcagcgtcaaggacaggccagcaatctccatgatcgaagacgcggagaagaaggggctgataaccccaggcaagacgacgctgatcgagcccacatccgggaacatgggcatcggcctggcgttcatggcagcactcaaagggtacgagctcgtgctgacgatgccatcatacaccagcctcgagaggagggtggtcatgaaggccttcggtgcgcagctcgtgctcactgacccggccaaggggatgggaggcaccgtcaggaaagcaacccagctctatgagaaccatcccagcgccttcatgctccagcagttcgagaatcccgccaacgtccaggtgcactacgagactaccggtccggagatatgggaggacacgctcgggcaggtcgacatcttcgtcatgggaatcggcagcggcggcaccgtcaccggcgtcggcaagtacctcaaggagaagaaccccaacgcaaagatctatggagttgaacctgccgaagcaaatgtcctgaacggtggcaagccagggcctcacctcatcactggaaatggagttggatttaagccagatattttggatatggatataatggagaaggttctagaggtgaaaagcgaggacgccgttacgatggcgcaacagttggcactgcaggagggcctgctggtggggatatcatcaggagccaacacagtggctgcgatcgaactcgcaaagaggccagaaaacaaagggaagctcatcgtgactgttcatccgagcgcgggagagcgatacttatcgtcggcgctattcgagggtctgaggaaggaggctgaggcaatgcagccagtgccagtggactaagttggagctatacaatgcatgtagaataaattcactgcaaccatgttgcaagtgctagtcatacctcatttgtgattcttcagtttgttcatcatgtggaagtcgtgtaaacaacagttcaaatggttgaaaaaaggactttacctctcc

SEQ ID NO: 26551 - protein, 423 aa, Triticum aestivum
LEHPNRKIYLPVACPRTTPQHTNRAPLIHQLHSTSYVPSDRAAREMERMVMRLVRNKQSLRQLQGAAAGGLASSSSASSTAGAAASSFSTLQQQQEDHPGVLNIRDTAAHLIGRTPLVYLNKVTEGCGARVAAKLEFLQPSFSVKDRPAISMIEDAEKKGLITPGKTTLIEPTSGNMGIGLAFMAALKGYELVLTMPSYTSLERRVVMKAFGAQLVLTDPAKGMGGTVRKATQLYENHPSAFMLQQFENPANVQVHYETTGPEIWEDTLGQVDIFVMGIGSGGTVTGVGKYLKEKNPNAKIYGVEPAEANVLNGGKPGPHLITGNGVGFKPDILDMDIMEKVLEVKSEDAVTMAQQLALQEGLLVGISSGANTVAAIELAKRPENKGKLIVTVHPSAGERYLSSALFEGLRKEAEAMQPVPVD

SEQ ID NO: 26552 - protein, 378 aa, Triticum aestivum
MERMVMRLVRNKQSLRQLQGAAAGGLASSSSASSTAGAAASSFSTLQQQQEDHPGVLNIRDTAAHLIGRTPLVYLNKVTEGCGARVAAKLEFLQPSFSVKDRPAISMIEDAEKKGLITPGKTTLIEPTSGNMGIGLAFMAALKGYELVLTMPSYTSLERRVVMKAFGAQLVLTDPAKGMGGTVRKATQLYENHPSAFMLQQFENPANVQVHYETTGPEIWEDTLGQVDIFVMGIGSGGTVTGVGKYLKEKNPNAKIYGVEPAEANVLNGGKPGPHLITGNGVGFKPDILDMDIMEKVLEVKSEDAVTMAQQLALQEGLLVGISSGANTVAAIELAKRPENKGKLIVTVHPSAGERYLSSALFEGLRKEAEAMQPVPVD

SEQ ID NO: 26553 - protein, 375 aa, Triticum aestivum
MVMRLVRNKQSLRQLQGAAAGGLASSSSASSTAGAAASSFSTLQQQQEDHPGVLNIRDTAAHLIGRTPLVYLNKVTEGCGARVAAKLEFLQPSFSVKDRPAISMIEDAEKKGLITPGKTTLIEPTSGNMGIGLAFMAALKGYELVLTMPSYTSLERRVVMKAFGAQLVLTDPAKGMGGTVRKATQLYENHPSAFMLQQFENPANVQVHYETTGPEIWEDTLGQVDIFVMGIGSGGTVTGVGKYLKEKNPNAKIYGVEPAEANVLNGGKPGPHLITGNGVGFKPDILDMDIMEKVLEVKSEDAVTMAQQLALQEGLLVGISSGANTVAAIELAKRPENKGKLIVTVHPSAGERYLSSALFEGLRKEAEAMQPVPVD

SEQ ID NO: 26554 - DNA, 957 bp, Triticum aestivum
acttgaatgcccttgcgacgtctcctatcatggctatctataaacgccggccggccacaccatgccttctcctcctcctcctcctcctcctcgtcaacagctagccagcaagaagcagagcagctcagaaccgagcacagaccgaagcggagccaaacgaaagaagggatctaacctagccagccggcgatcgaccgagagatggcgcggtggtgtcagctggcggcggtgctgctcgccgtgtcgatggcggcgtcgacgacggtggcgcaggacgcgctgcagaccaagtgccaggaggacctgcagaagctgtcagactgcatggactacgcgacggggcacgaggacacgccgtcggccaagtgctgcgaggacacggcggacacgcagaagtcgcggcccgagtgcctctgctccatcatccagcaggtgcacagcggcagccacggcgtgcagcagctcggcctccgcttcgaccgcctcctggcccagcccgccgcctgcaagctccccaacgccaacgtttccctctgcatcaacctgctgcacctgaccccgagctcgccagactacgctctcttcgcaaatgcttccaagattactccgtccactgccgcgccagcgagagacaccgccgacggcttcaaggttccgacggggctcggttatggcgtcgtggcggcggccgtcgtctctgctgtcttctcatccatcttctgatttttggacaagcacacgctcttttatcctctccctttcttctatccttcatgtttgtttacataactctgcaagttcccacacaacgacacgatgctttagatgatctatatctactcacgtggtaagaggattcgttcggatgacttactcttgttttaccccagacaagtagatggaaagttgagacttgtgtttcttcatgtggaagtgatggtttgtagtaatatcctg

SEQ ID NO: 26555 - protein, 173 aa, Triticum aestivum
MARWCQLAAVLLAVSMAASTTVAQDALQTKCQEDLQKLSDCMDYATGHEDTPSAKCCEDTADTQKSRPECLCSIIQQVHSGSHGVQQLGLRFDRLLAQPAACKLPNANVSLCINLLHLTPSSPDYALFANASKITPSTAAPARDTADGFKVPTGLGYGVVAAAVVSAVFSSIF

SEQ ID NO: 26556 - protein, 164 aa, Triticum aestivum
MPSPPPPPPPRQQLASKKQSSSEPSTDRSGAKRKKGSNLASRRSTERWRGGVSWRRCCSPCRWRRRRRWRRTRCRPSARRTCRSCQTAWTTRRGTRTRRRPSAARTRRTRRSRGPSASAPSSSRCTAAATACSSSASASTASWPSPPPASSPTPTFPSASTCCT

SEQ ID NO: 26557 - protein, 158 aa, Triticum aestivum
MAASTTVAQDALQTKCQEDLQKLSDCMDYATGHEDTPSAKCCEDTADTQKSRPECLCSIIQQVHSGSHGVQQLGLRFDRLLAQPAACKLPNANVSLCINLLHLTPSSPDYALFANASKITPSTAAPARDTADGFKVPTGLGYGVVAAAVVSAVFSSIF

SEQ ID NO: 26558 - DNA, 1112 bp, Triticum aestivum
tttctcttccttcgttcgttctggtcgtttcggtgaatcgatctcgcccaccaaacccgaccacccgatcccccggacagccggagagcgaggcgaagcggcgaggcgtaccgcaaccatgctcagggtcgcaggtcgacgcatatcctcccacctcgcatggcgccccgccgcggccgcctccgccggcagcagccccctcgccggcggcctccctggcgacgacttcccccgggaccagaatccgcgcttcgccatcgaatcacccttctacgtcgctgccagaggcttttcggctgaatctcttgttccgaggaaccaggatgtagagttggctgagctcacaccaactacggcagctctgaagaatccctgtgccaaaattgtgtacgatgagtataaccacgagaggtacccacctggtgaccccagcaagcgtgcctttgcctactttgtgttgagtggtgggagatttgtgtacgcatccttgttgcgtttgctcgtcttaaagtttgtcctgagtatgtcagcaagtaaggatgtgcttgccctcgcttcccttgaggttgacctgtcaagtattgagcccggtaccactgtgactgtaaagtggcggggcaagccagttttcatcaggcgcaggaccgaagatgatgtgaagctggccaacagcgttgatgttacatctctccgtgacccacaggaggatgcggtgcgtgtcaagaaccctgagtggcttgttgtcattggtgtctgcactcacttgggctgcattcccctccccaactctggggacttcggtggctggttctgcccatgtcatggctcacactacgacatctcaggtagaatcaggaagggcccagcaccatacaacctggaggtcccgacctacagtttcttggaagataacaaaatgcttattggctaagagcactggccgtaagattaatccctatggtgctgtgctgccattttgtgttggtttgaccattcgtcttcttgttgctcggatagtcctatgatggactgttatcttagtgcagtactcttactagcactggatagtaaagaataatctgctgctactttggtacttttaattaatttcc

SEQ ID NO: 26559 - protein, 309 aa, Triticum aestivum
FSSFVRSGRFGESISPTKPDHPIPRTAGERGEAARRTATMLRVAGRRISSHLAWRPAAAASAGSSPLAGGLPGDDFPRDQNPRFAIESPFYVAARGFSAESLVPRNQDVELAELTPTTAALKNPCAKIVYDEYNHERYPPGDPSKRAFAYFVLSGGRFVYASLLRLLVLKFVLSMSASKDVLALASLEVDLSSIEPGTTVTVKWRGKPVFIRRRTEDDVKLANSVDVTSLRDPQEDAVRVKNPEWLVVIGVCTHLGCIPLPNSGDFGGWFCPCHGSHYDISGRIRKGPAPYNLEVPTYSFLEDNKMLIG

SEQ ID NO: 26560 - protein, 270 aa, Triticum aestivum
MLRVAGRRISSHLAWRPAAAASAGSSPLAGGLPGDDFPRDQNPRFAIESPFYVAARGFSAESLVPRNQDVELAELTPTTAALKNPCAKIVYDEYNHERYPPGDPSKRAFAYFVLSGGRFVYASLLRLLVLKFVLSMSASKDVLALASLEVDLSSIEPGTTVTVKWRGKPVFIRRRTEDDVKLANSVDVTSLRDPQEDAVRVKNPEWLVVIGVCTHLGCIPLPNSGDFGGWFCPCHGSHYDISGRIRKGPAPYNLEVPTYSFLEDNKMLIG

SEQ ID NO: 26561 - DNA, 2075 bp, Triticum aestivum
ctctctccgcttctattctcttcctgccaggctccgtccgtccgccaccgatccgtcatcccctctgcgcccccttctccggcagccgccgcccgcccgccgtcgacatcccccaggggtccgcccggccctccgccgcatcggccatggcgtcgccggcgctcatctccgacaccgaccagtggaaggccctccaggcgcacgtcggcgcgatccacaagacgcacctgcgcgacctcatgacggacgccgatcgatgcaaggcaatgacagccgaattcgagggcgtcttcctggactactcgaggcagcaggccaccacggagaccgtcgacaagctcttcaagctggcagaggctgcaaagctcaaggagaagattgacaagatgtttaaaggcgaaaagataaataccacggagaacagatcagtgctccatgtggctttgagagctccaagagatgcagtcataaacagtgacggtgtgaacgtggtccccgaagtttgggctgttaaggataaaatcaagcagttttcagagactttcaggagtggctcatgggttggggcaaccgggaaaccgttgacaaatgttgtctcagttggaattggtggcagcttccttggacctctgtttgtgcatacggctctccagactgacccagaagcagcagaatctgccaaaggccgacaactgagatttcttgcaaatgttgatccggttgatgttgcacggagcatcaaagatttagaccctgcaaccactcttgttgtggttgtctcaaagaccttcacgacagctgaaacaatgttaaatgctcgaactatcaaggagtggattgtctcttctcttggacctcaggctgtttccaaacacatgattgctgtcagtactaatcttaagcttgtcaaggagttcggaattgaccctaacaacgcctttgcattctgggactgggttggcggccgctatagtgtttgcagtgctgtcggtgttctgcccttatctcttcagtatggatttccaattgttcagaaatttctggagggtgcttccagcattgacaaccacttccacacatcttcatttgagaaaaatatacctgtactccttggtttgttgagtgtgtggaatgtttcatttcttggatatccggctagggcaatattgccatactctcaagcacttgagaaactagcaccacatattcagcagcttagcatggagagtaatggaaagggtgtctccattgatggtgttcgacttccatatgaggctggtgaaattgattttggtgaacctggaacaaacgggcaacacagcttctatcaattaatccatcagggaagagttattccttgtgattttattggtgtcataaaaagccagcagcctgtttacttgaaaggggaaacggttagcaatcatgatgagttgatgtccaatttctttgctcagcctgacgcacttgcttatggaaagactcctgaacaattacgcagcgagaaagttcccgaaaatcttatctctcacaagacttttcagggcaaccggccatcactgagtttcttgctgtcttcattatctgcctatgagattggacagcttttatccatctatgagcaccggatcgcagttcagggtttcatatggggaatcaactcgtttgaccagtggggagtggagctgggcaagtcactggcttctacagtgaggaaacagttgcatgcatcacgcatggaaggaaagcccgtcgagggcttcaaccccagcagcgcaagtttgctcacacggtttcttgcggttaaaccatcaaccccatatgacacaacagtgcttccaaaagtgtaagccgagggaggtttagtagtcctaaaaaaagaagtgtaacctgaggttgagactgataatcgacaagctatgttgagcttgtggcataacaagttttcttccttctttcttgcgacttgttacaaccagtctggttgtactgtaattttgaagttcctcttgcttcagcttggagaaagacaagtaaactatgacgaaataatgaaataaatatatcgactcgtg

SEQ ID NO: 26562 - protein, 615 aa, Triticum aestivum
LSASILFLPGSVRPPPIRHPLCAPFSGSRRPPAVDIPQGSARPSAASAMASPALISDTDQWKALQAHVGAIHKTHLRDLMTDADRCKAMTAEFEGVFLDYSRQQATTETVDKLFKLAEAAKLKEKIDKMFKGEKINTTENRSVLHVALRAPRDAVINSDGVNVVPEVWAVKDKIKQFSETFRSGSWVGATGKPLTNVVSVGIGGSFLGPLFVHTALQTDPEAAESAKGRQLRFLANVDPVDVARSIKDLDPATTLVVVVSKTFTTAETMLNARTIKEWIVSSLGPQAVSKHMIAVSTNLKLVKEFGIDPNNAFAFWDWVGGRYSVCSAVGVLPLSLQYGFPIVQKFLEGASSIDNHFHTSSFEKNIPVLLGLLSVWNVSFLGYPARAILPYSQALEKLAPHIQQLSMESNGKGVSIDGVRLPYEAGEIDFGEPGTNGQHSFYQLIHQGRVIPCDFIGVIKSQQPVYLKGETVSNHDELMSNFFAQPDALAYGKTPEQLRSEKVPENLISHKTFQGNRPSLSFLLSSLSAYEIGQLLSIYEHRIAVQGFIWGINSFDQWGVELGKSLASTVRKQLHASRMEGKPVEGFNPSSASLLTRFLAVKPSTPYDTTVLPKV

SEQ ID NO: 26563 - protein, 567 aa, Triticum aestivum
MASPALISDTDQWKALQAHVGAIHKTHLRDLMTDADRCKAMTAEFEGVFLDYSRQQATTETVDKLFKLAEAAKLKEKIDKMFKGEKINTTENRSVLHVALRAPRDAVINSDGVNVVPEVWAVKDKIKQFSETFRSGSWVGATGKPLTNVVSVGIGGSFLGPLFVHTALQTDPEAAESAKGRQLRFLANVDPVDVARSIKDLDPATTLVVVVSKTFTTAETMLNARTIKEWIVSSLGPQAVSKHMIAVSTNLKLVKEFGIDPNNAFAFWDWVGGRYSVCSAVGVLPLSLQYGFPIVQKFLEGASSIDNHFHTSSFEKNIPVLLGLLSVWNVSFLGYPARAILPYSQALEKLAPHIQQLSMESNGKGVSIDGVRLPYEAGEIDFGEPGTNGQHSFYQLIHQGRVIPCDFIGVIKSQQPVYLKGETVSNHDELMSNFFAQPDALAYGKTPEQLRSEKVPENLISHKTFQGNRPSLSFLLSSLSAYEIGQLLSIYEHRIAVQGFIWGINSFDQWGVELGKSLASTVRKQLHASRMEGKPVEGFNPSSASLLTRFLAVKPSTPYDTTVLPKV

SEQ ID NO: 26564 - protein, 536 aa, Triticum aestivum
MTDADRCKAMTAEFEGVFLDYSRQQATTETVDKLFKLAEAAKLKEKIDKMFKGEKINTTENRSVLHVALRAPRDAVINSDGVNVVPEVWAVKDKIKQFSETFRSGSWVGATGKPLTNVVSVGIGGSFLGPLFVHTALQTDPEAAESAKGRQLRFLANVDPVDVARSIKDLDPATTLVVVVSKTFTTAETMLNARTIKEWIVSSLGPQAVSKHMIAVSTNLKLVKEFGIDPNNAFAFWDWVGGRYSVCSAVGVLPLSLQYGFPIVQKFLEGASSIDNHFHTSSFEKNIPVLLGLLSVWNVSFLGYPARAILPYSQALEKLAPHIQQLSMESNGKGVSIDGVRLPYEAGEIDFGEPGTNGQHSFYQLIHQGRVIPCDFIGVIKSQQPVYLKGETVSNHDELMSNFFAQPDALAYGKTPEQLRSEKVPENLISHKTFQGNRPSLSFLLSSLSAYEIGQLLSIYEHRIAVQGFIWGINSFDQWGVELGKSLASTVRKQLHASRMEGKPVEGFNPSSASLLTRFLAVKPSTPYDTTVLPKV

SEQ ID NO: 26565 - DNA, 1145 bp, Triticum aestivum
ctcactcatcacccacacagcgtgcacaacacaaacacaaacacagatcgatcgagatccagagcaaccaggagcaatggcgggcgagaagggcctggtgctgctggacttctgggtgagcccgttcgggcagcgcgtccgcatcgcgctggcggagaagggcctgccctacgagtacgcggaggaggacctgatggccggcaagagcgaccgcctcctccgcgccaacccggtgcacaagaagatcccggtgctcctccacgacggccgccccgtcaacgagtccctcatcatcctccagtacctggaggacgccttcccggacgccccggcactgctcccctccgacccctacgcgcgcgcgcaggcccgcttctgggccgactacgtcgacaagaaggtctacgactgcggctcccgcctctggaagctcaagggcgagccgcaggcgcaggcgcgcgccgagatgctggacatcctcaagaccctcgacggcgcgctcggggacaagcccttcttcggcggcgacaagttcgggttcgtcgacgccgccttcgcgcccttcaccgcgtggttccacagctacgagaggtacggcgagttcagcctgccggaggtggcgcccaagatcgcggcgtgggccaagcgctgcggcgagcgggagagcgtcgccaagagcctctactcgccggacaaggtgtacgacttcatcggcctgctcaagaagaagtacggcatcgagtagccgcgcggacggacgggcggccatgcatgcgccatcccgccggccggccaataaatcagggagcgtttgggtggcctacagtgcgtacgtttcggatattgatttcttcgtggagtctagtgttcgtgcgtgtgtggttggtggtagttgtttggttttgttagtgtgagtgcgtcgtgggtgccgtgtactcctgtgtgtgtgtcaagtgttgccacctgcgattccattttcattccgtgcgatgaataaattaagaaggggtcttctggacgcgtctagcgggcgcacggccgcctaggatgcttagcgagcggcccgacacttcagataatttcttgtctctccttttaactagaatagtcatctagtagtccctttttctgctagtattaaagtc

SEQ ID NO: 26566 - protein, 302 aa, Triticum aestivum
LTHHPHSVHNTNTNTDRSRSRATRSNGGREGPGAAGLLGEPVRAARPHRAGGEGPALRVRGGGPDGRQERPPPPRQPGAQEDPGAPPRRPPRQRVPHHPPVPGGRLPGRPGTAPLRPLRARAGPLLGRLRRQEGLRLRLPPLEAQGRAAGAGARRDAGHPQDPRRRARGQALLRRRQVRVRRRRLRALHRVVPQLREVRRVQPAGGGAQDRGVGQALRRAGERRQEPLLAGQGVRLHRPAQEEVRHRVAARTDGRPCMRHPAGRPINQGAFGWPTVRTFRILISSWSLVFVRVWLVVVVWFC

SEQ ID NO: 26567 - protein, 247 aa, Triticum aestivum
SLITHTACTTQTQTQIDRDPEQPGAMAGEKGLVLLDFWVSPFGQRVRIALAEKGLPYEYAEEDLMAGKSDRLLRANPVHKKIPVLLHDGRPVNESLIILQYLEDAFPDAPALLPSDPYARAQARFWADYVDKKVYDCGSRLWKLKGEPQAQARAEMLDILKTLDGALGDKPFFGGDKFGFVDAAFAPFTAWFHSYERYGEFSLPEVAPKIAAWAKRCGERESVAKSLYSPDKVYDFIGLLKKKYGIE

SEQ ID NO: 26568 - protein, 222 aa, Triticum aestivum
MAGEKGLVLLDFWVSPFGQRVRIALAEKGLPYEYAEEDLMAGKSDRLLRANPVHKKIPVLLHDGRPVNESLIILQYLEDAFPDAPALLPSDPYARAQARFWADYVDKKVYDCGSRLWKLKGEPQAQARAEMLDILKTLDGALGDKPFFGGDKFGFVDAAFAPFTAWFHSYERYGEFSLPEVAPKIAAWAKRCGERESVAKSLYSPDKVYDFIGLLKKKYGIE

SEQ ID NO: 26569 - DNA, 642 bp, Triticum aestivum
  misc_feature (593)..(593): n is a, c, g, or t
attacttaaccggcccgtccccaatcgcagcacactcctcaccgccacctccaagcccccggcgacgccccgcctcgacctcgccgccgctccagcccacggttcgcggctccccggccgccgcagccggattcgcctcctcgccggcgggtgaagtcggtcaaccctaggctcaggcgtttcgcatcgcccgagccccctcggcgtcggctcgggcccgggccgctccctccttcctcgaaaccctagattccgccgcccccccgcgcggtgcgatcgtgcggcccgcggcctcccgcgatgcccatataaggaggccccctctccccccccgaggctctcgacacaaccgctctcgcgctctagggtttggcgccgccgccgccctcgaggacaatgggacgcacggtggtttccgacgaggaagaggacgacttcatcgaggccgaggaagaggacgagccgcggccgtcgcggagggccagggatgacgacgacgagcaggacgacgatgaggaggaggaggatgatgaagatgagggacagaatgagtacgagaaggatggcttcatagtggatgatgcggatgaagncgaggaggaggaggaggaggaggcgagagctagtgatgatgaaagacgc

SEQ ID NO: 26570 - protein, 82 aa, Triticum aestivum
  misc_feature (66)..(66): Xaa can be any naturally occurring amino acid
MGRTVVSDEEEDDFIEAEEEDEPRPSRRARDDDDEQDDDEEEEDDEDEGQNEYEKDGFIVDDADEXEEEEEEEARASDDERR

SEQ ID NO: 26571 - protein, 55 aa, Triticum aestivum
YLTGPSPIAAHSSPPPPSPRRRPASTSPPLQPTVRGSPAAAAGFASSPAGEVGQP

SEQ ID NO: 26572 - protein, 50 aa, Triticum aestivum
LLNRPVPNRSTLLTATSKPPATPRLDLAAAPAHGSRLPGRRSRIRLLAGG

SEQ ID NO: 26573 - DNA, 752 bp, Triticum aestivum
agcgcgtccccattccgatccgttggcttcctgttcatacattctcccctcccggcgccgcctccagcctagggtttcctcccgccgtccgccgccatggctcgccgcagcggaggaggaaggtcttcccgccctgctccacgtgctgctccagtgagaaacccaccagcgccagcccgtcaagctcctccacctgctactacccagaatagcggtggtggtatcatgagtggaattgggtccaccattgctcagggcatggctttcggtactggcagtgccatggcgcacagggctgttgatgctgtgatgggtccccgcaccattcagcatgagactgttgtcggtgaggctgctgcatctatgactccaatggacaatgctgctgatgacaagtgtggcaacccttccaaggccttccaagattgcatcaaccactacggaagcgacatcagcaagtgccagttctacctcgacatgctgaacgagtgccgccgtggaggagcaggagctggtgcaactctttaagctactatctttgcttgattgcggcttaattggtcggaacctgttttcagtcatgatgatgatgatatatatctcctaaataattcattggcaatattatgaacctatgccacagcttatgtctattacctaccctagtttgtggtctctgttgtcctgggagtatttccttgtattgatgttggaattaccttcatggcagtgggtttataaatatggagttt

SEQ ID NO: 26574 - protein, 143 aa, Triticum aestivum
MARRSGGGRSSRPAPRAAPVRNPPAPARQAPPPATTQNSGGGIMSGIGSTIAQGMAFGTGSAMAHRAVDAVMGPRTIQHETVVGEAAASMTPMDNAADDKCGNPSKAFQDCINHYGSDISKCQFYLDMLNECRRGGAGAGATL

SEQ ID NO: 26575 - protein, 100 aa, Triticum aestivum
MSGIGSTIAQGMAFGTGSAMAHRAVDAVMGPRTIQHETVVGEAAASMTPMDNAADDKCGNPSKAFQDCINHYGSDISKCQFYLDMLNECRRGGAGAGATL

SEQ ID NO: 26576 - protein, 89 aa, Triticum aestivum
MAFGTGSAMAHRAVDAVMGPRTIQHETVVGEAAASMTPMDNAADDKCGNPSKAFQDCINHYGSDISKCQFYLDMLNECRRGGAGAGATL

SEQ ID NO: 26577 - DNA, 1826 bp, Triticum aestivum
tatcgaattcggcacgagattgtggaatatgcataccagcggacgaagaattttgagaggctgacttttctgtatcttattactggttacatggacaaggtgggcttcatgtgcaaaattgccggacagaataacaatttgatgggtcagttccacaatgcattgtatcttggggatgctaggaagcgagctgagatcctggagaatgctggacagcttcctcttgcctatgtcactgccgccactcatgggctcactgaaattgctgaaaggcttgctgctgagttgggtgagaatgttccttctctacctgaaggaaaaactcgctcacttttgattccgcccgcacctctcatatccagcgttgattggccattgctccgggtgatgcgtggcatatttgagggtggactggatgctactgggagagcagaagttgaggaagatgatgaagctgctggtgctgactggggtgatgaggacttggatattgtggatgcaagtgatgcagtggcaaatgggggtgatggttttgatcccgaggaaggtgaagcgaacgaggtggatggggaggaaggtggttgggatcttgaagatctggaattgcctgaaccagagaccccaaaagctgctggaaatgctcgctctactgtgtttgttgctcctacaccaggaatgcctgtcagccaaatttggactcagaaatcttctcttgctggggagcatgcagcagcaggcaactttgacactgcaatgaggttgctcagccgtcaagttgggcacaaaaactttgttcccctgaaacccattttttcgatttcaaaagggcagtcattcaatcttcgcgcacttgcaactgctcccgttatatcaattgctgttgagaaaggttggagtgagtcctcaattcctaacgtgaggggccctccttcactagttttcaccttctcacaaatggaagacagactcaaggcagcctacaaagccacaacagaggggaagttcccagaagcgctgagacagttcctcaacatattgcataccattcccctgatcgtggtggactcgcggagagaagttgatgaagtgaaggagttgatcgagatagtgagggagtatgttcttggtctaagaatggaactcaagaggaaggaattgaaggacaacgtcaaccggcaacaggaactggcggcctacttcaccaactgcaagctccagagggttcacatgaggcttgtgctctcaaacgccatggctctatgctacaagcagaagaactttgcgaccgcggagcactttgcaaggctgctcctcgagaacagccccaacgaggtccaagcgaagaaggctcggcaggtgcagcagcagtgcaacggcaagcaggacagccatgagctcaactacgactacagaaatccgttcgtcgtctgtggctcgacgtatgttcccatctaccgcggccaaaaggatatctcgtgcgcatactgcggatcccggtttgttcctaacattgaagggcagctttgtaccatatgcgagctggctgtggtcggcgcggacgcctcgggcctcctgtgctcccctacacaatgagatgagcggaagaggctagtcgttagagctcccctatattctttctagtctcgtaaagtcttgtcttatattttaccaggaggtttactgaatggtaaggaataagcataatagtacatggttttgtcagagtttttctcatacttcttctatctctctaacccccgttttttttccttgagatgctgttacatgcttgagcttatcatgatcaactcatgcaaactttgcct

SEQ ID NO: 26578 - protein, 530 aa, Triticum aestivum
YRIRHEIVEYAYQRTKNFERLTFLYLITGYMDKVGFMCKIAGQNNNLMGQFHNALYLGDARKRAEILENAGQLPLAYVTAATHGLTEIAERLAAELGENVPSLPEGKTRSLLIPPAPLISSVDWPLLRVMRGIFEGGLDATGRAEVEEDDEAAGADWGDEDLDIVDASDAVANGGDGFDPEEGEANEVDGEEGGWDLEDLELPEPETPKAAGNARSTVFVAPTPGMPVSQIWTQKSSLAGEHAAAGNFDTAMRLLSRQVGHKNFVPLKPIFSISKGQSFNLRALATAPVISIAVEKGWSESSIPNVRGPPSLVFTFSQMEDRLKAAYKATTEGKFPEALRQFLNILHTIPLIVVDSRREVDEVKELIEIVREYVLGLRMELKRKELKDNVNRQQELAAYFTNCKLQRVHMRLVLSNAMALCYKQKNFATAEHFARLLLENSPNEVQAKKARQVQQQCNGKQDSHELNYDYRNPFVVCGSTYVPIYRGQKDISCAYCGSRFVPNIEGQLCTICELAVVGADASGLLCSPTQ

SEQ ID NO: 26579 - protein, 500 aa, Triticum aestivum
MDKVGFMCKIAGQNNNLMGQFHNALYLGDARKRAEILENAGQLPLAYVTAATHGLTEIAERLAAELGENVPSLPEGKTRSLLIPPAPLISSVDWPLLRVMRGIFEGGLDATGRAEVEEDDEAAGADWGDEDLDIVDASDAVANGGDGFDPEEGEANEVDGEEGGWDLEDLELPEPETPKAAGNARSTVFVAPTPGMPVSQIWTQKSSLAGEHAAAGNFDTAMRLLSRQVGHKNFVPLKPIFSISKGQSFNLRALATAPVISIAVEKGWSESSIPNVRGPPSLVFTFSQMEDRLKAAYKATTEGKFPEALRQFLNILHTIPLIVVDSRREVDEVKELIEIVREYVLGLRMELKRKELKDNVNRQQELAAYFTNCKLQRVHMRLVLSNAMALCYKQKNFATAEHFARLLLENSPNEVQAKKARQVQQQCNGKQDSHELNYDYRNPFVVCGSTYVPIYRGQKDISCAYCGSRFVPNIEGQLCTICELAVVGADASGLLCSPTQ

SEQ ID NO: 26580 - protein, 494 aa, Triticum aestivum
MCKIAGQNNNLMGQFHNALYLGDARKRAEILENAGQLPLAYVTAATHGLTEIAERLAAELGENVPSLPEGKTRSLLIPPAPLISSVDWPLLRVMRGIFEGGLDATGRAEVEEDDEAAGADWGDEDLDIVDASDAVANGGDGFDPEEGEANEVDGEEGGWDLEDLELPEPETPKAAGNARSTVFVAPTPGMPVSQIWTQKSSLAGEHAAAGNFDTAMRLLSRQVGHKNFVPLKPIFSISKGQSFNLRALATAPVISIAVEKGWSESSIPNVRGPPSLVFTFSQMEDRLKAAYKATTEGKFPEALRQFLNILHTIPLIVVDSRREVDEVKELIEIVREYVLGLRMELKRKELKDNVNRQQELAAYFTNCKLQRVHMRLVLSNAMALCYKQKNFATAEHFARLLLENSPNEVQAKKARQVQQQCNGKQDSHELNYDYRNPFVVCGSTYVPIYRGQKDISCAYCGSRFVPNIEGQLCTICELAVVGADASGLLCSPTQ

SEQ ID NO: 26581 - DNA, 1139 bp, Triticum aestivum
acatgcggctgatcaccgcagacggtgagaggcaaaacatggactttgtcttcgggtgtgcacatgatcagcaaggaaagcttctggactcaccagcaagtactgatgggatccttggcctcagcaatggggcaatgagcctccctacccagctagccaagcaagggatcatttccaacgttttcggccattgcatcgccacggatcccagcagtagtggctacatgtttctcggtgatgattacgttcccagatggggaatgacatgggttcccgtccgcaatggtccagaggacgtgtacagcacggtagtacagaaggtgaactatggaggtcaggagcttaatgtgcgagagcaggctgggaagctgactcaagtgatcttcgacagcgggagctcatacacttattttccacatgaaatatacacaagcctgattgcttcgcttgaagcggcctctccaggctttgcacgcgatgaatcagatcaaacgctgcctttctgcatgaagcctaattttccagtgaggtctgtggatgatgtgaagcaactgttcaagccattgcttctgcatttcagcaaaacatggtttgtgatcccaagaacgttcgcaattgctcccgagaactacttgatcatcagcgacaagggcaatgtctgcctaggggtgcttgatggaactgagattggccacagctcaacaatagtaattggagatgtttccctctgtgggaagttggttgcgtatgacaacgacgagaatcagatcggatgggctcagtcaggctgcaccaggccacagaaagcaagcagggttccgttcttcctttcgagagcattgcgcagtcaacttctttaaatggcacagacagatgatcaccccgtgttcgcctgaccatgcgctcaccttttcgacgcgcaattctgcgaccgaagctgccataatcatataatggatgtagttaaacaagggatataggaaaaccaaattggaagaaaggtgaatagatatagccagtacctgtaatttttctctgctgtatatataccaaagaagcagaactctgcatatctatggatatgctgtagagtatatctcatccacttgtaagactaagtggtgaagcatatcaatttc

SEQ ID NO: 26582 - protein, 285 aa, Triticum aestivum
MRLITADGERQNMDFVFGCAHDQQGKLLDSPASTDGILGLSNGAMSLPTQLAKQGIISNVFGHCIATDPSSSGYMFLGDDYVPRWGMTWVPVRNGPEDVYSTVVQKVNYGGQELNVREQAGKLTQVIFDSGSSYTYFPHEIYTSLIASLEAASPGFARDESDQTLPFCMKPNFPVRSVDDVKQLFKPLLLHFSKTWFVIPRTFAIAPENYLIISDKGNVCLGVLDGTEIGHSSTIVIGDVSLCGKLVAYDNDENQIGWAQSGCTRPQKASRVPFFLSRALRSQLL

SEQ ID NO: 26583 - protein, 273 aa, Triticum aestivum
MDFVFGCAHDQQGKLLDSPASTDGILGLSNGAMSLPTQLAKQGIISNVFGHCIATDPSSSGYMFLGDDYVPRWGMTWVPVRNGPEDVYSTVVQKVNYGGQELNVREQAGKLTQVIFDSGSSYTYFPHEIYTSLIASLEAASPGFARDESDQTLPFCMKPNFPVRSVDDVKQLFKPLLLHFSKTWFVIPRTFAIAPENYLIISDKGNVCLGVLDGTEIGHSSTIVIGDVSLCGKLVAYDNDENQIGWAQSGCTRPQKASRVPFFLSRALRSQLL

SEQ ID NO: 26584 - protein, 241 aa, Triticum aestivum
MSLPTQLAKQGIISNVFGHCIATDPSSSGYMFLGDDYVPRWGMTWVPVRNGPEDVYSTVVQKVNYGGQELNVREQAGKLTQVIFDSGSSYTYFPHEIYTSLIASLEAASPGFARDESDQTLPFCMKPNFPVRSVDDVKQLFKPLLLHFSKTWFVIPRTFAIAPENYLIISDKGNVCLGVLDGTEIGHSSTIVIGDVSLCGKLVAYDNDENQIGWAQSGCTRPQKASRVPFFLSRALRSQLL

SEQ ID NO: 26585 - DNA, 1600 bp, Triticum aestivum
agagcagagcagaacttgaagcagaacagagccaaaaccaacccaaaaagcatttcgtgctaggacagtgaagccatggagaagaccgttgtcctgtaccctggcgtcggcgtcggccacctggtgccgatggtggaggtcgccaagctgttcctcaagcacggcctggccgtcaccgtggtgctcatcgatccgcaggtcgagtccacggacttctccgccgccgtcgcccgcgcgagggcctccaacccctccgtcgccttccacgtcctgccgccgccgcccgccgattccaactccaacagcgcgcccacgcaccccgtcatccagattttccggctcctgaaatccatgaacgctcccctcctcgacttcctccgctcgctgccctccgtcgacgcactcgtcctcgacatgttctgcgtcgacgcccaagatgtcgcggccgagctcaagctgccggtctactacttctacgcgtcggccgccgccgatctcgcgctcttcttcaacctgccgagcaagctcgccggcagtaaggtaaaggagctcggcgactctatcatcactttcccgggtgttcctccgttaaaggcttcggacttacccgaagtcacccacaacgatgaagtactcaaggccatctcaggcatgttcgaccgaatgccagatgccaacggaattctcattaattccttcgagtcgctggagacgcgggcggtgcgcgctctcaaggacgggctctgcgtccctggtcgtgccacgccgccggtctactgcatcgggccgttggtttcgggaggcggagacaaggagcacgagtgcctccggtggctggacgcgcagccggaccagagcgtggtgttcctctccttcggcagcatgggcacgttctccggtaagcagctcgaggagattgcaactggattagaaaagtcaggggagagattcctgtgggtcgtgcggagcccgcgcaatcccgactacaagtacggcgattcgctgccggagcccgatctcgacgcgctcatgccggaagggttcttggagaggaccaaggacagagggctcgtgatcaagtcttgggcgccgcaggtggaggtcctgcgccacagggcgaccggcgcattcatgacgcactgcggctggaactcgacgctggagggcatcacggcagggttgccgctgctgtgctggccgctgtacgcggagcagaaggtgaacaaggtgcacatagtggagggaatgaagctcggggtggagatgagaggctacaacgaagaggtggttaaggccgaggaagtggaggagaaggtcaggtgggttatggcgtccgagggcggcaaggcgctcagggagcgggtggcggcggcgaaggatgcagctgccgaggcgctcaaggaagggggctcgtccgacttggcgtttgtccaattcctcaacgacctggacacttccatagccccaaccgtgcagcattgatgtgaaacttgtaatctttatttaatgttcgattcgtagtagcgggctatctcattttgatattatatgcggactaagtttatttccgaaccctttcgcagctactgttggtttgttc

SEQ ID NO: 26586 - protein, 468 aa, Triticum aestivum
MEKTVVLYPGVGVGHLVPMVEVAKLFLKHGLAVTVVLIDPQVESTDFSAAVARARASNPSVAFHVLPPPPADSNSNSAPTHPVIQIFRLLKSMNAPLLDFLRSLPSVDALVLDMFCVDAQDVAAELKLPVYYFYASAAADLALFFNLPSKLAGSKVKELGDSIITFPGVPPLKASDLPEVTHNDEVLKAISGMFDRMPDANGILINSFESLETRAVRALKDGLCVPGRATPPVYCIGPLVSGGGDKEHECLRWLDAQPDQSVVFLSFGSMGTFSGKQLEEIATGLEKSGERFLWVVRSPRNPDYKYGDSLPEPDLDALMPEGFLERTKDRGLVIKSWAPQVEVLRHRATGAFMTHCGWNSTLEGITAGLPLLCWPLYAEQKVNKVHIVEGMKLGVEMRGYNEEVVKAEEVEEKVRWVMASEGGKALRERVAAAKDAAAEALKEGGSSDLAFVQFLNDLDTSIAPTVQH

SEQ ID NO: 26587 - protein, 450 aa, Triticum aestivum
MVEVAKLFLKHGLAVTVVLIDPQVESTDFSAAVARARASNPSVAFHVLPPPPADSNSNSAPTHPVIQIFRLLKSMNAPLLDFLRSLPSVDALVLDMFCVDAQDVAAELKLPVYYFYASAAADLALFFNLPSKLAGSKVKELGDSIITFPGVPPLKASDLPEVTHNDEVLKAISGMFDRMPDANGILINSFESLETRAVRALKDGLCVPGRATPPVYCIGPLVSGGGDKEHECLRWLDAQPDQSVVFLSFGSMGTFSGKQLEEIATGLEKSGERFLWVVRSPRNPDYKYGDSLPEPDLDALMPEGFLERTKDRGLVIKSWAPQVEVLRHRATGAFMTHCGWNSTLEGITAGLPLLCWPLYAEQKVNKVHIVEGMKLGVEMRGYNEEVVKAEEVEEKVRWVMASEGGKALRERVAAAKDAAAEALKEGGSSDLAFVQFLNDLDTSIAPTVQH

SEQ ID NO: 26588 - protein, 376 aa, Triticum aestivum
MNAPLLDFLRSLPSVDALVLDMFCVDAQDVAAELKLPVYYFYASAAADLALFFNLPSKLAGSKVKELGDSIITFPGVPPLKASDLPEVTHNDEVLKAISGMFDRMPDANGILINSFESLETRAVRALKDGLCVPGRATPPVYCIGPLVSGGGDKEHECLRWLDAQPDQSVVFLSFGSMGTFSGKQLEEIATGLEKSGERFLWVVRSPRNPDYKYGDSLPEPDLDALMPEGFLERTKDRGLVIKSWAPQVEVLRHRATGAFMTHCGWNSTLEGITAGLPLLCWPLYAEQKVNKVHIVEGMKLGVEMRGYNEEVVKAEEVEEKVRWVMASEGGKALRERVAAAKDAAAEALKEGGSSDLAFVQFLNDLDTSIAPTVQH

SEQ ID NO: 26589 - DNA, 1184 bp, Triticum aestivum
acctaaccaaagccgcaccacacgtcccgaggcaggcgaaggggcagagagggagcggccatggcggcggtggtcggcgtcctcgcgctgcagggctcctacaacgagcacatggccgcgctgaggaggatcggggccaagggggtggaggtgcggaaggcggagcagctgcttggcatcgactccctcatcatccccggcggcgagagcaccaccatggccaagctcgccaacttccacaacctctttcctgcacttcgagagtttgtcggcacaggaaaacccgtatggggaacctgtgctgggctcatcttccttgctaacaaggcagtagggcagaaaacaggaggccaggagcttgttggtggactagattgtactgtccaccgtaacttttttggtagccagcttcaaagcttcgaaacagaactttcagtgccaatgcttgcagagaaggaaggagggagtcatacatgccgtggcgtatttatacgagcacctgctatcctagaagtaggccaggatgttgaagtattagccgattgccctgttcctgctggcagacccagcattacaataacatctggcgagggtttggaggaccaagtgtactccaaagatcgggtgattgttgcagttcggcaagggaacatccttgccaccgcattccacccagagctaacatcagactctagatggcatcgcctcttcttggacatggacaaagaatctcaagcaaaggccttggctgcgctatcgctatctgcatcctcaaacgatgcagatgttgggtcgaagaataaggctcctgatctacccattttcgagtagagctaggaaacccgaaatttgattatccggttggtgacaggaaaggattctgggcatttgttatgcccagtccaaagaatatttttggcgtcaaagctgtgccaatcaaaataatggccattgtgctccaaacactatgatattgctatgacaaggaggctgaccagttggattgggtctgtgtgtcagtagtacttttttcgaaaaggggtgctttattacttaaaagatttaagcattacacctggcctctgcataactgagatgcacacaaccaacgtcactgtagtactacgcgtctcgtgaatgcctgaatggtgatgtatgtttgtcatggttttcatgtcagcttg

SEQ ID NO: 26590 - protein, 256 aa, Triticum aestivum
MAAVVGVLALQGSYNEHMAALRRIGAKGVEVRKAEQLLGIDSLIIPGGESTTMAKLANFHNLFPALREFVGTGKPVWGTCAGLIFLANKAVGQKTGGQELVGGLDCTVHRNFFGSQLQSFETELSVPMLAEKEGGSHTCRGVFIRAPAILEVGQDVEVLADCPVPAGRPSITITSGEGLEDQVYSKDRVIVAVRQGNILATAFHPELTSDSRWHRLFLDMDKESQAKALAALSLSASSNDADVGSKNKAPDLPIFE

SEQ ID NO: 26591 - protein, 239 aa, Triticum aestivum
MAALRRIGAKGVEVRKAEQLLGIDSLIIPGGESTTMAKLANFHNLFPALREFVGTGKPVWGTCAGLIFLANKAVGQKTGGQELVGGLDCTVHRNFFGSQLQSFETELSVPMLAEKEGGSHTCRGVFIRAPAILEVGQDVEVLADCPVPAGRPSITITSGEGLEDQVYSKDRVIVAVRQGNILATAFHPELTSDSRWHRLFLDMDKESQAKALAALSLSASSNDADVGSKNKAPDLPIFE

SEQ ID NO: 26592 - protein, 204 aa, Triticum aestivum
MAKLANFHNLFPALREFVGTGKPVWGTCAGLIFLANKAVGQKTGGQELVGGLDCTVHRNFFGSQLQSFETELSVPMLAEKEGGSHTCRGVFIRAPAILEVGQDVEVLADCPVPAGRPSITITSGEGLEDQVYSKDRVIVAVRQGNILATAFHPELTSDSRWHRLFLDMDKESQAKALAALSLSASSNDADVGSKNKAPDLPIFE

SEQ ID NO: 26593 - DNA, 833 bp, Triticum aestivum
aacaaatctccatcaagaaagtgtacccatcgacgcacaaagcatacacgagggtgaagaagagatggatccagccgagggccgaaggatactggtggccgtggacgagggcgacgagagcgtccacgcgctgcgatggtgcctcaccaacttcgccacgcgcggcgacggcgagcttgccccaccggacaccatcctcctgctctacgtccggccgacgccgcccacctactccgtgctcgacgcctccggctatctgtttgtcaatgaggcgaccgccgcgatcgacgggtacagccgggcggtggcggacgcggtggtggacaaggcgcagaagctctgcgcgctccacagcaaagagaacggcgaggtgaaggtgaaggtggatgtgaaggtggcggtcggggacgcccggagcgtcatctgcgacatggtggacaagctcggagccgacgtgctggtgatggggagccatggctatggatttttcaagagggctctcctcgggagtgtcagcgactactgcgtcaggaacgccaactgccccgttctcatcgtcaagttgaaataacagggccaactgttcttgggagattagcaatgatgcccgtacttgcatttgctgtttggcattaaatttctttctactactatttactactgtatttgttatgcctccttttttttttttcttcacttttggtcgcttcgcgtgtaacctgctagaggagctaaggggaagtgccaagcaatgtgtctcaagatccccgcgacttgtatatatgccgctgttactgctcggttatcggttgaatttatcgtattggacatgt

SEQ ID NO: 26594 - protein, 189 aa, Triticum aestivum
TNLHQESVPIDAQSIHEGEEEMDPAEGRRILVAVDEGDESVHALRWCLTNFATRGDGELAPPDTILLLYVRPTPPTYSVLDASGYLFVNEATAAIDGYSRAVADAVVDKAQKLCALHSKENGEVKVKVDVKVAVGDARSVICDMVDKLGADVLVMGSHGYGFFKRALLGSVSDYCVRNANCPVLIVKLK

SEQ ID NO: 26595 - protein, 168 aa, Triticum aestivum
MDPAEGRRILVAVDEGDESVHALRWCLTNFATRGDGELAPPDTILLLYVRPTPPTYSVLDASGYLFVNEATAAIDGYSRAVADAVVDKAQKLCALHSKENGEVKVKVDVKVAVGDARSVICDMVDKLGADVLVMGSHGYGFFKRALLGSVSDYCVRNANCPVLIVKLK

SEQ ID NO: 26596 - protein, 123 aa, Triticum aestivum
QISIKKVYPSTHKAYTRVKKRWIQPRAEGYWWPWTRATRASTRCDGASPTSPRAATASLPHRTPSSCSTSGRRRPPTPCSTPPAICLSMRRPPRSTGTAGRWRTRWWTRRRSSARSTAKRTAR

SEQ ID NO: 26597 - DNA, 1488 bp, Triticum aestivum
cagtcgcgagcccccgcttccattctaatccgccccctcccgagacgccaaagccccaaacccctcgccctcccaaaccctaactctaaaacctccgccctcccgccgccgccgccgcccgattcccctccccaggccccgcatcccccgtccggcttgaacgatgtcgtccgacgaggaggtcagggaggagaaggagctcgacctctcctccaacgaggtcgtcaccaagtacaagaccgccgccgagatcatcaacaaggctctgaagttggtattgttggagtgcaagccgaaagccaagattgttgacatttgtgagaagggtgacaatttcataacagagcaaactgggaatgtctacaagaacgcgaagaggaagattgaaaggggcattgctttcccgacatgtgtatctgtgaacaacacagtctgtcatttctccccactggcaactgacgattctgtactcgaagaaaatgacatggtgaagatcgatatggcttgccatattgatggttttattgctgtggtggctcatacacatgtcatcaaaggtgggccggttactggaagagcagctaatgttcttgctgctgcaaacacagcagcagaagttgcaatgaggcttgttagacctggcaagaagaataaggatgtcactgaagcaattcagaaagttgctgctgcttatgattgtaaaattgttgaaggagttcttagccatcagctgaaacaattcgtcatcgatggtaacaaagtggtacttagtgtttcaaatgctgatacaaaggtggatgatgctgaatttgaagaaaatgaagtgtatgcaattgatattgtcaccagcactggcgagggaaagccgaagctattggatgagaagcagaccactatttacaagagagctgtagacaagaactatcacttgaagatgaaggcatcaaggttcatcttcagtgagattagccagaagttcccaatcatgccattcactgctagggcgctggaggagaagcgtgcacgcttaggtttggtagaatgcatgaatcatgagctgttgcagccataccctgttctacatgagaagcaaggtgacctggttgcccacatcaagttcaccgtgttgttgatgccaaatgggtctgacaagataacttcacatccactacagcaattggagccctcaaaatccatcgagggcgatgctgagatcaaggcttggctggctttgggcacaaagtcaaagaagaagggtggtggcaagaaaaagaaaggcaagaaaggagatgcagcagaagtagcagagcccatggaggtttctaaggacgcaccaagccaggaataattctcattttttttgaattgcttccgttacgtttgtacctgctcctttgctgcatctgattgttttatattacattcagctgtggggatttgagtacctttttttgaagtgtctaatgaaaatggttgatcctggcgcac

SEQ ID NO: 26598 - protein, 394 aa, Triticum aestivum
MSSDEEVREEKELDLSSNEVVTKYKTAAEIINKALKLVLLECKPKAKIVDICEKGDNFITEQTGNVYKNAKRKIERGIAFPTCVSVNNTVCHFSPLATDDSVLEENDMVKIDMACHIDGFIAVVAHTHVIKGGPVTGRAANVLAAANTAAEVAMRLVRPGKKNKDVTEAIQKVAAAYDCKIVEGVLSHQLKQFVIDGNKVVLSVSNADTKVDDAEFEENEVYAIDIVTSTGEGKPKLLDEKQTTIYKRAVDKNYHLKMKASRFIFSEISQKFPIMPFTARALEEKRARLGLVECMNHELLQPYPVLHEKQGDLVAHIKFTVLLMPNGSDKITSHPLQQLEPSKSIEGDAEIKAWLALGTKSKKKGGGKKKKGKKGDAAEVAEPMEVSKDAPSQE

SEQ ID NO: 26599 - protein, 287 aa, Triticum aestivum
MVKIDMACHIDGFIAVVAHTHVIKGGPVTGRAANVLAAANTAAEVAMRLVRPGKKNKDVTEAIQKVAAAYDCKIVEGVLSHQLKQFVIDGNKVVLSVSNADTKVDDAEFEENEVYAIDIVTSTGEGKPKLLDEKQTTIYKRAVDKNYHLKMKASRFIFSEISQKFPIMPFTARALEEKRARLGLVECMNHELLQPYPVLHEKQGDLVAHIKFTVLLMPNGSDKITSHPLQQLEPSKSIEGDAEIKAWLALGTKSKKKGGGKKKKGKKGDAAEVAEPMEVSKDAPSQE

SEQ ID NO: 26600 - protein, 282 aa, Triticum aestivum
MACHIDGFIAVVAHTHVIKGGPVTGRAANVLAAANTAAEVAMRLVRPGKKNKDVTEAIQKVAAAYDCKIVEGVLSHQLKQFVIDGNKVVLSVSNADTKVDDAEFEENEVYAIDIVTSTGEGKPKLLDEKQTTIYKRAVDKNYHLKMKASRFIFSEISQKFPIMPFTARALEEKRARLGLVECMNHELLQPYPVLHEKQGDLVAHIKFTVLLMPNGSDKITSHPLQQLEPSKSIEGDAEIKAWLALGTKSKKKGGGKKKKGKKGDAAEVAEPMEVSKDAPSQE

SEQ ID NO: 26601 - DNA, 743 bp, Triticum aestivum
aaaccctagccgccgccgcctcctccgcctcttcgtcctgcaagcagcgccgccgccttccaccggcccgagctccagccttcccttcaaccatggcggacgttgatgtcgatcccgaggtggcggccgccggtcccaagaagaggacgttccgcaagttcagctaccgcggcgtggacctcgacgctctcctcgacatgtccagcgaggacctcgtcggcctcttccccgcgcgcgcccgcagaaggttctcgaggggtctgaagaggaagccgatggcgctcgtcaagaagctgcgcaaggcgaaaagcgaagcccctgctggtgagaagcctgagcaagtgaggacccacctccgcaacatgatcatcatgcctgagatgatcggaagcgttgtgggcatctacaatggcaagtgcttcaaccaggtggagatcaagccggagatgattgggcactacctggcagagttctccctgtcgtacaagccggtgaagcacgggaggcccggtatcggtgccacccactcgtcgaggttcattcctctcaagtgagcatatggtcaggaaaattgtctttggtgtctggaatccagtgttcttatcgttgtcaaatgtagcgcctgatataccgactgtcagtctagtggtggagcagcaccctttgaaccctgaactaatcctgttccagattttgttccagattttgaagttatcgtaaggaaggtcgaacatgtttatcgc

SEQ ID NO: 26602 - protein, 183 aa, Triticum aestivum
TLAAAASSASSSCKQRRRLPPARAPAFPSTMADVDVDPEVAAAGPKKRTFRKFSYRGVDLDALLDMSSEDLVGLFPARARRRFSRGLKRKPMALVKKLRKAKSEAPAGEKPEQVRTHLRNMIIMPEMIGSVVGIYNGKCFNQVEIKPEMIGHYLAEFSLSYKPVKHGRPGIGATHSSRFIPLK

SEQ ID NO: 26603 - protein, 153 aa, Triticum aestivum
MADVDVDPEVAAAGPKKRTFRKFSYRGVDLDALLDMSSEDLVGLFPARARRRFSRGLKRKPMALVKKLRKAKSEAPAGEKPEQVRTHLRNMIIMPEMIGSVVGIYNGKCFNQVEIKPEMIGHYLAEFSLSYKPVKHGRPGIGATHSSRFIPLK

SEQ ID NO: 26604 - protein, 118 aa, Triticum aestivum
MSSEDLVGLFPARARRRFSRGLKRKPMALVKKLRKAKSEAPAGEKPEQVRTHLRNMIIMPEMIGSVVGIYNGKCFNQVEIKPEMIGHYLAEFSLSYKPVKHGRPGIGATHSSRFIPLK

SEQ ID NO: 26605 - DNA, 699 bp, Triticum aestivum
  misc_feature (93)..(93): n is a, c, g, or t
  misc_feature (152)..(152): n is a, c, g, or t
  misc_feature (259)..(259): n is a, c, g, or t
  misc_feature (436)..(436): n is a, c, g, or t
  misc_feature (453)..(453): n is a, c, g, or t
  misc_feature (485)..(485): n is a, c, g, or t
agcaaatccaagacacacacacacacacacacaaactagcttagcaggttgtcactgatcaccgtggtcgacgagaagacgacgatggcggtnaggctgatgctggtggcggcgctgctgtgcgcggcggcggcggcggccgcggcgcagcnggcgaacaacgtgcgcgcgacgtaccactactaccggccggcccagaacaactgggacctgggcgcgccggcggtgagcgcctactgcgcgacctgggacgccagcnagccgctgtcgtggcggtccaagtacgggtggacggcgttctgcggccccgccggcgcccacgggcaggcggcgtgcggcaagtgcctccgggtgacgaacccggcgacgggggcgcaggtgacggcgaggatcgtggaccagtgcgccaacggcgggctggacctggactgggacnccgtcttcaccaagatngacaccaacggggtcgggtaccagcagggccncctcaacgtcaactaccagttcgtcgactgccgcgactagatgaaatgaaagggtaagcaagctatgataagaataaaaggctagctagtagcgggctagctacgagtgagcactgagactgatccatgctgttgaataaaagctaccacgtgttgctgcattgtatacgtgtatacagtacgtacatggaaggaaataaagtggatcgtttcc

SEQ ID NO: 26606 - protein, 146 aa, Triticum aestivum
  misc_feature (3)..(3): Xaa can be any naturally occurring amino acid
  misc_feature (23)..(23): Xaa can be any naturally occurring amino acid
  misc_feature (59)..(59): Xaa can be any naturally occurring amino acid
  misc_feature (118)..(118): Xaa can be any naturally occurring amino acid
  misc_feature (123)..(123): Xaa can be any naturally occurring amino acid
  misc_feature (134)..(134): Xaa can be any naturally occurring amino acid
MAXRLMLVAALLCAAAAAAAAQXANNVRATYHYYRPAQNNWDLGAPAVSAYCATWDASXPLSWRSKYGWTAFCGPAGAHGQAACGKCLRVTNPATGAQVTARIVDQCANGGLDLDWDXVFTKXDTNGVGYQQGXLNVNYQFVDCRD

SEQ ID NO: 26607 - protein, 141 aa, Triticum aestivum
  misc_feature (18)..(18): Xaa can be any naturally occurring amino acid
  misc_feature (54)..(54): Xaa can be any naturally occurring amino acid
  misc_feature (113)..(113): Xaa can be any naturally occurring amino acid
  misc_feature (118)..(118): Xaa can be any naturally occurring amino acid
  misc_feature (129)..(129): Xaa can be any naturally occurring amino acid
MLVAALLCAAAAAAAAQXANNVRATYHYYRPAQNNWDLGAPAVSAYCATWDASXPLSWRSKYGWTAFCGPAGAHGQAACGKCLRVTNPATGAQVTARIVDQCANGGLDLDWDXVFTKXDTNGVGYQQGXLNVNYQFVDCRD

SEQ ID NO: 26608 - DNA, 1452 bp, Triticum aestivum
ccagtccacctccccccctatccccaccgcctccacaaccccaccccccccctccgctgcccctcccatcgcattcgcatccacctccgcgccccaagcacagcacaggggaagaagcgatcggcaatggcgtcctccacccagggccaggtcatcacctgcaaagcggcggtggcgtacgaggcgaacaagccgctggtggtggaggacgtgcaggtggcgccgccgcaggccggcgaggtccgcatcaagatcctctccaccgcgctctgccacaccgactactacacctggagcggcaaggatcctgagggtctctttccttgcattctcggtcatgaggctgctggaatcgttgagagcgttggcgaaggggtgaccgatgtgcagcctggggaccatgtcatcccttgctaccaagcggaatgcaagaactgcaagatgtgcaacagcgggaagaccaacctctgcggcaaagttcgtggcgccacaggggtaggggtcatgatgagcgaccgcaagagccgcttctcggtgaatgggaagcccatctaccatttcatggggacgtcgacgttcagtcagtacactgttgtgcatgacgtcagtgttgcgaagatcaacccgcaggcgcccctggataaggtctgcctgctcggctgtggtgtttccactggtcttggagcagtatggaatactgcaaaggttgaagcaggttcagttgttgctgtttttgggcttggcacagttggacttgcagttgctgagggggcaaaatcagctggtgcttctcggattattggcattgacattgatgccaagaagtttgatgttgctaagaactttggagtcacagagtttgtgaacccaaaagaccatgacaaaccaatccagcaggtcctagttgaccttacagatggtggtgtggattacagttttgagtgcatcggaaatgtttctatcatgagggctgcactcgaatgctgccacaagggctggggtacctctgttgtcgttggtgtagctgcatctggccaggagattgccacacggccattccagcttgtcactggccgtgtctggaagggaacagcttttggtggcttcaagagtcggagccaggttccatggctcgtcgagaagtacatgaacaaggaaatcaaggtggacgagtacatcacccacaacatgaaccttaccgatatcaacaaggcgttcgacctgctgcacgaaggcggctgcctgcggtgcgtgctggccatggagcactgaggatcctgctatgtgtctcgccctgcctcgaagcggagcagtttgtgtcgtgtgaagttgtaatgcagatctatcctccgccctgggactatagaactcgtttggcctagaaactcttgaacacgaaccgctgctataataatatgttgtgttggatggttgcctctggttggggtcatt

SEQ ID NO: 26609 - protein, 423 aa, Triticum aestivum
PVHLPPYPHRLHNPTPPLRCPSHRIRIHLRAPSTAQGKKRSAMASSTQGQVITCKAAVAYEANKPLVVEDVQVAPPQAGEVRIKILSTALCHTDYYTWSGKDPEGLFPCILGHEAAGIVESVGEGVTDVQPGDHVIPCYQAECKNCKMCNSGKTNLCGKVRGATGVGVMMSDRKSRFSVNGKPIYHFMGTSTFSQYTVVHDVSVAKINPQAPLDKVCLLGCGVSTGLGAVWNTAKVEAGSVVAVFGLGTVGLAVAEGAKSAGASRIIGIDIDAKKFDVAKNFGVTEFVNPKDHDKPIQQVLVDLTDGGVDYSFECIGNVSIMRAALECCHKGWGTSVVVGVAASGQEIATRPFQLVTGRVWKGTAFGGFKSRSQVPWLVEKYMNKEIKVDEYITHNMNLTDINKAFDLLHEGGCLRCVLAMEH

SEQ ID NO: 26610 - protein, 381 aa, Triticum aestivum
MASSTQGQVITCKAAVAYEANKPLVVEDVQVAPPQAGEVRIKILSTALCHTDYYTWSGKDPEGLFPCILGHEAAGIVESVGEGVTDVQPGDHVIPCYQAECKNCKMCNSGKTNLCGKVRGATGVGVMMSDRKSRFSVNGKPIYHFMGTSTFSQYTVVHDVSVAKINPQAPLDKVCLLGCGVSTGLGAVWNTAKVEAGSVVAVFGLGTVGLAVAEGAKSAGASRIIGIDIDAKKFDVAKNFGVTEFVNPKDHDKPIQQVLVDLTDGGVDYSFECIGNVSIMRAALECCHKGWGTSVVVGVAASGQEIATRPFQLVTGRVWKGTAFGGFKSRSQVPWLVEKYMNKEIKVDEYITHNMNLTDINKAFDLLHEGGCLRCVLAMEH

SEQ ID NO: 26611 - protein, 276 aa, Triticum aestivum
MCNSGKTNLCGKVRGATGVGVMMSDRKSRFSVNGKPIYHFMGTSTFSQYTVVHDVSVAKINPQAPLDKVCLLGCGVSTGLGAVWNTAKVEAGSVVAVFGLGTVGLAVAEGAKSAGASRIIGIDIDAKKFDVAKNFGVTEFVNPKDHDKPIQQVLVDLTDGGVDYSFECIGNVSIMRAALECCHKGWGTSVVVGVAASGQEIATRPFQLVTGRVWKGTAFGGFKSRSQVPWLVEKYMNKEIKVDEYITHNMNLTDINKAFDLLHEGGCLRCVLAMEH

SEQ ID NO: 26612 - DNA, 928 bp, Triticum aestivum
acacacacacgcctcacactctctcatcagatcagccacagagtcacacaagcactagcttcagctagccagcctcagccactccgggcattttcttgcatccacgacggcaatggccaccgctgatgtccagaacccgacggccgcgctgacggaggaggcgcccacggtggagacgccggtggccgccgaggaggccccgaagacggaggaggtccccgcgccggcggaggccgaggtcgaggcgtctgcccccgtcgaggttgaggcgaccaaggaggaggcgccgggcgccgctgagacggaggaggccaaggagaccgagccagcagctgcggccgagccggaggccgaggcgcccaaagagccagaggcgccagccgtggtcgagacagagaccaaggaggccgtggcagaggccgagccggcggtggtcgaggaggtgaaggaggaggccgcgcctgctgccgagccagaagcaccggccgtcgccgaggaagcaccggctgcagcggaggaggcccccgcggccgtggcagaggagccggccgccgcggtggccagcgtcagcgtgtgaggcgcgcacagagacagaggaggggctggctgggtcagcgtccacggcggcggccgtgtgctcctacgtggcacggccagtcagccagtggagtggagttctactttttactaggtgtggagtgggagtgctatgcgcggggtcgcgtgacgcgggctaaataaaagtgttgtcggggccagtcgacgcccagtgtcggtcagcggcagcgagcgagcgagcgacgcagtgcggtgccactctcgccggcccccgtggctggctgcgtctgcttagctgcagctttgtagtggtgtgtgtcacagtgtcagttccacctatgatcgatcggtatcctatccggtttgtgtc

SEQ ID NO: 26613 - protein, 154 aa, Triticum aestivum
MATADVQNPTAALTEEAPTVETPVAAEEAPKTEEVPAPAEAEVEASAPVEVEATKEEAPGAAETEEAKETEPAAAAEPEAEAPKEPEAPAVVETETKEAVAEAEPAVVEEVKEEAAPAAEPEAPAVAEEAPAAAEEAPAAVAEEPAAAVASVSV

SEQ ID NO: 26614 - DNA, 389 bp, Triticum aestivum
  misc_feature (383)..(383): n is a, c, g, or t
ccacatcgcgcttagctgggttccaagagagctacaaggtacgtagtgactagcggtcacgagcgcgcgcccatggcttccacgtcgacgagcttcgtggccatggcgctcgtcatggccgtcatgctcagcacgtgccatgccgcgcgcctcctcgccgacgttccggccttgcccacaccgatgctgccccccgtgcccgtcgtccctacagtccccgccctgccaggcggcgtcgttcccacggtgcccaccgtgccgaacgtcccgacggttcccaccgtgccaggcgtcccgaaggtgccgacagttcccaccgtgcccggcgtgccgacggtgcccaccgtgccaggtgtgccgacggttccagtacctggcgccgncctgcc

SEQ ID NO: 26615 - protein, 105 aa, Triticum aestivum
  misc_feature (104)..(104): Xaa can be any naturally occurring amino acid
MASTSTSFVAMALVMAVMLSTCHAARLLADVPALPTPMLPPVPVVPTVPALPGGVVPTVPTVPNVPTVPTVPGVPKVPTVPTVPGVPTVPTVPGVPTVPVPGAXL

SEQ ID NO: 26616 - protein, 95 aa, Triticum aestivum
  misc_feature (94)..(94): Xaa can be any naturally occurring amino acid
MALVMAVMLSTCHAARLLADVPALPTPMLPPVPVVPTVPALPGGVVPTVPTVPNVPTVPTVPGVPKVPTVPTVPGVPTVPTVPGVPTVPVPGAXL

SEQ ID NO: 26617 - protein, 91 aa, Triticum aestivum
  misc_feature (90)..(90): Xaa can be any naturally occurring amino acid
MAVMLSTCHAARLLADVPALPTPMLPPVPVVPTVPALPGGVVPTVPTVPNVPTVPTVPGVPKVPTVPTVPGVPTVPTVPGVPTVPVPGAXL

SEQ ID NO: 26618 - DNA, 1623 bp, Triticum aestivum
gacgacaacgccagcgccaccactctcaagagtcttaaaccctcactcctctccttccaccacctctccacacacaccatctctgtcagacatggcgccttccgcgacctgccctctccactccatggcatccgtctcccgcgctctccgcccgcgcccgcgtctcgccgctcctcgtctcggatgcggactgagagttggatgctctgtgccagcatatggaagtgctgccacggagaaggccgagtggggattggccattgcgccctcaccagcgaccactcttgttccggttgtcaggagccgtcaaattttctgcaaggcagaagctaacatttctagtaacctgccagcgagcaagcctactggagcaagccagtacgagaaaatagttgagctactcactactcttttccctgtctgggtcatattaggtacagttattggcatctacaagccatcaatggtcacctggttggagactgatctttttaccgtgggcctaggattcctaatgttgtcaatgggactaacattaacatttgaagatttcaggagatgtttaaggaatccatggacagttggtgtgggatttcttgcgcagtatttgatcaaacctatgctaggatatgctatcgcattgtcattgaagttatctgctcctcttgcaactggtcttattttggtctcatgttgtcctggtggtcaagcatcaaacgttgcaacttacatatccaaaggaaatgtggcactttcagttcttatgaccacttgctcgactattggtgctatagcgatgacaccactccttactaaactccttgctggtcaattagtccctgttgatgctgcaggcttggccatcagtacttttcaggttgttttagtaccgactatcgttggagtgttggcacatgagtattttcccaagtttaccgagcggattatctccataacaccactgataggggtcatcctcaccaccttgctttgtgctagccctattgggcaagtcgcagaagtgttgaaaactcaaggtgctcaacttattctccctgttgctctgctgcatgctgttgcattcgctcttggctattggatctcgaaatggtcttctttcggggaatcaacttctagaaccatctcaattgagtgtgggatgcagagttctgcgcttggatttttacttgcccaaaagcacttcacaaaccctcttgttgctgttccttctgctgtcagtgttgtgtgcatggcgctcggaggcagtgctcttgcagtattctggagaaacagaggccttccagcagatgacaaggacgatttcaaggaatgaatgaagcaaaaacaatcctaggctccagcttctagtcgttccatgttttagttgagcgtggttacgtcagagaattttttatattcccatattttaggtatgtaaaacacaaaacaggataaggacgtttgtttattctagataattgattattggtaggaaggacccttgttaatgatttaggcaaggctttgcaattaagtttggtgtgtaatgtatttttcatcttctaaataaataagctgcttctcagacaaagcagtaattcgtttatatatatggtgttatgc

SEQ ID NO: 26619 - protein, 443 aa, Triticum aestivum
TTTPAPPLSRVLNPHSSPSTTSPHTPSLSDMAPSATCPLHSMASVSRALRPRPRLAAPRLGCGLRVGCSVPAYGSAATEKAEWGLAIAPSPATTLVPVVRSRQIFCKAEANISSNLPASKPTGASQYEKIVELLTTLFPVWVILGTVIGIYKPSMVTWLETDLFTVGLGFLMLSMGLTLTFEDFRRCLRNPWTVGVGFLAQYLIKPMLGYAIALSLKLSAPLATGLILVSCCPGGQASNVATYISKGNVALSVLMTTCSTIGAIAMTPLLTKLLAGQLVPVDAAGLAISTFQVVLVPTIVGVLAHEYFPKFTERIISITPLIGVILTTLLCASPIGQVAEVLKTQGAQLILPVALLHAVAFALGYWISKWSSFGESTSRTISIECGMQSSALGFLLAQKHFTNPLVAVPSAVSVVCMALGGSALAVFWRNRGLPADDKDDFKE

SEQ ID NO: 26620 - protein, 413 aa, Triticum aestivum
MAPSATCPLHSMASVSRALRPRPRLAAPRLGCGLRVGCSVPAYGSAATEKAEWGLAIAPSPATTLVPVVRSRQIFCKAEANISSNLPASKPTGASQYEKIVELLTTLFPVWVILGTVIGIYKPSMVTWLETDLFTVGLGFLMLSMGLTLTFEDFRRCLRNPWTVGVGFLAQYLIKPMLGYAIALSLKLSAPLATGLILVSCCPGGQASNVATYISKGNVALSVLMTTCSTIGAIAMTPLLTKLLAGQLVPVDAAGLAISTFQVVLVPTIVGVLAHEYFPKFTERIISITPLIGVILTTLLCASPIGQVAEVLKTQGAQLILPVALLHAVAFALGYWISKWSSFGESTSRTISIECGMQSSALGFLLAQKHFTNPLVAVPSAVSVVCMALGGSALAVFWRNRGLPADDKDDFKE

SEQ ID NO: 26621 - protein, 402 aa, Triticum aestivum
MASVSRALRPRPRLAAPRLGCGLRVGCSVPAYGSAATEKAEWGLAIAPSPATTLVPVVRSRQIFCKAEANISSNLPASKPTGASQYEKIVELLTTLFPVWVILGTVIGIYKPSMVTWLETDLFTVGLGFLMLSMGLTLTFEDFRRCLRNPWTVGVGFLAQYLIKPMLGYAIALSLKLSAPLATGLILVSCCPGGQASNVATYISKGNVALSVLMTTCSTIGAIAMTPLLTKLLAGQLVPVDAAGLAISTFQVVLVPTIVGVLAHEYFPKFTERIISITPLIGVILTTLLCASPIGQVAEVLKTQGAQLILPVALLHAVAFALGYWISKWSSFGESTSRTISIECGMQSSALGFLLAQKHFTNPLVAVPSAVSVVCMALGGSALAVFWRNRGLPADDKDDFKE

SEQ ID NO: 26622 - DNA, 1469 bp, Triticum aestivum
actccacacacacacaccggacacaagcccacccagcgccctaccacccaaccagcacccgccgcccgcccgcccgccatgtcgtccgccgcgccggcgccggcgccggaggagcagcggccgcgcccggtgcgcttcggcatcatgggctgcgcgtccatcgcgcgcaagctcgcgcgggcgatgctgctggccgcgcccgcggccgccgtggccgccgtcggcagccgctccgaggccaaggcgcgcctcttcgccgccgacaacggcctccccgcgggcgcgcgcctgcacggctcctacgaggcgctcctcgacgacccggccgtcgacgccgtctacctgccgctccccaccagcctccacgtgcagtgggtcaccgccgccgccgcgcggggcaagcacgtgctcctcgagaagcccaccgcgctctgcgccgccgacctcgacgccatcctcgccgcctgcgacgccagcggcgtccagttcatggactccaccatgtggatgcaccacccccgcaccgccaagatgcgcgacctcctccccgccgacgtcggcgacgtcagagttataaacagtctgttcagcttccgagcaaacgaagatttcctccagaatgacatcagggtgaagccagacctcgacgcgctgggcgtactcggcgatgccgggtggtactgcatccgcgcgatcctgtgggccgtcaactacgagctcccgaagaacgtgatcgcgctccccgaccctgtcaagaaccaagccggcgtgctcatcgcctgcggcgcgacgctctactgggccgacggaaagacggccaccttccactgctcgttcctcgccaacctcaccatggacctgaccgtcgtcggcaccgacggcacgctccacgtcaccgacttcatcatcccgtacgaggagaagtccggcccgttcagcgtggcgtccaggtcgaacttcgccgagctccacaccgggtgggttccgcagcccagcaggcacgtcgtcacgactgacctgccgcaggaggccctgatggtccaggagttctgcaggctggtgcagggcatcagagacgccggcgccaagcctgagggcaagtggccggccatcaccaggaagacgcaggttgtgatggacgcggtgaaggcttccattgacaagggatttgagtctgtcgatgttgtgagctaagaaaatgcaacacgtagctggtcattctggtgatatgtcttccaagccatggtgcatacctggccattccggtgatcttcaaggccatggcgtatggattgtgcgtttgctcaaatcgtacttgtgcgcaagcgcaaaactacttatatatattggaataataactcgaattattattgccataccaaggacaacattgcagttatcaagttcaatgatatattgctacggatttattgtgtggtattttggcaatatggatgcttgcgaggtcc

SEQ ID NO: 26623 - protein, 397 aa, Triticum aestivum
TPHTHTGHKPTQRPTTQPAPAARPPAMSSAAPAPAPEEQRPRPVRFGIMGCASIARKLARAMLLAAPAAAVAAVGSRSEAKARLFAADNGLPAGARLHGSYEALLDDPAVDAVYLPLPTSLHVQWVTAAAARGKHVLLEKPTALCAADLDAILAACDASGVQFMDSTMWMHHPRTAKMRDLLPADVGDVRVINSLFSFRANEDFLQNDIRVKPDLDALGVLGDAGWYCIRAILWAVNYELPKNVIALPDPVKNQAGVLIACGATLYWADGKTATFHCSFLANLTMDLTVVGTDGTLHVTDFIIPYEEKSGPFSVASRSNFAELHTGWVPQPSRHVVTTDLPQEALMVQEFCRLVQGIRDAGAKPEGKWPAITRKTQVVMDAVKASIDKGFESVDVVS

SEQ ID NO: 26624 - protein, 371 aa, Triticum aestivum
MSSAAPAPAPEEQRPRPVRFGIMGCASIARKLARAMLLAAPAAAVAAVGSRSEAKARLFAADNGLPAGARLHGSYEALLDDPAVDAVYLPLPTSLHVQWVTAAAARGKHVLLEKPTALCAADLDAILAACDASGVQFMDSTMWMHHPRTAKMRDLLPADVGDVRVINSLFSFRANEDFLQNDIRVKPDLDALGVLGDAGWYCIRAILWAVNYELPKNVIALPDPVKNQAGVLIACGATLYWADGKTATFHCSFLANLTMDLTVVGTDGTLHVTDFIIPYEEKSGPFSVASRSNFAELHTGWVPQPSRHVVTTDLPQEALMVQEFCRLVQGIRDAGAKPEGKWPAITRKTQVVMDAVKASIDKGFESVDVVS

SEQ ID NO: 26625 - protein, 349 aa, Triticum aestivum
MGCASIARKLARAMLLAAPAAAVAAVGSRSEAKARLFAADNGLPAGARLHGSYEALLDDPAVDAVYLPLPTSLHVQWVTAAAARGKHVLLEKPTALCAADLDAILAACDASGVQFMDSTMWMHHPRTAKMRDLLPADVGDVRVINSLFSFRANEDFLQNDIRVKPDLDALGVLGDAGWYCIRAILWAVNYELPKNVIALPDPVKNQAGVLIACGATLYWADGKTATFHCSFLANLTMDLTVVGTDGTLHVTDFIIPYEEKSGPFSVASRSNFAELHTGWVPQPSRHVVTTDLPQEALMVQEFCRLVQGIRDAGAKPEGKWPAITRKTQVVMDAVKASIDKGFESVDVVS

SEQ ID NO: 26626 - DNA, 796 bp, Triticum aestivum
cctatcaaaaattcgcacgtctggcgagctctcgcagccatccaatatcaacaactctggtgcccaagcagcaagcagtgagcgtgctcttcttgagacccaaagtcgccaagttagaagctgcacaaaggtaattatgacgggaatggcagttggaagagcagtggacttgacaaagctatatgggtatgttgatcttcactgcaagttggaggagatgtttgatatacagggggagctatgttccacactcaagaaatggcaggttgtttatgccgatgaagaggatgatatgatgcttgttggggacgatccttgggacgagttttgcaacatggcgaaaagaatttacatttatacatatgaggaggccaagcaattggcaccaaaggccaccaagctcagccgtgtgaactcatcacatgaatcggtcactccgcagagtggctcagactatccagcctcgtttgccaatgcagattgctgaatgctaagttgctaactttgctctaattacgctctttcttcctttgatcattcggggaaattgcccatgatcatccgctctactcaggagagctatgattgcttcacggacaaaagacattgtgtgcgttgctgtggtgggtttggtcctgtgtcagcaaagaggcattctggcatttcgtgacgtttagtcgccagttgttttatgcgagaactggcggtgagccgcagtatgcatattgccgtagactttgccttcgttgcttgctacagtagtaaataggcgtatgtatatattgatcttttgggt

SEQ ID NO: 26627 - protein, 161 aa, Triticum aestivum
LSKIRTSGELSQPSNINNSGAQAASSERALLETQSRQVRSCTKVIMTGMAVGRAVDLTKLYGYVDLHCKLEEMFDIQGELCSTLKKWQVVYADEEDDMMLVGDDPWDEFCNMAKRIYIYTYEEAKQLAPKATKLSRVNSSHESVTPQSGSDYPASFANADC

SEQ ID NO: 26628 - protein, 116 aa, Triticum aestivum
MTGMAVGRAVDLTKLYGYVDLHCKLEEMFDIQGELCSTLKKWQVVYADEEDDMMLVGDDPWDEFCNMAKRIYIYTYEEAKQLAPKATKLSRVNSSHESVTPQSGSDYPASFANADC

SEQ ID NO: 26629 - protein, 113 aa, Triticum aestivum
MAVGRAVDLTKLYGYVDLHCKLEEMFDIQGELCSTLKKWQVVYADEEDDMMLVGDDPWDEFCNMAKRIYIYTYEEAKQLAPKATKLSRVNSSHESVTPQSGSDYPASFANADC

SEQ ID NO: 26630 - DNA, 1305 bp, Triticum aestivum
attccaagctgcctaccgcacacactagccgcgagcagtaccatcactactggccaaaacgtgaccccctccagtcaacttcctcgtcgccaccacacgaccgcacctctcccatggcgtcctcctcgccgccgcacgtcgtggaggacgtgcccccgttcctgcagctcctcagcgacggcacggtgatccgcttcactgacgcctacccgctccccatcccgtcgccgccgcccggccagcccgtcgtcgactggaaggacgttctgtacgacgccagccacggcctcaagctccgcatctacaggccggcggcggcctcctcctccgggaacaagctcccggtgatcgtctacttccacggcggcgggtacagcatcggtagcttcgacatgcccaacttccatgcgtgctgcgtccgcctcgccggcgagctccccgctttggtgctctctgcagactaccgcctcgcccccgagcaccgcttccccgcgggtctcgacgacgcggcgaacgtcgtgtcctgggtgcgcgcccaggcagcggctgttggggacaacgccgacccatggctctcggagacggcgaacttcggccgggtgttcgtcgccggggactcggccggcgggggcgtcgtccaccacacggccgtccgcctcgcgtcgggccggctaggccccctcgaccccgttcgcgtcgccgggtgcgcgatgctctgcccgatgttcggcggggaggagaggacggcgtcggaggcggagttcccgccgggcccgttcctgtcgctgccggcggtcgaccaggcgtggcgcctggtgctgccgcctgggtccacgagggaccacccgctggccaacccgttcggcccggacagcccggcccttgacggcgtcgcgctgcctccgatgctcgttgtggccgccgcgcgcgacctgctgcgcgaccgcgccgcggactatgccgcgaggctcaaggccatggggaagccggtggagctcgtggagttcgaggggcagcaccacgggttcttcgcggtcgagccgtacggcgacgccggcagcgaggtggtccggctcgtcaaacggtttgtctacggcaacggcggcgcctccgactaaattggagatcgagcaaagctgttgagggctcctttgattcaaaggatatctttagaatttttgaaggattgaaatttttaggaattttttttatattggccttttgattcatagaattggatcctataggaatttatcctatgaaatcttttgtattacatttcataggaaatctaacatccacttc

SEQ ID NO: 26631 - protein, 371 aa, Triticum aestivum
SKLPTAHTSREQYHHYWPKRDPLQSTSSSPPHDRTSPMASSSPPHVVEDVPPFLQLLSDGTVIRFTDAYPLPIPSPPPGQPVVDWKDVLYDASHGLKLRIYRPAAASSSGNKLPVIVYFHGGGYSIGSFDMPNFHACCVRLAGELPALVLSADYRLAPEHRFPAGLDDAANVVSWVRAQAAAVGDNADPWLSETANFGRVFVAGDSAGGGVVHHTAVRLASGRLGPLDPVRVAGCAMLCPMFGGEERTASEAEFPPGPFLSLPAVDQAWRLVLPPGSTRDHPLANPFGPDSPALDGVALPPMLVVAAARDLLRDRAADYAARLKAMGKPVELVEFEGQHHGFFAVEPYGDAGSEVVRLVKRFVYGNGGASD

SEQ ID NO: 26632 - protein, 334 aa, Triticum aestivum
MASSSPPHVVEDVPPFLQLLSDGTVIRFTDAYPLPIPSPPPGQPVVDWKDVLYDASHGLKLRIYRPAAASSSGNKLPVIVYFHGGGYSIGSFDMPNFHACCVRLAGELPALVLSADYRLAPEHRFPAGLDDAANVVSWVRAQAAAVGDNADPWLSETANFGRVFVAGDSAGGGVVHHTAVRLASGRLGPLDPVRVAGCAMLCPMFGGEERTASEAEFPPGPFLSLPAVDQAWRLVLPPGSTRDHPLANPFGPDSPALDGVALPPMLVVAAARDLLRDRAADYAARLKAMGKPVELVEFEGQHHGFFAVEPYGDAGSEVVRLVKRFVYGNGGASD

SEQ ID NO: 26633 - protein, 241 aa, Triticum aestivum
MPNFHACCVRLAGELPALVLSADYRLAPEHRFPAGLDDAANVVSWVRAQAAAVGDNADPWLSETANFGRVFVAGDSAGGGVVHHTAVRLASGRLGPLDPVRVAGCAMLCPMFGGEERTASEAEFPPGPFLSLPAVDQAWRLVLPPGSTRDHPLANPFGPDSPALDGVALPPMLVVAAARDLLRDRAADYAARLKAMGKPVELVEFEGQHHGFFAVEPYGDAGSEVVRLVKRFVYGNGGASD

SEQ ID NO: 26634 - DNA, 1133 bp, Triticum aestivum
aaaacccctcgaccacgaaaaccctaaaccctctccgccgccgccgccagccatggccctcttcgccgccgcccgccgcgcggcctcctcctcgctccccctcctccgcgcctccgcctccgcctcccgcggcgcggcctcccgtggcgcggccctgctccgccccctggccgccgccgcggcccggccgatgcccttctcctcggcgaccgcgctgaagccgagctccgacgacgagctcctccgcatcgtcaaggccgagatcaagttcgccgaggactgcgacgaccacgaccgggttgaggaggtcccagatagcttccctttcaaaatcagcgacaagaaggggcttaatgacatcactcttacaagaacttaccagggtgagaagatcgaggttctggtttttatgcccaacctagtcactggagacgagccagagcatgaccaggacgaggatgacaaggagaaagatgatgatcaggatgacggcgagaagcccccgaagtccagccttcccctcacagtcaccatcaccaagagtgaaggcccaagcctcgagttcacctgcacggcctatcctgacgagatcctcatcgataccttgtccgtgaagcagccctctgagaagttgggagaggactacattgcatacgagggtcctgacttcaatgacctggacgagaacctgcagagggcattccacaagtacctggagctgcgcgggatcacgcccatgacgacaaacttcctgcacgagtacatgatcaacaaggacagccgggagtacctgttttggctgaacaagctcaaggatttcgtcaagcagtaatgtagagattgcaagttatgatccctagcataaagacgagccaatgtgctttgcacatcctgttctgagaccttcgggcttcggaactccaaactgctccgtgtttagtacacgatgacgatgtgtatgcttagcatcgtgttttagattgctttttttggcagtgtggaaatgaccgggtgatgttagagttgaaaacctgggtagttcttcagatagaacacttcgttaagtagcgtgctatttttttctgaacaaataattatgctctgtgtgcgtgaaggtttacgcacagtgtttc

SEQ ID NO: 26635 - protein, 276 aa, Triticum aestivum
KPLDHENPKPSPPPPPAMALFAAARRAASSSLPLLRASASASRGAASRGAALLRPLAAAAARPMPFSSATALKPSSDDELLRIVKAEIKFAEDCDDHDRVEEVPDSFPFKISDKKGLNDITLTRTYQGEKIEVLVFMPNLVTGDEPEHDQDEDDKEKDDDQDDGEKPPKSSLPLTVTITKSEGPSLEFTCTAYPDEILIDTLSVKQPSEKLGEDYIAYEGPDFNDLDENLQRAFHKYLELRGITPMTTNFLHEYMINKDSREYLFWLNKLKDFVKQ

SEQ ID NO: 26636 - protein, 259 aa, Triticum aestivum
MALFAAARRAASSSLPLLRASASASRGAASRGAALLRPLAAAAARPMPFSSATALKPSSDDELLRIVKAEIKFAEDCDDHDRVEEVPDSFPFKISDKKGLNDITLTRTYQGEKIEVLVFMPNLVTGDEPEHDQDEDDKEKDDDQDDGEKPPKSSLPLTVTITKSEGPSLEFTCTAYPDEILIDTLSVKQPSEKLGEDYIAYEGPDFNDLDENLQRAFHKYLELRGITPMTTNFLHEYMINKDSREYLFWLNKLKDFVKQ

SEQ ID NO: 26637 - protein, 213 aa, Triticum aestivum
MPFSSATALKPSSDDELLRIVKAEIKFAEDCDDHDRVEEVPDSFPFKISDKKGLNDITLTRTYQGEKIEVLVFMPNLVTGDEPEHDQDEDDKEKDDDQDDGEKPPKSSLPLTVTITKSEGPSLEFTCTAYPDEILIDTLSVKQPSEKLGEDYIAYEGPDFNDLDENLQRAFHKYLELRGITPMTTNFLHEYMINKDSREYLFWLNKLKDFVKQ

SEQ ID NO: 26638 - DNA, 1705 bp, Triticum aestivum
ctaatcgaaaaacccgcttttccctttttctctcatctagaacccccaagaccgggctcactcgccccctcggacctgctagggatggcacgcgccgctgccgccaacctgcgtggcctggtcggcattgcagcggcgggccggaggcgggtgaccgcctccgtcgcgccaccccgcgcgtcgcccggcgggcgcgcattccgggccgtggcctcaggctccgggggcaggacgactcctgaatcctcctcttcgtcctcgccggccctaccacagctgcagccgcggcgcggcttggcgacgagacgagcggtgctgcgtaacttgattagcggcggcttagagagtgaggatggtaagctgagctgcggatattcaagttttaaagggaggagacctactatggaggatcgctacgatgtaaagttcgctaaaatgaagggacagtcagttagcttgtttggtgtatttgatggtcatgcaggagcacttgccgctgaatatctaaaggaacatctgcttgacaaccttatcgagcatcctcagttcctgagaaacccaaagcttgctctgaagacgaccttcctgaaaactgatgctgatttcttagagtcggtaaccactccttatagggaggatggttcgactgctttggctgctgttctggttggtgaccaaatttatgtagcaaatgttggtgattcacgtgctatcgctttaaaaggtggcaaagctatcccactctcagatgaccataaacctaacttaaaggatgagagaacgagaattgagaatgctggaggtggtgttagttatgatggttttacttggagggttgatggaattctggcaatgtcccgtgcatttggcaaccgttcattgaagaattatgtgatagcagagcctgacattcaggaaacgcaggtcagcagtgacttggaatacctggttctcgctacagatggtctttgggatgtcgtgcaaaatgaggatgttatttcacttatgagagcaacggacgagcctgaggtggcggcagtgaagctgacggaaatggcccactctcggcacagctcagacaacattacatgcattgtggtgggatttcaccactgaacagcgtatgatacgtgaccgatattggtggcagtgaagttttttcacttcctctctgatctatggctggtataagacttccaacggctgtgaaagaaactggccaattgttggatctttttgtagggaattttttgcatctgattatcacttagtgaaattgcatcagatccgttaggagttgggtccacaaaatcaacaaaatggagaaggcctagggcatactactactaccactacaccacaacatcatcatatctttataattgaaggagtgtggagtattttctttagtgttttgtgttcagtttagtttattcacaaaaccgaggtctacatggcatactcatgtcatgagatcctaaattggatctagaacttgcaaactacatatttctttgttgcttttatgcaccacgctgaaatatgtatatctgaagtacaaagattatccggaatcttttactctagtattttttttgcgaataaatcttttactctagtatgctggacaaaattcaaaaattaacactagacatgtgttattcagattcgcaccttctgattgtactctatttatttcaaagtg

SEQ ID NO: 26639 - protein, 371 aa, Triticum aestivum
LIEKPAFPFFSHLEPPRPGSLAPSDLLGMARAAAANLRGLVGIAAAGRRRVTASVAPPRASPGGRAFRAVASGSGGRTTPESSSSSSPALPQLQPRRGLATRRAVLRNLISGGLESEDGKLSCGYSSFKGRRPTMEDRYDVKFAKMKGQSVSLFGVFDGHAGALAAEYLKEHLLDNLIEHPQFLRNPKLALKTTFLKTDADFLESVTTPYREDGSTALAAVLVGDQIYVANVGDSRAIALKGGKAIPLSDDHKPNLKDERTRIENAGGGVSYDGFTWRVDGILAMSRAFGNRSLKNYVIAEPDIQETQVSSDLEYLVLATDGLWDVVQNEDVISLMRATDEPEVAAVKLTEMAHSRHSSDNITCIVVGFHH

SEQ ID NO: 26640 - protein, 343 aa, Triticum aestivum
MARAAAANLRGLVGIAAAGRRRVTASVAPPRASPGGRAFRAVASGSGGRTTPESSSSSSPALPQLQPRRGLATRRAVLRNLISGGLESEDGKLSCGYSSFKGRRPTMEDRYDVKFAKMKGQSVSLFGVFDGHAGALAAEYLKEHLLDNLIEHPQFLRNPKLALKTTFLKTDADFLESVTTPYREDGSTALAAVLVGDQIYVANVGDSRAIALKGGKAIPLSDDHKPNLKDERTRIENAGGGVSYDGFTWRVDGILAMSRAFGNRSLKNYVIAEPDIQETQVSSDLEYLVLATDGLWDVVQNEDVISLMRATDEPEVAAVKLTEMAHSRHSSDNITCIVVGFHH

SEQ ID NO: 26641 - protein, 237 aa, Triticum aestivum
MEDRYDVKFAKMKGQSVSLFGVFDGHAGALAAEYLKEHLLDNLIEHPQFLRNPKLALKTTFLKTDADFLESVTTPYREDGSTALAAVLVGDQIYVANVGDSRAIALKGGKAIPLSDDHKPNLKDERTRIENAGGGVSYDGFTWRVDGILAMSRAFGNRSLKNYVIAEPDIQETQVSSDLEYLVLATDGLWDVVQNEDVISLMRATDEPEVAAVKLTEMAHSRHSSDNITCIVVGFHH

SEQ ID NO: 26642 - DNA, 1993 bp, Triticum aestivum
gctcaaaccctagctaccaatccccgcaattcctcccctggcccaggttcctccgtagctggatgcccccaacctaggcggcggctcggtggcgtgtgtgcgtgcgcggccgccgatggagccgcgcgtgggtaacaagtaccgcctcggccgcaagctcggcagcggctcgttcggggagatctacctcggtactaacgtgcagaccaacgaggaggtcgcgattaagcttgaaaatgtgaagacaaagcatcctcagttgctgtatgagtcaaagttgtacagagtactgcagggcggaactgggatttcaaatgtcaagtggtttggtgttgagggtgactacaatgttcttgttatggatgtgttggggccaagccttgaagatcttttcagcttttgcaacagaaaactgtcgctcaaaactgttctgatgcttgctgatcaaatgatcaaccgagttgaatttatacattcaaagtccttcttgcatcgagatataaagccagacaattttctcatgggccttggaaagagagcaaatcaggtatatatgattgactttggactggcaaagaaatatagggacacgtcaacgcaccagcacattccataccgggagaacaaaaatttgactgggacagctcgatatgcgagtgtaagcacccatctcggaattgaacaaagcagaagggatgacatggagtctcttggatatgtactcatgtacttcttgagaggaagtctcccatggcagggtttaaaagccggtacgaagaaacaaaagtatgagaaaatcagcgaacggaagattgccacttcaattgaggctttgtgtcgtggatacccttctgaatttcagtcattcttccattactgccgcgcactgcgttttgaagacagtccagactatcaatacctgaagagattgttcagagatctttttattcgagagggattccagtttgattatgtttttgactggaccattcttaaataccagcagtcacaaatgaccagtgctccaccacgtgctattgccgctgctgcaggacaaagctcggggatggctccaattgcaagtaataatagactgtcagccaccgaagagggaagaagtgggtggtcagatgatcctacacgacgtcaagttccacctacaggaataaatgcaggcagcttagcgaaacagaagtcaccagttagaccagatgtgtccgcaccaaaggaagctgtgttgtccagttcgacttttttgggtcggtcaggcgtgtcctcaaggcgacctgctgtttgtagtagccgagatttgccaagcagtgaggctgaaccatcgcgtagtcgtgcaccagacgtgagtccagggacgttccagagaaactcagccccacggaggacctcacagacgcttgactactctgaccccaggcacaagtctaacagcaacaactacgagtccactataaggggcatccggggcctaaatttcaatgccaacgataggatccactactagtatcttctggatcctaaaaagcatgtataatatgtgatctgctgaagttaaagtggggagtgaggccatactttccgagctactctcctaccatagtaccatgtgatccacaagctacgtgctggagcggtgaggcagtttactgacgcaaagaaacgggggctggctggcaaaataaagggtctgcgacagccatggccctaaaatagcacgttgggcctatgttttagcctctctgtacaggttttcttttgtgcgttgagatgttgctttcgtacttttcacataatattatgttttaagatatttaccttactgtcatgtctagtatgtttacattggaatgccttgttggcttgagcaggtaaaaaaaaaaaaaaaaaaaaaaaaaaaaaaaaaaaaaaaaaaaaaaaaaagaaaaaaaaaaaaaaaaaagcttatcgataccgtcgacctcgagggggggcccggtaccca

SEQ ID NO: 26643 - protein, 466 aa, Triticum aestivum
MEPRVGNKYRLGRKLGSGSFGEIYLGTNVQTNEEVAIKLENVKTKHPQLLYESKLYRVLQGGTGISNVKWFGVEGDYNVLVMDVLGPSLEDLFSFCNRKLSLKTVLMLADQMINRVEFIHSKSFLHRDIKPDNFLMGLGKRANQVYMIDFGLAKKYRDTSTHQHIPYRENKNLTGTARYASVSTHLGIEQSRRDDMESLGYVLMYFLRGSLPWQGLKAGTKKQKYEKISERKIATSIEALCRGYPSEFQSFFHYCRALRFEDSPDYQYLKRLFRDLFIREGFQFDYVFDWTILKYQQSQMTSAPPRAIAAAAGQSSGMAPIASNNRLSATEEGRSGWSDDPTRRQVPPTGINAGSLAKQKSPVRPDVSAPKEAVLSSSTFLGRSGVSSRRPAVCSSRDLPSSEAEPSRSRAPDVSPGTFQRNSAPRRTSQTLDYSDPRHKSNSNNYESTIRGIRGLNFNANDRIHY

SEQ ID NO: 26644 - protein, 385 aa, Triticum aestivum
MDVLGPSLEDLFSFCNRKLSLKTVLMLADQMINRVEFIHSKSFLHRDIKPDNFLMGLGKRANQVYMIDFGLAKKYRDTSTHQHIPYRENKNLTGTARYASVSTHLGIEQSRRDDMESLGYVLMYFLRGSLPWQGLKAGTKKQKYEKISERKIATSIEALCRGYPSEFQSFFHYCRALRFEDSPDYQYLKRLFRDLFIREGFQFDYVFDWTILKYQQSQMTSAPPRAIAAAAGQSSGMAPIASNNRLSATEEGRSGWSDDPTRRQVPPTGINAGSLAKQKSPVRPDVSAPKEAVLSSSTFLGRSGVSSRRPAVCSSRDLPSSEAEPSRSRAPDVSPGTFQRNSAPRRTSQTLDYSDPRHKSNSNNYESTIRGIRGLNFNANDRIHY

SEQ ID NO: 26645 - protein, 360 aa, Triticum aestivum
MLADQMINRVEFIHSKSFLHRDIKPDNFLMGLGKRANQVYMIDFGLAKKYRDTSTHQHIPYRENKNLTGTARYASVSTHLGIEQSRRDDMESLGYVLMYFLRGSLPWQGLKAGTKKQKYEKISERKIATSIEALCRGYPSEFQSFFHYCRALRFEDSPDYQYLKRLFRDLFIREGFQFDYVFDWTILKYQQSQMTSAPPRAIAAAAGQSSGMAPIASNNRLSATEEGRSGWSDDPTRRQVPPTGINAGSLAKQKSPVRPDVSAPKEAVLSSSTFLGRSGVSSRRPAVCSSRDLPSSEAEPSRSRAPDVSPGTFQRNSAPRRTSQTLDYSDPRHKSNSNNYESTIRGIRGLNFNANDRIHY

SEQ ID NO: 26646 - DNA, 966 bp, Triticum aestivum
aaaaaaaaacggcgcctgctttgcctgcttttccattccccggggcttgggcgcgaccgacgacggacgagcaagcaacaatgctccgcctctcccgcttcctcccctccacctccaggggagtcactgacctcaaagatgttctctggagcagttcattgacattcaagcatgcgctttcgacttcagctgcaaatgttgatgagagtacatctgctagaaagtttgcgagctacactgtgttcaagggaaaggctgcactttccataagtcctattcttcctttattcaccaaactcgaatctggaggatctcgagtgaacagaaatggatcggtaatgttgaccttcttcccggcagttggacaaaggaagtatgactatacaaagaaacagctctttgctctgtcacctactgaagttggaagcttgataagtcttgggcctgctgaatcttgtgaatttttccatgatccttccatgaaatcaagtcatgaaggccaagtgaaaaaatcattgtcgatcactcctcttggcagtgacaatggatacttcgttaacataactgttctgaataatgtgcaaaagaccaacgaacgcctttcagtccctgtaacaaaagctgaatttgcagttatgcgcacggcattgagttttgcattgccgcacatcatgggttgggaccaagcgttgtcaactcaccctcaaagcacctcgacctcagctagcaagcctaggttcgagcgcccaaacccagcttctgagtgggacaggtgaagctttcctcctcgcagcagatcgcctgagggctttaaacaccaccgcaggtcgccagtgaaatgtgtggagatgtgggatgtcgaattatgtttcttttgtgatcaaactagggaattgtctttatcagattttatgttaccccaggagattgaagttagagagcaccatgaaattcaaatggcttttc

SEQ ID NO: 26647 - protein, 257 aa, Triticum aestivum
KKTAPALPAFPFPGAWARPTTDEQATMLRLSRFLPSTSRGVTDLKDVLWSSSLTFKHALSTSAANVDESTSARKFASYTVFKGKAALSISPILPLFTKLESGGSRVNRNGSVMLTFFPAVGQRKYDYTKKQLFALSPTEVGSLISLGPAESCEFFHDPSMKSSHEGQVKKSLSITPLGSDNGYFVNITVLNNVQKTNERLSVPVTKAEFAVMRTALSFALPHIMGWDQALSTHPQSTSTSASKPRFERPNPASEWDR

SEQ ID NO: 26648 - protein, 231 aa, Triticum aestivum
MLRLSRFLPSTSRGVTDLKDVLWSSSLTFKHALSTSAANVDESTSARKFASYTVFKGKAALSISPILPLFTKLESGGSRVNRNGSVMLTFFPAVGQRKYDYTKKQLFALSPTEVGSLISLGPAESCEFFHDPSMKSSHEGQVKKSLSITPLGSDNGYFVNITVLNNVQKTNERLSVPVTKAEFAVMRTALSFALPHIMGWDQALSTHPQSTSTSASKPRFERPNPASEWDR

SEQ ID NO: 26649 - protein, 145 aa, Triticum aestivum
MLTFFPAVGQRKYDYTKKQLFALSPTEVGSLISLGPAESCEFFHDPSMKSSHEGQVKKSLSITPLGSDNGYFVNITVLNNVQKTNERLSVPVTKAEFAVMRTALSFALPHIMGWDQALSTHPQSTSTSASKPRFERPNPASEWDR

SEQ ID NO: 26650 - DNA, 1132 bp, Triticum aestivum
atcatcacccaacagcactcaaccagagcagagcattcgccactgtagctagcactcgcggcgtgcgggcagggacacggcgagcatgggttcgaggtacgaggtggaggtgacggtgggctcggcgcgggacctcaagaacgtcaactggcgcaacggcgacctgcagccctacgccgtgctctgggtcgacgacggccccaagtgctcctcccgcgtcgacctggacaacggcgagagcccggtctgggacgagaagctcaccgtcccgctcccgccgtccaccgcccgcctcgaggacgccgtcctccgcatcgacgtcgtccacgccaacgccggcgggggcaccaagccgctcgtggggtccgcgcgcctccctctgcgcgacgtcctcgacgacgccggcctcggcggccgcgcgtcccgcacgctccgcctcaagcgcccctccggccggccccagggccgcctcgacgtccgcgtcgccgtccgcgaggccgccgcccgctactacgaccccgcctacccgccgccctacggccagagccagccccagtcccgcgacccctacgcggccccggcgccgtacggctcgggcgggtacgggtatggccagcagcagccgtacgccgcgccgccgtccggctacccggccgcctacggcgccgccgcgccaccgcagcccgccgggtaccctgccgcctacggaggcggcgcgcagccggcgtacggcgccgctcctgcccccgcgtacgggtcggtgagtgaccctgctgcgaagaagaaggggatggggatgggggcggggctggcggtgggcgcggcggcgggggtgctgggcgggctggcgctggcggaaggggcgagctacctggaggacaagatcgaggacgacgtggcggagaaggtggaggacgacctggccggcggcggctacgacgacgacgactactagagaaaacgaaaacgatgggcacctcctgagagattgttgtacacgctggtgctgactagccagcatcttctttgcttttattctggccggatttgttgaataaatacgcgaaacaaattagcaaaaaaaaaaaaaaaaaagcttatcgataccgtcgactgtttaaacacaataaag

SEQ ID NO: 26651 - protein, 289 aa, Triticum aestivum
MGSRYEVEVTVGSARDLKNVNWRNGDLQPYAVLWVDDGPKCSSRVDLDNGESPVWDEKLTVPLPPSTARLEDAVLRIDVVHANAGGGTKPLVGSARLPLRDVLDDAGLGGRASRTLRLKRPSGRPQGRLDVRVAVREAAARYYDPAYPPPYGQSQPQSRDPYAAPAPYGSGGYGYGQQQPYAAPPSGYPAAYGAAAPPQPAGYPAAYGGGAQPAYGAAPAPAYGSVSDPAAKKKGMGMGAGLAVGAAAGVLGGLALAEGASYLEDKIEDDVAEKVEDDLAGGGYDDDDY

SEQ ID NO: 26652 - DNA, 1314 bp, Triticum aestivum
aaaaaccggcagcgcgcgttcttgctcgggtctcgtctcggaagaaagattccagcaccgagagctcgaggccgacgactcaccttttggaaaggcggggttcttctgaggaccttgcatctccagtagatcgggcgcgtccactgttcccaggaccagagcatcgcacttggcaaagcagaggagaagatggacgctcgcggcggagacgcatcggccattgccctgctgctgtgcgcttgctttctcaccgcccttgcatgtgacagcaatggtgccaagtttgcgtacagcggtcctcttggccccgatcactgggggggattggaccccaacttcacgcgctgcgccatggggacgtaccagtctccggttgatatcaagaccagcgacgtggtttacaacccgatgctggggcctcttcacagggaatacaccgctgcgaatgctaccctcgtagacaacatcttcaacatcgcgctgcgatgcgaggatgctgctgggacggtgcagatcgacggggtgaagtacaagctggacaatatccattggcactctccttcagagcacaccatcaacggcgagaggtttgcggtggagcagcacatggttcacttcagtgacgacggcaacatatccgttgtgtcgatcctgtaccggctcggcaggccagaccctttcctcatgcagctgcaggataagctatcggagctctacgtggaggcctgcagggccgagaaaggtgctccgatccccaccggagtagtaaacatgtggcagctgcggcgttacgccaacatgtactaccggtacgtcgggtcgctgaccacgccgccgtgcaccgagaacatcatctggaacatccacggcagggtgagggagatggcgttggggcaggctgccgccctgatcgcgcccctggaggaaggctaccggcgcaacaacaggccgacgcagccgctcaacggccgcaccgtgcagttctaccgcaggttctggaagaagaaggggagcgggaagccgtaagggctggtcgatgcgcctcgatcgatgtttggagatgatgatgatgctgcagtctctctcgtctttgctctcggttcaggacaaagttatagtagtcgtttatctatctgcaagtcgtgttagcatataggtctgctttataggtttgctttatcgcttatcggtcttactctgaatttggttaagtgttaggtctttcgtgtctgtaaatgcgtccgggagggttgatgtgatcgatccttcttttgtctacaaaaaaagttaagctaatcaagaaagtttcactcc

SEQ ID NO: 26653 - protein, 278 aa, Triticum aestivum
MDARGGDASAIALLLCACFLTALACDSNGAKFAYSGPLGPDHWGGLDPNFTRCAMGTYQSPVDIKTSDVVYNPMLGPLHREYTAANATLVDNIFNIALRCEDAAGTVQIDGVKYKLDNIHWHSPSEHTINGERFAVEQHMVHFSDDGNISVVSILYRLGRPDPFLMQLQDKLSELYVEACRAEKGAPIPTGVVNMWQLRRYANMYYRYVGSLTTPPCTENIIWNIHGRVREMALGQAAALIAPLEEGYRRNNRPTQPLNGRTVQFYRRFWKKKGSGKP

SEQ ID NO: 26654 - protein, 224 aa, Triticum aestivum
MGTYQSPVDIKTSDVVYNPMLGPLHREYTAANATLVDNIFNIALRCEDAAGTVQIDGVKYKLDNIHWHSPSEHTINGERFAVEQHMVHFSDDGNISVVSILYRLGRPDPFLMQLQDKLSELYVEACRAEKGAPIPTGVVNMWQLRRYANMYYRYVGSLTTPPCTENIIWNIHGRVREMALGQAAALIAPLEEGYRRNNRPTQPLNGRTVQFYRRFWKKKGSGKP

SEQ ID NO: 26655 - protein, 205 aa, Triticum aestivum
MLGPLHREYTAANATLVDNIFNIALRCEDAAGTVQIDGVKYKLDNIHWHSPSEHTINGERFAVEQHMVHFSDDGNISVVSILYRLGRPDPFLMQLQDKLSELYVEACRAEKGAPIPTGVVNMWQLRRYANMYYRYVGSLTTPPCTENIIWNIHGRVREMALGQAAALIAPLEEGYRRNNRPTQPLNGRTVQFYRRFWKKKGSGKP

SEQ ID NO: 26656 - DNA, 1540 bp, Triticum aestivum
gaaattttccattcccccacccgcccttcacttcccttcacccgtcgctctcagccccgcagcgctagctagggttgggatcgatttggggcctagggttaggtcagtttctccatggcggcggcggcggcggcggaggggtccggggcagagggccgcggcgaggccgccgccggcggcaggcggcagcagcagcaggggctggcggagcgccggatgctccggtcccagtaccacgccatgaagaccctcatcaacgaggagagggatgacatggcgaaggaggactccgacaagttcgcctccatcatcacgcaggtggagagcttgcacgagcaagtgcagagacccagggagcaagtagcggatgcagaggctctgctagatattacaaccacgctggtaaaatccgtgaggtcccagtcaagtgaaggaatcacaccttctgatttcgtaacagcattgctgaagaaatttgggcagcaagcaacccttgattccgagcctgtctcgttgcgctgggctgatgttgggctttctgcttcacatgtcttcagggctgcgcctggatgctgcaccatgcttggacccatggatacagaagtaaagcagcggaagctttcagttgttagtagaaaaagaagtgccaggccaactgaaaatacttgtcctgaagagcttgctgattcttctgagggagcaaagacagacactgaccggaatgtgactgttgtatttgatatcctgaggaaaaataagcgtgcgaggctggagacccttgttttgaacagacaatcatttgcccaaacggttgagaatgtttttgcattgtctttcctagttaaagatggcagggtggcaataaacattgatgacaatgggcaccatatagtctatccacgaaatgcacctgctgctagtgccatagcgtcaggagaagtgtcctacagccattttgttttcagatatgattacagagattggaagcttatgaaagaagtcgttcctgaagggcaagaactgatgccgcacaggaccgcgcacagcctctcttctgaagagcgagaacagctggagccgtgtgcgcaacgaacaccgataaggaaactttgccggaaccggggtttggttcttcaggagcagatggttgttgcagagacacccgaggaggacagaagctccaaacgcaagcgtctattcatagatcaggagtgatcatgcctgcttgaaatgccttgtgccgcggtctacgctgtgtctgtatgtaggaggtatttgcctgattaacgtacccattgtagaacaaggtgtgccatagcaccgcttgtgctagttcttaccttgagacgagattcctccgggagaggaaagagggcaatagaaatgtaagctcaatagaaatgctactgtagttctttagatcagtcggcttaaataatgttcttggaatcggacttgtataatgtcgctcagagtaatatgcttgtgctgatagagaaaaagaaaaggtttgcttctagctgagccaaagttcctattc

SEQ ID NO: 26657 - protein, 366 aa, Triticum aestivum
MAAAAAAEGSGAEGRGEAAAGGRRQQQQGLAERRMLRSQYHAMKTLINEERDDMAKEDSDKFASIITQVESLHEQVQRPREQVADAEALLDITTTLVKSVRSQSSEGITPSDFVTALLKKFGQQATLDSEPVSLRWADVGLSASHVFRAAPGCCTMLGPMDTEVKQRKLSVVSRKRSARPTENTCPEELADSSEGAKTDTDRNVTVVFDILRKNKRARLETLVLNRQSFAQTVENVFALSFLVKDGRVAINIDDNGHHIVYPRNAPAASAIASGEVSYSHFVFRYDYRDWKLMKEVVPEGQELMPHRTAHSLSSEEREQLEPCAQRTPIRKLCRNRGLVLQEQMVVAETPEEDRSSKRKRLFIDQE

SEQ ID NO: 26658 - protein, 332 aa, Triticum aestivum
MLRSQYHAMKTLINEERDDMAKEDSDKFASIITQVESLHEQVQRPREQVADAEALLDITTTLVKSVRSQSSEGITPSDFVTALLKKFGQQATLDSEPVSLRWADVGLSASHVFRAAPGCCTMLGPMDTEVKQRKLSVVSRKRSARPTENTCPEELADSSEGAKTDTDRNVTVVFDILRKNKRARLETLVLNRQSFAQTVENVFALSFLVKDGRVAINIDDNGHHIVYPRNAPAASAIASGEVSYSHFVFRYDYRDWKLMKEVVPEGQELMPHRTAHSLSSEEREQLEPCAQRTPIRKLCRNRGLVLQEQMVVAETPEEDRSSKRKRLFIDQE

SEQ ID NO: 26659 - protein, 324 aa, Triticum aestivum
MKTLINEERDDMAKEDSDKFASIITQVESLHEQVQRPREQVADAEALLDITTTLVKSVRSQSSEGITPSDFVTALLKKFGQQATLDSEPVSLRWADVGLSASHVFRAAPGCCTMLGPMDTEVKQRKLSVVSRKRSARPTENTCPEELADSSEGAKTDTDRNVTVVFDILRKNKRARLETLVLNRQSFAQTVENVFALSFLVKDGRVAINIDDNGHHIVYPRNAPAASAIASGEVSYSHFVFRYDYRDWKLMKEVVPEGQELMPHRTAHSLSSEEREQLEPCAQRTPIRKLCRNRGLVLQEQMVVAETPEEDRSSKRKRLFIDQE

SEQ ID NO: 26660 - DNA, 1489 bp, Triticum aestivum
atgttttcttggcagcaagcagctcactaaagggacagagtgacaaggagaaatatgagaagtcccgaaaattgaaggatcacatacacaacattcgtgtaaattacacaaaggatttcaatagcaaagatgtctccaagaagcaaattgcagtggcaacatacctcatagataaactagcccttagggctggtaatgagaaggatgatgatgaggctgatactgttggttgttgtacgctgaaggttgataatgttacctgtgtgcctccaaataagcttcagtttgacttccttggtaaagattctataagatatttcaacactgtagaggttgaattacctgtatacaatgcgattgaggaattccgtactggcaaaaaggatggagatgctgtctttgaccagcttgatacaacgaaactgaatcatcacctgaaggacttgatgcctggcctttctgcgaaagtgttccgtacatataatgcttcgattaccttggatgctatcttgcacgaagaaacagaagatggaacccttcttgaaaagattgctgtctatcaacgagcaaacaaagaggttgctataatttgtaaccatcagcgtgctgtgtcaaagtcacacgatacccagatgactaagctgaatgaaaagattgatgaattaaaggcccaggtggatgagctgaacaaagatttgggcaaagtgaagagaggaaaacctctaggcaacggtgcagatgggaagccaaagagaactttggcacctgaagcgattgagaagaagatctctcagatagaaaccaagatagagaaaatggagatggataagaagacgaaagaggatttgaagacggtagcattagggacatcaaagatcaactaccttgaccctagaattacggtagcatggtgcaaaacccatgaagtccctattgagaagattttcagcaagacgattcttgcaaagtttggatgggcaatggacgtcgagccggatttcagattctaagagtattggcttccgggtgagccaatgggccccttggtaaattcgattcagcttccaggccttctcgcggtcccctaactgcaactagtagtaaaggaagagctcggtgtttgtttttcaagtctccctgctcctggaagaaggaagcacccggcattttctttgtaggcttttttttctctacccatcttctcttctgtacttgctatggcccaattgcctaaagtcgtgttttcatttgggccgacgaattttagcttgttgagaactgatggacattcattttatactgcatcaatcgcaaatatagataacctgtcagagtgatggttgtggatttgtttgagcgaggaagcctcaaaaaaaaaaaaaaaaaaaaaaaaaaaaaaaaaaaaaaaaaaaaaaaaaaaaaaaaaaaaaaaaggaaaaaaaaaaaaaaaaaggtttttcaaaaccgtcaaccccaagggggggcccgg

SEQ ID NO: 26661 - protein, 335 aa, Triticum aestivum
VFLAASSSLKGQSDKEKYEKSRKLKDHIHNIRVNYTKDFNSKDVSKKQIAVATYLIDKLALRAGNEKDDDEADTVGCCTLKVDNVTCVPPNKLQFDFLGKDSIRYFNTVEVELPVYNAIEEFRTGKKDGDAVFDQLDTTKLNHHLKDLMPGLSAKVFRTYNASITLDAILHEETEDGTLLEKIAVYQRANKEVAIICNHQRAVSKSHDTQMTKLNEKIDELKAQVDELNKDLGKVKRGKPLGNGADGKPKRTLAPEAIEKKISQIETKIEKMEMDKKTKEDLKTVALGTSKINYLDPRITVAWCKTHEVPIEKIFSKTILAKFGWAMDVEPDFRF

SEQ ID NO: 26662 - protein, 187 aa, Triticum aestivum
MPGLSAKVFRTYNASITLDAILHEETEDGTLLEKIAVYQRANKEVAIICNHQRAVSKSHDTQMTKLNEKIDELKAQVDELNKDLGKVKRGKPLGNGADGKPKRTLAPEAIEKKISQIETKIEKMEMDKKTKEDLKTVALGTSKINYLDPRITVAWCKTHEVPIEKIFSKTILAKFGWAMDVEPDFRF

SEQ ID NO: 26663 - DNA, 1300 bp, Triticum aestivum
aaaagggaagcaggcatattctattgctgggagtagaacttgggcggcatggatcagcttgacgagcaatcgttcctggacgagctcatgtcgctgcgccgggaggaggcgccgtcgccggctccgtggcaggcgtatccgggcagcggcatgatgacgacgagcgacctcctcttctacggcggcgagggcaccaccgaggcgagcagcggcatggactttgccgggccgtttcagcagcccatggcgccaccgccggccacatctccgcaccggccgcacgagaagttcaacttcgactgcctcagcgaagtatgcaacccttacggcagctgcgtcggcggcgtacctaagcctggggtcgtccacgcggctggccaggcgtatgccctccaggatgccatggcgcagaacggcacgagtggcggcaagctgcatcacggtggtggcaggtcgtcgtcgtccccggcgccgttcgtgttcgcaggtgtcgccggggagagctcggagatgaccaggggcgccttctccggcgcccacgctagaagcaagctcaacggtggcactacgtccaagaacctcatggcggaaaggcggcgccggaagcgtctcaacgaccgcctctccatgctccgctccatcgtgcccaagattaccaagatggataggacctcgatcctcggggacaccatagactacgtgaatgagctaaccgagcggatccaaaccctcgaggaggagatcggcgccacgccggaggatctgaacctgctgaacaccacgaagaatttctccagcggtagcagtgaggagatgccgatgaggaattccaccaagtttgtcatcgagaagcagggcgacggtggaacgaggatcgacatctgctgcgccacaagccccggcgtgctgatctcgacggtgagcgcgctggaggtgttggggctggagatcgaacagtgcgtcgtcagctgcttcggcgacttcgccatgcaggcatcctgctcacaagaggaagggaggagccgtgtgacaagaaccgacgagatcaagcaggcattgttcacgagtgcaggctatggaggaaggtgtctgtagtagtagttgtaattttgtaatattcgtctgtgagttctctgttgaatagtagtggttatgtaaaaaaaattgaatagtagtactatctaaagttcagctgtttgtgaccagattgtaatagttgggtgtgtgtccgtgagtataatgcatgcatgtatgtatcattgtatggagtggagtattgggatttggccgacatgaaaag

SEQ ID NO: 26664 - protein, 348 aa, Triticum aestivum
MDQLDEQSFLDELMSLRREEAPSPAPWQAYPGSGMMTTSDLLFYGGEGTTEASSGMDFAGPFQQPMAPPPATSPHRPHEKFNFDCLSEVCNPYGSCVGGVPKPGVVHAAGQAYALQDAMAQNGTSGGKLHHGGGRSSSSPAPFVFAGVAGESSEMTRGAFSGAHARSKLNGGTTSKNLMAERRRRKRLNDRLSMLRSIVPKITKMDRTSILGDTIDYVNELTERIQTLEEEIGATPEDLNLLNTTKNFSSGSSEEMPMRNSTKFVIEKQGDGGTRIDICCATSPGVLISTVSALEVLGLEIEQCVVSCFGDFAMQASCSQEEGRSRVTRTDEIKQALFTSAGYGGRCL

SEQ ID NO: 26665 - protein, 335 aa, Triticum aestivum
MSLRREEAPSPAPWQAYPGSGMMTTSDLLFYGGEGTTEASSGMDFAGPFQQPMAPPPATSPHRPHEKFNFDCLSEVCNPYGSCVGGVPKPGVVHAAGQAYALQDAMAQNGTSGGKLHHGGGRSSSSPAPFVFAGVAGESSEMTRGAFSGAHARSKLNGGTTSKNLMAERRRRKRLNDRLSMLRSIVPKITKMDRTSILGDTIDYVNELTERIQTLEEEIGATPEDLNLLNTTKNFSSGSSEEMPMRNSTKFVIEKQGDGGTRIDICCATSPGVLISTVSALEVLGLEIEQCVVSCFGDFAMQASCSQEEGRSRVTRTDEIKQALFTSAGYGGRCL

SEQ ID NO: 26666 - protein, 314 aa, Triticum aestivum
MMTTSDLLFYGGEGTTEASSGMDFAGPFQQPMAPPPATSPHRPHEKFNFDCLSEVCNPYGSCVGGVPKPGVVHAAGQAYALQDAMAQNGTSGGKLHHGGGRSSSSPAPFVFAGVAGESSEMTRGAFSGAHARSKLNGGTTSKNLMAERRRRKRLNDRLSMLRSIVPKITKMDRTSILGDTIDYVNELTERIQTLEEEIGATPEDLNLLNTTKNFSSGSSEEMPMRNSTKFVIEKQGDGGTRIDICCATSPGVLISTVSALEVLGLEIEQCVVSCFGDFAMQASCSQEEGRSRVTRTDEIKQALFTSAGYGGRCL

SEQ ID NO: 26667 - DNA, 926 bp, Triticum aestivum
agcgaggttttaggggtaagcggagagggactcccggcggcggcgcgaagcggagagagggagagagatgtcgaagcgagctggtcccccgaagcaccagaacacctacgcatggaagcccaacctcggccggaagatcaacgagaccgagcccgggggcaggttccggcctctgtcggagatcaccggcgtctgccagcgctgccgggaccaaatcgactggaagcgcaaatacggcaagtacaagccgattgttgagcctgcaaaatgccagaagtgcagtaaacgaaacgtccggcaggcataccacaacgtctgcacaggttgctccaaggagcttgggatttgtgccaagtgctgcacctctgttaagcagcttgttggaagggatgctgaggaagcaaacagtgagcgcaaagaactagaggaggccatcagatatgctagggagagggaacgacggacacttcttcgccttatgaacaaaaacaaggacgaggagagcggcacatcagtcccgaagatcgcagaccgagatcgggagggcgaccttttccctgttgcatcccttgacgaatatgctgaacaggctgtacagaaggatgagtctgatgaagaagatgccagggattttgtgaaagattaacttggcaaggtttggtactgtaaaaggatatttagttttgtgcgcggacgctccttcggggtgttctaactcagcggagaaatgccaacacttgttttagcagagatatatatttctgtttatcagatcttattttgaccagtgagcttacgacaccttcccagttatgttatgcttcttcctaataagtgtaggattctgaagctgtattattattacatgagtggtatatattgctgttgctggtttacctccagagacaagtcaacattccccgttt

SEQ ID NO: 26668 - protein, 192 aa, Triticum aestivum
MSKRAGPPKHQNTYAWKPNLGRKINETEPGGRFRPLSEITGVCQRCRDQIDWKRKYGKYKPIVEPAKCQKCSKRNVRQAYHNVCTGCSKELGICAKCCTSVKQLVGRDAEEANSERKELEEAIRYARERERRTLLRLMNKNKDEESGTSVPKIADRDREGDLFPVASLDEYAEQAVQKDESDEEDARDFVKD

SEQ ID NO: 26669 - protein, 140 aa, Triticum aestivum
RGFRGKRRGTPGGGAKRREGERCRSELVPRSTRTPTHGSPTSAGRSTRPSPGAGSGLCRRSPASASAAGTKSTGSANTASTSRLLSLQNARSAVNETSGRHTTTSAQVAPRSLGFVPSAAPLLSSLLEGMLRKQTVSAKN

SEQ ID NO: 26670 - DNA, 734 bp, Triticum aestivum
  misc_feature (670)..(673): n is a, c, g, or t
  misc_feature (681)..(681): n is a, c, g, or t
tctattcactccgtcgctcggcgccctagagcaagaacatggcgatcgcgatctcgcaggaggccttcgatgacatggtccgggagaacatggaggacctcggaatggaccccgacgaggccctcgccgacgccgtcgacgccctcaccctccagggcgccaacctctccgggatcatcaggcgcgtgcctggggacgccgtggcggaggaggtgaacccggtgatgcgggtgctggacgaactgaaggcctctgccagtggtaggtcgggggaggatcttgacaggctggtctctttgctcgacgagttgctcgagctgtgctccggcgagggggcggagaatgcggccgtggcggcacggaacggtggcgtggaggcgctcgtcgccctgtgcgcttcggctggggttatgcaggaggggctgcttgcttcgggcttgaaggcgctgagctccctgatccgtgatgttgggagcactgaaaagttcaggcaaagccaagggcccaaaattgtcatggatatcttgaaaggagccctggaaaattcagatatactcgatggtggttttagtgtcatggcagcggcatctgctggcaatgaagttgtgaaagacgcctttatggacttgaaggtcgatgaactcattctggaggttatgaggaacaaatnnnntagtaaantgcaaagcgtgtatgatgccatacgtgttctgttgacacccgatgataaccga

SEQ ID NO: 26671 - protein, 232 aa, Triticum aestivum
  misc_feature (211)..(212): Xaa can be any naturally occurring amino acid
  misc_feature (215)..(215): Xaa can be any naturally occurring amino acid
MAIAISQEAFDDMVRENMEDLGMDPDEALADAVDALTLQGANLSGIIRRVPGDAVAEEVNPVMRVLDELKASASGRSGEDLDRLVSLLDELLELCSGEGAENAAVAARNGGVEALVALCASAGVMQEGLLASGLKALSSLIRDVGSTEKFRQSQGPKIVMDILKGALENSDILDGGFSVMAAASAGNEVVKDAFMDLKVDELILEVMRNKXXSKXQSVYDAIRVLLTPDDNR

SEQ ID NO: 26672 - protein, 220 aa, Triticum aestivum
  misc_feature (199)..(200): Xaa can be any naturally occurring amino acid
  misc_feature (203)..(203): Xaa can be any naturally occurring amino acid
MVRENMEDLGMDPDEALADAVDALTLQGANLSGIIRRVPGDAVAEEVNPVMRVLDELKASASGRSGEDLDRLVSLLDELLELCSGEGAENAAVAARNGGVEALVALCASAGVMQEGLLASGLKALSSLIRDVGSTEKFRQSQGPKIVMDILKGALENSDILDGGFSVMAAASAGNEVVKDAFMDLKVDELILEVMRNKXXSKXQSVYDAIRVLLTPDDNR

SEQ ID NO: 26673 - protein, 215 aa, Triticum aestivum
  misc_feature (194)..(195): Xaa can be any naturally occurring amino acid
  misc_feature (198)..(198): Xaa can be any naturally occurring amino acid
MEDLGMDPDEALADAVDALTLQGANLSGIIRRVPGDAVAEEVNPVMRVLDELKASASGRSGEDLDRLVSLLDELLELCSGEGAENAAVAARNGGVEALVALCASAGVMQEGLLASGLKALSSLIRDVGSTEKFRQSQGPKIVMDILKGALENSDILDGGFSVMAAASAGNEVVKDAFMDLKVDELILEVMRNKXXSKXQSVYDAIRVLLTPDDNR

SEQ ID NO: 26674 - DNA, 1654 bp, Triticum aestivum
accaagcaaagctgaatcagaacactccaatgtcaacgccaagaagggtggtcgtcgtcgccggccagagcctaagccacctcatctccatgctggagttcgccgcgatgtgcctccgtcgcggcctcgcggtgaccgtcgccgtcccggacccgtccctcaccgccccggccttccgctccaccatcggccggtacgcctcccggctccccaccctctccgtccactccctccctccccctcccgccctcgacgccgcctccgctgccgcccacccgttcatccgcatgcaggccgcctcccgctcccaggcacctgtcctgcgggacttcctccatagcctccccgacgtccacgcgctcgtggccgacatgctcgccgtctgtgacctcgacgtagccacggagctgggcatcccggggcacctgttcttctccacaggcgccgccagcctctccgtcttcctccaattgcctttgttttgctccgggcgcgccggaaacttgaaagatctcggcgacacgcccgtgtcgttccccggcatgtccccgatgccggcgtctcacttggtcgacgcggtgctcgacagagggacggacctctacgcgactgtgctggacgtattcggtcggatcgcgggtgcgcgcggcattctggtgaataccttcgacgcgctggagggctcagcggtgtcggcgcttagagacgggcgctgcctgcgcggccgcgccacgccgccagtttactgcgtcgggccgttgatcgcggagggggaagaggaggaggaaagacacccatgcctcccgtggctggacgcgcagcccgagcgtagcgtcgtgttcctctgcttcggcagccgatgcacggtgtcgctccagcagatcggtgagatggccaaggggctggagaagtccgggcacaggttcttgtgggtgctgcgcgcgcctcctgccttcgccgcagccggcggcggaccggacgcggcgctgtctcttctcccggaggggttcttggcccggaccgcggacaggggcttcgtggtgactgcgtcctgggtgcctcaggtggaggtgctgcgtcactcatccactggtgcgttcgtaacccactgtggatggaactcgacgctggaggcggtggtcgccggtgtgccaatggtgtgctggccgttggtagccgagcagtggatgaacaaggtgtacattgtccaagatatgaaggttggcgtggaggtgagagggtataagcgcgggggccttgtcagggccgacgatgttgacgcggcggttaggcagatcatggacatggagccggagagacggcgagcactcgaggaacggatcatggcggtaaagaagagcgctcaagcagtatggaaggaagatggctcctcctgtaccgcgttcaccgagtttatgatgcaaacggagtaaccattgtaatcattagcagcaactatccatgaagcaaatggagtgatcattagtttatgaagcaaagggacatcagcagcagatgcttaggtgtgggtaaggatatgtaagttgcacgttgcagcattgcgcaccattgggttgtaattaagcttgaattatatgagtatagtccaatctgttggtccaaaaaaaaaaaaaaaaaagcttatcgataccgt

SEQ ID NO: 26675 - protein, 476 aa, Triticum aestivum
QAKLNQNTPMSTPRRVVVVAGQSLSHLISMLEFAAMCLRRGLAVTVAVPDPSLTAPAFRSTIGRYASRLPTLSVHSLPPPPALDAASAAAHPFIRMQAASRSQAPVLRDFLHSLPDVHALVADMLAVCDLDVATELGIPGHLFFSTGAASLSVFLQLPLFCSGRAGNLKDLGDTPVSFPGMSPMPASHLVDAVLDRGTDLYATVLDVFGRIAGARGILVNTFDALEGSAVSALRDGRCLRGRATPPVYCVGPLIAEGEEEEERHPCLPWLDAQPERSVVFLCFGSRCTVSLQQIGEMAKGLEKSGHRFLWVLRAPPAFAAAGGGPDAALSLLPEGFLARTADRGFVVTASWVPQVEVLRHSSTGAFVTHCGWNSTLEAVVAGVPMVCWPLVAEQWMNKVYIVQDMKVGVEVRGYKRGGLVRADDVDAAVRQIMDMEPERRRALEERIMAVKKSAQAVWKEDGSSCTAFTEFMMQTE

SEQ ID NO: 26676 - protein, 467 aa, Triticum aestivum
MSTPRRVVVVAGQSLSHLISMLEFAAMCLRRGLAVTVAVPDPSLTAPAFRSTIGRYASRLPTLSVHSLPPPPALDAASAAAHPFIRMQAASRSQAPVLRDFLHSLPDVHALVADMLAVCDLDVATELGIPGHLFFSTGAASLSVFLQLPLFCSGRAGNLKDLGDTPVSFPGMSPMPASHLVDAVLDRGTDLYATVLDVFGRIAGARGILVNTFDALEGSAVSALRDGRCLRGRATPPVYCVGPLIAEGEEEEERHPCLPWLDAQPERSVVFLCFGSRCTVSLQQIGEMAKGLEKSGHRFLWVLRAPPAFAAAGGGPDAALSLLPEGFLARTADRGFVVTASWVPQVEVLRHSSTGAFVTHCGWNSTLEAVVAGVPMVCWPLVAEQWMNKVYIVQDMKVGVEVRGYKRGGLVRADDVDAAVRQIMDMEPERRRALEERIMAVKKSAQAVWKEDGSSCTAFTEFMMQTE

SEQ ID NO: 26677 - protein, 447 aa, Triticum aestivum
MLEFAAMCLRRGLAVTVAVPDPSLTAPAFRSTIGRYASRLPTLSVHSLPPPPALDAASAAAHPFIRMQAASRSQAPVLRDFLHSLPDVHALVADMLAVCDLDVATELGIPGHLFFSTGAASLSVFLQLPLFCSGRAGNLKDLGDTPVSFPGMSPMPASHLVDAVLDRGTDLYATVLDVFGRIAGARGILVNTFDALEGSAVSALRDGRCLRGRATPPVYCVGPLIAEGEEEEERHPCLPWLDAQPERSVVFLCFGSRCTVSLQQIGEMAKGLEKSGHRFLWVLRAPPAFAAAGGGPDAALSLLPEGFLARTADRGFVVTASWVPQVEVLRHSSTGAFVTHCGWNSTLEAVVAGVPMVCWPLVAEQWMNKVYIVQDMKVGVEVRGYKRGGLVRADDVDAAVRQIMDMEPERRRALEERIMAVKKSAQAVWKEDGSSCTAFTEFMMQTE

SEQ ID NO: 26678 - DNA, 1723 bp, Triticum aestivum
ctagccgccgccactgcaccggcgcctcccccgccccactgactggcttcctagggctgccctccgcccgcttcttcaccggcgcgttggtcgcgaccccgccaccccgccaccctcgccagcgctggtccctgcacggacggcacgaacgccgccgccccgtacaagatactgcaccgactccgcagcccgtcctcgtcctagggcagaccccacccccgcggctccgctttcttagcactctcgccgtcgcgccgccgggagccaggcatgacgacgcgtatcgcgcccggcgtgggcgcgaacctcctcgggcagcactcggcggagcgcaaccaggacgccaccacctacgtcggcaacctcgacccgcaggtttccgaggaattactgtgggagttgtttgtccaagcaggccctgttgttaatgtctatgtcccgaaagacagagttacaaatctacaccagggctatgggtttgtagaatttaggagtgaggaagatgcagattatgctattaagattttgaacatgctcaaattgtatggaaagccaataagagtaaacaaggcttcccaagacaagaagagcttggatgtgggtgcgaatctttttattggcaatcttgatccggaagtcgatgagaagcttctctatgacaccttcagtgcatttggtgtgattgtgaccaaccctaagataatgcgggaccctgaaactggaaattctcgagggtttggctttgtgagctatgactcctttgaatcatctgatcaagctatagaggccatgaacaaccagcatttatgtaatcggccaatcactgtctcatatgcttacaagaaagacacgaaaggagagcgccatggcacaccagcagagaggttgcttgcggcgaacaacccaggatctcagaagcataggccacacacaatgtttgcaactgctccgccaacccaagggcttcaaaacggtggtgttggtgcacctgtgccacggccttttgccaatgggaatgtcccaggacagatgcaacatgtcagaccgccgccgccacctgttggtcaataccctcccatgcagatgcatggacagcctgcctggcctggtcctccacagaatatgcaacaagtaccacctccgatgcaacagcagcttcaatacaggcttccagggatgcccccgccgccgcaaaacatgatgcccccaccgcaaaacatgatgccgccacctcatcacatggccaggccgccgccgccacctcccaatatgcaagctccacctatgtggaggccacccccacccccacaacaaggtggtggaatgccgccacctccaatgtccatgccacctcctccaccgccaccttctggttaaaaatacaaatgggtgtcttccatgggttaatttggcgcgcagcagttgtagaccaagggtgttaaaagtctttcatatattgtcatgtaacttgcagcactaggagaatatcagaattgagagaattagcggacggtgatacaaaatgcgtggcttttgtgattgcatgtacggtacctgccttgtgggtgctgctgctgtgtgctctgcttaggacaattatggaccgtgatctgcgctatctctttacattgttattactgacagaatcgtgttttaaacaggcccctggtgattgacagttgtcgcgcataaaaaaaaaaaaaaaaaagcttatcgataccgt

SEQ ID NO: 26679 - protein, 368 aa, Triticum aestivum
MTTRIAPGVGANLLGQHSAERNQDATTYVGNLDPQVSEELLWELFVQAGPVVNVYVPKDRVTNLHQGYGFVEFRSEEDADYAIKILNMLKLYGKPIRVNKASQDKKSLDVGANLFIGNLDPEVDEKLLYDTFSAFGVIVTNPKIMRDPETGNSRGFGFVSYDSFESSDQAIEAMNNQHLCNRPITVSYAYKKDTKGERHGTPAERLLAANNPGSQKHRPHTMFATAPPTQGLQNGGVGAPVPRPFANGNVPGQMQHVRPPPPPVGQYPPMQMHGQPAWPGPPQNMQQVPPPMQQQLQYRLPGMPPPPQNMMPPPQNMMPPPHHMARPPPPPPNMQAPPMWRPPPPPQQGGGMPPPPMSMPPPPPPPSG

SEQ ID NO: 26680 - protein, 281 aa, Triticum aestivum
MLKLYGKPIRVNKASQDKKSLDVGANLFIGNLDPEVDEKLLYDTFSAFGVIVTNPKIMRDPETGNSRGFGFVSYDSFESSDQAIEAMNNQHLCNRPITVSYAYKKDTKGERHGTPAERLLAANNPGSQKHRPHTMFATAPPTQGLQNGGVGAPVPRPFANGNVPGQMQHVRPPPPPVGQYPPMQMHGQPAWPGPPQNMQQVPPPMQQQLQYRLPGMPPPPQNMMPPPQNMMPPPHHMARPPPPPPNMQAPPMWRPPPPPQQGGGMPPPPMSMPPPPPPPSG

SEQ ID NO: 26681 - protein, 224 aa, Triticum aestivum
MRDPETGNSRGFGFVSYDSFESSDQAIEAMNNQHLCNRPITVSYAYKKDTKGERHGTPAERLLAANNPGSQKHRPHTMFATAPPTQGLQNGGVGAPVPRPFANGNVPGQMQHVRPPPPPVGQYPPMQMHGQPAWPGPPQNMQQVPPPMQQQLQYRLPGMPPPPQNMMPPPQNMMPPPHHMARPPPPPPNMQAPPMWRPPPPPQQGGGMPPPPMSMPPPPPPPSG

SEQ ID NO: 26682 - DNA, 1325 bp, Triticum aestivum
attcgcacgagaccattacctagaacatcctaattgaaaaaaggtttccatacgtaccatggctgcccggctcgtcgtcctccttctagcgctcgtccacgccggcgtgtccgccgaagacgtcatccggcaggtgacggacggcggccacggcgctggacgccccggtctgctcccggaggcgcagttcgcggcgttcgtgcggcgacacggcaagcagtactcgggccccgaggagtacgcgcgccggctgcgcgtgttcgcggccaacgtggcccgcgcagccgcccaccaggcgctcgacccgggcgcgcgccacggcgtcacgcccttctccgacctcacccgggaggagttcgaggcgcgcctcaccggcctcgccggcgccggcgacgtcctgcgcagcgtgcgggggatgcccgccgcggcgccggccacggaggaggaggtcgccgcgctgcccgccagcttcgactggcgcgacaagggcgccgtcaccgatgtgaagatgcagggcgtgtgcggctcgtgctgggcgttcagcacaaccggcgtcgtggagggcgccaacttcgtcgccacggggaagctcctcaacctcagcgagcagcagctggtcgactgcgaccacacgtgcgacgcggtggcgaagaccgagtgcaacagcggctgctccggcggactgatgacgaacgcttacaagtacctgatgagctccggcgggctgatggagcaggcggcgtacccctacacgggagcgcaggggacgtgccggttcgacaggagcaaggtggcagtccgcgtggccaacttcaccgccgtgccgctcgacgaggaccagatgcgggcggcgctcgtccgcggcgggcccctggcggtgggcctgaacgcggcgttcatgcagacgtacgtcggcggcgtgtcctgcccgctcatctgcccgcgggcgctggtgaaccacggcgtgctcctcgtcggctacggcgcgcgcggcttctcggcgctgcggctcgggtaccggccctactggctcatcaagaactcgtgggggcagcagtggggggagggcgggtactacaagctctgccgcggccgcaacgtctgcggcgtcgacagcatggtctccgccgtcgccgtcgccccgtgatcggcaaacgacgacgacgaccggcgtagtacgtgttcatgtagttgttcgttagcctaacggtatattagtagggcttaatcagtggacactgcactcaataatgccacttcaaagttcaaacatactagaagcgcttgtatacgttctctcttggatgccgtggaggtctcaagtc

SEQ ID NO: 26683 - protein, 362 aa, Triticum aestivum
MAARLVVLLLALVHAGVSAEDVIRQVTDGGHGAGRPGLLPEAQFAAFVRRHGKQYSGPEEYARRLRVFAANVARAAAHQALDPGARHGVTPFSDLTREEFEARLTGLAGAGDVLRSVRGMPAAAPATEEEVAALPASFDWRDKGAVTDVKMQGVCGSCWAFSTTGVVEGANFVATGKLLNLSEQQLVDCDHTCDAVAKTECNSGCSGGLMTNAYKYLMSSGGLMEQAAYPYTGAQGTCRFDRSKVAVRVANFTAVPLDEDQMRAALVRGGPLAVGLNAAFMQTYVGGVSCPLICPRALVNHGVLLVGYGARGFSALRLGYRPYWLIKNSWGQQWGEGGYYKLCRGRNVCGVDSMVSAVAVAP

SEQ ID NO: 26684 - protein, 243 aa, Triticum aestivum
MPAAAPATEEEVAALPASFDWRDKGAVTDVKMQGVCGSCWAFSTTGVVEGANFVATGKLLNLSEQQLVDCDHTCDAVAKTECNSGCSGGLMTNAYKYLMSSGGLMEQAAYPYTGAQGTCRFDRSKVAVRVANFTAVPLDEDQMRAALVRGGPLAVGLNAAFMQTYVGGVSCPLICPRALVNHGVLLVGYGARGFSALRLGYRPYWLIKNSWGQQWGEGGYYKLCRGRNVCGVDSMVSAVAVAP

SEQ ID NO: 26685 - protein, 212 aa, Triticum aestivum
MQGVCGSCWAFSTTGVVEGANFVATGKLLNLSEQQLVDCDHTCDAVAKTECNSGCSGGLMTNAYKYLMSSGGLMEQAAYPYTGAQGTCRFDRSKVAVRVANFTAVPLDEDQMRAALVRGGPLAVGLNAAFMQTYVGGVSCPLICPRALVNHGVLLVGYGARGFSALRLGYRPYWLIKNSWGQQWGEGGYYKLCRGRNVCGVDSMVSAVAVAP

SEQ ID NO: 26686 - DNA, 1129 bp, Triticum aestivum
ctacaccatcacacaatatccagaaccatctcactgccaacctccgccatggcgttccgacgccctctcgctctccacccgctcgtgatcgccttcgtgctggtctcctgtctcgccggcgccgccacggcgaagcagacgggccagctgaccgtgttctggggccggaacgccggcgagggcacgctgcgcgaggcctgcgacacggggctctactccaccgtcgtcatctccttctacagcgtcttcgggcacggccgctactggggcgacctctctggccaccctctcgccggcgtcggtgccgacatcaagcactgccagtccacgaacatcctcgtcctcctctccatcggcgggcccgggaacggctactccctcccgtcctccgcctccgccgcagccgtcgccgacaacctctggaacgcgcacctcggcgggcgccggaacggcgtgtaccgcccgttcggcgacgccgccgtcgacggcatcgacttctacatcgaccagggcgcccccgaccactacgacgagctggccagccgcctcgacgggtacaaccggttctaccgcggccggaagggtgtgcgcctgacggcgacgccgcggtgcgggttgcccgaccgccgcctgggggcggcgctccggacggggctgttcgagcgcatccacgtcaggttctacggcaatgacacatgctcgctggggaagggcgggacgtacggcgtggtagagcagtgggagaagtggacggcggcgttcccaaggacccaggtgtacctgggcctcgcgccggcggagagcggcgtgccggagggggcgcagggcaccgtcgccgtttacctcaagtacctctactacgacctgctgcccaaggtgcagaaggcgaacaactatggcggggtcatggtctgggacagattcgccgacaagaagacacgctggagcagcgtcgtcaacggatgggcctgatcgtttatatcgctagctggtttacagctacggatccgagtatatactacttctactgtgtatgcgtgtgtatgaataaaacggcatccatatgataatgatatatggatgtgaactcaagttgtttcttgttctagtcaatgagataaggaatatg

SEQ ID NO: 26687 - protein, 323 aa, Triticum aestivum
LHHHTISRTISLPTSAMAFRRPLALHPLVIAFVLVSCLAGAATAKQTGQLTVFWGRNAGEGTLREACDTGLYSTVVISFYSVFGHGRYWGDLSGHPLAGVGADIKHCQSTNILVLLSIGGPGNGYSLPSSASAAAVADNLWNAHLGGRRNGVYRPFGDAAVDGIDFYIDQGAPDHYDELASRLDGYNRFYRGRKGVRLTATPRCGLPDRRLGAALRTGLFERIHVRFYGNDTCSLGKGGTYGVVEQWEKWTAAFPRTQVYLGLAPAESGVPEGAQGTVAVYLKYLYYDLLPKVQKANNYGGVMVWDRFADKKTRWSSVVNGWA

SEQ ID NO: 26688 - protein, 307 aa, Triticum aestivum
MAFRRPLALHPLVIAFVLVSCLAGAATAKQTGQLTVFWGRNAGEGTLREACDTGLYSTVVISFYSVFGHGRYWGDLSGHPLAGVGADIKHCQSTNILVLLSIGGPGNGYSLPSSASAAAVADNLWNAHLGGRRNGVYRPFGDAAVDGIDFYIDQGAPDHYDELASRLDGYNRFYRGRKGVRLTATPRCGLPDRRLGAALRTGLFERIHVRFYGNDTCSLGKGGTYGVVEQWEKWTAAFPRTQVYLGLAPAESGVPEGAQGTVAVYLKYLYYDLLPKVQKANNYGGVMVWDRFADKKTRWSSVVNGWA

SEQ ID NO: 26689 - protein, 229 aa, Triticum aestivum
TPSHNIQNHLTANLRHGVPTPSRSPPARDRLRAGLLSRRRRHGEADGPADRVLGPERRRGHAARGLRHGALLHRRHLLLQRLRARPLLGRPLWPPSRRRRCRHQALPVHEHPRPPLHRRARERLLPPVLRLRRSRRRQPLERAPRRAPERRVPPVRRRRRRRHRLLHRPGRPRPLRRAGQPPRRVQPVLPRPEGCAPDGDAAVRVARPPPGGGAPDGAVRAHPRQVLRQ

SEQ ID NO: 26690 - DNA, 1491 bp, Triticum aestivum
gctcgtctctgccgatacttcacacaagaaagatgagatcgccggcaactcttccactactatcttccgatcgtttggtcgccatggcgccgtgacctcgccgtgcttcagcgatggccccgcgctggacctctgatgaccagacaagacggaccgaccgcaccgtgactccgacagccactccgtggtggtaatcagtggagtgccgccaccgtcgatcaaaatctttgacctcccgcatccaccgccagttctgtctccctgcaagcaaatctcagccgccattgctcagcttctgagcagcggagcggatccgagatggagcccatccctctgctcacgccgtacaagatgggccagttcgagctgtcgcaccgggtcgtgctggcgcccatgacgcggcagcgcgcctacggcggcgtgccgcagccgcacgccgccctctactactcccagcgcgccacccccggcggcctcctcatctccgaggccacgcgcgtcgcgccggcaaggcaggacgaggagccggcctcgttcagggacatgccgggggtctgggcgccggagcaggtcgaggcgtggaggcccgtggtcgacgccgtgcacgccgagggcgccgtcttcttctgccagctctggcacgccgcggccgcccccggcgacgccgtcagggaaaggcagcaggtgagcccgcagatgagctatgatggccgccgcgaggagctcacgtcgccgaggagggtggcagctgaggacgcgcccggcgtcgtcgacgcgttcagacgcgccgccaggaacgccatcgatgccggcttcgacggcgtcgagctccaaggcaccaacggctacttcgtcgtcgacggcggtggcccggagagtcgctgccggttcgcgctggaggtggtggacgccgtggcgcgggagatcggcggccaccgcctgggcctgcgactggaccagttcaccgcagagccggacgagcacgcgctggcgctccatgtcgtcagccggctcaacgacctcggcgtgctctactgccacatgatcgagcccaaggtggacggccggcggcgcgtgtcccggcggctgctgccttacagggaggcgttcggcggcacgttcatcgccagcggcgggtacgggcgggaggagggcgacgcggccgtcggcgaggggtacgccgacctggtggcgtacgggcggctcttcctggcgaacccggacctgccgaggaggttcgagctcggcgcgccgctcaacgactgcgtcagcgccaccttctacggcgccggcgccggcgccgcccaccccgccgtcggatacactgattacccgttcctagaatgatcgatgattgtgctcggatgttcttttcggcgtaaacaatcgaccatgatttgcctcctcagtgttgtatatatgatagtactaattttatggggattaagttcatcaaaaaaaaaaaaaaaaaagcttatcgataccgtcgac

SEQ ID NO: 26691 - protein, 342 aa, Triticum aestivum
MEPIPLLTPYKMGQFELSHRVVLAPMTRQRAYGGVPQPHAALYYSQRATPGGLLISEATRVAPARQDEEPASFRDMPGVWAPEQVEAWRPVVDAVHAEGAVFFCQLWHAAAAPGDAVRERQQVSPQMSYDGRREELTSPRRVAAEDAPGVVDAFRRAARNAIDAGFDGVELQGTNGYFVVDGGGPESRCRFALEVVDAVAREIGGHRLGLRLDQFTAEPDEHALALHVVSRLNDLGVLYCHMIEPKVDGRRRVSRRLLPYREAFGGTFIASGGYGREEGDAAVGEGYADLVAYGRLFLANPDLPRRFELGAPLNDCVSATFYGAGAGAAHPAVGYTDYPFLE

SEQ ID NO: 26692 - protein, 331 aa, Triticum aestivum
MGQFELSHRVVLAPMTRQRAYGGVPQPHAALYYSQRATPGGLLISEATRVAPARQDEEPASFRDMPGVWAPEQVEAWRPVVDAVHAEGAVFFCQLWHAAAAPGDAVRERQQVSPQMSYDGRREELTSPRRVAAEDAPGVVDAFRRAARNAIDAGFDGVELQGTNGYFVVDGGGPESRCRFALEVVDAVAREIGGHRLGLRLDQFTAEPDEHALALHVVSRLNDLGVLYCHMIEPKVDGRRRVSRRLLPYREAFGGTFIASGGYGREEGDAAVGEGYADLVAYGRLFLANPDLPRRFELGAPLNDCVSATFYGAGAGAAHPAVGYTDYPFLE

SEQ ID NO: 26693 - protein, 317 aa, Triticum aestivum
MTRQRAYGGVPQPHAALYYSQRATPGGLLISEATRVAPARQDEEPASFRDMPGVWAPEQVEAWRPVVDAVHAEGAVFFCQLWHAAAAPGDAVRERQQVSPQMSYDGRREELTSPRRVAAEDAPGVVDAFRRAARNAIDAGFDGVELQGTNGYFVVDGGGPESRCRFALEVVDAVAREIGGHRLGLRLDQFTAEPDEHALALHVVSRLNDLGVLYCHMIEPKVDGRRRVSRRLLPYREAFGGTFIASGGYGREEGDAAVGEGYADLVAYGRLFLANPDLPRRFELGAPLNDCVSATFYGAGAGAAHPAVGYTDYPFLE

SEQ ID NO: 26694 - DNA, 1041 bp, Triticum aestivum
ccatcaccggaacatcttgaccaactgcgcgcacctcatcggccgcgcgcacgcccagtaaaccctaccctactcgccggcgacagaggttttcgcgagctcatgcgacaatggcgtcccgcctcgagtttgagaactcgtgcaaggtcggggtgttcgcgaggctcaccaacgcctactgcctcgtcctggccggtggggcggggaatttcaccagtgtgtttgaggccgagctcgcctacaccgtcccagtggtcaaggcatccatcggcggcatgaggatcctcgggacattgtgcgtgggcaacaagaacggccttcttctaccacacaccaccaacgaccaagagctccagcacctcaagaatagcctgcctgatgaggtggtcgtccagtgtcgacgagcggctctccgccctcggcaagtgcattgcttgcaacgaccacgtggctctcacaaacccagatctcaccagggaaaccgaggagatcatctcggacgttcttggggtggaagtgttcaggcagaccatcgcagggagcatcctggttggcagctcctgcgccttctccaacaaagtgggacttgttcaccacacacgtcggtggaggacctggacgagctgtcgacgctgctgcaggtgcccctcgtcgtcggcaccgtcaaccgggggagcgagggcattgcggccgacatggtggtcaacgattgggcggccttctgcggttccgacaccatggcgaccgagctctcagtgtggagagcgtcttcaggctgagggacgcccggccgggggcattgggcgcagacgtgaggaaatccttggttgaaagctacttttttaggggaattttgccttcggggtgttagccatgaatattcttaagtacttcttccgcttcaaaatagatgactcaactttgtactaactttacggagggagtagtacttttaagctcgtgataagactttcaagtagcaaggatggagggtttatctctaaagacctgagttataaacaaaaatgaggggcacacatg

SEQ ID NO: 26695 - protein, 222 aa, Triticum aestivum
MASRLEFENSCKVGVFARLTNAYCLVLAGGAGNFTSVFEAELAYTVPVVKASIGGMRILGTLCVGNKNGLLLPHTTNDQELQHLKNSLPDEVVVQCRRAALRPRQVHCLQRPRGSHKPRSHQGNRGDHLGRSWGGSVQADHRREHPGWQLLRLLQQSGTCSPHTSVEDLDELSTLLQVPLVVGTVNRGSEGIAADMVVNDWAAFCGSDTMATELSVWRASSG

SEQ ID NO: 26696 - protein, 167 aa, Triticum aestivum
MRILGTLCVGNKNGLLLPHTTNDQELQHLKNSLPDEVVVQCRRAALRPRQVHCLQRPRGSHKPRSHQGNRGDHLGRSWGGSVQADHRREHPGWQLLRLLQQSGTCSPHTSVEDLDELSTLLQVPLVVGTVNRGSEGIAADMVVNDWAAFCGSDTMATELSVWRASSG

SEQ ID NO: 26697 - protein, 150 aa, Triticum aestivum
MRWSSSVDERLSALGKCIACNDHVALTNPDLTRETEEIISDVLGVEVFRQTIAGSILVGSSCAFSNKVGLVHHTRRWRTWTSCRRCCRCPSSSAPSTGGARALRPTWWSTIGRPSAVPTPWRPSSQCGERLQAEGRPAGGIGRRREEILG

SEQ ID NO: 26698 - DNA, 1303 bp, Triticum aestivum
aacaaaccaaccgccaacacttccattccaggcatcaaccatggcttctcctcggcatctgatgaagctttcggctgctcttctcctcctctgtgttggcgtgtgtgtggctcgcaacagtgacttctccattgtcggctactcggaggaggacctgtcgtccaacgacagactcgtcgagctgtttgagaagtggctggccaagcaccagaaggcgtacgcgagcttcgaggagaagctgcacaagttcgaggtgttcaaggacaacctgaagcacatcgacaagatcaaccgggaagtgaccagctactggctcggcctcaacgagtttgccgacctcaccaacgtcgagttcaaggccgcctacctcggcctcaatgctgctccggctcgtcggggcagcagccgaagcttcaggtacgaggacgtgagtgccagcgacctgcccaagtctgtggactggaggaagaagggcgcggtgacagaggtgaagaaccaggggcagtgcggcagctgctgggccttctcgacggtggcggcagtggaagggatcaacgccatcgtgacaggcaacctgactgcgctgtcggagcaggagctcatcgactgcagcgtcgatggcaacagtggctgcaatggcggcttgatggactacgccttctcctacatcgcgtccagtggcgggctacacaccgaggaggcgtacccctacctcatggaggaaggcagctgcggcgacggtaagaaggccgagtccaaggcggtgacgatcagcggcttcgaggacgtgccggccaatgacgagcaggcgctgatcaaggctctcgcccaccagcccgtctccgtcgccatcgaggcctccggcaggcacttccagttctacagcgggggagttttcgacggtccttgcggcgcgcagctagatcacggcgtggcggcggtcgggtacgggtcggacaaggggaagggccacgactacatcatcgtgaggaactcgtggggtgcggactggggcgagaagggttacatcaggatgaagaggggcaccagcaacggcgagggcctctgcggcatcaacaagatggcctcctacccaaccaaggacaagtgatgttccagcctcaaatcctgcatccagaggattgaagatttgaaccatccttgagagtccttgttcccgatctttgcatttccctgctttttctttcacgtttttccttttctcaatggttcctttcggttaatgcgacgaacatggactgaaataataaaatttatttccaagtttctattgagattgccc

SEQ ID NO: 26699 - protein, 369 aa, Triticum aestivum
TNQPPTLPFQASTMASPRHLMKLSAALLLLCVGVCVARNSDFSIVGYSEEDLSSNDRLVELFEKWLAKHQKAYASFEEKLHKFEVFKDNLKHIDKINREVTSYWLGLNEFADLTNVEFKAAYLGLNAAPARRGSSRSFRYEDVSASDLPKSVDWRKKGAVTEVKNQGQCGSCWAFSTVAAVEGINAIVTGNLTALSEQELIDCSVDGNSGCNGGLMDYAFSYIASSGGLHTEEAYPYLMEEGSCGDGKKAESKAVTISGFEDVPANDEQALIKALAHQPVSVAIEASGRHFQFYSGGVFDGPCGAQLDHGVAAVGYGSDKGKGHDYIIVRNSWGADWGEKGYIRMKRGTSNGEGLCGINKMASYPTKDK

SEQ ID NO: 26700 - protein, 356 aa, Triticum aestivum
MASPRHLMKLSAALLLLCVGVCVARNSDFSIVGYSEEDLSSNDRLVELFEKWLAKHQKAYASFEEKLHKFEVFKDNLKHIDKINREVTSYWLGLNEFADLTNVEFKAAYLGLNAAPARRGSSRSFRYEDVSASDLPKSVDWRKKGAVTEVKNQGQCGSCWAFSTVAAVEGINAIVTGNLTALSEQELIDCSVDGNSGCNGGLMDYAFSYIASSGGLHTEEAYPYLMEEGSCGDGKKAESKAVTISGFEDVPANDEQALIKALAHQPVSVAIEASGRHFQFYSGGVFDGPCGAQLDHGVAAVGYGSDKGKGHDYIIVRNSWGADWGEKGYIRMKRGTSNGEGLCGINKMASYPTKDK

SEQ ID NO: 26701 - protein, 349 aa, Triticum aestivum
MKLSAALLLLCVGVCVARNSDFSIVGYSEEDLSSNDRLVELFEKWLAKHQKAYASFEEKLHKFEVFKDNLKHIDKINREVTSYWLGLNEFADLTNVEFKAAYLGLNAAPARRGSSRSFRYEDVSASDLPKSVDWRKKGAVTEVKNQGQCGSCWAFSTVAAVEGINAIVTGNLTALSEQELIDCSVDGNSGCNGGLMDYAFSYIASSGGLHTEEAYPYLMEEGSCGDGKKAESKAVTISGFEDVPANDEQALIKALAHQPVSVAIEASGRHFQFYSGGVFDGPCGAQLDHGVAAVGYGSDKGKGHDYIIVRNSWGADWGEKGYIRMKRGTSNGEGLCGINKMASYPTKDK

SEQ ID NO: 26702 - DNA, 1564 bp, Triticum aestivum
aaaaacaaacaaaaggcggacccaactccccctcctccaccttccccggagcgcaaatctcccctcccaatccccacccccgtcggtagccgatcgcgtcgacgatgctgggcgccgcgaggagatccggatgcgtgctggggcaactgatgcagaccctccgcccggcggcgtcggcggccacggcggcgaggagctactccgcgaccccgaaggagatgactgtgcgtgaagcattgaattccgcccttgacgaggagatgtctgccgacccttctgttttcttaatgggagaagaggttggagagtaccaaggtgcgtacaagataacaaagggtttgctggacaagtatggtcctgatagggttctcgatacaccaatcacagaggctggttttactggcattggcgttggtgctgcctaccaaggtcttagacctgtagtagagttcatgacatttaacttctcgatgcaggcaattgatcacatcatcaattcagctgccaaatcaaactacatgtcagctggtcagatatccgttcctattgtttttcgaggaccaaatggggcagctgctggagttggtgctcaacactcgcagtgctatgcagcatggtatgcccatgttccaggattgaaggtcctaactccttattctgcagaagatgctcgtggcttgctaaaagcagcaatcagggatccagaccctgtagttttcctggaaaatgaactactctatggtgaatcgtttcctattaaggctgaagtacttgattctagcttcagtgtcccaatcggcaaagctaagatagaacgggaaggaaaagatgttacaattactgcattctctaagatggttgggtatgctcttcaggcggcagagatactgtccaaggagggaatcagtgctgaggtgatcaaccttcggtcaattagaccattggatagagctgctatcaatgcatccgttaggaaaaccaacagattggtaaccgtcgaagaaggctttccacaacatggtgttggtgctgaaatatgcatgtccgtagtggaggacagctttgagtatcttgatgcaccagttgagaggattgccggagctgatgtacctatgccctatgcggcaaaccttgaaagattggcagttccacaggttgaggacatcgtccgtgctgcaaagcgagcttgctacagatcatcatgaatggcggcaaccgcctaagcacaaatgcacgttttgtttatcggccttcttctttgttccttgtccagaaaagatgtactgaatcgcataattgtatcccccaactcttgtgagctaattttgtagatctgcatgcattgttgattccaatctgtcggcggcagtcggatgactgcattcagttcatggttcatcctgaggcgtttgaatcgtgcaacttctggaggtttacatcactgagggatgtctcaataacatgtatgtaactgaattacagacgttcacatgattttgctgtggcttaggccgatctgtaagtgtgatcaatatcgcggagaaaactggaacattgaaatgct

SEQ ID NO: 26703 - protein, 366 aa, Triticum aestivum
MLGAARRSGCVLGQLMQTLRPAASAATAARSYSATPKEMTVREALNSALDEEMSADPSVFLMGEEVGEYQGAYKITKGLLDKYGPDRVLDTPITEAGFTGIGVGAAYQGLRPVVEFMTFNFSMQAIDHIINSAAKSNYMSAGQISVPIVFRGPNGAAAGVGAQHSQCYAAWYAHVPGLKVLTPYSAEDARGLLKAAIRDPDPVVFLENELLYGESFPIKAEVLDSSFSVPIGKAKIEREGKDVTITAFSKMVGYALQAAEILSKEGISAEVINLRSIRPLDRAAINASVRKTNRLVTVEEGFPQHGVGAEICMSVVEDSFEYLDAPVERIAGADVPMPYAANLERLAVPQVEDIVRAAKRACYRSS

SEQ ID NO: 26704 - protein, 351 aa, Triticum aestivum
MQTLRPAASAATAARSYSATPKEMTVREALNSALDEEMSADPSVFLMGEEVGEYQGAYKITKGLLDKYGPDRVLDTPITEAGFTGIGVGAAYQGLRPVVEFMTFNFSMQAIDHIINSAAKSNYMSAGQISVPIVFRGPNGAAAGVGAQHSQCYAAWYAHVPGLKVLTPYSAEDARGLLKAAIRDPDPVVFLENELLYGESFPIKAEVLDSSFSVPIGKAKIEREGKDVTITAFSKMVGYALQAAEILSKEGISAEVINLRSIRPLDRAAINASVRKTNRLVTVEEGFPQHGVGAEICMSVVEDSFEYLDAPVERIAGADVPMPYAANLERLAVPQVEDIVRAAKRACYRSS

SEQ ID NO: 26705 - protein, 328 aa, Triticum aestivum
MTVREALNSALDEEMSADPSVFLMGEEVGEYQGAYKITKGLLDKYGPDRVLDTPITEAGFTGIGVGAAYQGLRPVVEFMTFNFSMQAIDHIINSAAKSNYMSAGQISVPIVFRGPNGAAAGVGAQHSQCYAAWYAHVPGLKVLTPYSAEDARGLLKAAIRDPDPVVFLENELLYGESFPIKAEVLDSSFSVPIGKAKIEREGKDVTITAFSKMVGYALQAAEILSKEGISAEVINLRSIRPLDRAAINASVRKTNRLVTVEEGFPQHGVGAEICMSVVEDSFEYLDAPVERIAGADVPMPYAANLERLAVPQVEDIVRAAKRACYRSS

SEQ ID NO: 26706 - DNA, 1728 bp, Triticum aestivum
attacctagagcatcctaatcgaaaaattgtcgattcccctcaaccctagccgccagcggcggccagattttgctagtaacaagtgcttattagcttcacctccccctccagctgccgccgcctgccatctccggcgacgagcagggcggagaaggagaactagccatggcctcggtggcgccggaggttgagaagaaggaggaggaggagcaggtggtgaacccgtgggaggtgtcggcggggaagggcggcatcgactacgacaagctggtcgaccagttcggctgccagcgcctggacgccccgctcatcgaccgcatcgcgcgactcaccggccgccccccgcaccgcttcctccgccgcggcctcttcttcgcccaccgggatttgaacgagatactggacatctacgagaagggggacaagttctacctctacacggggagagggccctcctcagaggcgttgcatctcggacacctcgtccccttcatgttcaccaaatatttgcaggatgctttcaaggttcctctggtgatacagctaactgatgatgagaagttcctgtggaaaaatttgacggtagaggaaagtaaaaggcttgcgcgtgaaaatgcaaaagacattatagcatgcggatttgatgttgaaaggacttttatattctctgattttaattttgttggcggtgccttttacgaaaacatggttaaagtggccagatgtgtgacatataataaagttgtcggaatatttggattcactccagaggatcacattggaaagattagctttcctcctgtgcaagcagttccatcattcccttcttcatttcccaaacacttttctggcaatgaccaactacggtgcctgataccttgtgcaatagaccaggatccttatttcaggatgacccgtgatgttgctccaagaattggttaccagaagccagcactgattgagtcaagatttttccctgcccttcagggggagaacacgaaaatgtcagctagtgatccaaattctgctatatatgtgaccgatagtactaaatatataaagacaaaggtgaataaatatgcattctcaggtggccaggactctgtagaacttcatagaaaacttggagctaaccttgaggttgatgtctcaattaagtacctgaacttcttccttgaagacgatgatgagctcgagcgcataaagaaggcgtacaaggaaggaaggatgctgacgggtgaagtgaagcagcttctggttacggttctttctgagatggttgaaaggcacaaaagagctagagctcgagttaccgaggagatggtcgacgccttcatggctgtgaggcctcttcccaacatgtttggctgagcattgggtgggaagttcataccctttctgtgtggattttattgaattccaggagcaacatatgaagtttcaggatttagttgtaactattaatgtcaacctggccgctcaatcctgtatggcagccactgattttgcaaaatcagcatgtgatatgtttgttttcaagcttgctcgatcactgcaaagatttctatttattggaattagggaacacacacgtgttttttttgaaaccgaggcaaaagatttgcctcgtatattaattaagaggggagagagtacaacacatggcagttacaactttgcttgtcagattgggacatacaacgtaaaaagactactctcgcggcatc

SEQ ID NO: 26707 - protein, 401 aa, Triticum aestivum
MASVAPEVEKKEEEEQVVNPWEVSAGKGGIDYDKLVDQFGCQRLDAPLIDRIARLTGRPPHRFLRRGLFFAHRDLNEILDIYEKGDKFYLYTGRGPSSEALHLGHLVPFMFTKYLQDAFKVPLVIQLTDDEKFLWKNLTVEESKRLARENAKDIIACGFDVERTFIFSDFNFVGGAFYENMVKVARCVTYNKVVGIFGFTPEDHIGKISFPPVQAVPSFPSSFPKHFSGNDQLRCLIPCAIDQDPYFRMTRDVAPRIGYQKPALIESRFFPALQGENTKMSASDPNSAIYVTDSTKYIKTKVNKYAFSGGQDSVELHRKLGANLEVDVSIKYLNFFLEDDDELERIKKAYKEGRMLTGEVKQLLVTVLSEMVERHKRARARVTEEMVDAFMAVRPLPNMFG

SEQ ID NO: 26708 - protein, 292 aa, Triticum aestivum
MFTKYLQDAFKVPLVIQLTDDEKFLWKNLTVEESKRLARENAKDIIACGFDVERTFIFSDFNFVGGAFYENMVKVARCVTYNKVVGIFGFTPEDHIGKISFPPVQAVPSFPSSFPKHFSGNDQLRCLIPCAIDQDPYFRMTRDVAPRIGYQKPALIESRFFPALQGENTKMSASDPNSAIYVTDSTKYIKTKVNKYAFSGGQDSVELHRKLGANLEVDVSIKYLNFFLEDDDELERIKKAYKEGRMLTGEVKQLLVTVLSEMVERHKRARARVTEEMVDAFMAVRPLPNMFG

SEQ ID NO: 26709 - protein, 221 aa, Triticum aestivum
MVKVARCVTYNKVVGIFGFTPEDHIGKISFPPVQAVPSFPSSFPKHFSGNDQLRCLIPCAIDQDPYFRMTRDVAPRIGYQKPALIESRFFPALQGENTKMSASDPNSAIYVTDSTKYIKTKVNKYAFSGGQDSVELHRKLGANLEVDVSIKYLNFFLEDDDELERIKKAYKEGRMLTGEVKQLLVTVLSEMVERHKRARARVTEEMVDAFMAVRPLPNMFG

SEQ ID NO: 26710 - DNA, 1138 bp, Triticum aestivum
gtcaataagtttttctccgccattttccccgtcctccgcgagaagcgcctcgaggtccccgtgtgcggctagctagatcggtggcgcctcccctccctcctcccccgcggaaggcgctcgcccccttcattcccggaaccgattctcgcaagggattcctcgctgctcggctcttcttgaggcatgcagagccagatcgtgtgccatgggtgcaggagcgttctactctaccccagaggggcccccagcgtgtgctgcgccgtgtgccacgccgtcaccagcgcgccgcctccaggaatggagatggctcagcttatatgcgtcggctgtcgaactttattgatgtatactcgcaatgcaactactgtcagatgctcatgttgtgatacagtcaaccttgccagaccagcaccgccagtgaatagtatagctcatgtgaactgtggccagtgccagacggtgttaatgtatccatacggagcatcttctgtcaaatgtgctatctgcaattttattacgaacatcggaatgaacaccgtgagacctttgccacctacaatgcatgcaccaaacggaatttcatatagtgtcccatcgacctctgcgccatccgctcaatcgcagaatgtaacggtggtcgtcgaaaacccaatgacagtagatgacaagggaaaattggtgagcaacgtcgtagtcggggttacgtccggcgggaaaaagtagcaaaacatgtcagcgcttgtaccaagtgatgccctgttctgtgtcttataatctggagttgggaacactttgtattatactcgtgtctggtgatcgaccgatcggtcgcatagaagaaaaccccgaagcgcgtaaacggactgcgccaacaaaaaaagagagtgcgggtgtggataatacggaaaaaaactgtattttgcttaccccctagattcttttgtatgtaaaatgtgggcactgtcagacctcactgcgtgatcaaatcctctctgtcctgtcctgtgtcctgtcctggaggggcctctcgttctggatgaataacagcaaataactttgcatatggctggccccacctgtcaatgattggtaattaaacgactgtaattattgtgatgaataattctttgaaggctgt

SEQ ID NO: 26711 - protein, 179 aa, Triticum aestivum
MQSQIVCHGCRSVLLYPRGAPSVCCAVCHAVTSAPPPGMEMAQLICVGCRTLLMYTRNATTVRCSCCDTVNLARPAPPVNSIAHVNCGQCQTVLMYPYGASSVKCAICNFITNIGMNTVRPLPPTMHAPNGISYSVPSTSAPSAQSQNVTVVVENPMTVDDKGKLVSNVVVGVTSGGKK

SEQ ID NO: 26712 - protein, 141 aa, Triticum aestivum
MEMAQLICVGCRTLLMYTRNATTVRCSCCDTVNLARPAPPVNSIAHVNCGQCQTVLMYPYGASSVKCAICNFITNIGMNTVRPLPPTMHAPNGISYSVPSTSAPSAQSQNVTVVVENPMTVDDKGKLVSNVVVGVTSGGKK

SEQ ID NO: 26713 - protein, 139 aa, Triticum aestivum
MAQLICVGCRTLLMYTRNATTVRCSCCDTVNLARPAPPVNSIAHVNCGQCQTVLMYPYGASSVKCAICNFITNIGMNTVRPLPPTMHAPNGISYSVPSTSAPSAQSQNVTVVVENPMTVDDKGKLVSNVVVGVTSGGKK

SEQ ID NO: 26714 - DNA, 1798 bp, Triticum aestivum
cacacaaacccgcaaaaacaatccatcccccaaaaccccaccgccccgcggcggcggcggcggcgtcgcgatggacccttcctcggccggcgctggcggcaactcgctgccgtcggtcggccccgacgggcagaagcggcgcgtgtgctacttctacgactcggaggtgggcaactactactacgggcagggccacccgatgaagccgcaccgcatccgcatgacccactcgctgctggcgcagtacggcctcctcgaccagatgcaggtgctgcgccccaaccccgcccgcgaccgcgacctctgccgcttccacgccgacgactacatctccttcctccgctccgtcacgcccgagacgcagcaggaccagatccgggccctcaagcgcttcaacgtcggcgaggactgccccgtcttcgacggcctctacagcttctgccagacctacgcgggggcctccgtcggcggcgccgtcaagctcaaccacggccttgacatcgccatcaactggtcggggggcctgcaccacgcgaagaagtgcgaggcctcagggttctgctacgtcaacgacatcgtactcgccatactcgagctcctcaagcaccaccagcgagttctctatgtcgatattgatatccaccatggtgacggagttgaggaggcattctacacgacagacagggttatgacagtctcattccacaagtttggggattatttcccaggtacaggggatgtccgtgatattgggcattcaaaaggaaagtattactcccttaatgtccctctggatgatgggattgacgacgaaagctaccagtccctgtttaagcctataatggccaaagttatggaggttttccagcctggtgcagttgtttttcaatgtggcgccgattcgttatctggggataggttgggttgcttcaatctttcgatcagaggtcatgcagaatgcgtgaagtacatgaggtctttcaatgttccattgttgcttcttggcggtggtggctataccataagaaatgtcgcacgatgttggtgttatgagacaggagttgcacttggccaagagctcgaggataagatgcctgtcaatgagtactatgaatacttcggtccagattacactcttcatgtggcaccaagtaacatggagaacaaaaatacacgctacgaactggataatataagaaccaaacttcttgacaatctttcaaaacttcgacatgcccctagcgttcagtttcaagagcgacctcctgatactgagttccctgagccgggtgaagatgaagacgatcaggatgaaaggcatgatgaccctgattctgatatggaaatggattatcacacacctttggaagactcagcaaggagaatcactattcaaggtacaagagttaagagagaatcagctggagctgagacaaaagatcagcaggatggtagcagagtaacaggtgaacatagaggaccagaacctatggcagaagacatgggtccctccaagcaagctcatgtcgacgctaatgccatgaccgtggatgagcccggaattgtcaagaccgaatcaggaagctctaccaagttgcctgacccaccagccatctaccagaagccatgattgtaagcattcggaccgtgcggcttcttgcatgtgtttttgacagtaaaaagacgaagtgacgagtggtagctcgagtgtctgacccatgtatacatgtagcatggattattaagctgtaatatgtatagtcgattaaatgagccgcgaggcagaattttcttggcc

SEQ ID NO: 26715 - protein, 542 aa, Triticum aestivum
TQTRKNNPSPKTPPPRGGGGGVAMDPSSAGAGGNSLPSVGPDGQKRRVCYFYDSEVGNYYYGQGHPMKPHRIRMTHSLLAQYGLLDQMQVLRPNPARDRDLCRFHADDYISFLRSVTPETQQDQIRALKRFNVGEDCPVFDGLYSFCQTYAGASVGGAVKLNHGLDIAINWSGGLHHAKKCEASGFCYVNDIVLAILELLKHHQRVLYVDIDIHHGDGVEEAFYTTDRVMTVSFHKFGDYFPGTGDVRDIGHSKGKYYSLNVPLDDGIDDESYQSLFKPIMAKVMEVFQPGAVVFQCGADSLSGDRLGCFNLSIRGHAECVKYMRSFNVPLLLLGGGGYTIRNVARCWCYETGVALGQELEDKMPVNEYYEYFGPDYTLHVAPSNMENKNTRYELDNIRTKLLDNLSKLRHAPSVQFQERPPDTEFPEPGEDEDDQDERHDDPDSDMEMDYHTPLEDSARRITIQGTRVKRESAGAETKDQQDGSRVTGEHRGPEPMAEDMGPSKQAHVDANAMTVDEPGIVKTESGSSTKLPDPPAIYQKP

SEQ ID NO: 26716 - protein, 519 aa, Triticum aestivum
MDPSSAGAGGNSLPSVGPDGQKRRVCYFYDSEVGNYYYGQGHPMKPHRIRMTHSLLAQYGLLDQMQVLRPNPARDRDLCRFHADDYISFLRSVTPETQQDQIRALKRFNVGEDCPVFDGLYSFCQTYAGASVGGAVKLNHGLDIAINWSGGLHHAKKCEASGFCYVNDIVLAILELLKHHQRVLYVDIDIHHGDGVEEAFYTTDRVMTVSFHKFGDYFPGTGDVRDIGHSKGKYYSLNVPLDDGIDDESYQSLFKPIMAKVMEVFQPGAVVFQCGADSLSGDRLGCFNLSIRGHAECVKYMRSFNVPLLLLGGGGYTIRNVARCWCYETGVALGQELEDKMPVNEYYEYFGPDYTLHVAPSNMENKNTRYELDNIRTKLLDNLSKLRHAPSVQFQERPPDTEFPEPGEDEDDQDERHDDPDSDMEMDYHTPLEDSARRITIQGTRVKRESAGAETKDQQDGSRVTGEHRGPEPMAEDMGPSKQAHVDANAMTVDEPGIVKTESGSSTKLPDPPAIYQKP

SEQ ID NO: 26717 - protein, 476 aa, Triticum aestivum
MKPHRIRMTHSLLAQYGLLDQMQVLRPNPARDRDLCRFHADDYISFLRSVTPETQQDQIRALKRFNVGEDCPVFDGLYSFCQTYAGASVGGAVKLNHGLDIAINWSGGLHHAKKCEASGFCYVNDIVLAILELLKHHQRVLYVDIDIHHGDGVEEAFYTTDRVMTVSFHKFGDYFPGTGDVRDIGHSKGKYYSLNVPLDDGIDDESYQSLFKPIMAKVMEVFQPGAVVFQCGADSLSGDRLGCFNLSIRGHAECVKYMRSFNVPLLLLGGGGYTIRNVARCWCYETGVALGQELEDKMPVNEYYEYFGPDYTLHVAPSNMENKNTRYELDNIRTKLLDNLSKLRHAPSVQFQERPPDTEFPEPGEDEDDQDERHDDPDSDMEMDYHTPLEDSARRITIQGTRVKRESAGAETKDQQDGSRVTGEHRGPEPMAEDMGPSKQAHVDANAMTVDEPGIVKTESGSSTKLPDPPAIYQKP

SEQ ID NO: 26718 - DNA, 886 bp, Triticum aestivum
agcatctccggctttactcctcttctttttttagtcggtgcgtgtgtgtgcgcgcgcgcatttcgctcgttcatagacatggcttccaacgggagcgccggcgaggtcagggatgtccacagcagcgagaccaccaagaccctcctcaagagcaacgacctctacgattacatgttgaagacgatggtgtacccgcgggagaacgagttcatgcgcgagctccgacagatcaccaacgagcacatcttcgggttcatgtcgtcgccgccggacgaggggctggtgctgtcgctgctgctcaagctgatgggcgccaagaggaccatcgaggtcggggtctacaccggctgctccgtcctcgctaccgcgctcgccatcccggacgacggcaggatcgtcgccatcgacgtcagcagggagtacttcgacctcggcctccccgtcatcaagaaggccggcgtcgcgcacaaggtcgacttccgcgagggccccgccggccccatcctcgacaagctcatcgccgacgaggacgaggggagcttcgacttcgccttcgtggacgccgacaagtacaactacggcaactaccacgagcagctgctgcggctcgtgcgcgtcggcggcgtgctcgcctacgacaacacactctggggcggcaccgtggccatgcccgacgacacgccgctcacggaggaggaccgcaagaaacgggactccatcagggggttcaacgccatgatcgccgccgacacgcgcgtcgaccccgtgcagctccctatcgccgatggcatcacgctctgccgccgcgtcgtttgattataggaccggcggagctggtcgcgcgtcttatgtgtgaccgaaataaaataagctggcatgtttattc

SEQ ID NO: 26719 - protein, 294 aa, Triticum aestivum
HLRLYSSSFFSRCVCVRARISLVHRHGFQRERRRGQGCPQQRDHQDPPQEQRPLRLHVEDDGVPAGERVHARAPTDHQRAHLRVHVVAAGRGAGAVAAAQADGRQEDHRGRGLHRLLRPRYRARHPGRRQDRRHRRQQGVLRPRPPRHQEGRRRAQGRLPRGPRRPHPRQAHRRRGRGELRLRLRGRRQVQLRQLPRAAAAARARRRRARLRQHTLGRHRGHARRHAAHGGGPQETGLHQGVQRHDRRRHARRPRAAPYRRWHHALPPRRLIIGPAELVARLMCDRNKISWHVY

SEQ ID NO: 26720 - protein, 271 aa, Triticum aestivum
SISGFTPLLFLVGACVCARAFRSFIDMASNGSAGEVRDVHSSETTKTLLKSNDLYDYMLKTMVYPRENEFMRELRQITNEHIFGFMSSPPDEGLVLSLLLKLMGAKRTIEVGVYTGCSVLATALAIPDDGRIVAIDVSREYFDLGLPVIKKAGVAHKVDFREGPAGPILDKLIADEDEGSFDFAFVDADKYNYGNYHEQLLRLVRVGGVLAYDNTLWGGTVAMPDDTPLTEEDRKKRDSIRGFNAMIAADTRVDPVQLPIADGITLCRRVV

SEQ ID NO: 26721 - protein, 245 aa, Triticum aestivum
MASNGSAGEVRDVHSSETTKTLLKSNDLYDYMLKTMVYPRENEFMRELRQITNEHIFGFMSSPPDEGLVLSLLLKLMGAKRTIEVGVYTGCSVLATALAIPDDGRIVAIDVSREYFDLGLPVIKKAGVAHKVDFREGPAGPILDKLIADEDEGSFDFAFVDADKYNYGNYHEQLLRLVRVGGVLAYDNTLWGGTVAMPDDTPLTEEDRKKRDSIRGFNAMIAADTRVDPVQLPIADGITLCRRVV

SEQ ID NO: 26722 - DNA, 1407 bp, Triticum aestivum
aaaataaaaagaatccccgcagcctcctcctatctcctcctcgcgcacacgccaagcgaccgaatcgccgccgcagccgcctagggcttcgccgccgtcgcagatccctacttccggccgtctgctgcgggtcctccgtgttcgtggctgctgtgccggcgccgacagaaatttccctgccgtcagattttgtgagtgttcgagcttctgcaatgggtggaagcaactatgatgacgactgggtgttgcccggtgctgacatcactcttgttcttgttggaaaacttggctatggcaagagtgcaactggcaatagtatccttggacgggaagcatttgtatcagaatactctcatgccagtgtgacaaacacttgtcagatgggaagcaccatgctgacggatggccgcaccatcaatgttattgatacaccaggattatttgacatgaccgtaactcctgaggatgctggcaaagaaattgttaagtgcatgaacatggctaaagatgggatacatgctgtgttgatggttttttctgctacgtctcgattttctcgagaagattctagtacaattgagactatcaaagtgttttttggagagaaaatcgttgatcacttggtcttagttttcacttatggagatttagttggtgaaaatttattgaagaacatgttaagtaatgccccagactatctgcagaaagttgttcagctatgcaaaaatagagtggttctttttgataacaagaccaaggaccctaggattcgaactaagcagctcgaaacgttgcttgatgtggttgattctgttagtgcaaataatggaggaaacccatttacagatcaaatgctcactcgccttaaggaggtgcatgatagagagaaggaggttcatgatgctctcggatattcagaggaccaaatatctgaattgaagaaggagatccacagaactcgggatgaacagcttgcaaacattactgccatggtggaggaaaagctgaatatcacggtggagaagctgcaagttcaactcatggaagaacagaatgcaaggctggaagcagagagggtggcggcggaggccaggctgaaatccgacgaggagatccgcaagctcaaggagaggctcgagaaggctcaggaggaaaacgaggagttccggaggctggcggcgaacaagtgcaccattctgtaaacagtagtctcttgggaaagagttgtcggatgtcttgttaataggagggggtgaacttaagtctgtctagtagcaacagatatactgtacttggttgcatcgtctcgtatattggtagaacttgaatgcttggggagtcggataactatatgttagtgacagttatacttgtcgtctcgtatattagtagcacttgcgacttgcg

SEQ ID NO: 26723 - protein, 399 aa, Triticum aestivum
NKKNPRSLLLSPPRAHAKRPNRRRSRLGLRRRRRSLLPAVCCGSSVFVAAVPAPTEISLPSDFVSVRASAMGGSNYDDDWVLPGADITLVLVGKLGYGKSATGNSILGREAFVSEYSHASVTNTCQMGSTMLTDGRTINVIDTPGLFDMTVTPEDAGKEIVKCMNMAKDGIHAVLMVFSATSRFSREDSSTIETIKVFFGEKIVDHLVLVFTYGDLVGENLLKNMLSNAPDYLQKVVQLCKNRVVLFDNKTKDPRIRTKQLETLLDVVDSVSANNGGNPFTDQMLTRLKEVHDREKEVHDALGYSEDQISELKKEIHRTRDEQLANITAMVEEKLNITVEKLQVQLMEEQNARLEAERVAAEARLKSDEEIRKLKERLEKAQEENEEFRRLAANKCTIL

SEQ ID NO: 26724 - protein, 329 aa, Triticum aestivum
MGGSNYDDDWVLPGADITLVLVGKLGYGKSATGNSILGREAFVSEYSHASVTNTCQMGSTMLTDGRTINVIDTPGLFDMTVTPEDAGKEIVKCMNMAKDGIHAVLMVFSATSRFSREDSSTIETIKVFFGEKIVDHLVLVFTYGDLVGENLLKNMLSNAPDYLQKVVQLCKNRVVLFDNKTKDPRIRTKQLETLLDVVDSVSANNGGNPFTDQMLTRLKEVHDREKEVHDALGYSEDQISELKKEIHRTRDEQLANITAMVEEKLNITVEKLQVQLMEEQNARLEAERVAAEARLKSDEEIRKLKERLEKAQEENEEFRRLAANKCTIL

SEQ ID NO: 26725 - protein, 273 aa, Triticum aestivum
MGSTMLTDGRTINVIDTPGLFDMTVTPEDAGKEIVKCMNMAKDGIHAVLMVFSATSRFSREDSSTIETIKVFFGEKIVDHLVLVFTYGDLVGENLLKNMLSNAPDYLQKVVQLCKNRVVLFDNKTKDPRIRTKQLETLLDVVDSVSANNGGNPFTDQMLTRLKEVHDREKEVHDALGYSEDQISELKKEIHRTRDEQLANITAMVEEKLNITVEKLQVQLMEEQNARLEAERVAAEARLKSDEEIRKLKERLEKAQEENEEFRRLAANKCTIL

SEQ ID NO: 26726 - DNA, 1717 bp, Triticum aestivum
cccaaacccaaacacaggcccatcatctcctggtcccgacctcgcactccccatcccagcatccaactccagctccacctcgccgccgcccccaccatgtacggcgtcggcgtcggcggcggcggaggcgggttcaacgcgccgtccacggcctccgggcggcgcaaaaaccaggaggacgacgacgacgaggaggaggaggagaccggcgacggccgcgtcctcgaggcgtgggagcgcgcctacgccgacgaccgctcgtgggaggcgctgcaggaggacgagtccggcctgctccgccccatcgacaccaagaacctcgtccactcgcagtaccgccgccgcctcctgctccgctccgcggccgccgcggcccgcatccagaagggcctcatccgctacctctacatcgtcatcgacctctccaaggcagcttcagaaatggattatcgccctagtcgaatggctgttgttgctaagtgtgctgaggcattcataagggaattcttcgatcagaatcccttgagccatgttgggttagtgacaattaaagatggcatttctcatcgacttacggagattggagggagtccagagtcacagattaacgcattgatgggcaagcttgagtgttctggtgattcatctctgcagaatgctctagaacttgtcaatggttacttgaaccagattccttcctatggtcacaaggaagtattatttttgtactccgcactgaatacatgtgatcctggtgatatcatggagacaatagaaaaatgcaagaaatccaaagttagatgttcggttattgggcttgctgcagaaattttcatttgcaagcatctctgtgaagagactggtggatcatatacggttgcactagacgagtcccacttcaaggaattgctgcttgaacatgctcctccaccacctgccattgcagagtatgctgcagctaatttgattaagatgggttttccacagaggggagcagaggatcttatctccatctgctcttgtcataagaaaattaaatctggtgctgaaggttacatatgtcccagatgcaaagttaatgtctgtgagcttccgacggagtgccgaacatgtggtctaacacttgttagttctccacatctggcacgatcctatcaccatctcttccctgtagcgccatttgatgaggtgacgttcaaattaggtcaaaagggaggacaaaattgttttggctgccagcagagtctcattaacaccggtggccagtctaatatccatgtctgctgtccaaaatgcaagcaccacttctgcttcgactgtgatatttacatccatgagagcttgcataactgccccggttgcgagagtcagtgcagttcatctcggtagagacgccgccatcatgtgcattgttcaggtgttgatccttttttttgagtcggagctacgcattgttgtaagctttctggtgccctgacgttgatgacagtattgctggacaatcgaacggtgtacagataacacctggcatccttttgttggcacctcttgttagattgtgctagctagttaagctattgatgcagttagaggtggaggtgctgagagtagagcgttgcgttgagaagagacttgaggaatgtacgacgtgaagaatggaaacctggtagctcttgctgttttttctgaagcaagatcaatatatgttattttcttc

SEQ ID NO: 26727 - protein, 462 aa, Triticum aestivum
PKPKHRPIISWSRPRTPHPSIQLQLHLAAAPTMYGVGVGGGGGGFNAPSTASGRRKNQEDDDDEEEEETGDGRVLEAWERAYADDRSWEALQEDESGLLRPIDTKNLVHSQYRRRLLLRSAAAAARIQKGLIRYLYIVIDLSKAASEMDYRPSRMAVVAKCAEAFIREFFDQNPLSHVGLVTIKDGISHRLTEIGGSPESQINALMGKLECSGDSSLQNALELVNGYLNQIPSYGHKEVLFLYSALNTCDPGDIMETIEKCKKSKVRCSVIGLAAEIFICKHLCEETGGSYTVALDESHFKELLLEHAPPPPAIAEYAAANLIKMGFPQRGAEDLISICSCHKKIKSGAEGYICPRCKVNVCELPTECRTCGLTLVSSPHLARSYHHLFPVAPFDEVTFKLGQKGGQNCFGCQQSLINTGGQSNIHVCCPKCKHHFCFDCDIYIHESLHNCPGCESQCSSSR

SEQ ID NO: 26728 - protein, 430 aa, Triticum aestivum
MYGVGVGGGGGGFNAPSTASGRRKNQEDDDDEEEEETGDGRVLEAWERAYADDRSWEALQEDESGLLRPIDTKNLVHSQYRRRLLLRSAAAAARIQKGLIRYLYIVIDLSKAASEMDYRPSRMAVVAKCAEAFIREFFDQNPLSHVGLVTIKDGISHRLTEIGGSPESQINALMGKLECSGDSSLQNALELVNGYLNQIPSYGHKEVLFLYSALNTCDPGDIMETIEKCKKSKVRCSVIGLAAEIFICKHLCEETGGSYTVALDESHFKELLLEHAPPPPAIAEYAAANLIKMGFPQRGAEDLISICSCHKKIKSGAEGYICPRCKVNVCELPTECRTCGLTLVSSPHLARSYHHLFPVAPFDEVTFKLGQKGGQNCFGCQQSLINTGGQSNIHVCCPKCKHHFCFDCDIYIHESLHNCPGCESQCSSSR

SEQ ID NO: 26729 - protein, 315 aa, Triticum aestivum
MDYRPSRMAVVAKCAEAFIREFFDQNPLSHVGLVTIKDGISHRLTEIGGSPESQINALMGKLECSGDSSLQNALELVNGYLNQIPSYGHKEVLFLYSALNTCDPGDIMETIEKCKKSKVRCSVIGLAAEIFICKHLCEETGGSYTVALDESHFKELLLEHAPPPPAIAEYAAANLIKMGFPQRGAEDLISICSCHKKIKSGAEGYICPRCKVNVCELPTECRTCGLTLVSSPHLARSYHHLFPVAPFDEVTFKLGQKGGQNCFGCQQSLINTGGQSNIHVCCPKCKHHFCFDCDIYIHESLHNCPGCESQCSSSR

SEQ ID NO: 26730 - DNA, 860 bp, Triticum aestivum
ctaccgctaatcatcctcctccaccatttttattccgtagaaagaagcacccagaacacaagccaatcaaacaagctgctgggttggtttcctccattcattccgctcaacatggctcctcaggtgtggatggttggggaggacggcgaggacctcaagaaccacggggagctcctgcctctctccaagctccaagagattggtgtgttatactggcatttggacccaaagaagcttgaaagcgaagaagagctagcgaagatccgcaaagacagaggatacaactacatggactatctcgacatatgccctggaaagttggcaaactttgaggagaagctcaagaacttcttcacagagcacatgcatgccgacgaagagatccggtactgcttggaaggcggcgggtactttgatgtgcgcgacaaggatgacaagtgggttcggatctggataaaagaagggggcatgatcgtgctgccggctggaatttatcatcggttcaccctcgacgccgccaaccatgtgaagctcatgaggctcttcctgggagaaccagtgtggacggcgcacaaccggcctcaggaggaccatccggtgcggcaagagtatgtcaagaggctcacggacgacaatgctggtcttgctctggcagcacactgaagtttgtttgtgattcctcagctatgttttataaacacccatggacatatacatacacttggatgaaaccgtgttgtaatcttgaaaccagatagatatgctacctacgtacagtacttgttaatattcactaggtaattgcatgtgctatactgccatatcaaactctcaagtgcttaaacccagttttgattttg

SEQ ID NO: 26731 - protein, 220 aa, Triticum aestivum
LPLIILLHHFYSVERSTQNTSQSNKLLGWFPPFIPLNMAPQVWMVGEDGEDLKNHGELLPLSKLQEIGVLYWHLDPKKLESEEELAKIRKDRGYNYMDYLDICPGKLANFEEKLKNFFTEHMHADEEIRYCLEGGGYFDVRDKDDKWVRIWIKEGGMIVLPAGIYHRFTLDAANHVKLMRLFLGEPVWTAHNRPQEDHPVRQEYVKRLTDDNAGLALAAH

SEQ ID NO: 26732 - protein, 183 aa, Triticum aestivum
MAPQVWMVGEDGEDLKNHGELLPLSKLQEIGVLYWHLDPKKLESEEELAKIRKDRGYNYMDYLDICPGKLANFEEKLKNFFTEHMHADEEIRYCLEGGGYFDVRDKDDKWVRIWIKEGGMIVLPAGIYHRFTLDAANHVKLMRLFLGEPVWTAHNRPQEDHPVRQEYVKRLTDDNAGLALAAH

SEQ ID NO: 26733 - protein, 177 aa, Triticum aestivum
MVGEDGEDLKNHGELLPLSKLQEIGVLYWHLDPKKLESEEELAKIRKDRGYNYMDYLDICPGKLANFEEKLKNFFTEHMHADEEIRYCLEGGGYFDVRDKDDKWVRIWIKEGGMIVLPAGIYHRFTLDAANHVKLMRLFLGEPVWTAHNRPQEDHPVRQEYVKRLTDDNAGLALAAH

SEQ ID NO: 26734 - DNA, 1220 bp, Triticum aestivum
gtcaagaccattcgaggcagcccgcaaacacgcacgccagcacgcacgctcgcacaccactccatccaaagtccaggaagaaggagcgtacgtccgtcgggatggccggcgtcgtggtggtgttcgacttcgacaagaccatcatcgacgtcgacagcgacaactgggtcgtcgacggcctgggggccaccgacctcttcgaccgcctgctgcccaccatgccgtggaacaccctcatcgacaccgtcatgggggagctgcacgcgcaggggaagaccctccgcgacgtcgccgacgtgctccgggccgcgcccatcgacccgcacgtcgtcgccgccatccgggccgcctacagcctcggctgcgacctccgggtcctcagcgacgccaaccacttcttcatcgaggccgtcctcgaccaccacggcctccggggctgcttctccgagatcaacaccaaccccagccgcgtcgacgccgacggccgcctccgcatcgcgccgcaccacgacttccacgccgccccgcacggctgcggcctcggcacatgcccgcccaacatgtgcaagggccaggtgctcgaccgcatccgcgcctccgccgccgcggcggacggcggcaggaagcgcttcatctacctcggcgacggccgcggcgactactgcccgtccctgcggctcgccagggaggacttcatgatgccgcgcaagggcttccccgtgtgggacctcatctgcgagaaccccggcctgctccaggccgaggtgcacccatggagcgacggcaaggacatggaggaggcgctgctgcggctcgtcagccgggtgctcgtcgaggagagcacgctgctgccgctcgactgcaagctcgagtcgctgccggtgaccgtccaggacggcatgcccatgccgctcggcgtcaagaactgatccgcccaaccctgctgcattacgattaatttggggatcgataccttgtcttctgatttgcttgcctgatatgctggcgtgtagtgcgtacgagtttgggtagggcgtcggtggaaactaattaagggtgaggagttcgagcgccaatggcgaactcgatagtagtattgactaatttgtgcgtgtcgtccttgtgccgcctggcaatggtgaaggctcgctgtatcccatctatctattgatttgatgaaagaataaatgagttgatgcgacgaaagtcaatttcggctg

SEQ ID NO: 26735 - protein, 318 aa, Triticum aestivum
SRPFEAARKHARQHARSHTTPSKVQEEGAYVRRDGRRRGGVRLRQDHHRRRQRQLGRRRPGGHRPLRPPAAHHAVEHPHRHRHGGAARAGEDPPRRRRRAPGRAHRPARRRRHPGRLQPRLRPPGPQRRQPLLHRGRPRPPRPPGLLLRDQHQPQPRRRRRPPPHRAAPRLPRRPARLRPRHMPAQHVQGPGARPHPRLRRRGGRRQEALHLPRRRPRRLLPVPAARQGGLHDAAQGLPRVGPHLREPRPAPGRGAPMERRQGHGGGAAAARQPGARRGEHAAAARLQARVAAGDRPGRHAHAARRQELIRPTLLHYD

SEQ ID NO: 26736 - protein, 308 aa, Triticum aestivum
QDHSRQPANTHASTHARTPLHPKSRKKERTSVGMAGVVVVFDFDKTIIDVDSDNWVVDGLGATDLFDRLLPTMPWNTLIDTVMGELHAQGKTLRDVADVLRAAPIDPHVVAAIRAAYSLGCDLRVLSDANHFFIEAVLDHHGLRGCFSEINTNPSRVDADGRLRIAPHHDFHAAPHGCGLGTCPPNMCKGQVLDRIRASAAAADGGRKRFIYLGDGRGDYCPSLRLAREDFMMPRKGFPVWDLICENPGLLQAEVHPWSDGKDMEEALLRLVSRVLVEESTLLPLDCKLESLPVTVQDGMPMPLGVKN

SEQ ID NO: 26737 - protein, 275 aa, Triticum aestivum
MAGVVVVFDFDKTIIDVDSDNWVVDGLGATDLFDRLLPTMPWNTLIDTVMGELHAQGKTLRDVADVLRAAPIDPHVVAAIRAAYSLGCDLRVLSDANHFFIEAVLDHHGLRGCFSEINTNPSRVDADGRLRIAPHHDFHAAPHGCGLGTCPPNMCKGQVLDRIRASAAAADGGRKRFIYLGDGRGDYCPSLRLAREDFMMPRKGFPVWDLICENPGLLQAEVHPWSDGKDMEEALLRLVSRVLVEESTLLPLDCKLESLPVTVQDGMPMPLGVKN

SEQ ID NO: 26738 - DNA, 999 bp, Triticum aestivum
atctcttctcacttcgcaccctgccattccaaaacctctcaaaaccctcgttctccccactccccgcctccgccgccgccgccgccggtgcctagcaagatgagtcggcaccctgaagtcaggtgggctcaaaggattgacaaggtgtatatcacagtacaattgcctgacgcaaaggatgccaaggtcaagctggaacctgatggtgtattctctttctttgccactgctggaactgatgggaactcctatgaatcaaaactggatttgaatgacaaagtgaatgtcgaggcaagcaaagtaagtgttggtgtcaggtccatattctgtattttggaaaaagccgacgccaaatggtggaataagcttgttccagatgatcagaaggcaccacacttcgtgaaagttgattgggacaaatgggtcgatgaagatgatgatggtgctgatgttaatgttgatgggatggacttttcgaatatgggtggcatgggcggtatgcctggcatggaaggtttgggcggcatgggtggcatgcccggcatggaaggtttgggtggcatgggtggtatgggtggtctggctggtatgatgggtggaatgggcggtatgggtggtatgggcatgccgcctggtatggaaggtttgggtggtatggggatggatgattttgaggatgagagtgacgacgaaggagaagtgtcgaaacctcaagacgcagggaagtctgatgctgcggaaatctccgaggtggaaggcaaagctggcacagctgctcagagcaactgaaggctttctactcaataatccctactcgactgtatcctagcgtttttttatcaacgtgctaaactgaaggacacattctgctcgctggttgtgattggtgtctcatgtaagatgttaacttatactttgtgtccaactaagcttcgtaccgtctgctggcatattacgaaaaaaaataaaaaaaaaaaaaaaaaagcttatcgataccgt

SEQ ID NO: 26739 - protein, 262 aa, Triticum aestivum
ISSHFAPCHSKTSQNPRSPHSPPPPPPPPVPSKMSRHPEVRWAQRIDKVYITVQLPDAKDAKVKLEPDGVFSFFATAGTDGNSYESKLDLNDKVNVEASKVSVGVRSIFCILEKADAKWWNKLVPDDQKAPHFVKVDWDKWVDEDDDGADVNVDGMDFSNMGGMGGMPGMEGLGGMGGMPGMEGLGGMGGMGGLAGMMGGMGGMGGMGMPPGMEGLGGMGMDDFEDESDDEGEVSKPQDAGKSDAAEISEVEGKAGTAAQSN

SEQ ID NO: 26740 - protein, 229 aa, Triticum aestivum
MSRHPEVRWAQRIDKVYITVQLPDAKDAKVKLEPDGVFSFFATAGTDGNSYESKLDLNDKVNVEASKVSVGVRSIFCILEKADAKWWNKLVPDDQKAPHFVKVDWDKWVDEDDDGADVNVDGMDFSNMGGMGGMPGMEGLGGMGGMPGMEGLGGMGGMGGLAGMMGGMGGMGGMGMPPGMEGLGGMGMDDFEDESDDEGEVSKPQDAGKSDAAEISEVEGKAGTAAQSN

SEQ ID NO: 26741 - DNA, 888 bp, Triticum aestivum
gaagtacataaatggacccatagtagtgcactgcaaacacagaggaagaagaagaagaagaagaagaagaagaagagatggcgcctatgaaggtgtacggctgggcggtgtcgccgtggatggcgcgggtcctcgtgtgcctggaggaggccggcgccgagtacgatttcgtgcccatgagcaggaacggcggcgaccaccggctgccggagcacctcgccagaaaccccttcggcgagatcccggtgctggaggacggcgatctgacgctctaccaatcccgtgccatcgcaaggcatattctgcgcaaatgcaagcccgagtttctaggagcgggcagcctcaaggagtcggcgatggtggacgtatgggtcgacgtggatgcccaccagcttgagcccgtactcaagcccatcgtgtttaactgcatcatcaacccgttcgtcgggagggacgtcgaccaaggcctcgtcgatgagagcgtcgagaagctcaagaagctgctggaggtgtatgaggcgaggctgtcaagcaacaagtacttggccggtgatttcgtcagcttcgccgacctcacccatttctccttcatgcgctatttcatggcgacggagcatgcggttgtgctcgatgtgtatccgcacgtaaaggcatggtgggaggcgctgctggcaaggccgtcggtcaagaaggtgatagctggcatgcctccggactttggattcgggagcgggaacataccatgataaggcatatgctttgtgtgcttgtgatgctctaatcatctctacccaacccacgagcaataaagtaagcaaagtgtgggtgtgggtatgaaataacttgtttcggtgaattgtttcctaataccaattagaattgattccc

SEQ ID NO: 26742 - protein, 222 aa, Triticum aestivum
MAPMKVYGWAVSPWMARVLVCLEEAGAEYDFVPMSRNGGDHRLPEHLARNPFGEIPVLEDGDLTLYQSRAIARHILRKCKPEFLGAGSLKESAMVDVWVDVDAHQLEPVLKPIVFNCIINPFVGRDVDQGLVDESVEKLKKLLEVYEARLSSNKYLAGDFVSFADLTHFSFMRYFMATEHAVVLDVYPHVKAWWEALLARPSVKKVIAGMPPDFGFGSGNIP

SEQ ID NO: 26743 - protein, 219 aa, Triticum aestivum
MKVYGWAVSPWMARVLVCLEEAGAEYDFVPMSRNGGDHRLPEHLARNPFGEIPVLEDGDLTLYQSRAIARHILRKCKPEFLGAGSLKESAMVDVWVDVDAHQLEPVLKPIVFNCIINPFVGRDVDQGLVDESVEKLKKLLEVYEARLSSNKYLAGDFVSFADLTHFSFMRYFMATEHAVVLDVYPHVKAWWEALLARPSVKKVIAGMPPDFGFGSGNIP

SEQ ID NO: 26744 - protein, 208 aa, Triticum aestivum
MARVLVCLEEAGAEYDFVPMSRNGGDHRLPEHLARNPFGEIPVLEDGDLTLYQSRAIARHILRKCKPEFLGAGSLKESAMVDVWVDVDAHQLEPVLKPIVFNCIINPFVGRDVDQGLVDESVEKLKKLLEVYEARLSSNKYLAGDFVSFADLTHFSFMRYFMATEHAVVLDVYPHVKAWWEALLARPSVKKVIAGMPPDFGFGSGNIP

SEQ ID NO: 26745 - DNA, 977 bp, Triticum aestivum
tcagcttccaaataccaagttgtcccctgaactgggacgaaggtaattagccatggcgtctactgaaacaggaggtgacaagtaccggtcgttcatgcacggcgagggcgagaagaacaccgtgtggaggcatggagcccctcccaactacgacatcgtgaacaagctcttcgaggaagagaggaccaaggaatggccggatgggtctcttgaggagaaggtgcagcgcctgctcaagacctgggagatggagatgatccacaaggtgcgccccgacgaccagaagagcgtccactcccagggattcaccgcgagcaccaacgggatgaagcctctaacgcggaaggagtggactgccatcggcggctacaacgcgttcctggcgaccaagctgccgccggagcaccgcatctacgacccggacaaggagacggtcgactccggcatgtcgacgttcctcacggcgttccccaggggcttcgccatcgaggtgctggacgtgtacagcggcccgccgagggtcgccttcaagttccggcactggggttacatggaggggccgttcaaggggcaccctcctcacggccagcgcgtcgagttctttggggtctgcgtcttccatgttgatgaggagatgaaggtggagaaggcggagtacttctacgagcgcggcaacttcctcgcaagcttcttgagcgcgcctgctactgctgctgctgcatcggcttcaggttgtcctgtgatgagaggaaactgaagcaccaaagaaacatgtcgctcatatcgttggatgaccagcttcagatttcaaattggcttttgatttcatgtggtggcattacaatgtttgaataaagtggcttattatgtctggtacaaacaccacttcgggtgtgtaggtgtaagaagcccaacttggatttggacatcgctatctgaagagctgcatgaaatgactcgatcatcaccaagaatcc

SEQ ID NO: 26746 - protein, 234 aa, Triticum aestivum
MASTETGGDKYRSFMHGEGEKNTVWRHGAPPNYDIVNKLFEEERTKEWPDGSLEEKVQRLLKTWEMEMIHKVRPDDQKSVHSQGFTASTNGMKPLTRKEWTAIGGYNAFLATKLPPEHRIYDPDKETVDSGMSTFLTAFPRGFAIEVLDVYSGPPRVAFKFRHWGYMEGPFKGHPPHGQRVEFFGVCVFHVDEEMKVEKAEYFYERGNFLASFLSAPATAAAASASGCPVMRGN

SEQ ID NO: 26747 - protein, 220 aa, Triticum aestivum
MHGEGEKNTVWRHGAPPNYDIVNKLFEEERTKEWPDGSLEEKVQRLLKTWEMEMIHKVRPDDQKSVHSQGFTASTNGMKPLTRKEWTAIGGYNAFLATKLPPEHRIYDPDKETVDSGMSTFLTAFPRGFAIEVLDVYSGPPRVAFKFRHWGYMEGPFKGHPPHGQRVEFFGVCVFHVDEEMKVEKAEYFYERGNFLASFLSAPATAAAASASGCPVMRGN

SEQ ID NO: 26748 - protein, 169 aa, Triticum aestivum
MEMIHKVRPDDQKSVHSQGFTASTNGMKPLTRKEWTAIGGYNAFLATKLPPEHRIYDPDKETVDSGMSTFLTAFPRGFAIEVLDVYSGPPRVAFKFRHWGYMEGPFKGHPPHGQRVEFFGVCVFHVDEEMKVEKAEYFYERGNFLASFLSAPATAAAASASGCPVMRGN

SEQ ID NO: 26749 - DNA, 747 bp, Triticum aestivum
aaaaactcccaatctcccacctccgcctccggcgatatccctctcccgcagcgaggcagccgtcccccctgcggccgatggggagcggcacggagccggccaaggggctgctgccctacctgcagcgcgccgacgagctgcagaagcacgagcccctcgtcgcgtactactgtcggttgtacgcgatggagaaggggctggtgatcccgcagaaggagcgcaccaagatgaccaactccatcctcgtctccctcatcaaccagctcgagaaggataagaaatctttgaccttggggcctgatgaccatcttcatttggaggggtttgcatcaagtgtctttgctaaagcagacaaacaggatcgtgctggacgagctgacataaacactgcaaaaactttctatgctgccagcatcttttttgagattctcagtcagtttggcgagcttcaacctgatcttgagcagaagcagaaatatgccatctggaaagccgctgaaattagaaaagctctcaaagaaggacgaaagcctgaagctggccctcctggtggggacaaagatgaagcacctgccagcaccactacaattgatcatgtaacctccttaactccggctatcctttagatactagtatttgtcggcagatttggcttttctatgatgcatttggttgttcacacgccgcggaatcaataatttgttagtcggcattattattttgaaaagggtaaattgcaccagaggc

SEQ ID NO: 26750 - protein, 207 aa, Triticum aestivum
KLPISHLRLRRYPSPAARQPSPLRPMGSGTEPAKGLLPYLQRADELQKHEPLVAYYCRLYAMEKGLVIPQKERTKMTNSILVSLINQLEKDKKSLTLGPDDHLHLEGFASSVFAKADKQDRAGRADINTAKTFYAASIFFEILSQFGELQPDLEQKQKYAIWKAAEIRKALKEGRKPEAGPPGGDKDEAPASTTTIDHVTSLTPAIL

SEQ ID NO: 26751 - protein, 182 aa, Triticum aestivum
MGSGTEPAKGLLPYLQRADELQKHEPLVAYYCRLYAMEKGLVIPQKERTKMTNSILVSLINQLEKDKKSLTLGPDDHLHLEGFASSVFAKADKQDRAGRADINTAKTFYAASIFFEILSQFGELQPDLEQKQKYAIWKAAEIRKALKEGRKPEAGPPGGDKDEAPASTTTIDHVTSLTPAIL

SEQ ID NO: 26752 - protein, 146 aa, Triticum aestivum
MEKGLVIPQKERTKMTNSILVSLINQLEKDKKSLTLGPDDHLHLEGFASSVFAKADKQDRAGRADINTAKTFYAASIFFEILSQFGELQPDLEQKQKYAIWKAAEIRKALKEGRKPEAGPPGGDKDEAPASTTTIDHVTSLTPAIL

SEQ ID NO: 26753 - DNA, 593 bp, Triticum aestivum
ataggtcgagctgtccttcccgtctctcttcccctccattcctcctcttctccgcatccacccgaacggaaccctagtctcccatcacttggatccggtctttgacattctccggtgcaggacgccgtaagaatttcgctagagatcttgcagctgccatggcggacaatgaacctattgacccaaagaattaccttgaggaacgctgcaagccgcagtgtgtaaaatcactgtatgactatgagagatgtgtgaagagagtcgagaacgatgaaactgggcagaagcactgcaccgggcaattctttgactactggtcatgcgttgacaaatgtgtagcaccaaagctctttgagaagctcaaatgatggatgggatggcgctgattgccccagaccccaataaatcgatccactgtcctgatttctgattgtgctgaccctgtaacaaggagctttgttctatctgttgctaaaacttgtcaaaacaagcaaacacaattattttggcagtgggaacaattacttttattttgcttgtgtaatgttcattctgttctgttatacttggacagatgaaagcatttctgcttt

SEQ ID NO: 26754 - protein, 69 aa, Triticum aestivum
MADNEPIDPKNYLEERCKPQCVKSLYDYERCVKRVENDETGQKHCTGQFFDYWSCVDKCVAPKLFEKLK

SEQ ID NO: 26755 - protein, 34 aa, Triticum aestivum
IGRAVLPVSLPLHSSSSPHPPERNPSLPSLGSGL

SEQ ID NO: 26756 - DNA, 591 bp, Triticum aestivum
acacacacatttcagctcacagcgcaggcagaggaagcgagaagcgagccaccaagaaaccacccaaaggtttgcacaatggccgcttctcagctcaccatcctctccgtcctcgcgctcctggccgtggccgccaccgctcaggcgcccggagcggcccccgcggcagcgccccaggccccgcctccaccgccggcgaccccgcccccggcaatggcgccccctaccccggcgccggtgtccccgccccctaccgcggccccggcgcccgcgcccaccgtcgcccccacgccctccgccaccgcgccggcgcccgccgactccccgatgtcctcccctccggcgcccaccccggacatgtcgccctcgcccaccgccgagcccgccaccccgggcagcggcgccgctggtctccgccccgccttcgtgctggctgccgccgccgccgccatctacgtcttctagatgacccgacgatgtatcatttcattgtttctttgcagcttttgttccatttctccccctctttgcccccttccgtccgcacattggtgtaccctcatcttctgctgtaattacgagcattgattt

SEQ ID NO: 26757 - protein, 190 aa, Triticum aestivum
THISAHSAGRGSEKRATKKPPKGLHNGRFSAHHPLRPRAPGRGRHRSGARSGPRGSAPGPASTAGDPAPGNGAPYPGAGVPAPYRGPGARAHRRPHALRHRAGARRLPDVLPSGAHPGHVALAHRRARHPGQRRRWSPPRLRAGCRRRRHLRLLDDPTMYHFIVSLQLLFHFSPSLPPSVRTLVYPHLLL

SEQ ID NO: 26758 - protein, 155 aa, Triticum aestivum
HTHFSSQRRQRKREASHQETTQRFAQWPLLSSPSSPSSRSWPWPPPLRRPERPPRQRPRPRLHRRRPRPRQWRPLPRRRCPRPLPRPRRPRPPSPPRPPPPRRRPPTPRCPPLRRPPRTCRPRPPPSPPPRAAAPLVSAPPSCWLPPPPPSTSSR

SEQ ID NO: 26759 - protein, 154 aa, Triticum aestivum
THTFQLTAQAEEARSEPPRNHPKVCTMAASQLTILSVLALLAVAATAQAPGAAPAAAPQAPPPPPATPPPAMAPPTPAPVSPPPTAAPAPAPTVAPTPSATAPAPADSPMSSPPAPTPDMSPSPTAEPATPGSGAAGLRPAFVLAAAAAAIYVF

SEQ ID NO: 26760 - protein, 128 aa, Triticum aestivum
MAASQLTILSVLALLAVAATAQAPGAAPAAAPQAPPPPPATPPPAMAPPTPAPVSPPPTAAPAPAPTVAPTPSATAPAPADSPMSSPPAPTPDMSPSPTAEPATPGSGAAGLRPAFVLAAAAAAIYVF

SEQ ID NO: 26761 - DNA, 924 bp, Triticum aestivum
atatgtgcacagcagaaccagcttgaccatcaccttgtcttccctacatcttactacagacaagcagctgcaatgtcgacggtcatctcttgctccctcctgagcggccggccggcggacgcaccatcgcgctcctccggcaatcgggctcctccgacgacggggaaggctgccgcggtttctctctctagtttccagcggcagtccaggccctcctccgtgtgctgtgcaagcaacccaaaaggggatcagcacgtaccaaagacggatttgccgccgttcggcatctcccccgtcgctctgctgcaccccgggtcgccgcagggggagcggtgggggatacatgagagggccgacaacgtgagcatgtggttcgaggtgccgggcctgtccaaggaggacctcctcgtggagctggacgaggacgtcctcgtcatacggaagatgaagaccaaggcggagatagaggctgcgacggcagacgctgtcgccagcggtagctccaaggacgcggccggagcggcagcgcacgacggtgacatgtacgcgcggctactcgtcccggcgggctacaacaaggagaccatcaaggcggagctcgcctccggcgttctgaaggttcacattcgtaaagtcatggagtgcgcacgcaggaggatcaatgtcaacatcgacgtcaagtagaactactgctttgcataatgcatacgcatggacatctctacgtacgttgacgtccattgcatcgagggagaaattgtccaagagacccatgaaaaacttcttcaaatgtacttttgttcctacttaaataaggtcaagtattatgcatgtatcatgtatcacttgttttccaaccatgaatacaattattgatcaagctcaaaaaaaaaaaaaaaaaagcttatcgataccgtcgacctc

SEQ ID NO: 26762 - protein, 227 aa, Triticum aestivum
ICAQQNQLDHHLVFPTSYYRQAAAMSTVISCSLLSGRPADAPSRSSGNRAPPTTGKAAAVSLSSFQRQSRPSSVCCASNPKGDQHVPKTDLPPFGISPVALLHPGSPQGERWGIHERADNVSMWFEVPGLSKEDLLVELDEDVLVIRKMKTKAEIEAATADAVASGSSKDAAGAAAHDGDMYARLLVPAGYNKETIKAELASGVLKVHIRKVMECARRRINVNIDVK

SEQ ID NO: 26763 - protein, 203 aa, Triticum aestivum
MSTVISCSLLSGRPADAPSRSSGNRAPPTTGKAAAVSLSSFQRQSRPSSVCCASNPKGDQHVPKTDLPPFGISPVALLHPGSPQGERWGIHERADNVSMWFEVPGLSKEDLLVELDEDVLVIRKMKTKAEIEAATADAVASGSSKDAAGAAAHDGDMYARLLVPAGYNKETIKAELASGVLKVHIRKVMECARRRINVNIDVK

SEQ ID NO: 26764 - DNA, 1671 bp, Triticum aestivum
agcgagtgagctcccacctccctccctcccctcctctctgctcccaccaccaaaccctccgatccaaaccctctctcacctcgcatgcggccgcgccccccgaggcggcggcgcagctgaccccttcccaccgccgctcccggagcccgccggcatgggcggggtcacgtccaccatcgccgcgcgcttcgccttcttcccgcccacgccgccctcctacacgctcgtcgccgacgcggccaccggccgcctcctcatccccgagatctcccggccccccgcgcgccgccggaggcgggacggcggcggggactcctcctcaggtgccgccgcagcagccgaggaggaggacgccacggaggtggtgcgcctccgcacgcgccgcgggaacgagatcgtcgccgtctacgtgcgccacgcgcgggcctccgccacgctgctctactcccacggcaacgccgccgacctcggccagatgtacggcctcttcgtcgagctcagccgccgcctccgcgtcaacattttcgggtatgattatgctggttatgggaggtctacagggaagcccactgagtataatacatatgcagacattgaagcagcatataactgcctcaaggaaaaatatggtgtgccagatgaggatataattttgtatggacaatctgttggaagtggtccaaccattgatcttgcttcacggttgccaaatttgcgagctgtggttcttcacagtcctattttatctggactgagagtgctatatccagtcaaaaaaactttttggtttgacatttacaagaatgtcgacaaaatcagcctggtgaattgtccagttcttgtcattcatggcacgtcagatgatgttgttgattggtcccatggaaagcagctatgggagctttgcaaggtgaaacattcgcctttgtggctaagtggcggtgggcactgcaaccttgagctgtatcctgactacatcaggcacttgaagaagtttgtgtcgagccttggcaaaaaatcaacgaaacctgacttgaaagagttaccagcaacagaagacacatctcgcaaagacgcagaatctgtgtcctcggacaaaccccaagaagctgcaaagtgccgacagatctcgcggaagagcttagatagtagagttgggaaatccaaaacggtggatgttcctgaaaagccacgaatgagctcagatgacgttgacaagtttaggaggagaagatgcttggtttggtgatctatgatatgacgtctgcacagttcatggagtagtttccgaacaccatggaatggggatcaagcaactgtgtcatactgtatagcgaggaacaacgccgacagttcccgcagtagagggataatagctgtgttaaatgtgggagaagaagaatgaggacgctggtgaataagctgttatttatcaaagagggtacgtctcaacgtggtaactttctcggttaattaacctgtattgcaacccccagtggtggtaggatttccatcatgtaaaagtgtaccgtgttattgtctgtaatcacgagggacaaggatagaacatttgcggccactttgcggcgcagtctaaagtcttggagcaatcacaagaagcaacatattctagtctggatatgcaaatatagtgttcatgaaaaaaaaaaa

SEQ ID NO: 26765 - protein, 415 aa, Triticum aestivum
ASELPPPSLPSSLLPPPNPPIQTLSHLACGRAPRGGGAADPFPPPLPEPAGMGGVTSTIAARFAFFPPTPPSYTLVADAATGRLLIPEISRPPARRRRRDGGGDSSSGAAAAAEEEDATEVVRLRTRRGNEIVAVYVRHARASATLLYSHGNAADLGQMYGLFVELSRRLRVNIFGYDYAGYGRSTGKPTEYNTYADIEAAYNCLKEKYGVPDEDIILYGQSVGSGPTIDLASRLPNLRAVVLHSPILSGLRVLYPVKKTFWFDIYKNVDKISLVNCPVLVIHGTSDDVVDWSHGKQLWELCKVKHSPLWLSGGGHCNLELYPDYIRHLKKFVSSLGKKSTKPDLKELPATEDTSRKDAESVSSDKPQEAAKCRQISRKSLDSRVGKSKTVDVPEKPRMSSDDVDKFRRRRCLVW

SEQ ID NO: 26766 - protein, 364 aa, Triticum aestivum
MGGVTSTIAARFAFFPPTPPSYTLVADAATGRLLIPEISRPPARRRRRDGGGDSSSGAAAAAEEEDATEVVRLRTRRGNEIVAVYVRHARASATLLYSHGNAADLGQMYGLFVELSRRLRVNIFGYDYAGYGRSTGKPTEYNTYADIEAAYNCLKEKYGVPDEDIILYGQSVGSGPTIDLASRLPNLRAVVLHSPILSGLRVLYPVKKTFWFDIYKNVDKISLVNCPVLVIHGTSDDVVDWSHGKQLWELCKVKHSPLWLSGGGHCNLELYPDYIRHLKKFVSSLGKKSTKPDLKELPATEDTSRKDAESVSSDKPQEAAKCRQISRKSLDSRVGKSKTVDVPEKPRMSSDDVDKFRRRRCLVW

SEQ ID NO: 26767 - protein, 257 aa, Triticum aestivum
MYGLFVELSRRLRVNIFGYDYAGYGRSTGKPTEYNTYADIEAAYNCLKEKYGVPDEDIILYGQSVGSGPTIDLASRLPNLRAVVLHSPILSGLRVLYPVKKTFWFDIYKNVDKISLVNCPVLVIHGTSDDVVDWSHGKQLWELCKVKHSPLWLSGGGHCNLELYPDYIRHLKKFVSSLGKKSTKPDLKELPATEDTSRKDAESVSSDKPQEAAKCRQISRKSLDSRVGKSKTVDVPEKPRMSSDDVDKFRRRRCLVW

SEQ ID NO: 26768 - DNA, 1213 bp, Triticum aestivum
actcggccgaaccgaagccgcagtttaccccccaccaaaactcgactaaaagtcaagcaaaaacctaaatcgcagcgcgacggcgacggcgacgcgccgatgggcaacgccggaagcagcggccgccccaacctgccaccgccgcggcctcatctgcatggggtgcccccaccgtactaccaccagtacccgccgtggcgcccgggcgccgccgcgccgccgccggtgccgttccccacgcacgtggagcggcacagggccgttgcggtgagcgccggcgtcaacgtcaaggggcataccctgcggctggagcgcgacgacgacggcggcggccacctgctcgccttctccttcgacgccgacgcccccgggagcataacagtctacttctttgcacaagaagctgatgattctgtcctgaagggtacaaaggaaaatttgctcaaacctgtcacggtaacttttaaggaaggtcatggtcaggagttcaggcaacctagtggaactggaatcaagctctcaatgtttgaggaatctgagctaactaaggttggggaggatcatgtatttccgcttgcattgaaagtggaagtgggtgtgccaagtaaccaagaattaggaagggaacatgatgctgaagactcgaagtctttggctaaatttgctgtgtttgttaagaaagacagtgctgaatatgggatcaacattgtgcagcagatactgtgggtaaatggaaccagatatgtcttgcaggagatatacggtattgggaacaggaacacagctgacaggaatgttaatgaggatgattctggaaaagaatgtgtggtttgtctaacagaaccaagagatacaactgttcttccatgcaggcatatgtgcctatgcagggagtgtgctcagacattaaggttccagaccaacaaatgccccatgtgcaggcagcctgttgagagccttcttgagattaaggttgatagcacacccaggcatcaaggaggagatcagtagtttgggaaccctcaaaggaagttccgtttgattgttagcaactgtaattggatgtatatatatcgcgtgttaaaatgaaattaccgtgctttcggcaaagaacagaacatggaaggtatacactaagctgaccgtgatgttctctttgcgtgtgacatggaatttaaaacaggcaacatctattgtctgggcttgagctttc

SEQ ID NO: 26769 - protein, 336 aa, Triticum aestivum
TRPNRSRSLPPTKTRLKVKQKPKSQRDGDGDAPMGNAGSSGRPNLPPPRPHLHGVPPPYYHQYPPWRPGAAAPPPVPFPTHVERHRAVAVSAGVNVKGHTLRLERDDDGGGHLLAFSFDADAPGSITVYFFAQEADDSVLKGTKENLLKPVTVTFKEGHGQEFRQPSGTGIKLSMFEESELTKVGEDHVFPLALKVEVGVPSNQELGREHDAEDSKSLAKFAVFVKKDSAEYGINIVQQILWVNGTRYVLQEIYGIGNRNTADRNVNEDDSGKECVVCLTEPRDTTVLPCRHMCLCRECAQTLRFQTNKCPMCRQPVESLLEIKVDSTPRHQGGDQ

SEQ ID NO: 26770 - protein, 303 aa, Triticum aestivum
MGNAGSSGRPNLPPPRPHLHGVPPPYYHQYPPWRPGAAAPPPVPFPTHVERHRAVAVSAGVNVKGHTLRLERDDDGGGHLLAFSFDADAPGSITVYFFAQEADDSVLKGTKENLLKPVTVTFKEGHGQEFRQPSGTGIKLSMFEESELTKVGEDHVFPLALKVEVGVPSNQELGREHDAEDSKSLAKFAVFVKKDSAEYGINIVQQILWVNGTRYVLQEIYGIGNRNTADRNVNEDDSGKECVVCLTEPRDTTVLPCRHMCLCRECAQTLRFQTNKCPMCRQPVESLLEIKVDSTPRHQGGDQ

SEQ ID NO: 26771 - DNA, 1408 bp, Triticum aestivum
  misc_feature (1399)..(1399): n is a, c, g, or t
  misc_feature (1404)..(1404): n is a, c, g, or t
gccaacagtccaataaaagggactgcacccatcagtgtaaaaacaagcagcagtcaggcttcaatacaagcagactagtacgtagtacacgcaaggcagctcttctagttcttaggtgtgtgtagtacgtgcatcgatcctgtttgtttgatcctcatagagctacctactcgatcgcaccacttgaaattgcagccaaggccttgtagcacacccaagctagctagcagagcatttggtatttgaattggccgggaggaactatggtgctggacaagcaagacaggagcagagtcctggtaattggtggcacaggtcacattgggaagcacatcgttgctgcgagtgtccgccgcgacaacccgacctgtgtcctcattagggatgctgcaccggcttatctggccaaggcgcagctcctcaagagcttcattgattccggtgttgctctcatcaagggggatttatttgaccacgacagcctcgtaaatgccatcaagggtgcagatgccgtgatctcggccgtggggacctgtcagctcgacgagcagacgaggattgtcatggccatcaaggaggctggcaatgtcattaagaggttcctgccgtctgagttcggctctgacccagagcgggttcacaccgtggatccagcggccacactatacgctggtaaaatcagccttcgccgtctgatcgaggcggagggtatacctcatacatatgtctgctgcaacgggttcgccgaaacctaccttgtgagcatcggcgatgttacggctcttggcgctggtcctcggtccgacaagatcactgtcctaggcgatggagttgcaaaaggggtgtttgtggtggaagaggacatagctgcctacacggtgagagcgatcgaggatacgaggaccctgaacaagatcctgtacatgaggccgccggcgaacatcgtgtcccacaacgagctcatcgcactgtgggagaagaaagcgggaaggactttccagatcgctcgcatcccagagccggatctcctcaagttgatcaaggaggcggcataccctctcaacatgatgctgtcccactcgctctccgtcttggtgaggggcgaccaagccaacttcgacatcgagccgtcctttggtgttgaggccaccgagctgtaccctgacgtgaagtacaccaccgtcgacgagtacctggaccgcctcctctgacacttcttggctggatggagcactaaagatgatagagcagtggcctctccaaatgcaatgatgcgtgtgtcttgtgtgcaaattcaccagaaagaaaagaagaacctctgcgttccttgctaaaaaacatgatttgtggccgtgcataggctagtttatatatctttcctaataataaagggattatngcttntgcc

SEQ ID NO: 26772 - protein, 315 aa, Triticum aestivum
MVLDKQDRSRVLVIGGTGHIGKHIVAASVRRDNPTCVLIRDAAPAYLAKAQLLKSFIDSGVALIKGDLFDHDSLVNAIKGADAVISAVGTCQLDEQTRIVMAIKEAGNVIKRFLPSEFGSDPERVHTVDPAATLYAGKISLRRLIEAEGIPHTYVCCNGFAETYLVSIGDVTALGAGPRSDKITVLGDGVAKGVFVVEEDIAAYTVRAIEDTRTLNKILYMRPPANIVSHNELIALWEKKAGRTFQIARIPEPDLLKLIKEAAYPLNMMLSHSLSVLVRGDQANFDIEPSFGVEATELYPDVKYTTVDEYLDRLL

SEQ ID NO: 26773 - protein, 215 aa, Triticum aestivum
MAIKEAGNVIKRFLPSEFGSDPERVHTVDPAATLYAGKISLRRLIEAEGIPHTYVCCNGFAETYLVSIGDVTALGAGPRSDKITVLGDGVAKGVFVVEEDIAAYTVRAIEDTRTLNKILYMRPPANIVSHNELIALWEKKAGRTFQIARIPEPDLLKLIKEAAYPLNMMLSHSLSVLVRGDQANFDIEPSFGVEATELYPDVKYTTVDEYLDRLL

SEQ ID NO: 26774 - DNA, 1999 bp, Triticum aestivum
acctagaacatcctaatcgaaaacacaagtttgttccgggaggccaccgtcgcggtctagttggtcgcgcaccctatatataccgagccgcccgccgaggccaactcacgcttccggctccggcgcctcggtccaactcacaccaaaggcgatcgacacgcgagtacgtctcgagatccatggagtctgcgccggcggcggccttcatggagcgggagcgcctcacggcggaggtgacattctccggggacgcgcaggcggcggcctcgtccgagggcgccgagcggctgcccaccagcatcatcatcaagatccggcgccgcctcccggacttcgcccgctccgtcaacctcaagtacgtcaggctcgggctccgccacggcggcagcctcacgtcctacctgcccatgctgtgcgtgccggtgctcgccgcggccgcctactccttcgtccgcctcgacgtcatctacctctccatcgacctgctcagctgcgtcgcctggctcggcaccgccatgctgctgctcaccgtctactacttcaagcggcctcgcccggtctacctcgtcgagttcgcgtgctacaagccggaggaccagaacaagatcaccaaggaggccttcctcgacatgaccgagagcaccggctgcttcaatgacgagacgctcgcgttccagaccaagatcaccacccgctccgcgctcggcgacgagacgtacctgccccccggcgtccaggcgcgcccgccgaggctcaacatggccgaggcgcggctggaggccgaggcggtcatgttcggctgcctggacgctctgttcgagtccaccgggatcgacccgcgccgcgacgtgcgcatcctcatcgtcaactgcagcctcttcaacccgacgccgtcgctggcgtccatgatcatccaccattacaagatgcgggaggacgtcaagtcgttcaacctgggcggcatggggtgcagcgccggcctcatcgccatcgacctcgccaaggacatgctccaggccaaccccaacgcgtacgcggtcgtcctcagcaccgagaacatcaccctcaactggtacttcgggaacgaccgctccatgctgctctccaactgcatcttccgcatgggcggcgcggcggctctgctctcgaaccggcgcgcggacgccgggcgcgccaagtaccgcctcctgcacacggtccggacgcacaagggcgccacggacgagtgcttcaagtgcgtgtaccagcgcgaggacgacgtgggcaaggtgggcgtgtcgctggcgcgggagctcatgacggtggccggcgacgcgctcaagaccaacatcaccacgctggggccgctggtgctgcccctgagcgagcagctcaagttcctcaagtcgctgatgatgcgccgggtgttccgcgccaagggcgtgcggccctacatccccaacttccggcgagccttcgagcacttctgcgtgcacgccggcgggcgggcggtgctggaggaggtgcagcgcagcctgagcctggaggacaaggacatggagccgagcaggtgcgcgctgcaccggttcggcaacaccagcagcagctcgctgtggtacgagctggcctacgccgaggccaagggccgggtgaagcgcggcaaccgcgtgtggcagatcggcttcgggtccgggttcaagtgcaacagcgcggtgtggcgcgcgctccgcgacgtgccggccgtgtcgcccccggggccggaggagaaggcctgcaacccgtgggcggactgcgtcgccaagtacccgcccaaggcctacgtctgacgatacattactacgccgccgccgcatgactccacacgaagattacatgattcttttctcctatactttttctgcatttcgtttcccgtaggtggctgtacctcaggttccatgggcgagcagtgccgttgttttcagcttttgtacttcaagtgtgaattataaacgacaaatatatacgacgaggtttcatt

SEQ ID NO: 26775 - protein, 600 aa, Triticum aestivum
LEHPNRKHKFVPGGHRRGLVGRAPYIYRAARRGQLTLPAPAPRSNSHQRRSTREYVSRSMESAPAAAFMERERLTAEVTFSGDAQAAASSEGAERLPTSIIIKIRRRLPDFARSVNLKYVRLGLRHGGSLTSYLPMLCVPVLAAAAYSFVRLDVIYLSIDLLSCVAWLGTAMLLLTVYYFKRPRPVYLVEFACYKPEDQNKITKEAFLDMTESTGCFNDETLAFQTKITTRSALGDETYLPPGVQARPPRLNMAEARLEAEAVMFGCLDALFESTGIDPRRDVRILIVNCSLFNPTPSLASMIIHHYKMREDVKSFNLGGMGCSAGLIAIDLAKDMLQANPNAYAVVLSTENITLNWYFGNDRSMLLSNCIFRMGGAAALLSNRRADAGRAKYRLLHTVRTHKGATDECFKCVYQREDDVGKVGVSLARELMTVAGDALKTNITTLGPLVLPLSEQLKFLKSLMMRRVFRAKGVRPYIPNFRRAFEHFCVHAGGRAVLEEVQRSLSLEDKDMEPSRCALHRFGNTSSSSLWYELAYAEAKGRVKRGNRVWQIGFGSGFKCNSAVWRALRDVPAVSPPGPEEKACNPWADCVAKYPPKAYV

SEQ ID NO: 26776 - protein, 541 aa, Triticum aestivum
MESAPAAAFMERERLTAEVTFSGDAQAAASSEGAERLPTSIIIKIRRRLPDFARSVNLKYVRLGLRHGGSLTSYLPMLCVPVLAAAAYSFVRLDVIYLSIDLLSCVAWLGTAMLLLTVYYFKRPRPVYLVEFACYKPEDQNKITKEAFLDMTESTGCFNDETLAFQTKITTRSALGDETYLPPGVQARPPRLNMAEARLEAEAVMFGCLDALFESTGIDPRRDVRILIVNCSLFNPTPSLASMIIHHYKMREDVKSFNLGGMGCSAGLIAIDLAKDMLQANPNAYAVVLSTENITLNWYFGNDRSMLLSNCIFRMGGAAALLSNRRADAGRAKYRLLHTVRTHKGATDECFKCVYQREDDVGKVGVSLARELMTVAGDALKTNITTLGPLVLPLSEQLKFLKSLMMRRVFRAKGVRPYIPNFRRAFEHFCVHAGGRAVLEEVQRSLSLEDKDMEPSRCALHRFGNTSSSSLWYELAYAEAKGRVKRGNRVWQIGFGSGFKCNSAVWRALRDVPAVSPPGPEEKACNPWADCVAKYPPKAYV

SEQ ID NO: 26777 - protein, 532 aa, Triticum aestivum
MERERLTAEVTFSGDAQAAASSEGAERLPTSIIIKIRRRLPDFARSVNLKYVRLGLRHGGSLTSYLPMLCVPVLAAAAYSFVRLDVIYLSIDLLSCVAWLGTAMLLLTVYYFKRPRPVYLVEFACYKPEDQNKITKEAFLDMTESTGCFNDETLAFQTKITTRSALGDETYLPPGVQARPPRLNMAEARLEAEAVMFGCLDALFESTGIDPRRDVRILIVNCSLFNPTPSLASMIIHHYKMREDVKSFNLGGMGCSAGLIAIDLAKDMLQANPNAYAVVLSTENITLNWYFGNDRSMLLSNCIFRMGGAAALLSNRRADAGRAKYRLLHTVRTHKGATDECFKCVYQREDDVGKVGVSLARELMTVAGDALKTNITTLGPLVLPLSEQLKFLKSLMMRRVFRAKGVRPYIPNFRRAFEHFCVHAGGRAVLEEVQRSLSLEDKDMEPSRCALHRFGNTSSSSLWYELAYAEAKGRVKRGNRVWQIGFGSGFKCNSAVWRALRDVPAVSPPGPEEKACNPWADCVAKYPPKAYV

SEQ ID NO: 26778 - DNA, 873 bp, Triticum aestivum
gagaaggaaaacgatcccgccaccatctcgccggcatttcctcccacttgcggctgcagcggcggcggcggccaccgcccaccgggtgtggaggcgagatgtcgtacatgcgaggcgatctgctgacgaagacgcggaaactggtgaaggggctggccaagcccgcccctgcctggctcaaggccatggagcaggcacctccagtcacattccctagaactgatggtaaaatctagaagatagaactgccagaggatgtctatgtcaagaggttcttcagaaggcatcctgattcactctaccatgatgcaataaagataagcgggtttgatccaccgccagcaagagtttttgcttggtgtgtcttagagttgaaagaacagggagtcaatgaagatgatgcaatggctgtagcagatatggagtatggagcagagaaaaaagcaaagaagctagcatacaaggaactgaaacaaattgcacgcagagaaggaaagccaccacctccaaatccatatccaagcgctatcaaagaaatacaggcagaggaaaagaagtatgttagggaccgtttccataacccaaaggtactcgagatcgtgaataagatgaaagaggacagacagatgtttcttcaagatagagcggcagcatcaggtgcatcaggtgaaggacagtaactagttgtgtggactggcctactagttgctgttgcttatgacatcaaccaactgatatttaaactcgatgtttagtttttctataaaaataaagttgtgtgcacattcagaagttagttaaagaactagctgtaagggttcgaaacatgtttggtgagatagagcattgtttctttctcatatatttttactg

SEQ ID NO: 26779 - protein, 91 aa, Triticum aestivum
MAVADMEYGAEKKAKKLAYKELKQIARREGKPPPPNPYPSAIKEIQAEEKKYVRDRFHNPKVLEIVNKMKEDRQMFLQDRAAASGASGEGQ

SEQ ID NO: 26780 - protein, 86 aa, Triticum aestivum
MEYGAEKKAKKLAYKELKQIARREGKPPPPNPYPSAIKEIQAEEKKYVRDRFHNPKVLEIVNKMKEDRQMFLQDRAAASGASGEGQ

SEQ ID NO: 26781 - protein, 77 aa, Triticum aestivum
EGKRSRHHLAGISSHLRLQRRRRPPPTGCGGEMSYMRGDLLTKTRKLVKGLAKPAPAWLKAMEQAPPVTFPRTDGKI

SEQ ID NO: 26782 - DNA, 1300 bp, Triticum aestivum
cccactcaaagcaccaaccctagctcccgcacccccgcaccctcgccgcagccatggcggaagaagccgccgccaccgcctccgcctccgccaccaacttcgaggtggacctgggccacctcctggcctacgacccctcgcaccacctcgccgccggcgccgcgtcctcccgggcggagctgcgggacgagtgcctgcggaaggccacggagctcgcgcaggccgtcgccaacgccctcttctcgctgcccgccaccgagggccgcgacggccctgtcgtccgcctcccgccgcccaccaaccgcctaccccgcgagaagcacttgccaaggccaaagcctcctaccaagtgggagcagttcgcaaagtcgaaagggattatcaagcacaagaagaacaagcgtgcatgggatgagcaaactaattcctggaagcggacgtatggctatgatcgtgttaatgatgacagagacgttcccatcattgaagccaaattgacagacgagcctggtgttgatccttttgctcaaagaagggaagagaagaagggcagggtcgataaacaagaaaagaacagacttgggaatttgaagaatgctgcaaaagttggtgctctgccaagtcatatacagctcgctgccacgtccgtgcccatcacaggaactaaagctgatctgccaagaaaagctaagaaggaagacctcgagaatgtcgctggtatggcttctgcagcaacggctagcggtggaaagtttgataaaaagttgcctggtgagaaacctctaaagaaggctggcaaaaacagaaagttcctccctgttgttgaagggaaaggaatgggcaacctagagaaacagcaaaacgacaagatcctgaacagtctactggccaagaacttcgaggaaccattggatgtcagcaaggcaatcacgatgtacaaggtgaagaaggacaacaagaggaggaaagacaagcaatcatcgtcgtcgtccggatcaaataagttgaagccccagaagaaaatccacaagaaatcttcaaagaaaagcgcttaggtccttccacatcatcgttgagacatgccgtgctgtaggcggcgagcgcagtctccaagcatcaaggatagtcttggcaaattttgtatggtcattgtcctgtttaagtcccaagggagaaatatagttattccggttaccactggttatgatatggcgcaagaagctgagtgccgtgatgacatagctgtacacgtattgtattttcagaagtttgggaaatgtttctggaaagctttgttggc

SEQ ID NO: 26783 - protein, 333 aa, Triticum aestivum
MAEEAAATASASATNFEVDLGHLLAYDPSHHLAAGAASSRAELRDECLRKATELAQAVANALFSLPATEGRDGPVVRLPPPTNRLPREKHLPRPKPPTKWEQFAKSKGIIKHKKNKRAWDEQTNSWKRTYGYDRVNDDRDVPIIEAKLTDEPGVDPFAQRREEKKGRVDKQEKNRLGNLKNAAKVGALPSHIQLAATSVPITGTKADLPRKAKKEDLENVAGMASAATASGGKFDKKLPGEKPLKKAGKNRKFLPVVEGKGMGNLEKQQNDKILNSLLAKNFEEPLDVSKAITMYKVKKDNKRRKDKQSSSSSGSNKLKPQKKIHKKSSKKSA

SEQ ID NO: 26784 - DNA, 835 bp, Triticum aestivum
agcttcccccatcgaagcttactcaattactacctgctagttttagtttctcgtttatttacctttagttacccggcgccatcggcatcgacagatttccaagccaagaaacggaccaacagctagctaatcggcgccgttactggtcatggctgccgcgagtttcatcaaggcgcccgccgggcagaatcccaggctggcaatccacgctccggggaggagcggccgcgtggtcaggtgctcgcttggcgcggccgtcggcggccggaccgagtggctcagcagctgcgccgtcctctccagcaaggtggccgcgctcggcccccactccgtcaacggccacgccgcgccggcgccggcccccaacggggcggtgctcgatttgatccccgtgagcggtgttaacggcgttgccaagaacctgccggcgccgctgcggatcgccgacctgtccccggcgccgatgcacggctcggagctgcgcgtggcgtaccagggcgtgccgggcgcgtacagcgagaaggcggccggcaaggcctacccgggctgcgacgccatcccctgcgaccagttcgaggtggcgttccaggccgtggagctctggatcgcggaccgcgccgtgctccccgtggagaactcgctcggcggcagcatccaccgcaactacgacctcctgctccgccaccgcctccacatcgtgggcgaggtgcagctccccgtgcaccactgcctcctggctctcccgggcgtgcgcaaggagaacatcacccgcgtgatcagccacccgcaggcgctggcgcagtgcgagcacaccatcacccgcatgggcctcaac

SEQ ID NO: 26785 - protein, 229 aa, Triticum aestivum
MAAASFIKAPAGQNPRLAIHAPGRSGRVVRCSLGAAVGGRTEWLSSCAVLSSKVAALGPHSVNGHAAPAPAPNGAVLDLIPVSGVNGVAKNLPAPLRIADLSPAPMHGSELRVAYQGVPGAYSEKAAGKAYPGCDAIPCDQFEVAFQAVELWIADRAVLPVENSLGGSIHRNYDLLLRHRLHIVGEVQLPVHHCLLALPGVRKENITRVISHPQALAQCEHTITRMGLN

SEQ ID NO: 26786 - protein, 124 aa, Triticum aestivum
MHGSELRVAYQGVPGAYSEKAAGKAYPGCDAIPCDQFEVAFQAVELWIADRAVLPVENSLGGSIHRNYDLLLRHRLHIVGEVQLPVHHCLLALPGVRKENITRVISHPQALAQCEHTITRMGLN

SEQ ID NO: 26787 - DNA, 958 bp, Triticum aestivum
atctcatctccgaggaaccatcaatccgagatagctctacaaccagcaaagccatccaaagccatgaggttgcagtgctccctggtcctcctgatcgccctgagcgtcggctgcgcggcagcgcaggagagcgggaaacaggcgggctacgatttcttctacctcgtgctgcagtggccggggtcgtactgcgacacgaagcagagctgctgctacccgcggtccggcaaaccggcggcggacttcgggatccacgggctgtggcccaaccgcgacgacgggtcctacccgcagaactgcaaccccgacagcgccttcgatccctccaaggtgagcgacatcctgagcagcctgcgcagcagctggccgacgctggcgtgcccgaccaacgacggcctccgcttctgggcgcacgagtgggagaagcacggcacctgcgcgcagaacctcttcaacgagcacggctacttccaggccgccctccgcctgcgcggccagctccgcgtcctcgacgccctcgccaccgcgggcatctcccccgacggcgggtactacacgatgggggccatcaagggcgccatccaggaggggaccgggttcgcgcctcacgtcgactgcaaccgcgacgagtccggcaacagccagctcttccagctctacttctgcgtccacgccgacgcctcccgcttcgtcgagtgccccgtccagcccggcggcaggccctgtggcaacaggatcgagttcccggctttctgatcattatctcctccaacccaaggagttatcatgtgttccttaatttgcctcccgattcctagatattcatttggttttcatttcttgccgctggcagaataaactgagggtgcatattcgaacatgtgctcgttttctttctttcccccccttaattttcatgttaatgacctgatctcaggcagcaattgaagttacgacg

SEQ ID NO: 26788 - protein, 271 aa, Triticum aestivum
LISEEPSIRDSSTTSKAIQSHEVAVLPGPPDRPERRLRGSAGERETGGLRFLLPRAAVAGVVLRHEAELLLPAVRQTGGGLRDPRAVAQPRRRVLPAELQPRQRLRSLQGERHPEQPAQQLADAGVPDQRRPPLLGARVGEARHLRAEPLQRARLLPGRPPPARPAPRPRRPRHRGHLPRRRVLHDGGHQGRHPGGDRVRASRRLQPRRVRQQPALPALLLRPRRRLPLRRVPRPARRQALWQQDRVPGFLIIISSNPRSYHVFLNLPPDS

SEQ ID NO: 26789 - protein, 251 aa, Triticum aestivum
ISSPRNHQSEIALQPAKPSKAMRLQCSLVLLIALSVGCAAAQESGKQAGYDFFYLVLQWPGSYCDTKQSCCYPRSGKPAADFGIHGLWPNRDDGSYPQNCNPDSAFDPSKVSDILSSLRSSWPTLACPTNDGLRFWAHEWEKHGTCAQNLFNEHGYFQAALRLRGQLRVLDALATAGISPDGGYYTMGAIKGAIQEGTGFAPHVDCNRDESGNSQLFQLYFCVHADASRFVECPVQPGGRPCGNRIEFPAF

SEQ ID NO: 26790 - protein, 230 aa, Triticum aestivum
MRLQCSLVLLIALSVGCAAAQESGKQAGYDFFYLVLQWPGSYCDTKQSCCYPRSGKPAADFGIHGLWPNRDDGSYPQNCNPDSAFDPSKVSDILSSLRSSWPTLACPTNDGLRFWAHEWEKHGTCAQNLFNEHGYFQAALRLRGQLRVLDALATAGISPDGGYYTMGAIKGAIQEGTGFAPHVDCNRDESGNSQLFQLYFCVHADASRFVECPVQPGGRPCGNRIEFPAF

SEQ ID NO: 26791 - DNA, 867 bp, Triticum aestivum
aacaatctacatttgacttccagcagaggaagcgagccaagatgggcacaccggcggccgtcagggtgatcggcgccttcgacagcccgtttagccaccgcgccgaggtcgccctgtgcctcaagggcgttccctacgagctcatcctggaggagctccacaacaagagcgagctgctgcttacgagcaaccccgtccacaagaaggtgcccgtgctcctccacggcgaccgcaccatctgcgagtcgctcatcatcgtcgagtacgttgacgagaccttcgacgggccggcgcttctcccaacggacccctacgaccgtgccactgcccgcttgtggtcccgcttcatcgatgacaagtgctcgaagccgttctggctggcgatgtggactgatggggaagcgcagaaggggttcacgaaggagatcaaggagaacttcgcgctcctggaggcgcagctcgagggtaagaggttcttcggcggcggcaccattggcctcgtcgacatagccgcctgcgggttcgcgcactggctcaccgtctgcgaggaggtttctggcgtgacactggtcacggccgaggagttccctcgcctgtgccgctgggccaaagagtatgcctccgacgagaaggtcagagcgtgcctgccggacagggcgcagatgctcgcccatttcacggccaacaaggagatgttcatggccatggcaaagtcaatgctgccaaaataatgtgatgtatgttgatgtggaagtggatgcgtgcatgaaagatatcgtagcccagagcgcatggtcgtcatgtgatggaataaagaaaaagcatttactagtattaatcagtcatctgatttatttattatttctc

SEQ ID NO: 26792 - protein, 242 aa, Triticum aestivum
QSTFDFQQRKRAKMGTPAAVRVIGAFDSPFSHRAEVALCLKGVPYELILEELHNKSELLLTSNPVHKKVPVLLHGDRTICESLIIVEYVDETFDGPALLPTDPYDRATARLWSRFIDDKCSKPFWLAMWTDGEAQKGFTKEIKENFALLEAQLEGKRFFGGGTIGLVDIAACGFAHWLTVCEEVSGVTLVTAEEFPRLCRWAKEYASDEKVRACLPDRAQMLAHFTANKEMFMAMAKSMLPK

SEQ ID NO: 26793 - protein, 229 aa, Triticum aestivum
MGTPAAVRVIGAFDSPFSHRAEVALCLKGVPYELILEELHNKSELLLTSNPVHKKVPVLLHGDRTICESLIIVEYVDETFDGPALLPTDPYDRATARLWSRFIDDKCSKPFWLAMWTDGEAQKGFTKEIKENFALLEAQLEGKRFFGGGTIGLVDIAACGFAHWLTVCEEVSGVTLVTAEEFPRLCRWAKEYASDEKVRACLPDRAQMLAHFTANKEMFMAMAKSMLPK

SEQ ID NO: 26794 - DNA, 1644 bp, Triticum aestivum
gcaaaaggaccaaactcacgcgacgacgaagaaagaagcggagaccggagatcgagatcgccggtgggagagatggagccgagacgagcgatccaccgcagatccggcgcgctcctcctcctcctcgccgctgtattcgcggcggccgccggcgcctccgcctccgccatcggcgacaggtgcgccgcctgcaaagccgtcgcggctgagctagagattggaatatcaagtgagaaaccaagaaaccacttggacttgcgtaacaggttaaattcgaaaggtcagcgcgaggggaaggtcatcgattacagagtcagtgagcttcggattgtagagcttctggatgacctatgtgataagatgcaagactatacgctgcagaagttggaatcaggcgaaaaagaatgggtgaaagtaccaagctggagcagttttcaaactgataagaaagctgcagcacgagcacactccaaaaatctatccagttactgtggaaggttactggaggaaactgaggacgagcttgctgagtggataaaaacaagctcggcagaatccgcggacgtgagccaggccctttgccaggatattagcaaacactgccagttaacaagtgctacagccccggtcgacgatgaactataacagcacgtgttagctccccgtatttactcgacaaagaaaagcagatgaatgcctgagaagcgtcaaagaagaagctccagtaggatatgaggctgtgatgtcttagcgtctgcatttttacacactcgcattgttgtcttaaagagggacttgcagattttcacatatgattactgatgtattgagaacattcaaactttgaggaatttctgcatgctgaattacagttagcagcatggtatgattcgctgaactaatctgaattcaacaatgcgagtgaggtatcatggacctcgaactgttaagccactagctgctttctacagtgatgtttcaggcatcagtgcatcagtagagtcaaccaatggggaggccatgccacacccgttagatgaaattgagccaaaaaaggatgttgaaccggagaattgtccattctggtgggcgcgttcgcccgaaaatatactgcagcaggatacatatctagcactggcagcttcttttgtaatcctgcggttgctgtatcttctattcccaaggatagtttctgcagcaaaatgggcatggaggaggcatactctgtttgcgaacttgatgggcgtgcatgaatatttcttcacctacctcgagcaagcaagacagaaattgagtaggttatacccttcgaagcgagggaatttacaggagggggcaaggaatgccactgcctgggcctccaaatcattagcatctgtgtcaatcggagaaccaagcactatcggaaggacgaactccacgaatgaactgaggtgaagtgtaaacttttttgtccgcagggatattatgtacagtagagtgatgaggatatgagcaccaagaatctgttgtaaccagctttgttagctattgtaacatcatcattagaataagcacctcccccagtattgttgccattataaccttgtcttgaatagctgttgcccaaacatattcttggaggaaaaaggtttgacgtgttcc

SEQ ID NO: 26795 - protein, 214 aa, Triticum aestivum
AKGPNSRDDEERSGDRRSRSPVGEMEPRRAIHRRSGALLLLLAAVFAAAAGASASAIGDRCAACKAVAAELEIGISSEKPRNHLDLRNRLNSKGQREGKVIDYRVSELRIVELLDDLCDKMQDYTLQKLESGEKEWVKVPSWSSFQTDKKAAARAHSKNLSSYCGRLLEETEDELAEWIKTSSAESADVSQALCQDISKHCQLTSATAPVDDEL

SEQ ID NO: 26796 - protein, 190 aa, Triticum aestivum
MEPRRAIHRRSGALLLLLAAVFAAAAGASASAIGDRCAACKAVAAELEIGISSEKPRNHLDLRNRLNSKGQREGKVIDYRVSELRIVELLDDLCDKMQDYTLQKLESGEKEWVKVPSWSSFQTDKKAAARAHSKNLSSYCGRLLEETEDELAEWIKTSSAESADVSQALCQDISKHCQLTSATAPVDDEL

SEQ ID NO: 26797 - protein, 173 aa, Triticum aestivum
MRVRYHGPRTVKPLAAFYSDVSGISASVESTNGEAMPHPLDEIEPKKDVEPENCPFWWARSPENILQQDTYLALAASFVILRLLYLLFPRIVSAAKWAWRRHTLFANLMGVHEYFFTYLEQARQKLSRLYPSKRGNLQEGARNATAWASKSLASVSIGEPSTIGRTNSTNELR

SEQ ID NO: 26798 - DNA, 855 bp, Triticum aestivum
gatgtgttgctttctatccaagaagagtacaaactcacgagagaccatattaaggctcagttagagatcatattcgaagctggcacagatacatcattcatagtgttggaatatgcgatggtccagctcatgcgaaaaccccatctcatgaacaagctacaagctgaggtgaggagcactataaccaaggggaaagaaatagttaccgaagacgatctggatagtttggcctacctaaaggcagtcattaaagagacactccggctccatatgcctgggccactcctcataccccacctctccatggccgactgcaacataaagggctacacgataccatcaggaatacgtgtcatcatcaacagttgggctcttgcaagggaccctagtagttgggagcatgcggatgagttcatgcctgagcggtttatggaatgtggtagcgccgcaactatggactataagggaaatgacttccaatacttgccctttggggccgggcgaaggatttgcccaggcatgaactatgcgactgcgagcattgaaatcatgctagcgaatctcatgtaccacttcaactggaagctaccagtagagttgatggacgaaggtggcatcagtatgactgaattttttgggatgactgtgcatcgaaaggagaagctcctcctagtccccgtagtgccagaagattaatacatcggtccactgtattgtgtgtgtgcatcagaatgtgtacctaccataatagtatcgtgaatgtagcgtttgtacttcttattaagcaccggtgtaatgaataattatttgatgggattttgtacgaaatgatacaagttaatatctgtgcatggt

SEQ ID NO: 26799 - protein, 231 aa, Triticum aestivum
DVLLSIQEEYKLTRDHIKAQLEIIFEAGTDTSFIVLEYAMVQLMRKPHLMNKLQAEVRSTITKGKEIVTEDDLDSLAYLKAVIKETLRLHMPGPLLIPHLSMADCNIKGYTIPSGIRVIINSWALARDPSSWEHADEFMPERFMECGSAATMDYKGNDFQYLPFGAGRRICPGMNYATASIEIMLANLMYHFNWKLPVELMDEGGISMTEFFGMTVHRKEKLLLVPVVPED

SEQ ID NO: 26800 - protein, 192 aa, Triticum aestivum
MVQLMRKPHLMNKLQAEVRSTITKGKEIVTEDDLDSLAYLKAVIKETLRLHMPGPLLIPHLSMADCNIKGYTIPSGIRVIINSWALARDPSSWEHADEFMPERFMECGSAATMDYKGNDFQYLPFGAGRRICPGMNYATASIEIMLANLMYHFNWKLPVELMDEGGISMTEFFGMTVHRKEKLLLVPVVPED

SEQ ID NO: 26801 - protein, 188 aa, Triticum aestivum
MRKPHLMNKLQAEVRSTITKGKEIVTEDDLDSLAYLKAVIKETLRLHMPGPLLIPHLSMADCNIKGYTIPSGIRVIINSWALARDPSSWEHADEFMPERFMECGSAATMDYKGNDFQYLPFGAGRRICPGMNYATASIEIMLANLMYHFNWKLPVELMDEGGISMTEFFGMTVHRKEKLLLVPVVPED

SEQ ID NO: 26802 - DNA, 683 bp, Triticum aestivum
tttttttctccctcccacagcccacagacccctcccctcccctcccctcccccaacccaccggcggcggcgcagcgcagcttgaggaaggaagcgaagatggtgaagttcctgaagcccggcaaggcggtgatcctgctgcagggcaggtacgcggggaagaaggcggtgatcgtgcgcgtgttcgaggagggcacccgcgaccgcccgtacgggcactgcctcgtcgccgggctggccaagtacccgaagaaggtgatccgcaaggactcggccaagaagacggccaagaagtcccgcgtcaaggtgttcctcaagctcgtcaacttcacccatctcatgcccacccgctataccctcgacgtcgacctcaaggaggtggcctccggcgcgcccgactccctcacctccaaggacaagaaggtgggcgccgccaaggccgccaaggccaagctcgaggagaggttcaagaccggcaagaacaggtggttcttcaccaagctccgcttctaggccggccggccgcgccagggcggtctctgccgttattactacccgaaccctttacatttttagttgcttgttatcggtgactgttgctgcgcttaaggtgtcctgttttggtattgcccatgaagaagactctgtgtttagcttggatcttatgagatatgatgatgtttc

SEQ ID NO: 26803 - protein, 196 aa, Triticum aestivum
FFLPPTAHRPLPSPPLPQPTGGGAAQLEEGSEDGEVPEARQGGDPAAGQVRGEEGGDRARVRGGHPRPPVRALPRRRAGQVPEEGDPQGLGQEDGQEVPRQGVPQARQLHPSHAHPLYPRRRPQGGGLRRARLPHLQGQEGGRRQGRQGQARGEVQDRQEQVVLHQAPLLGRPAAPGRSLPLLLPEPFTFLVACYR

SEQ ID NO: 26804 - protein, 169 aa, Triticum aestivum
FFSLPQPTDPSPPLPSPNPPAAAQRSLRKEAKMVKFLKPGKAVILLQGRYAGKKAVIVRVFEEGTRDRPYGHCLVAGLAKYPKKVIRKDSAKKTAKKSRVKVFLKLVNFTHLMPTRYTLDVDLKEVASGAPDSLTSKDKKVGAAKAAKAKLEERFKTGKNRWFFTKLRF

SEQ ID NO: 26805 - protein, 137 aa, Triticum aestivum
MVKFLKPGKAVILLQGRYAGKKAVIVRVFEEGTRDRPYGHCLVAGLAKYPKKVIRKDSAKKTAKKSRVKVFLKLVNFTHLMPTRYTLDVDLKEVASGAPDSLTSKDKKVGAAKAAKAKLEERFKTGKNRWFFTKLRF

SEQ ID NO: 26806 - DNA, 493 bp, Triticum aestivum
acctagcaaatcatatcactgtaaccttaagttggactacagcatccgttgcgaaaccaccagaatcataaggtagacattctacgcaagcagagcaaatggcgtcgacctctcgccgtatggttgcgtccgtcctcttggtccttcttctcctcgtcgccacagagatggggacgatgagggtggcggaggcgaggcacgggcacaggcactgcgagtcgcagagccacaggtaccgcggagcgtgctggagggacgacaactgcgaacacgtctgcaacaccgagggcttcccttggggcaagtgcaagttccacgacttcgaaaggaagtgcttctgcaagaaaccgtgctagccacttcatcgaccgatggatcagctggctagttagccgcgcaccacgaccaccctcgtgatcttcgtagtgctcctctcctgtttcgtgtaccgctttccttattcctaatctagtaaggtctacatgcgttgtgc

SEQ ID NO: 26807 - protein, 85 aa, Triticum aestivum
MASTSRRMVASVLLVLLLLVATEMGTMRVAEARHGHRHCESQSHRYRGACWRDDNCEHVCNTEGFPWGKCKFHDFERKCFCKKPC

SEQ ID NO: 26808 - protein, 78 aa, Triticum aestivum
MVASVLLVLLLLVATEMGTMRVAEARHGHRHCESQSHRYRGACWRDDNCEHVCNTEGFPWGKCKFHDFERKCFCKKPC

SEQ ID NO: 26809 - protein, 62 aa, Triticum aestivum
MGTMRVAEARHGHRHCESQSHRYRGACWRDDNCEHVCNTEGFPWGKCKFHDFERKCFCKKPC

SEQ ID NO: 26810 - DNA, 636 bp, Triticum aestivum
gtcctccgctcccaatccgaatccaccaacgcagaggagtggagagagaaactccggagaagaagcaggagcgggtgcggcggcgaggtcgatgtcgacgacggcggggtacctggcgcggcgcgcggggcagaaggagcgggtgcggctgctctaccgccgcgcgctcaaggacaccctcaactgggccgtccaccgccacctcttctaccaggacgcgtccgagctcagggacaagttcgaggccaacagaaatgtggagaacctggacgtgatcgataggctcatcgaggacgcggaggcgcagcagaggaacttccagcacccggatccttacattgttccatgggctcctggtggcactaaattcacaaggaaccctcctccacctgaagggattgagattatctacaactatggcaaagaagaccaatgaacaagaatcatgcatttgtgagcagagcctggcaccggcggagtgcaaaggacttacttttgcttttccagatgatagcatgcaactgagctgctgtattgttaagaacaaaataaaattactcgcctccttccatgtgtttcttttatcatggatgttgtatgccaactattttgtgctcatcagctagttcattgttt

SEQ ID NO: 26811 - protein, 144 aa, Triticum aestivum
SSAPNPNPPTQRSGERNSGEEAGAGAAARSMSTTAGYLARRAGQKERVRLLYRRALKDTLNWAVHRHLFYQDASELRDKFEANRNVENLDVIDRLIEDAEAQQRNFQHPDPYIVPWAPGGTKFTRNPPPPEGIEIIYNYGKEDQ

SEQ ID NO: 26812 - protein, 114 aa, Triticum aestivum [sequence omitted]

SEQ ID NO: 26813 - protein, 93 aa, Triticum aestivum
VLRSQSESTNAEEWREKLRRRSRSGCGGEVDVDDGGVPGAARGAEGAGAAALPPRAQGHPQLGRPPPPLLPGRVRAQGQVRGQQKCGEPGRDR

SEQ ID NO: 26814 - DNA, 983 bp, Triticum aestivum
ataaaacataagtccatgggagagacggatattaagagttcattaggaaagtacagaattatggaagagtttagttgtcttaggaaagatctagcaagtccaattaggagaggttggtgacctgagcaacgcatccatgccatctggttatcttcagcacggcagttatcacgttgtgaatcaaggttcacaccaccagcacaatactgctgaataatgctaacgaacttgttcatactgttaattcttgtgtgtgacaggaaggtaggtagcagtagcactgacacactattttttgttctctgtggggatgcaaaataacatttgttatcatgaataattgaaaacctgtgcttgagattctaaatctgccatgcaacgtttgtctgtgtcgaaggatgattcagaaatagttgctatgataaaagaactgttggagacccgtattcgtccggctgttcaagatgatggtggtgacattgaataccgaggatttgagccagaaacaggaatagtgaagctaaaaatgcaaggtgcctgcagtggctgcccgagttcatcagtcacgttgaaatctggcatagagaacatgctcatgcactatgtgcccgaggtgaaaggagtggagcaggagtttgatggtgatgaggaagctgaactggctggccagatggaatgagtttttacagttaaatcgcaacccttgtcacatatgcttgttcagggaaaccatgctatgcatgaaaagtcctggagaattaccactcccaaaaccataggttaccactatattttgtgagataaaccaggaatagcctgaaggtttttgtgatgattagatggttgtaattttgatcaaatgtgtgcaagaagcagactaccgcacatggtagagaggcagcagtagcctgaaccaacatcaactgcagtagggctgaataaagtgatagttggattgatctttccttttgtccaactctgtc

SEQ ID NO: 26815 - protein, 101 aa, Triticum aestivum
MQRLSVSKDDSEIVAMIKELLETRIRPAVQDDGGDIEYRGFEPETGIVKLKMQGACSGCPSSSVTLKSGIENMLMHYVPEVKGVEQEFDGDEEAELAGQME

SEQ ID NO: 26816 - protein, 86 aa, Triticum aestivum
MIKELLETRIRPAVQDDGGDIEYRGFEPETGIVKLKMQGACSGCPSSSVTLKSGIENMLMHYVPEVKGVEQEFDGDEEAELAGQME

SEQ ID NO: 26817 - protein, 50 aa, Triticum aestivum
MQGACSGCPSSSVTLKSGIENMLMHYVPEVKGVEQEFDGDEEAELAGQME

SEQ ID NO: 26818 - DNA, 1269 bp, Triticum aestivum
accgtctcagataacttaggattttcggtctcagattgtgaggagcggctcatcgacctctgccaactgccatcgcacttgctgttggagctcgtggactcgtggtgcgccctcatggaagggcccgtcctccccaacctgccaaacacgagggtcgccgtcgtcaccggagggaacaaagggatcggcttcgaggtgtgccgccagctggccagcggcggcgtcacggtcgtcttgacggcccgggacgagacgaggggcggggaggccgtcgagaggctcaatgcgctgggactctctggtgtcatcttccatcggctggagatcacggacgcttcgagcgccgcgacgctggctggttttctcaaggcccgctttggcaagcttgacattctggtgaataatgccgcagttggtggggttgagtacggccaagaattcgatacgaacgaggaaaagttcggtggcatggatttccaccagagagttgagtggatgttgaagaacgcacgggagcccatcgacagcgcgaagaacagcgtgcagacgaactactatggcacgaagcatgtaatcgaagccctgctgcctctgcttcaatcttcgtccgtgggaagaatagtgaacgtctcctccaattatggactgctaagacatatcggcagcgaggaggtgaggcaggagctcaacgacgtcgacaacctgacagaggggaggctagacgagctgctggagaagttcatgaaagacttcgaggccggcgcgctggagccgcacgggtggcccacaaagttctcggcgtacaaggtggccaaggccgccatgaacgcctactcgaggatcctggcgaggaggcaccctgagctgcgcgtcaactgcgcgcaccctggcttcgtcaagaccgacatgagcatggggtccggggtcctgacgccggaggagggcgcacgtaacttggtgaaggtggcgctgctgcctgacggcgggccgaccggcgcgtatttcgccatgggcgaggaggcgccgttcgtgtgaggtaccggcggtacgtgcgtgcgtgccgtacggttactgcttggatgcgttaaaaaaaaataagatgtgtcatctatcttttttcgacaaagggtgaggttcacagcggcagcgtccgccacctccaatgcatgacacgtgttcagtgagggctcgtataccgtccttcattgaacgcgcttttgcaacagaggtaatgtttctgaaacatatgtgatattgcagtagtttacg

SEQ ID NO: 26819 - protein, 344 aa, Triticum aestivum
TVSDNLGFSVSDCEERLIDLCQLPSHLLLELVDSWCALMEGPVLPNLPNTRVAVVTGGNKGIGFEVCRQLASGGVTVVLTARDETRGGEAVERLNALGLSGVIFHRLEITDASSAATLAGFLKARFGKLDILVNNAAVGGVEYGQEFDTNEEKFGGMDFHQRVEWMLKNAREPIDSAKNSVQTNYYGTKHVIEALLPLLQSSSVGRIVNVSSNYGLLRHIGSEEVRQELNDVDNLTEGRLDELLEKFMKDFEAGALEPHGWPTKFSAYKVAKAAMNAYSRILARRHPELRVNCAHPGFVKTDMSMGSGVLTPEEGARNLVKVALLPDGGPTGAYFAMGEEAPFV

SEQ ID NO: 26820 - protein, 306 aa, Triticum aestivum
MEGPVLPNLPNTRVAVVTGGNKGIGFEVCRQLASGGVTVVLTARDETRGGEAVERLNALGLSGVIFHRLEITDASSAATLAGFLKARFGKLDILVNNAAVGGVEYGQEFDTNEEKFGGMDFHQRVEWMLKNAREPIDSAKNSVQTNYYGTKHVIEALLPLLQSSSVGRIVNVSSNYGLLRHIGSEEVRQELNDVDNLTEGRLDELLEKFMKDFEAGALEPHGWPTKFSAYKVAKAAMNAYSRILARRHPELRVNCAHPGFVKTDMSMGSGVLTPEEGARNLVKVALLPDGGPTGAYFAMGEEAPFV

SEQ ID NO: 26821 - protein, 188 aa, Triticum aestivum
MDFHQRVEWMLKNAREPIDSAKNSVQTNYYGTKHVIEALLPLLQSSSVGRIVNVSSNYGLLRHIGSEEVRQELNDVDNLTEGRLDELLEKFMKDFEAGALEPHGWPTKFSAYKVAKAAMNAYSRILARRHPELRVNCAHPGFVKTDMSMGSGVLTPEEGARNLVKVALLPDGGPTGAYFAMGEEAPFV

SEQ ID NO: 26822 - DNA, 929 bp, Triticum aestivum
acgaaggcaaagcgaacacacaaacccaaacccaaacccacccacttctcctctcaagccttcgcctgccaccgacgccacccaagcccccaaccctagcgaggactgaaagaggaggaggcggcggcaaccccgtcgaccggaggggagatggtgttcttcgcgctgctcgtgggggcagagctcgacggcctcaccaacctgcagccccgcggcggctgcgacgaccccagctacccttactacttcaagctgcggtgcgagagctgcggagagacgagcgccaagaccacctgcgtctccctcaacgaggtcgtcgaactgcccaccggcaaaggcacctccaatctcctccagaagtgcaagttatgttcgagggatggatcagttgtgatgattcctgggcagggaacaccactgactgctgagcagagccagaaaggagagatgacttgtttgatggtctttgaatgcagaggctatgaacctattgagttcgcttttggtaatggctggaaggctgaatctgtacatgggacaccatttgacattgatctttctgaaggagagtttgatgagtatgatgagaagggagagtgccctgtcgctctatccaagctgcagtcaacattcaaagtggtgaagaagcagggttttcatgggaagaccagatatgtctaagatccagtttctcttgggctcttcaaacattggagtcagagatgtgtaaagcgcatctacaaagttgaatcctcgatgttgattttgtatttgaactaagttcatgcccatgattcggtggatttgccatgaatttggttaagcttgcagtgatgtggcctcctgtttggaaaaattgaatattctgcctatcagtggtttcaaacttagatctatggctctaccatatcaatcataaaattatttag

SEQ ID NO: 26823 - protein, 176 aa, Triticum aestivum
MVFFALLVGAELDGLTNLQPRGGCDDPSYPYYFKLRCESCGETSAKTTCVSLNEVVELPTGKGTSNLLQKCKLCSRDGSVVMIPGQGTPLTAEQSQKGEMTCLMVFECRGYEPIEFAFGNGWKAESVHGTPFDIDLSEGEFDEYDEKGECPVALSKLQSTFKVVKKQGFHGKTRYV

SEQ ID NO: 26824 - protein, 141 aa, Triticum aestivum
EGKANTQTQTQTHPLLLSSLRLPPTPPKPPTLARTERGGGGGNPVDRRGDGVLRAARGGRARRPHQPAAPRRLRRPQLPLLLQAAVRELRRDERQDHLRLPQRGRRTAHRQRHLQSPPEVQVMFEGWISCDDSWAGNTTDC

SEQ ID NO: 26825 - protein, 95 aa, Triticum aestivum
MIPGQGTPLTAEQSQKGEMTCLMVFECRGYEPIEFAFGNGWKAESVHGTPFDIDLSEGEFDEYDEKGECPVALSKLQSTFKVVKKQGFHGKTRYV

SEQ ID NO: 26826 - DNA, 595 bp, Triticum aestivum
aaaagacggagcggcggactctcctgcaatacatactccgccgccgccgccgccgccgccgcgatgcttctcttccacaagcaactgttctcgctccgtctcccagcttcacccgtgatcttctctctccgtcgggccctcttgtccacctcggcggccaccgacgccccgccggccccattcgccgtcgacgactacctcgtcaccacctgcggcctcacgccggagcaagccctcaaggccgccaagcacgtctcccactgcaagtccacctccaacgccgagtccgtcctcgcctacctcgccggccccaccctccgcttctccaaggccgacatcgcccacatcgtcgcccgcgacccgcggatcctcaactgcagcgtcgacgacaccctcaaggcccgcgtcgccatcttacgcggctatggcctctccgaagaccacgtccggaccttcctccgcatgacccccggcgtcttccgctccgtcagcatccaggagaagctcgggttctggttgcccttcctggggtcgccggagaagttcatccgcatcctcaagggcaactattacctgctcacgtcggacctcgagc

SEQ ID NO: 26827 - protein, 198 aa, Triticum aestivum
KRRSGGLSCNTYSAAAAAAAAMLLFHKQLFSLRLPASPVIFSLRRALLSTSAATDAPPAPFAVDDYLVTTCGLTPEQALKAAKHVSHCKSTSNAESVLAYLAGPTLRFSKADIAHIVARDPRILNCSVDDTLKARVAILRGYGLSEDHVRTFLRMTPGVFRSVSIQEKLGFWLPFLGSPEKFIRILKGNYYLLTSDLE

SEQ ID NO: 26828 - protein, 197 aa, Triticum aestivum
KTERRTLLQYILRRRRRRRRDASLPQATVLAPSPSFTRDLLSPSGPLVHLGGHRRPAGPIRRRRLPRHHLRPHAGASPQGRQARLPLQVHLQRRVRPRLPRRPHPPLLQGRHRPHRRPRPADPQLQRRRHPQGPRRHLTRLWPLRRPRPDLPPHDPRRLPLRQHPGEARVLVALPGVAGEVHPHPQGQLLPAHVGPR

SEQ ID NO: 26829 - protein, 177 aa, Triticum aestivum
MLLFHKQLFSLRLPASPVIFSLRRALLSTSAATDAPPAPFAVDDYLVTTCGLTPEQALKAAKHVSHCKSTSNAESVLAYLAGPTLRFSKADIAHIVARDPRILNCSVDDTLKARVAILRGYGLSEDHVRTFLRMTPGVFRSVSIQEKLGFWLPFLGSPEKFIRILKGNYYLLTSDLE

SEQ ID NO: 26830 - DNA, 1488 bp, Triticum aestivum
gaccctaaaccattcctcttctccacttcccctatcccttctttgctcgtggaaaaagctcgacctgctaatggcggcggcggcggacttcacgcagagcaagcaggccatgtcgtacgcgctctgcaagcacctgaacctcgatccgaatagcatatccagtacacttatcaaggagaatgatattgcgagcctattctcacatatcgtgacctcaccgcaggatgaggtcaagaagtgggttgagttctccagcaattttgttctaagtgatggagaacagcatgcattacttggtaatttgaatcaacatttgtcccagatgtcggtactattagctggtttcaaaccatcagcggcggacattattgtgtttgcaaccgtgcatgttttcatgtgtcatcttagtgacagtgagttgcagaaatatccaaatatattgcggtggatggactacattcagaatgttgttgattttggtatgacactgcaaaagataaacttgacgaaatctatcttcaacccacctgcacctgcaccttctcacccaaagaaagctgataaaggagatggtgatccaaattccaagaaagctgtttcaggacagaaggttgcggataagtcagatgtagctgctgactccaaaaaggctgcaggggagaataaggttcctggggataaggcaaatcctacttctaccaaaaacaacaaaccttctggggataaaaagaaagtccaagagaagactgccggcaaaacagaggcagctgcagagaaagctccacagaaaagtgcagaaaaggattctgagtgcagtgttagtatcctgaatatacaggtcggagttattcgcaaagcatggaaacatccatcagctgacagtcttctggtggaggagatagatttgggagatggcaatgtgcgtcaagttgttagtggtcttgcgaagttcttcagcccagatgaacttgttaatcgccatgttgtcttgatcacgaatgtgaagcctgggaagctgcgcgatgtaatgtctgctggattggtcttgtgtgcttcaaataaagatcatacagtcgtggagcctttgattcctccggaaggtgccaagcttggagaacgcatttcttttgctgggtttgatgggaagccggaagatgttctaaacccaaagaagaaacaattggacaagataacacctcatctccgtaccgacgagaatggaattgcaacgttccgaggggtaccattcactacatcagccggtctgtgtagatcctcagttccgaatgccgatgttaagtgagcaactcgttaagcatgctgatttcaaacattgatgtgctaagacacatgcagatgtaccattttgtcgtaatgcacatattaaatgttaccatatgttaacagagttgtcagttcttgacttttaatatctgaaaacaaattttgttttgtctatgcgcaaaaaggaaaaaaatggccctgatg

SEQ ID NO: 26831 - protein, 433 aa, Triticum aestivum
TLNHSSSPLPLSLLCSWKKLDLLMAAAADFTQSKQAMSYALCKHLNLDPNSISSTLIKENDIASLFSHIVTSPQDEVKKWVEFSSNFVLSDGEQHALLGNLNQHLSQMSVLLAGFKPSAADIIVFATVHVFMCHLSDSELQKYPNILRWMDYIQNVVDFGMTLQKINLTKSIFNPPAPAPSHPKKADKGDGDPNSKKAVSGQKVADKSDVAADSKKAAGENKVPGDKANPTSTKNNKPSGDKKKVQEKTAGKTEAAAEKAPQKSAEKDSECSVSILNIQVGVIRKAWKHPSADSLLVEEIDLGDGNVRQVVSGLAKFFSPDELVNRHVVLITNVKPGKLRDVMSAGLVLCASNKDHTVVEPLIPPEGAKLGERISFAGFDGKPEDVLNPKKKQLDKITPHLRTDENGIATFRGVPFTTSAGLCRSSVPNADVK

SEQ ID NO: 26832 - protein, 410 aa, Triticum aestivum
MAAAADFTQSKQAMSYALCKHLNLDPNSISSTLIKENDIASLFSHIVTSPQDEVKKWVEFSSNFVLSDGEQHALLGNLNQHLSQMSVLLAGFKPSAADIIVFATVHVFMCHLSDSELQKYPNILRWMDYIQNVVDFGMTLQKINLTKSIFNPPAPAPSHPKKADKGDGDPNSKKAVSGQKVADKSDVAADSKKAAGENKVPGDKANPTSTKNNKPSGDKKKVQEKTAGKTEAAAEKAPQKSAEKDSECSVSILNIQVGVIRKAWKHPSADSLLVEEIDLGDGNVRQVVSGLAKFFSPDELVNRHVVLITNVKPGKLRDVMSAGLVLCASNKDHTVVEPLIPPEGAKLGERISFAGFDGKPEDVLNPKKKQLDKITPHLRTDENGIATFRGVPFTTSAGLCRSSVPNADVK

SEQ ID NO: 26833 - protein, 397 aa, Triticum aestivum
MSYALCKHLNLDPNSISSTLIKENDIASLFSHIVTSPQDEVKKWVEFSSNFVLSDGEQHALLGNLNQHLSQMSVLLAGFKPSAADIIVFATVHVFMCHLSDSELQKYPNILRWMDYIQNVVDFGMTLQKINLTKSIFNPPAPAPSHPKKADKGDGDPNSKKAVSGQKVADKSDVAADSKKAAGENKVPGDKANPTSTKNNKPSGDKKKVQEKTAGKTEAAAEKAPQKSAEKDSECSVSILNIQVGVIRKAWKHPSADSLLVEEIDLGDGNVRQVVSGLAKFFSPDELVNRHVVLITNVKPGKLRDVMSAGLVLCASNKDHTVVEPLIPPEGAKLGERISFAGFDGKPEDVLNPKKKQLDKITPHLRTDENGIATFRGVPFTTSAGLCRSSVPNADVK

SEQ ID NO: 26834 - DNA, 1367 bp, Triticum aestivum
ccaacgcacaccaaacaaaaacaacaacaacaagatcaccggcgcatcccatcccagagcaaccacacacgcagacaagcaagaatggcgatcgccgtgagcgggcaatggactcgcctgcggacgctcggctgcggcgcgtcgggggccgtggtcaccctggcggccgacgccgcgtcgggggagctgttcgcggtcaagtccgtgcgcgcggcggacgcggcgcagctgagccgggagcaggggatcctctccgggctctcctcgccgcacgtcgtgggctgcatcggcggcggcggcgaccgcgacggctcctaccacctcttcctcgagttcgcccccggcggctcgctcgccgacgaggccgcgaggaatgggggccgcctggaggagcgcgccatccgggcgtacgcggcggacgtcctgcgcgggctcgcctacatccacggcaagtcgctcgtgcacggcgacgtcaagtcgaggaacgtagtgatcggcgccgacgggcgcgccatgatcgccgacttcgggtgcgcgagggccctcggttcggccgggccgatcggaggcacgccggcgttcatggccccggaggtggcacgaggcgaagagcaggggccggccgccgacgtgtgggctctcggctgcacggtcgtcgagatggccaccgggcgcgccccgtggggcgagatggacaacgtccttgccgccgtccaccggattgggtacacggacgccgtgccggaggtgccgacgtggctgtcagcggaggcgaagagtttcctcgccatgtgcttcgcgaggaacgcccgcgaccggtgcacggcggcgcagctcctggagcacccgttcgtggcattgcaggcaggagaggccaaggccaggtgggtgtctcccaagagcacgctcgacgcagcattctgggaatcggagaccgacgaggaagaggaggaggaggaggaggtttcggagagcccgtccgagaggatcaagtcattgtcgtgctccgtcttgccggactgggactccgacgaaggctggatcgacgtgctcggcgagcagtgcgaagcttgcgattcaccagcagcaaccaaggggccagctgatgtgtccagcagggcgccaagcaaagtgctcgggtccccggcggtgccagctgaagacgtagctgtcgtcggcaccctttcaagtgatgaacatgaagtggacgcagaggatgagcctttcggtgacgataccatcctggccgctgatccttcggtggaccgccagaaccaagtgtgttcgagctcagatagagatgtactttcatcatcacatgtaccctgtaataatcgagttcttgcaatagaaaagtttcgttttcc

SEQ ID NO: 26835 - protein, 455 aa, Triticum aestivum
PTHTKQKQQQQDHRRIPSQSNHTRRQARMAIAVSGQWTRLRTLGCGASGAVVTLAADAASGELFAVKSVRAADAAQLSREQGILSGLSSPHVVGCIGGGGDRDGSYHLFLEFAPGGSLADEAARNGGRLEERAIRAYAADVLRGLAYIHGKSLVHGDVKSRNVVIGADGRAMIADFGCARALGSAGPIGGTPAFMAPEVARGEEQGPAADVWALGCTVVEMATGRAPWGEMDNVLAAVHRIGYTDAVPEVPTWLSAEAKSFLAMCFARNARDRCTAAQLLEHPFVALQAGEAKARWVSPKSTLDAAFWESETDEEEEEEEEVSESPSERIKSLSCSVLPDWDSDEGWIDVLGEQCEACDSPAATKGPADVSSRAPSKVLGSPAVPAEDVAVVGTLSSDEHEVDAEDEPFGDDTILAADPSVDRQNQVCSSSDRDVLSSSHVPCNNRVLAIEKFRF

SEQ ID NO: 26836 - protein, 427 aa, Triticum aestivum
MAIAVSGQWTRLRTLGCGASGAVVTLAADAASGELFAVKSVRAADAAQLSREQGILSGLSSPHVVGCIGGGGDRDGSYHLFLEFAPGGSLADEAARNGGRLEERAIRAYAADVLRGLAYIHGKSLVHGDVKSRNVVIGADGRAMIADFGCARALGSAGPIGGTPAFMAPEVARGEEQGPAADVWALGCTVVEMATGRAPWGEMDNVLAAVHRIGYTDAVPEVPTWLSAEAKSFLAMCFARNARDRCTAAQLLEHPFVALQAGEAKARWVSPKSTLDAAFWESETDEEEEEEEEVSESPSERIKSLSCSVLPDWDSDEGWIDVLGEQCEACDSPAATKGPADVSSRAPSKVLGSPAVPAEDVAVVGTLSSDEHEVDAEDEPFGDDTILAADPSVDRQNQVCSSSDRDVLSSSHVPCNNRVLAIEKFRF

SEQ ID NO: 26837 - protein, 367 aa, Triticum aestivum
NAHQTKTTTTRSPAHPIPEQPHTQTSKNGDRRERAMDSPADARLRRVGGRGHPGGRRRVGGAVRGQVRARGGRGAAEPGAGDPLRALLAARRGLHRRRRRPRRLLPPLPRVRPRRLARRRGREEWGPPGGARHPGVRGGRPARARLHPRQVARARRRQVEERSDRRRRARHDRRLRVREGPRFGRADRRHAGVHGPGGGTRRRAGAGRRRVGSRLHGRRDGHRARPVGRDGQRPCRRPPDWVHGRRAGGADVAVSGGEEFPRHVLREERPRPVHGGAAPGAPVRGIAGRRGQGQVGVSQEHARRSILGIGDRRGRGGGGGGFGEPVREDQVIVVLRLAGLGLRRRLDRRARRAVRSLRFTSSNQGAS

SEQ ID NO: 26838 - DNA, 1491 bp, Triticum aestivum
aacatcctaatcgaaaaatcaagggttttcctcctctcctctcctctcatagccttcgccgcttcaccgctgctgccttccctccctcgcaagcctcctccgcgtcgccgccgcccgcccgcccgatccgccatggcttccgacccgaacaaagattccaaatcggaggggctgtctgaggcaaaaaagggggcttccccgacagctggtgcaggccttcccagtccttttgatttttccaacatgagcagcttgcttaatgatccatctataagggagatggctgagcaaatcgccagcgaccctgtattcaaccagatggctgagcagcttcagaaaagtgcgcagggtgcaggggaacagggtgttccaaatttggatcctcaagcatacatggaaaccatgacacaagttatgcagaatcctcagtttatgtcaatggcggagcgtcttgggaatactcttatgcaggatcctgcaatgtccagtatgcttgagaacttgactagtccagctcacaaagagcagcttgaagagcgaatggcccgtatcaaggatgatccgtctttgaagccaattcttgatgagatagagcgtggtggtccatctgcaatggtgaagtactggaatgaccctgagattcttcaaaagattggccaggctatgtcattgaacttcccagtagatgctgctacttccactgtactatctggacctcaagaaactgatgaagaaggcgaggatgatgatgagtccattgtccataacaccgccagtgtcggtgatgcagagggtctgaagaaagcattagatggtggagcaaacaaggatgaagaagatttggagggaagaagggccttgcattttgcatgtggatacggcgagttgaagtgtgcagaaatccttctggaggcaggcgctgcagttgacgcactggataagaacaagaacaccccgctgcactatgccgctggatacggtcggaaggaatgcgtggatcttctcttgaagcacggcgctgctgtcacgctccaaaatctggatgggaagacccccatcgaggtggccaagctcaacagccagggcgaggtggtgaagctgcttgagcaggacgtgttcctatgaagcaaaaccctcagacccgccgcccatcgatcctaaaactctccctttggttcgggactctcggcggtgtcatatcctggcatggtgttggttgctttccctcggtttacttagttggtagctctcgcatgtaacctgtgtggccttgcggtgctacttaacaagagtccatcttctccgttggtttgatcctgctgtgcaaccctgttcttggtccatctccatgcacgggggatatgggttcgctgtgggagatgtcaggggtgatgatgattgcgtatatacccctttcgtgaatatttcttggtgttgaaaatgatacgtgaggtgcaaattttgtttaatctgttgtttaggctttctgct

SEQ ID NO: 26839 - protein, 374 aa, Triticum aestivum
NILIEKSRVFLLSSPLIAFAASPLLPSLPRKPPPRRRRPPARSAMASDPNKDSKSEGLSEAKKGASPTAGAGLPSPFDFSNMSSLLNDPSIREMAEQIASDPVFNQMAEQLQKSAQGAGEQGVPNLDPQAYMETMTQVMQNPQFMSMAERLGNTLMQDPAMSSMLENLTSPAHKEQLEERMARIKDDPSLKPILDEIERGGPSAMVKYWNDPEILQKIGQAMSLNFPVDAATSTVLSGPQETDEEGEDDDESIVHNTASVGDAEGLKKALDGGANKDEEDLEGRRALHFACGYGELKCAEILLEAGAAVDALDKNKNTPLHYAAGYGRKECVDLLLKHGAAVTLQNLDGKTPIEVAKLNSQGEVVKLLEQDVFL

SEQ ID NO: 26840 - protein, 330 aa, Triticum aestivum
MASDPNKDSKSEGLSEAKKGASPTAGAGLPSPFDFSNMSSLLNDPSIREMAEQIASDPVFNQMAEQLQKSAQGAGEQGVPNLDPQAYMETMTQVMQNPQFMSMAERLGNTLMQDPAMSSMLENLTSPAHKEQLEERMARIKDDPSLKPILDEIERGGPSAMVKYWNDPEILQKIGQAMSLNFPVDAATSTVLSGPQETDEEGEDDDESIVHNTASVGDAEGLKKALDGGANKDEEDLEGRRALHFACGYGELKCAEILLEAGAAVDALDKNKNTPLHYAAGYGRKECVDLLLKHGAAVTLQNLDGKTPIEVAKLNSQGEVVKLLEQDVFL

SEQ ID NO: 26841 - protein, 293 aa, Triticum aestivum
MSSLLNDPSIREMAEQIASDPVFNQMAEQLQKSAQGAGEQGVPNLDPQAYMETMTQVMQNPQFMSMAERLGNTLMQDPAMSSMLENLTSPAHKEQLEERMARIKDDPSLKPILDEIERGGPSAMVKYWNDPEILQKIGQAMSLNFPVDAATSTVLSGPQETDEEGEDDDESIVHNTASVGDAEGLKKALDGGANKDEEDLEGRRALHFACGYGELKCAEILLEAGAAVDALDKNKNTPLHYAAGYGRKECVDLLLKHGAAVTLQNLDGKTPIEVAKLNSQGEVVKLLEQDVFL

SEQ ID NO: 26842 - DNA, 1267 bp, Triticum aestivum
aaccatcgttcacccccaattccaccttcacctctctccaccgccggcgtccggcgaccgccgcttgccggcctaccggcgatggaccgcgcatccacttgatggatccgtcggcggcagggcctgcgccaccacgggccgccccgggcagaggggcggacccagcggagcggcgcaggcggtggtgcgggatcacagtccgcggggccctcgtgatgctcttccccatcgccgtgtcattcctcttctcctttatcttcggcatcgctggcctcctcctcggcgggctctcctccaacgcgtccgtctccatgccctccacctgccgcatcctctctaccggcctggacattcggtcatctaaggtttgcgagcttggactgttgaactataaagctaagcatgtattttacccctcgagtaatcgaagattccgctgccatgatgactattactgggcttcggtttttgaggttgaatacacagaatatttttctggtcaaacatcttatgcaatggcagaagctccaaaagaggctcttcctcacaattgccggcctgattttggtgctgtatggtcaacaacagcaaagttcaaggtcaatgaatcatacaagtgcaggtacacactggggagtaccaaagctgacatttgttcagacaagctattcaattgcactgctgagaatccttcaataattgaaatgctgaaaaggatttttgtactgttttcaaagttctgcaagtcaaaagatttcagttcgtggtggatgcttggatatgcggcagcaggggtcgtggcgggcgtgctgagttccatactcatcacaatagcagtaagaatcctgcgaggagtgttccttgctgccgccaggcgggctgtgagaaaccatagcatcagggtgtttgcttaccgtttcaagcgggcgtgccttcttgttgcgtatatatctttcgttggctggatcaccttgcagtacagcaaaatggttgggttgaaggagcttgtgctggacttcaaactcttggagaggttcttgtaaaatgtaaacgggtttcggcaatgtatgtcaaataagccgatccccttgtgtgatgtaacctagtgtaacttatcctgccttgcttcgatatgcagccgcccatgaacaggtggatgaatcatgggtagctagtagctacagtgggcatggagtaactcccatctgttgtaacctgcaatgcaacatgtatcacaatcatcgtaatgacagtttggggggcttgg

SEQ ID NO: 26843 - protein, 346 aa, Triticum aestivum
PSFTPNSTFTSLHRRRPATAACRPTGDGPRIHLMDPSAAGPAPPRAAPGRGADPAERRRRWCGITVRGALVMLFPIAVSFLFSFIFGIAGLLLGGLSSNASVSMPSTCRILSTGLDIRSSKVCELGLLNYKAKHVFYPSSNRRFRCHDDYYWASVFEVEYTEYFSGQTSYAMAEAPKEALPHNCRPDFGAVWSTTAKFKVNESYKCRYTLGSTKADICSDKLFNCTAENPSIIEMLKRIFVLFSKFCKSKDFSSWWMLGYAAAGVVAGVLSSILITIAVRILRGVFLAAARRAVRNHSIRVFAYRFKRACLLVAYISFVGWITLQYSKMVGLKELVLDFKLLERFL

SEQ ID NO: 26844 - protein, 313 aa, Triticum aestivum
MDPSAAGPAPPRAAPGRGADPAERRRRWCGITVRGALVMLFPIAVSFLFSFIFGIAGLLLGGLSSNASVSMPSTCRILSTGLDIRSSKVCELGLLNYKAKHVFYPSSNRRFRCHDDYYWASVFEVEYTEYFSGQTSYAMAEAPKEALPHNCRPDFGAVWSTTAKFKVNESYKCRYTLGSTKADICSDKLFNCTAENPSIIEMLKRIFVLFSKFCKSKDFSSWWMLGYAAAGVVAGVLSSILITIAVRILRGVFLAAARRAVRNHSIRVFAYRFKRACLLVAYISFVGWITLQYSKMVGLKELVLDFKLLERFL

SEQ ID NO: 26845 - protein, 275 aa, Triticum aestivum
MLFPIAVSFLFSFIFGIAGLLLGGLSSNASVSMPSTCRILSTGLDIRSSKVCELGLLNYKAKHVFYPSSNRRFRCHDDYYWASVFEVEYTEYFSGQTSYAMAEAPKEALPHNCRPDFGAVWSTTAKFKVNESYKCRYTLGSTKADICSDKLFNCTAENPSIIEMLKRIFVLFSKFCKSKDFSSWWMLGYAAAGVVAGVLSSILITIAVRILRGVFLAAARRAVRNHSIRVFAYRFKRACLLVAYISFVGWITLQYSKMVGLKELVLDFKLLERFL

SEQ ID NO: 26846 - DNA, 1822 bp, Triticum aestivum
ccaaccgccaacgccccgactgcgaacacggcgagaaaattcctccgccgccgccgttcggtcagatctcgcttctagaagcttccaccccggtgcgggatgtcagaggggccccctcccgctgcggacggggccgtgcgccggaggcggaggcgatgggcggcggccgcgggggccctcctcgtggcgctcctcgccgtggccctgagctaccggggcttcccctccatttcgtccctctcgcgcggcagaggctgcggctgccccggcgcgaggaagtacacggggatggtggaggactgctgctgcgactacgagacggtggacgccatcaacgaggaggtgctcaacccgatcctgcaggacctcgtcgctctgcccttcttcaggtacttcaaggttaagttgtggtgtgactgccctttttggcctgatgatggcatgtgtcggctcagggactgtagtgtatgcgagtgcccagataatgaatttcccgaaccattcaagaagccttacagtggcctttctcctgaaaacatgatctgtcaagaaggaaaaccagaagccacggttgatagaacccttgacaccaaggttttcagggtgggttgaaaccgacaatccatggacatcagatgatgagacggataatgctgagatgacttatgtgaatcttcaacttaatcctgaacgttatactggttatactggtgattcagctagaaggatatgggacgctatctacaaagaaaattgcccaaaatatccttcagaagatatgtgccaggagaagaaggcactttacaagctaatttcaggattgcactcctcaatatctgtacatattgcttatgattatcttcttgatgaatctgctaacttgtggggacataatctttcgttgttgcatgaccgtgttctgaagtacccagagcgtgtcgaaaatctgtacttcacatacctatttgttcttcgggcagtgactaaggcggcagattaccttgagcaggcagagtacaacactggcaatcctgaagaggacttgaaaacacaatctttagtgaggcaattgctttacaaccacaagttaagatctgcatgtccattaccttttgatgaagcaaaactgtggcaaggtgaaaatggccctgagttaaagcaggagatccagaagcagtttagaaatatcagtgcaattatggactgtgttggttgtgagaagtgtcgattatggggaaagcttcaagttcttgggcttggaacagcgctgaagattctattttctgttgatggagagaacaatttgaatcaacagttccagctgcagcgaaatgaggtcattgcactggtaaatcttctgaataggctgtcagaatctgtcaagtttgtacatgaaacaggatcgtccagccaggaaatcattaaacaacagagcttttcaactttgcaaaagggggcttcctgaccaaatgtgaaaccgtattctgcaaagatgcaagagggcaagttgtttctataactcctcttctccatactgggagagtgatgtacatgcagggagcagcttcctagggttctacagatcgtagacaaaagatatgtagaaaactttggaagccaaacaaagacaagtttacccctttttttctttcagttttagtgggacatatccctttcaaattttgtatgtagtgtagacttcacctcttttctgtcgaacttccagttagtgacattttatctttcctccgttgactgataatacatatgactgctaacgaagtaaggccgtttgtcaatccaaactgtttgcatgtttcat

SEQ ID NO: 26847 - protein, 268 aa, Triticum aestivum
MTYVNLQLNPERYTGYTGDSARRIWDAIYKENCPKYPSEDMCQEKKALYKLISGLHSSISVHIAYDYLLDESANLWGHNLSLLHDRVLKYPERVENLYFTYLFVLRAVTKAADYLEQAEYNTGNPEEDLKTQSLVRQLLYNHKLRSACPLPFDEAKLWQGENGPELKQEIQKQFRNISAIMDCVGCEKCRLWGKLQVLGLGTALKILFSVDGENNLNQQFQLQRNEVIALVNLLNRLSESVKFVHETGSSSQEIIKQQSFSTLQKGAS

SEQ ID NO: 26848 - protein, 228 aa, Triticum aestivum
MCQEKKALYKLISGLHSSISVHIAYDYLLDESANLWGHNLSLLHDRVLKYPERVENLYFTYLFVLRAVTKAADYLEQAEYNTGNPEEDLKTQSLVRQLLYNHKLRSACPLPFDEAKLWQGENGPELKQEIQKQFRNISAIMDCVGCEKCRLWGKLQVLGLGTALKILFSVDGENNLNQQFQLQRNEVIALVNLLNRLSESVKFVHETGSSSQEIIKQQSFSTLQKGAS

SEQ ID NO: 26849 - protein, 170 aa, Triticum aestivum
MSEGPPPAADGAVRRRRRRWAAAAGALLVALLAVALSYRGFPSISSLSRGRGCGCPGARKYTGMVEDCCCDYETVDAINEEVLNPILQDLVALPFFRYFKVKLWCDCPFWPDDGMCRLRDCSVCECPDNEFPEPFKKPYSGLSPENMICQEGKPEATVDRTLDTKVFRVG

SEQ ID NO: 26850 - DNA, 1720 bp, Triticum aestivum
ctggtcggagaggagcagcagagatggccggagccggggaagacgacgcagctcctcctcccccttctccagatcgacagcagcccatggaagaggcggcggcggcggccaagcggagccggtcggagaaccaccatggcctcgccgacgggccgtccttccggatggaggaccttccggcggaggttcagccggttataatctcactgctcccactgaaagaggccgtgaggacgagcattgtttcaagaagttggacaacgctctggagattccactgcgacctatgttttgatgtggattctaacaccgatgacaattccgctcatcaggtcaatggcactggcaccaatgaccaatccactaatcggtataataccaaaataacacgggcaaagttcatggagactgtaaattccgttattcaacggcatagtgggataggaatcaataagttcagtatcagctgtgacctgcacaaagaggactctcatcatcttgacaagtggattcggtttgccgcttcatcaaaggcaaaaataatagattttcatcggaagatatctgattaccgagttgaagaagctccccactttcctcttgaggccttagatgctcaaggtagctcatttgtgcagtccttgtctctcgccagtgtttctataaagccacgctcaggaatatgccgctttacaatactcagaaggcttgttttgagctctgttcagatatttggagattttccaggcttgcttgcaaaatgttcaagacttgaggacttagagatcaaatggtgttctggtgtggatgacttaatcgtaccacacacactcgataaacttcaacatttgctgattgccggaatggacgtccagatggttgagtttcatgctactgatcttgctcactttgagtacaaaggccgagtaacccctatagtgcttcatggttgcttaaaactagagaaggcaacaattgcgtttgaggcctctaatgtactgccccatgcattcaatgtaattccaagcatttccccagtgaagatattaattgtgcgagcttttatatcaaaatatggacagtccctggagctgccattaagaccacagggcatgtttatgcatctgaggcatatgacttgtaaaattatcgtccttgctagagatgtaaatgactataatggagttcttcaactggcccattggttggacagtgcaccgcgactggagacattggacttgcatatgtcctatctgaggtccggtgctttcgtaagtgccgaggtggcgggagtggaagctccctgtatgcgtcgccatgatcatctcaagacggtcttcatgagtgggtttcagtgttacaagtctcagattgagctggcgtgctgtatcctgggaaatgcttctgttcttgagcagctgacagtagaagcaatatggggtgatgatgattacaggcggatctgtgaatgggcagaggtaacctcgaagcgctttggtaaggtgatcactgtcttagatgccccccttaacagtgagtaaaccaatccttttcgcatgtacacgctgtcaattaatctcgtgtagtctgcagtatgcagcattcagtgtagctgggagaatgcccctctagactgtactgactgttttggtgtctacaaatggaatctgtagggcttttgcccctcttaataaaaaacaagtaatctctggttcatcgt

SEQ ID NO: 26851 - protein, 512 aa, Triticum aestivum
GRRGAAEMAGAGEDDAAPPPPSPDRQQPMEEAAAAAKRSRSENHHGLADGPSFRMEDLPAEVQPVIISLLPLKEAVRTSIVSRSWTTLWRFHCDLCFDVDSNTDDNSAHQVNGTGTNDQSTNRYNTKITRAKFMETVNSVIQRHSGIGINKFSISCDLHKEDSHHLDKWIRFAASSKAKIIDFHRKISDYRVEEAPHFPLEALDAQGSSFVQSLSLASVSIKPRSGICRFTILRRLVLSSVQIFGDFPGLLAKCSRLEDLEIKWCSGVDDLIVPHTLDKLQHLLIAGMDVQMVEFHATDLAHFEYKGRVTPIVLHGCLKLEKATIAFEASNVLPHAFNVIPSISPVKILIVRAFISKYGQSLELPLRPQGMFMHLRHMTCKIIVLARDVNDYNGVLQLAHWLDSAPRLETLDLHMSYLRSGAFVSAEVAGVEAPCMRRHDHLKTVFMSGFQCYKSQIELACCILGNASVLEQLTVEAIWGDDDYRRICEWAEVTSKRFGKVITVLDAPLNSE

SEQ ID NO: 26852 - protein, 505 aa, Triticum aestivum
MAGAGEDDAAPPPPSPDRQQPMEEAAAAAKRSRSENHHGLADGPSFRMEDLPAEVQPVIISLLPLKEAVRTSIVSRSWTTLWRFHCDLCFDVDSNTDDNSAHQVNGTGTNDQSTNRYNTKITRAKFMETVNSVIQRHSGIGINKFSISCDLHKEDSHHLDKWIRFAASSKAKIIDFHRKISDYRVEEAPHFPLEALDAQGSSFVQSLSLASVSIKPRSGICRFTILRRLVLSSVQIFGDFPGLLAKCSRLEDLEIKWCSGVDDLIVPHTLDKLQHLLIAGMDVQMVEFHATDLAHFEYKGRVTPIVLHGCLKLEKATIAFEASNVLPHAFNVIPSISPVKILIVRAFISKYGQSLELPLRPQGMFMHLRHMTCKIIVLARDVNDYNGVLQLAHWLDSAPRLETLDLHMSYLRSGAFVSAEVAGVEAPCMRRHDHLKTVFMSGFQCYKSQIELACCILGNASVLEQLTVEAIWGDDDYRRICEWAEVTSKRFGKVITVLDAPLNSE

SEQ ID NO: 26853 - protein, 484 aa, Triticum aestivum
MEEAAAAAKRSRSENHHGLADGPSFRMEDLPAEVQPVIISLLPLKEAVRTSIVSRSWTTLWRFHCDLCFDVDSNTDDNSAHQVNGTGTNDQSTNRYNTKITRAKFMETVNSVIQRHSGIGINKFSISCDLHKEDSHHLDKWIRFAASSKAKIIDFHRKISDYRVEEAPHFPLEALDAQGSSFVQSLSLASVSIKPRSGICRFTILRRLVLSSVQIFGDFPGLLAKCSRLEDLEIKWCSGVDDLIVPHTLDKLQHLLIAGMDVQMVEFHATDLAHFEYKGRVTPIVLHGCLKLEKATIAFEASNVLPHAFNVIPSISPVKILIVRAFISKYGQSLELPLRPQGMFMHLRHMTCKIIVLARDVNDYNGVLQLAHWLDSAPRLETLDLHMSYLRSGAFVSAEVAGVEAPCMRRHDHLKTVFMSGFQCYKSQIELACCILGNASVLEQLTVEAIWGDDDYRRICEWAEVTSKRFGKVITVLDAPLNSE

SEQ ID NO: 26854 - DNA, 1068 bp, Triticum aestivum
atttccggccctgacggcgatagacagaaacgcctcctcgtccgaaaagaggccatctcgtgagcttcctcgccttcgcacgcggaccgccggcaccggccaccaccgccgccatgttgcgcgcagccgcttcccgcctcctcgtgcccctccggaggccctccctgtctccggcaccctccacggcggcctgcactctgcggcacctccgcctcttctccccgccgccgcagccgcgtcggggtccggatgcggaggtgacgccggcggaggcgcggcgtctggtgcggctcgtgggcgtggaggcgctcaagaggcggctgcgggaggaagggcggggcgaggtggtcggctacggggagctcctcgacgcctgcgtggaggccggtgcggcccgcacgcgcggcgaggcggaggtgttggcccgagccatggacgactccggcgtcgtgcttctcttccgggacaaggcgtacctccaccccgagaaggttgtggacctggtcagaagggcggtgccgcttgcactcgcaccagacaacgacacgagacaggcagagtttaagcagctccaggaaaagaaggaagagatcgacaagctggcacacaagcaagtccggcgagtcctgtggactggcttagggttcttcatgctccaggttgggatcttcttccgtctcacgttctgggagttctcatgggacgtgatggagccgattgccttcttcacgaccacctcggggctgctggttggctatgcctacttcgtcatcacctcaagggacccgacgtatcaagacttcatggagaggatgtttgagtcgaggaggagaaagctttgcgtgaagcatggtttcaacatggagaagtacctggagctgcagaaacattgcaagtgccctctggaaggccatcattctcaggggcatgactcgcaacacctgagctaaagtttctcagttgtttcttgatgctgacagtgtcatctctagcttttagaagagcggccgtttgcattatcttatactgagtttgtattaccaaagtgatatacgacaaattttatct

SEQ ID NO: 26855 - protein, 278 aa, Triticum aestivum
MLRAAASRLLVPLRRPSLSPAPSTAACTLRHLRLFSPPPQPRRGPDAEVTPAEARRLVRLVGVEALKRRLREEGRGEVVGYGELLDACVEAGAARTRGEAEVLARAMDDSGVVLLFRDKAYLHPEKVVDLVRRAVPLALAPDNDTRQAEFKQLQEKKEEIDKLAHKQVRRVLWTGLGFFMLQVGIFFRLTFWEFSWDVMEPIAFFTTTSGLLVGYAYFVITSRDPTYQDFMERMFESRRRKLCVKHGFNMEKYLELQKHCKCPLEGHHSQGHDSQHLS

SEQ ID NO: 26856 - protein, 187 aa, Triticum aestivum
FPALTAIDRNASSSEKRPSRELPRLRTRTAGTGHHRRHVARSRFPPPRAPPEALPVSGTLHGGLHSAAPPPLLPAAAAASGSGCGGDAGGGAASGAARGRGGAQEAAAGGRAGRGGRLRGAPRRLRGGRCGPHARRGGGVGPSHGRLRRRASLPGQGVPPPREGCGPGQKGGAACTRTRQRHETGRV

SEQ ID NO: 26857 - protein, 172 aa, Triticum aestivum
MDDSGVVLLFRDKAYLHPEKVVDLVRRAVPLALAPDNDTRQAEFKQLQEKKEEIDKLAHKQVRRVLWTGLGFFMLQVGIFFRLTFWEFSWDVMEPIAFFTTTSGLLVGYAYFVITSRDPTYQDFMERMFESRRRKLCVKHGFNMEKYLELQKHCKCPLEGHHSQGHDSQHLS

SEQ ID NO: 26858 - DNA, 1349 bp, Triticum aestivum
gtccccgtcccctcgcttccaagctactaccccgagcgcgcgagagcgagagcgagccagccagcgccacttgactccagctccttccttccctccccatccttccgtcctcggcttgcacatcacatcgcgtcaccggagccagctacgagcgcgtgagaccagcagcgggacagcatggaggggggcggcgaggggaagggccgggcggcgccggcgacggcggcggggggagggttcggagggtacgagtcggccggggaccgcaagtggtggccctggctcgtgcccaccgtcatcgtcgcctgcgtcgccgtcttcgtcgtcgagatgtgggtcaacgactgccccaggcacggcagcgcgctcggcggcggctgcgtcgcgggattcctccggcgattctccttccagccgctccgcgagaacccgctcctcgggccctcctccaccactttggggaaaatgggagctctggactggaacaaggttgtccatcagcaccaggggtggcgtctcattagctgcatctggctccatgctggcctgatccatttggttgtgaacatgctaagtctgctgtttattgggattcgtcttgagcagcaatttgggtttgttcgcattggcgctatctacctactgtctggtttcggtggcagcgtgatgtctgcactcttcctacgaaataactacatctctgttggtgcatctggagctttatttgggctgcttggatctatgctttctgagctacttatgaactggactatttactccaacaaggttgcagccataataacccttctgtttataatcgcgatcaacgtggcaatcgggatactaccgcatgctgataactttgctcacattggtggattcctgaccgggttccttttggggttcgttctgctggcaaggccacaattcggttggttggaacgcagcgagctgccccataccaatcagccccccaagtacaaaccataccaatatgtcctgtgggttgtggcactcgtcttgctgcttgtcgggttcacgctttcgttggtgatgctcttcaagggcaagaacgggaatgacggctgccactggtgccactacctgaactgtgtgccgacgtcgaggtggaagtgcgatacctaggcggttccttctttcggttttcgacgaaaacccgtagtgttgtgaggaccattttcatgcttttatgtttgtagataggaacttgttctttagtgaactctgtaaatttgtttggcaggctctgtaagtttgtaactcgagcactctccagtgatttcatgcgtgtttttgtgttaaaaaaaaaaaaaaaaaaaaaaaaaaaa

SEQ ID NO: 26859 - protein, 322 aa, Triticum aestivum
MEGGGEGKGRAAPATAAGGGFGGYESAGDRKWWPWLVPTVIVACVAVFVVEMWVNDCPRHGSALGGGCVAGFLRRFSFQPLRENPLLGPSSTTLGKMGALDWNKVVHQHQGWRLISCIWLHAGLIHLVVNMLSLLFIGIRLEQQFGFVRIGAIYLLSGFGGSVMSALFLRNNYISVGASGALFGLLGSMLSELLMNWTIYSNKVAAIITLLFIIAINVAIGILPHADNFAHIGGFLTGFLLGFVLLARPQFGWLERSELPHTNQPPKYKPYQYVLWVVALVLLLVGFTLSLVMLFKGKNGNDGCHWCHYLNCVPTSRWKCDT

SEQ ID NO: 26860 - protein, 271 aa, Triticum aestivum
MWVNDCPRHGSALGGGCVAGFLRRFSFQPLRENPLLGPSSTTLGKMGALDWNKVVHQHQGWRLISCIWLHAGLIHLVVNMLSLLFIGIRLEQQFGFVRIGAIYLLSGFGGSVMSALFLRNNYISVGASGALFGLLGSMLSELLMNWTIYSNKVAAIITLLFIIAINVAIGILPHADNFAHIGGFLTGFLLGFVLLARPQFGWLERSELPHTNQPPKYKPYQYVLWVVALVLLLVGFTLSLVMLFKGKNGNDGCHWCHYLNCVPTSRWKCDT

SEQ ID NO: 26861 - protein, 226 aa, Triticum aestivum
MGALDWNKVVHQHQGWRLISCIWLHAGLIHLVVNMLSLLFIGIRLEQQFGFVRIGAIYLLSGFGGSVMSALFLRNNYISVGASGALFGLLGSMLSELLMNWTIYSNKVAAIITLLFIIAINVAIGILPHADNFAHIGGFLTGFLLGFVLLARPQFGWLERSELPHTNQPPKYKPYQYVLWVVALVLLLVGFTLSLVMLFKGKNGNDGCHWCHYLNCVPTSRWKCDT

SEQ ID NO: 26862 - DNA, 1582 bp, Triticum aestivum
atttttcttcttccccccctgcccagatcaagaaaccgtgtcctagaatccaccgagatcgctggaaaggcgacatcctccggagactcttctcgctcccctcgtcggcacggatcgagcggttgttttagttggaagatttctcctttcttttccttctggtcgctggccggagacacggcgtgtcggggcgcgcggagatggtggccgaggcggaggtgatgcatcagcagccggcgcccgttctggaggtgcagtaccgccggtgcgtcgccaagggggccgggatgtcggcggtcgccgtgccggaggtggaggtggaggtcgccgtcgagctgcctcgcatgggattggcgaacaccgatggtgcgacgagtgtgtccgctgagacactacagtttgtacccaatattcggtctggaagctttgctgatatcggacctaggaggtacatggaagatgaacacatccggatagatgatctttcagctcatcttggctcgctgttggtgtgcccactacctagtgccttctatggggtctttgatggccatgggggtccggatgctgcagcctacatgaaaaggcatgccatgaggttcctgtttgaggatagagagttcccacaagcattgcaagtggatgatgtattccttcagtccgtcgaggaatgcattcgcagcgcgttcttgcaagccgatcttgctctggcagataatttagacatcagccgctcctccggaactaccgcactcgcagcattagtatttgggaggcaactgttggttgcgaacaccggtgactgccgagcggtcctttgccggagaggcatagcgatggagatgtctcgggaccacagggcaaactacgccgaggagtgcgagagggtggccgcctccggcggatacatcgaggacgggtacctcaacggggtgctctcgttgacgcgtgccctaggcgactgggacatgaaggtgcccgactgctccacgtcgcccctcatcgcggagcccgagttccagcaggcgacgctgagcgaggacgacgagttcctcatcatgggctgcgacggcatctgggacgtgatgacgagccagcacgcggtgagcgtggtccggcggggcctgcggcagcacgacgaccccgagcggtgcgcgcgggagctcgtcatggaggcgaagcggctcgagacggccgacaacctgaccgtcatcgtggtgtgcttcgggtcggagctcgggtcaccgccgccgccccccgctgccgcggcggcgaggccgaggagctgcaagggcctgtcggcggaggccctgtgcaacctgaggagctggctggagactgaccgctagctctagcttgagatgcctgctctgctcctgctcccctacctagtgctgctggtcggttcgttcccacgctgtaaatatgctgacatcggtcgaggaatcgtaactgccacttcccttttagtccctaccatttttttcaggcggtagcccggcagttttgtaggggcattctcccattgtttcctgtgcttttcacaaaaaaaaaaaaaaaaaagcttatcgataccgtcgac

SEQ ID NO: 26863 - protein, 382 aa, Triticum aestivum
MVAEAEVMHQQPAPVLEVQYRRCVAKGAGMSAVAVPEVEVEVAVELPRMGLANTDGATSVSAETLQFVPNIRSGSFADIGPRRYMEDEHIRIDDLSAHLGSLLVCPLPSAFYGVFDGHGGPDAAAYMKRHAMRFLFEDREFPQALQVDDVFLQSVEECIRSAFLQADLALADNLDISRSSGTTALAALVFGRQLLVANTGDCRAVLCRRGIAMEMSRDHRANYAEECERVAASGGYIEDGYLNGVLSLTRALGDWDMKVPDCSTSPLIAEPEFQQATLSEDDEFLIMGCDGIWDVMTSQHAVSVVRRGLRQHDDPERCARELVMEAKRLETADNLTVIVVCFGSELGSPPPPPAAAAARPRSCKGLSAEALCNLRSWLETDR

SEQ ID NO: 26864 - protein, 375 aa, Triticum aestivum
MHQQPAPVLEVQYRRCVAKGAGMSAVAVPEVEVEVAVELPRMGLANTDGATSVSAETLQFVPNIRSGSFADIGPRRYMEDEHIRIDDLSAHLGSLLVCPLPSAFYGVFDGHGGPDAAAYMKRHAMRFLFEDREFPQALQVDDVFLQSVEECIRSAFLQADLALADNLDISRSSGTTALAALVFGRQLLVANTGDCRAVLCRRGIAMEMSRDHRANYAEECERVAASGGYIEDGYLNGVLSLTRALGDWDMKVPDCSTSPLIAEPEFQQATLSEDDEFLIMGCDGIWDVMTSQHAVSVVRRGLRQHDDPERCARELVMEAKRLETADNLTVIVVCFGSELGSPPPPPAAAAARPRSCKGLSAEALCNLRSWLETDR

SEQ ID NO: 26865 - protein, 353 aa, Triticum aestivum
MSAVAVPEVEVEVAVELPRMGLANTDGATSVSAETLQFVPNIRSGSFADIGPRRYMEDEHIRIDDLSAHLGSLLVCPLPSAFYGVFDGHGGPDAAAYMKRHAMRFLFEDREFPQALQVDDVFLQSVEECIRSAFLQADLALADNLDISRSSGTTALAALVFGRQLLVANTGDCRAVLCRRGIAMEMSRDHRANYAEECERVAASGGYIEDGYLNGVLSLTRALGDWDMKVPDCSTSPLIAEPEFQQATLSEDDEFLIMGCDGIWDVMTSQHAVSVVRRGLRQHDDPERCARELVMEAKRLETADNLTVIVVCFGSELGSPPPPPAAAAARPRSCKGLSAEALCNLRSWLETDR

SEQ ID NO: 26866 - DNA, 1580 bp, Triticum aestivum
ggttctgacccccgattcggtccgtcgattgtgatttcccctcgatttcgtgcgggattagtggccggaattaatcgccatgacggcgtcgtcgccgatggtgctgtccctcctgctcttcgcctcgctcacggcgctgctcgtcctggcccctcgcacggcgtcgccgccgctgccgctggccgtggtggttggggacgaggaggcgccgccggccgccgctggtggtgctgcggggatcagcggcggaggggcgggagttgaggagggaccggaggacctcgcgctataccggcgcgtgacgctcgacgccggcgagggcgcggcggtggcgtccaaggtggcgttcatgttcctgaccaactccgacctcaccttcgcgccgctttgggagcgcttcttcgcggggcacgctgaccagttcaacgtctacgtgcacgcagacccggcggtgcggctgcggctcccccctacgccttccttccggggccgcttcgtcgcggccaagccgacgcggcgcggggacccgagcctcatcgctgcggcgcggcggctgcttgtcgccgcgctactcgacgacccggccaacgcctacttcgcgctgctctcgcagcactgcgtcccgctccactccttcccgcggctctacgaggcgctcttcccgcccaaggccgcgcaccaccaccgcctcccgagctatatcgaggtgctcaccggcgagccccagatgcccgcgcgctacgtggcgcgcggtgacgacgccatgctcccggaggtgcccttcgaccggttccgcatcggctcccagttcttcacgctggcccgccgccacgccgtgctagtcgtccgcgagcgccgtctctggcgaaagtttagggagccgtgcctgccggagtcgcagggctcgtgctacccggaggagcactatttcccgacgcttctcgacatggccgaccccgccggctgcacccggtacacgctcacgcgcgtcaactggaccgacagcttcgagggccacccgcacacgtattccgcgccagaggtgtcgccgcggctcatcgccgagctacgccagtccaacagctccacctatgagcacatgttcgcgcgcaagttcgcgcccgactgccttggcccgctcatggccatcgccgacaccgtcatcttcaaagattgatcgatgcggtgctctgcatcatagatacacgtaggaggtctatccgttgagagttgcgcgtgcgagaagacgaaagcagtgtcgttattctccgttgaatcttcacacggttcagactggtgctttgcctctgtgccctccaccgttcttctcctcctggtacttctatgtagacttaagtggcaacaacctaatgcaaagcggcaggtgttgcatctgatggtcagtccatccatccactgtatttttcctacctcgtgcggctgcctaaggctgctgttctgttgaaatgcgtaaaaggatggattgtggcggtgttctgttcagctgaaactgaaaaggaactttgtaccggtttatttcagcttgtgtacataaccaaggaataaaataatcattctgc

SEQ ID NO: 26867 - protein, 365 aa, Triticum aestivum
MTASSPMVLSLLLFASLTALLVLAPRTASPPLPLAVVVGDEEAPPAAAGGAAGISGGGAGVEEGPEDLALYRRVTLDAGEGAAVASKVAFMFLTNSDLTFAPLWERFFAGHADQFNVYVHADPAVRLRLPPTPSFRGRFVAAKPTRRGDPSLIAAARRLLVAALLDDPANAYFALLSQHCVPLHSFPRLYEALFPPKAAHHHRLPSYIEVLTGEPQMPARYVARGDDAMLPEVPFDRFRIGSQFFTLARRHAVLVVRERRLWRKFREPCLPESQGSCYPEEHYFPTLLDMADPAGCTRYTLTRVNWTDSFEGHPHTYSAPEVSPRLIAELRQSNSSTYEHMFARKFAPDCLGPLMAIADTVIFKD

SEQ ID NO: 26868 - protein, 359 aa, Triticum aestivum
MVLSLLLFASLTALLVLAPRTASPPLPLAVVVGDEEAPPAAAGGAAGISGGGAGVEEGPEDLALYRRVTLDAGEGAAVASKVAFMFLTNSDLTFAPLWERFFAGHADQFNVYVHADPAVRLRLPPTPSFRGRFVAAKPTRRGDPSLIAAARRLLVAALLDDPANAYFALLSQHCVPLHSFPRLYEALFPPKAAHHHRLPSYIEVLTGEPQMPARYVARGDDAMLPEVPFDRFRIGSQFFTLARRHAVLVVRERRLWRKFREPCLPESQGSCYPEEHYFPTLLDMADPAGCTRYTLTRVNWTDSFEGHPHTYSAPEVSPRLIAELRQSNSSTYEHMFARKFAPDCLGPLMAIADTVIFKD

SEQ ID NO: 26869 - protein, 275 aa, Triticum aestivum
MFLTNSDLTFAPLWERFFAGHADQFNVYVHADPAVRLRLPPTPSFRGRFVAAKPTRRGDPSLIAAARRLLVAALLDDPANAYFALLSQHCVPLHSFPRLYEALFPPKAAHHHRLPSYIEVLTGEPQMPARYVARGDDAMLPEVPFDRFRIGSQFFTLARRHAVLVVRERRLWRKFREPCLPESQGSCYPEEHYFPTLLDMADPAGCTRYTLTRVNWTDSFEGHPHTYSAPEVSPRLIAELRQSNSSTYEHMFARKFAPDCLGPLMAIADTVIFKD

SEQ ID NO: 26870 - DNA, 1338 bp, Triticum aestivum
agccacacacagagccagtgacacagagatagttcaaccatggcgaccagaggcagagcaaccatccctctcctcttcctcctgggcacaagccttctcttcgccgcggctgtttcggcctcccatgacgaggaggaggacaggcgcggtgggcgctcgcttcagcggtgcgtgcagcggtgccagcaggaccggccgcggtactctcatgcccggtgcgtgcaggagtgccgggacgaccagcagcagcacggaaggcacgagcaggaggagcagggccgcgggcatggccggcacggcgagggggagcgtgaggaggagcagggccgtggccgtgggcggcgcggccagggagagcgtgaggaggagcagggccgtggacgtgggcggcgcggcgagggagagcgtgatgaggagcacggggatggccggcggccgtacgtgttcggcccgcgcagcttccgccgcatcatccggagcgaccacgggttcgtcaaggcccttcgcccgttcgacgaagtgtccaggctcctccggggcatcaggaactaccgtgtcgccatcatggaggtgaacccgcgcgcgttcgtcgtgccgggactcacggacgcagacggcgtcggctacgtcgctcaaggcgagggggtgctgacggtgatcgagaacggcgagaagcggtcctacaccgtcaggcaaggcgatgtgatcgtggcgccggcggggtccatcatgcacctggccaacaccgacggccggaggaagctggtcatcgccaagattctccacaccatctccgtccccggcaagttccagtatttctcggccaagcctctcctcgctagtttgagcaaacgcgtgctcacagcggcgttaaagacctcggatgagcggctgggtagtctcttgggcagccgccaaggcaaggaggaggaggagaagtccatctccatcgtccgcgcgtcagaggagcagctccgcgagctgcgtcgccaggcgtccgagggtgaccagggccaccactggcctctccccccgttccgcggcgactcgcgcgacaccttcaacctcctggagcagcgccccaagatcgccaaccgccatggccgcctctacgaggccgacgcccgtagcttccacgccctcgcccaacacgacgtccgcgtcgccgtggccaacatcacgccgggttctatgaccgcgccctacctgaacacccagtcgttcaagctcgccgtcgtgctggaaggcgagggcgaggtggagatcgtctgcccgcacctcggccgcgacagcgagcgccgcgagcaagagcacggcaagggcaggtggaggaccgag

SEQ ID NO: 26871 - protein, 433 aa, Triticum aestivum
MATRGRATIPLLFLLGTSLLFAAAVSASHDEEEDRRGGRSLQRCVQRCQQDRPRYSHARCVQECRDDQQQHGRHEQEEQGRGHGRHGEGEREEEQGRGRGRRGQGEREEEQGRGRGRRGEGERDEEHGDGRRPYVFGPRSFRRIIRSDHGFVKALRPFDEVSRLLRGIRNYRVAIMEVNPRAFVVPGLTDADGVGYVAQGEGVLTVIENGEKRSYTVRQGDVIVAPAGSIMHLANTDGRRKLVIAKILHTISVPGKFQYFSAKPLLASLSKRVLTAALKTSDERLGSLLGSRQGKEEEEKSISIVRASEEQLRELRRQASEGDQGHHWPLPPFRGDSRDTFNLLEQRPKIANRHGRLYEADARSFHALAQHDVRVAVANITPGSMTAPYLNTQSFKLAVVLEGEGEVEIVCPHLGRDSERREQEHGKGRWRTE

SEQ ID NO: 26872 - protein, 258 aa, Triticum aestivum
MEVNPRAFVVPGLTDADGVGYVAQGEGVLTVIENGEKRSYTVRQGDVIVAPAGSIMHLANTDGRRKLVIAKILHTISVPGKFQYFSAKPLLASLSKRVLTAALKTSDERLGSLLGSRQGKEEEEKSISIVRASEEQLRELRRQASEGDQGHHWPLPPFRGDSRDTFNLLEQRPKIANRHGRLYEADARSFHALAQHDVRVAVANITPGSMTAPYLNTQSFKLAVVLEGEGEVEIVCPHLGRDSERREQEHGKGRWRTE

SEQ ID NO: 26873 - DNA, 613 bp, Triticum aestivum
atcgaaaagttctcactcaccgctgtccattcttctccattcgctttgctaacacagtccccagtagcagcagcagcaggacagctcagtctcgggtgaagctgagcagatcgatggcgctctctcgtcgcatggctgcgtccgccctcctgctgctggtcctcctcgtcgccacagagatgggggcgacgacggtcaagctggctgaggcgcgggactgcctgtcccagagccacaagttcaagggcgcctgcctcagcagcagcaactgcgccgccgtctgccgcaccgagaacttccccgacggggagtgccacacgcacaacttcgcccgcaagtgcttctgcaagagggcctgctagcccgcctgctcgatcgccccggccgccctgccggccagcgccgccacgtccgatgctagctagctgttagatcgtccgtgccttttggtagatctgttcgtcagtccgttcccgttcgtcactagtagctgttcgtgtggctgtctcccgtaataaagtacgaaatcaaccggggtctcggtagtttggttcgcagcacgtcgtgtttgtcgctgctttgtgtggtaatgtaatatggtccttgtttcagt

SEQ ID NO: 26874 - protein, 119 aa, Triticum aestivum
RKVLTHRCPFFSIRFANTVPSSSSSRTAQSRVKLSRSMALSRRMAASALLLLVLLVATEMGATTVKLAEARDCLSQSHKFKGACLSSSNCAAVCRTENFPDGECHTHNFARKCFCKRAC

SEQ ID NO: 26875 - protein, 82 aa, Triticum aestivum
MALSRRMAASALLLLVLLVATEMGATTVKLAEARDCLSQSHKFKGACLSSSNCAAVCRTENFPDGECHTHNFARKCFCKRAC

SEQ ID NO: 26876 - protein, 76 aa, Triticum aestivum
MAASALLLLVLLVATEMGATTVKLAEARDCLSQSHKFKGACLSSSNCAAVCRTENFPDGECHTHNFARKCFCKRAC

SEQ ID NO: 26877 - DNA, 1968 bp, Triticum aestivum
aaagggaccggcgctcgcggcgaccaggaaggcaaggaacgcgtccggttcttggataagcggaggcgcggcaccgcaccgcacgcggcattcgtcaatataagaaggccgccgggggtgggaggcggagggacaactccgtctacacaagcgcgcgcgcacccaccaaagtcttctgccgatttcttcgtctccgctctcctcgtgttcgggttgttggccgagcgacagttgggattctgtagaggaggttgaaagtacttgaaacaaatggggattggggatgcatcacctagtgaaaaccagtctgcacacaaggaacagagggatgagaccacgccacttctcccggtcaaggcggaagaggaagatgggatccatgagttcaatggagcgtctttctcgggtgcagttttcaatctgtcgacaaccatcgtgggggctggaattatggccctgccagcaagtatcaagatgctaggcattatccctggtattttgatgatcatccttgtggcattgctcactgaggcatcaattgacatgatggtcaggtgcagccaccaggccaagattacatcctatggctggctcatgggtgactcttttggtcaatgggggaggattgcactgcaagcatctgtggtcataaacaacgttggcgtcatgattgtatacatgattatcatcggtgatgtgctatcgggaacatctacaactggtgttcatcaccggggtatctttgaggggtggtttgggcctcatttctggaattctcgtccagttgttctccttgccacaactatttttgtgtttgctccattggtgagctttaagcgattggattcattgagatacacatctgctctgtcagttgctcttgctgtggtttttgttgtcatcactgctggaattgctattctcagactgatagaagggaccgcggagattcccaaactcttccctgagatacatgaactcaattccatctgggaactctttacagctgtgccggttcttgtcactgcctatatttgccactacaatgttcacagcatcgataacgaactggaagatagaagtcagactaagccaattgtgcgaacttcattggctctctgttcaagtgtttatgttgcaacaagcttctttgcatatttactcttcggcgagggtaccctctccgatgtgctcgctaattttgactctgaccttcatattccattcagctctgtcttcaatgatatagtcagagtgagctatgtagtccatgtcatgctggtcttccctatagtcttctttgcccttaggctcaacctggatggactcctcttccccacctcaaggcacatttctcatgacaaccgaaggtttatcattatcaccgtctcactcctcgctgtgatttatcttgctgccaacttcataccaagcatctgggatgcgttccagttcaccggtgctacagctgctgtcctgattggtttcatctttcctgccatgatcatactgagggattcttatgggattgcaaccaagcgcgacaaggttttagctgtaaccatgattgtgcttgctgtgctctccaattcagtggccctgtacagcgatgcgatgagcatcttctacaggaaggtggaggcctagtctgctccatgcctccatactccaagggaataagtccaatgcacatgcacaattcggagtgattattgagctttagttagtatattgcgcagtcaagcaatgtgatttcatggtggccactaatttttgttttggacacttgagaggattttgtttgctgcatttgtctagttccttgaacatgtaatccggctcagcatctagatgagcaatttgtgatctggtcgcaggtgtttgtatttattggcaagaacaagatttttatttacttttgggggtcatgtacatgttcatattcggtcatcttgaaattgatgtttg

SEQ ID NO: 26878 - protein, 458 aa, Triticum aestivum
MGIGDASPSENQSAHKEQRDETTPLLPVKAEEEDGIHEFNGASFSGAVFNLSTTIVGAGIMALPASIKMLGIIPGILMIILVALLTEASIDMMVRCSHQAKITSYGWLMGDSFGQWGRIALQASVVINNVGVMIVYMIIIGDVLSGTSTTGVHHRGIFEGWFGPHFWNSRPVVLLATTIFVFAPLVSFKRLDSLRYTSALSVALAVVFVVITAGIAILRLIEGTAEIPKLFPEIHELNSIWELFTAVPVLVTAYICHYNVHSIDNELEDRSQTKPIVRTSLALCSSVYVATSFFAYLLFGEGTLSDVLANFDSDLHIPFSSVFNDIVRVSYVVHVMLVFPIVFFALRLNLDGLLFPTSRHISHDNRRFIIITVSLLAVIYLAANFIPSIWDAFQFTGATAAVLIGFIFPAMIILRDSYGIATKRDKVLAVTMIVLAVLSNSVALYSDAMSIFYRKVEA

SEQ ID NO: 26879 - protein, 398 aa, Triticum aestivum
MALPASIKMLGIIPGILMIILVALLTEASIDMMVRCSHQAKITSYGWLMGDSFGQWGRIALQASVVINNVGVMIVYMIIIGDVLSGTSTTGVHHRGIFEGWFGPHFWNSRPVVLLATTIFVFAPLVSFKRLDSLRYTSALSVALAVVFVVITAGIAILRLIEGTAEIPKLFPEIHELNSIWELFTAVPVLVTAYICHYNVHSIDNELEDRSQTKPIVRTSLALCSSVYVATSFFAYLLFGEGTLSDVLANFDSDLHIPFSSVFNDIVRVSYVVHVMLVFPIVFFALRLNLDGLLFPTSRHISHDNRRFIIITVSLLAVIYLAANFIPSIWDAFQFTGATAAVLIGFIFPAMIILRDSYGIATKRDKVLAVTMIVLAVLSNSVALYSDAMSIFYRKVEA

SEQ ID NO: 26880 - protein, 390 aa, Triticum aestivum
MLGIIPGILMIILVALLTEASIDMMVRCSHQAKITSYGWLMGDSFGQWGRIALQASVVINNVGVMIVYMIIIGDVLSGTSTTGVHHRGIFEGWFGPHFWNSRPVVLLATTIFVFAPLVSFKRLDSLRYTSALSVALAVVFVVITAGIAILRLIEGTAEIPKLFPEIHELNSIWELFTAVPVLVTAYICHYNVHSIDNELEDRSQTKPIVRTSLALCSSVYVATSFFAYLLFGEGTLSDVLANFDSDLHIPFSSVFNDIVRVSYVVHVMLVFPIVFFALRLNLDGLLFPTSRHISHDNRRFIIITVSLLAVIYLAANFIPSIWDAFQFTGATAAVLIGFIFPAMIILRDSYGIATKRDKVLAVTMIVLAVLSNSVALYSDAMSIFYRKVEA

SEQ ID NO: 26881 - DNA, 1147 bp, Triticum aestivum
ctcacccaatacccacgagaacctctagctaccgtagcttagctgagcttcctagctgtagccatggccaagtatttccagagtgctcctgttagcaatgaagcattgaagcacaaggagattctgttggacggcctgtacatgcaccaggaccttgacggatcaccaaatcagaaccagaaaactatagtgaatcctaacctccctctgcagtttggctgcacagtggctaatgactggaccatatatgatggccttggccccgataagaagcttgttgcgcgtgcacaagggccacatatgggggcaggagtagccaaaggaagctggttcatatgtttcaacatggtgttcgtcgatgacaggtttgcgggttccagccttaaggtgctcggacattttgaagagccggtagaaggtgagtgggcaatccttggcgggacaggagagtttgcctatgcacaaggtgtggtcaccttcaagaaactccaggacggaagcactagggtcagacagcttcagatacgtgccatctgcctcagctttccatcgtcactttcaatgcctacgaagatggggccatggggtggaaatggaggctccattcaagacatcaccacaggaaccccgatgcgcctgcaaagtgtgacactcagcagcgagagcagctggattgtctctcttgcatttacttatattgacaaacttggaaagaggcgcaacgaaggcccctggggtcctgacaaagggaacagtcaaaccatcgagttcggacctaaagaatatgtgacggaaatatcagggacaattgacaatgtcatatcgtcacttgttatcacgacaaacatcaaaaagtatggaccgtttgggcatgagaagggcaaccgtttcagcgccgccgtgccagaaaacacatgtgttgtgggattctttgccaggaccgggaatgctcttgatgccattggcgtttaccacggacccatagtggtttgaactggatttaatgctgctttgctttagtttatggcaatctcatgcgagttcattttaagggaaagtgtgtttgttccacatttgttttccagcaataacatggcaagggtcatgcttacgtctgtgatccatgtctctctagtgcaagagtctt

SEQ ID NO: 26882 - protein, 309 aa, Triticum aestivum
MAKYFQSAPVSNEALKHKEILLDGLYMHQDLDGSPNQNQKTIVNPNLPLQFGCTVANDWTIYDGLGPDKKLVARAQGPHMGAGVAKGSWFICFNMVFVDDRFAGSSLKVLGHFEEPVEGEWAILGGTGEFAYAQGVVTFKKLQDGSTRVRQLQIRAICLSFPSSLSMPTKMGPWGGNGGSIQDITTGTPMRLQSVTLSSESSWIVSLAFTYIDKLGKRRNEGPWGPDKGNSQTIEFGPKEYVTEISGTIDNVISSLVITTNIKKYGPFGHEKGNRFSAAVPENTCVVGFFARTGNALDAIGVYHGPIVV

SEQ ID NO: 26883 - protein, 283 aa, Triticum aestivum
MHQDLDGSPNQNQKTIVNPNLPLQFGCTVANDWTIYDGLGPDKKLVARAQGPHMGAGVAKGSWFICFNMVFVDDRFAGSSLKVLGHFEEPVEGEWAILGGTGEFAYAQGVVTFKKLQDGSTRVRQLQIRAICLSFPSSLSMPTKMGPWGGNGGSIQDITTGTPMRLQSVTLSSESSWIVSLAFTYIDKLGKRRNEGPWGPDKGNSQTIEFGPKEYVTEISGTIDNVISSLVITTNIKKYGPFGHEKGNRFSAAVPENTCVVGFFARTGNALDAIGVYHGPIVV

SEQ ID NO: 26884 - protein, 230 aa, Triticum aestivum
MGAGVAKGSWFICFNMVFVDDRFAGSSLKVLGHFEEPVEGEWAILGGTGEFAYAQGVVTFKKLQDGSTRVRQLQIRAICLSFPSSLSMPTKMGPWGGNGGSIQDITTGTPMRLQSVTLSSESSWIVSLAFTYIDKLGKRRNEGPWGPDKGNSQTIEFGPKEYVTEISGTIDNVISSLVITTNIKKYGPFGHEKGNRFSAAVPENTCVVGFFARTGNALDAIGVYHGPIVV

SEQ ID NO: 26885 - DNA, 1060 bp, Triticum aestivum
aaattcgatccgtaatagcgttttttcgcgtactcccgagaccccaatcttttccccctctcgtcgcatcggcggcggcgacaggacatcgggcggcggcggcggcggcggcggctggacagccgcagaacgaaggaagggctcccctgtagcgccgttcctcgtcccgatccgcacggatccgccccacctaagggccccgtgcacaaggagcaaagatgataaaccttttcaagatcaaggggcagaagaacgaagaggcagccaactcgaaaggggggcctcccgtcaagaagcaaagtcctggggaattacgtctccataaagatattgctgaacttaaccttccaaagacaactaaaatttcctttccaaatggaaaggatgatctcatgaactttgaagccactctacgacctgatgaaggatactacgtaggtgggacatttactttcaccttccaagtatctccttcctaccctcacgaggctctgaaggtcaagtgcaagaccaaggtttaccatcctaatattgacctagaaggaaatgtctgcctgaacattctgcgtgaagactggaagcctgtcttgaacatcaacaccataatatatggcttaaaccttcttttctcacaacccaatgacgaggaccccttgaatcatgaagccgcggccgtcctccgagacaacccacagaagttccagagaaatgttcaaacggcgatgtcgggaggctatgttgataacacccatttcccaaggtgcaagtaaggtctgctatgtggagctctggttccgactcttgcccagttgccctgaatgcccttgcacagtctgaaggatgtggcatgtacccaggaaatgtatcgcatttgtgttagacgtgactgttattatgcttgtttggtggatgtaccggagtcatgcatgttgaagaaacatgctaagcagaaacaaaaacctcgcctgttattcagctgaaaagttggcggaagtgttccaagcgcagcaatcatatgagcatataactgaattatgaaaaataaaagagtctctgggcc

SEQ ID NO: 26886 - protein, 183 aa, Triticum aestivum
MINLFKIKGQKNEEAANSKGGPPVKKQSPGELRLHKDIAELNLPKTTKISFPNGKDDLMNFEATLRPDEGYYVGGTFTFTFQVSPSYPHEALKVKCKTKVYHPNIDLEGNVCLNILREDWKPVLNINTIIYGLNLLFSQPNDEDPLNHEAAAVLRDNPQKFQRNVQTAMSGGYVDNTHFPRCK

SEQ ID NO: 26887 - protein, 125 aa, Triticum aestivum
MNFEATLRPDEGYYVGGTFTFTFQVSPSYPHEALKVKCKTKVYHPNIDLEGNVCLNILREDWKPVLNINTIIYGLNLLFSQPNDEDPLNHEAAAVLRDNPQKFQRNVQTAMSGGYVDNTHFPRCK

SEQ ID NO: 26888 - protein, 107 aa, Triticum aestivum
NSIRNSVFSRTPETPIFSPSRRIGGGDRTSGGGGGGGGWTAAERRKGSPVAPFLVPIRTDPPHLRAPCTRSKDDKPFQDQGAEERRGSQLERGASRQEAKSWGITSP

SEQ ID NO: 26889 - DNA, 554 bp, Triticum aestivum
  misc_feature (536)..(538): n is a, c, g, or t
aaaccagcaagcttcacacacttccttccttcctgttgtggctcctgtacatgcgcgctagcctcgcctcgtacgcgcaagacctcgccatgcctgccttggacgtcatgccggagaaggcccaccacccggccatgtcgccgtcgcaccacggccacgggtgggacgccagcggcgcccccacccccatgcacaagaggctggacggcaaggtggccattgtcaccggcggcgcgcggggcatcggggaggccatcgtcaggctcttcgtcaagcacggcgccaaggtggtcatcgcggacatcgacgacgccgccggcgaggcgctggccgcctcgctcggcccgcacgtcgccttcgtgcgctgcgacgtgtccgtggaggaggacgtggagcgcgccgtcgaccgcgccgtgtcgcgctacggccgcctcgacgtcttctgcaacaacgccggggtgctgggccgccagaacagcgccgccaagagcatcctcacgttcgacgccggcgagttcgaccgcgtgctccgcgtnnncgcgctgggcaccgcg

SEQ ID NO: 26890 - protein, 184 aa, Triticum aestivum
  misc_feature (178)..(179): Xaa can be any naturally occurring amino acid
TSKLHTLPSFLLWLLYMRASLASYAQDLAMPALDVMPEKAHHPAMSPSHHGHGWDASGAPTPMHKRLDGKVAIVTGGARGIGEAIVRLFVKHGAKVVIADIDDAAGEALAASLGPHVAFVRCDVSVEEDVERAVDRAVSRYGRLDVFCNNAGVLGRQNSAAKSILTFDAGEFDRVLRXXALGTA

SEQ ID NO: 26891 - protein, 184 aa, Triticum aestivum
  misc_feature (179)..(180): Xaa can be any naturally occurring amino acid
KPASFTHFLPSCCGSCTCALASPRTRKTSPCLPWTSCRRRPTTRPCRRRTTATGGTPAAPPPPCTRGWTARWPLSPAARGASGRPSSGSSSSTAPRWSSRTSTTPPARRWPPRSARTSPSCAATCPWRRTWSAPSTAPCRATAASTSSATTPGCWAARTAPPRASSRSTPASSTACSAXXRWAP

SEQ ID NO: 26892 - protein, 168 aa, Triticum aestivum
  misc_feature (162)..(163): Xaa can be any naturally occurring amino acid
MRASLASYAQDLAMPALDVMPEKAHHPAMSPSHHGHGWDASGAPTPMHKRLDGKVAIVTGGARGIGEAIVRLFVKHGAKVVIADIDDAAGEALAASLGPHVAFVRCDVSVEEDVERAVDRAVSRYGRLDVFCNNAGVLGRQNSAAKSILTFDAGEFDRVLRXXALGTA

SEQ ID NO: 26893 - DNA, 1387 bp, Triticum aestivum
ccttcagccccaaatccctatcccaaatttccaaggaatcatggcgcgctgctccccgccgctgctgcgccgcttcttctgctgcgccgccaaatctgcctcggccacatccgccgccgccggcaccaagaagaagaacatcgtcttcttgggatctccccaggtggcggcctcggtcctggacacgttgttggccgcgtccagctcccccgactccgcattccaggtcgctgccgtcgtgacgcagccgccggccgccaagaacagggggaggaagctgttgccgtcggccgtcgcgcagctcgcgctcgagcgtgggttccctggcgacctcatcttcacccccgagcgcgctggggaggagtcctttctgtctgacttgaagggggtgaaaccagaactttgcatcactgctgcttacgggaacattttgccacagaggtttcttgacatcccaccatgtgcaggtacagttaatatacacccaagtttgttgcctctatatcgtggtgcagctcctgtgcagagggcattgcaggatggtgttgcagaaacaggtgtttcccttgcatatactatccgtgccttggatgcaggtccagtgattgcttgtgaaaggttttctgtcgatgaatgcatcaaggcaccagagctgcttgctatactattcaatatagggtccaagctactgctggatgaactaccatccgttcttgatggttcagctaagcaaaaggcgaagccacaagatgactccaaagctacactggcgcccaagatgaattcggacgagtcctggctgacatttgacgaagaagctaaagttctccataacaaggtgcgagcatttgcaggatggcctggaacccgtgcaaaattgcaacttatgaaccaaaatggcgaacctgatgttctagacatcaaggttatcagtacgaacgtttccacgtcatgtgacaaagtcggagacgaaaacgaaatactattctcagggaactcactgctcgttccttgcagtgggtcaacttggcttgaggtcttggagcttcagctacctggaaagaaggtaaccacagctcgggacttctggaatggtttgcgtggtcagaagctgttaaaatcaacatagagggaaatctgcattcattttgcagcacatgtgcaaaggatgcaaatgccacgacggccatatgccgtgctcggtttagatgcatcttgcaggattaaagggctgttgacatttatccttagagaaatttgcaggggagcaaaaagatggtcttaatttttgtaaagaaaattatttagattttttgccctaactttttttttacaaatcaataatttttcaaaaaaaaaaaaaaaaaagcttatcgataccgtcgac

SEQ ID NO: 26894 - protein, 375 aa, Triticum aestivum
LQPQIPIPNFQGIMARCSPPLLRRFFCCAAKSASATSAAAGTKKKNIVFLGSPQVAASVLDTLLAASSSPDSAFQVAAVVTQPPAAKNRGRKLLPSAVAQLALERGFPGDLIFTPERAGEESFLSDLKGVKPELCITAAYGNILPQRFLDIPPCAGTVNIHPSLLPLYRGAAPVQRALQDGVAETGVSLAYTIRALDAGPVIACERFSVDECIKAPELLAILFNIGSKLLLDELPSVLDGSAKQKAKPQDDSKATLAPKMNSDESWLTFDEEAKVLHNKVRAFAGWPGTRAKLQLMNQNGEPDVLDIKVISTNVSTSCDKVGDENEILFSGNSLLVPCSGSTWLEVLELQLPGKKVTTARDFWNGLRGQKLLKST

SEQ ID NO: 26895 - protein, 362 aa, Triticum aestivum
MARCSPPLLRRFFCCAAKSASATSAAAGTKKKNIVFLGSPQVAASVLDTLLAASSSPDSAFQVAAVVTQPPAAKNRGRKLLPSAVAQLALERGFPGDLIFTPERAGEESFLSDLKGVKPELCITAAYGNILPQRFLDIPPCAGTVNIHPSLLPLYRGAAPVQRALQDGVAETGVSLAYTIRALDAGPVIACERFSVDECIKAPELLAILFNIGSKLLLDELPSVLDGSAKQKAKPQDDSKATLAPKMNSDESWLTFDEEAKVLHNKVRAFAGWPGTRAKLQLMNQNGEPDVLDIKVISTNVSTSCDKVGDENEILFSGNSLLVPCSGSTWLEVLELQLPGKKVTTARDFWNGLRGQKLLKST

SEQ ID NO: 26896 - DNA, 967 bp, Triticum aestivum
aaaagctccactgccattgtctgcaatggcgtctcggcctttcccacgggagtcccggcctcctagctctagctctctctccgcctccgttcaaatgggatcctcgcctgcgccttcgccttcgccttcgacttcgccgccgatgccgatgatagggagggccggcaacctcaccgtcttcatcacgccgccgtcgccggccagcaccccgcgctcctcgcgcccgtccgactccccaaggccggacttctccacccctacctcccgcacgggtacggcaccgcctccggcgcagaagagcgctagcccgcccgcgccgccggtcaagttctcgccccctgcaccgcccgtgaaggtgtccccagtgcaggtgcccccgccgcagtacggaaaggcttctgcggggggcaagcacgacggatcggcgttcggcttcttatgggacgccgtcgcgcgcgtgcaggaagcgcacgcgagcctggacgagtacgtcgccaactggttcggattggatcagtctaagtaccagtgggctctcaacgactactacgataccaccggcaaggaagtggaatatggcaaagctgggaagccaaaggagcttactactactactactactactaataataataaagtgcagaaagtttagaagcaaacttcattccaggttgtgtgtgtagtgaagcgaagttctatttgttagatcttgtcattggggcttcaagagtttttgcctctttatctacctgatgaagtagggtctacatttgacacaaggggcacttggatcatcgagagtctgaagttattgttatttgttggctcctttcagggtctgctgtaatctgagacgcaaattgcgtatttgcagtggctaaatgttgcagttcaacatcttatcacattgtcttgcattgcatatcgattgcacggcataaatttccctcatcatttcactttaccg

SEQ ID NO: 26897 - protein, 216 aa, Triticum aestivum
KAPLPLSAMASRPFPRESRPPSSSSLSASVQMGSSPAPSPSPSTSPPMPMIGRAGNLTVFITPPSPASTPRSSRPSDSPRPDFSTPTSRTGTAPPPAQKSASPPAPPVKFSPPAPPVKVSPVQVPPPQYGKASAGGKHDGSAFGFLWDAVARVQEAHASLDEYVANWFGLDQSKYQWALNDYYDTTGKEVEYGKAGKPKELTTTTTTTNNNKVQKV

SEQ ID NO: 26898 - protein, 208 aa, Triticum aestivum
MASRPFPRESRPPSSSSLSASVQMGSSPAPSPSPSTSPPMPMIGRAGNLTVFITPPSPASTPRSSRPSDSPRPDFSTPTSRTGTAPPPAQKSASPPAPPVKFSPPAPPVKVSPVQVPPPQYGKASAGGKHDGSAFGFLWDAVARVQEAHASLDEYVANWFGLDQSKYQWALNDYYDTTGKEVEYGKAGKPKELTTTTTTTNNNKVQKV

SEQ ID NO: 26899 - protein, 185 aa, Triticum aestivum
MGSSPAPSPSPSTSPPMPMIGRAGNLTVFITPPSPASTPRSSRPSDSPRPDFSTPTSRTGTAPPPAQKSASPPAPPVKFSPPAPPVKVSPVQVPPPQYGKASAGGKHDGSAFGFLWDAVARVQEAHASLDEYVANWFGLDQSKYQWALNDYYDTTGKEVEYGKAGKPKELTTTTTTTNNNKVQKV

SEQ ID NO: 26900 - DNA, 891 bp, Triticum aestivum
aaaaccctagcgccacaaccagacggcaggtaagggaggaggagagcggcggcgaagatggtgtcgctgaagctgcagaagcgcctggcctcgagcgtcctcaagtgcggcaagggcaaggtctggctcgaccccaatgaggtcaacgagatctccatggccaactcccggcagaacatccggaagctggtaaaggatggtttcatcatcaggaagcctcagaagatccactccaggtctcgtgcaaggagggcacatgaggccaagcagaagggccgtcactctggatatggtaagcgtaggggtaccagggaggctaggctccccaccaagatcctgtggatgcggaggatgcgcgtcctgaggcgccttctgcgcaagtaccgtgaggccaagaagatcgacaagcacatgtaccatgacatgtacctgaaggtcaagggtaacatgttcaagaacaagagggtcctcatggagagtatccacaagtccaaggctgagaaggcaagagagaagaccctctctgatcagtttgaggccaagcgcgccaagagcaaggcaagcagggagaggaagcatgccaggagggaggagagattggctcagggccccagagatcatgcaccagcaccagcggctgcagctccagctccagcagcagcggcaccaaagaaggccaaggccaagaagtgaaggtctgacatgaagctttagctttctggtatcatgaagggttagcctgattttggagcatctgaagttcagaactgttttctgtgcaatatctgtgtgccgcgtatgagataccttaaatatcatatcgtgtttgttctgttggatgttgcttatgcagagtttctttaaacatttcggttcaccgaacctagtttt

SEQ ID NO: 26901 - protein, 211 aa, Triticum aestivum
MVSLKLQKRLASSVLKCGKGKVWLDPNEVNEISMANSRQNIRKLVKDGFIIRKPQKIHSRSRARRAHEAKQKGRHSGYGKRRGTREARLPTKILWMRRMRVLRRLLRKYREAKKIDKHMYHDMYLKVKGNMFKNKRVLMESIHKSKAEKAREKTLSDQFEAKRAKSKASRERKHARREERLAQGPRDHAPAPAAAAPAPAAAAPKKAKAKK

SEQ ID NO: 26902 - protein, 178 aa, Triticum aestivum
MANSRQNIRKLVKDGFIIRKPQKIHSRSRARRAHEAKQKGRHSGYGKRRGTREARLPTKILWMRRMRVLRRLLRKYREAKKIDKHMYHDMYLKVKGNMFKNKRVLMESIHKSKAEKAREKTLSDQFEAKRAKSKASRERKHARREERLAQGPRDHAPAPAAAAPAPAAAAPKKAKAKK

SEQ ID NO: 26903 - protein, 116 aa, Triticum aestivum
MRRMRVLRRLLRKYREAKKIDKHMYHDMYLKVKGNMFKNKRVLMESIHKSKAEKAREKTLSDQFEAKRAKSKASRERKHARREERLAQGPRDHAPAPAAAAPAPAAAAPKKAKAKK

SEQ ID NO: 26904 - DNA, 578 bp, Triticum aestivum
aaaccctagctcgttccccttctagccttaaaccttcttcccccatctcacgaaaaagggcaacatctaagcggcggcggcggcgggcggtgaccatggcggagctgaagcggctgtcggagagccgcgacctaacccgcatcgagcggataggtgcgcactcccacatccgggggctggggctggactcctccatcgaggcccgcgatgcctcggaggggatggtcggccagctccccgcgcgccgcgccgctggactcatcctccagctcatccgccaggggaagatcgccggccgcgccgtcctcctcgcagggcagccggggaccggcaagaccgccctcgccatgggcatcgccaagtcgctcggcgccgagacgcccttcgcctccgtcgctgcctccgagctcttctccctcgacctctccaagaccgaggcgctcacccaggcgttccgccgcgccattggcgttcgcatcaaggaggaagcggagatcattgagggcgaggtcgttgagatctcaatcgaccgccctgtctccgccagtagctcgggcataccttcaggtgctaccgcg

SEQ ID NO: 26905 - protein, 192 aa, Triticum aestivum
TLARSPSSLKPSSPISRKRATSKRRRRRAVTMAELKRLSESRDLTRIERIGAHSHIRGLGLDSSIEARDASEGMVGQLPARRAAGLILQLIRQGKIAGRAVLLAGQPGTGKTALAMGIAKSLGAETPFASVAASELFSLDLSKTEALTQAFRRAIGVRIKEEAEIIEGEVVEISIDRPVSASSSGIPSGATA

SEQ ID NO: 26906 - protein, 161 aa, Triticum aestivum
MAELKRLSESRDLTRIERIGAHSHIRGLGLDSSIEARDASEGMVGQLPARRAAGLILQLIRQGKIAGRAVLLAGQPGTGKTALAMGIAKSLGAETPFASVAASELFSLDLSKTEALTQAFRRAIGVRIKEEAEIIEGEVVEISIDRPVSASSSGIPSGATA

SEQ ID NO: 26907 - protein, 123 aa, Triticum aestivum
MPRRGWSASSPRAAPLDSSSSSSARGRSPAAPSSSQGSRGPARPPSPWASPSRSAPRRPSPPSLPPSSSPSTSPRPRRSPRRSAAPLAFASRRKRRSLRARSLRSQSTALSPPVARAYLQVLP

SEQ ID NO: 26908 - DNA, 1258 bp, Triticum aestivum
aaaaacaaccaagaaatctcacgacgcgtcctcctcccactcctctcctcccccctctcgccatggccggccgcctcctcgccgcccctctcctcctctttgtgctcctccagctccccgtgccgtcccaggtgcgcgcgtacccgctcgcggcggcacactctggtcggtgcccaaggccggaggagaggccgccgccgttcctccaggggctccggcgaacctgccgcacctcgacggaggggcacccggccgaggaggttaatggggaggaacttatcagagagttgggtggaaaggagtacactgctgtcctcttctatgcatcatggtgccctttctctcatagaatgagaccaatcttcgacgatcttagctcaatgtatccacatattaagcacttggctgtagaacagtccaacgtgatgccaacagttttatcaagatatggtgtccgcagccttccttctatactaatagctcatgagtcatatgcattttggcctcttgttgccaaagatctcaactcactggtcaacttctactctgctgttactggacaagaaccagttgcatatcttggtccacggaagtggatcacaaccgaaagaagcacacagtatgtgaagctttggaatggttcagtcagcgaatcagtgaagggcgagccctacctagcattcagcatcttctttatttgcctaagggtgttctcgttcttcttcccaaagttcttcgcctgcatcaaaggcttgtgggcccaatacttccggcacgccaactttggagtccttgccaaattgacgcagctgctcgaatgtgtgccccatgccgtggatgtaaggaagatgtggagcaaatggaggctcatggttggagccataaacatgagagtctgggcatcatctctagcttcggtgtctcttggtgggcaatcttctccccgagctgctagattggattgatggtttggattttaatgtcgggcgggagagcatgcgggctgtttgaattgcgctggatgtggaagctcctataactcacatgaacatgtagtgaaacatcttgtttgtagcatgtaaatcttagggatactgttgagcctgtgtagaccacactgtaacattaatcatgagtaccaattgtcatagtttttgagcaactgggcacacatcataagcccttttactatttttcacatgtaatctgcaattgcagtatgttcatctgtcttgtactaataagtgaaagacattcc

SEQ ID NO: 26909 - protein, 320 aa, Triticum aestivum
KQPRNLTTRPPPTPLLPPLAMAGRLLAAPLLLFVLLQLPVPSQVRAYPLAAAHSGRCPRPEERPPPFLQGLRRTCRTSTEGHPAEEVNGEELIRELGGKEYTAVLFYASWCPFSHRMRPIFDDLSSMYPHIKHLAVEQSNVMPTVLSRYGVRSLPSILIAHESYAFWPLVAKDLNSLVNFYSAVTGQEPVAYLGPRKWITTERSTQYVKLWNGSVSESVKGEPYLAFSIFFICLRVFSFFFPKFFACIKGLWAQYFRHANFGVLAKLTQLLECVPHAVDVRKMWSKWRLMVGAINMRVWASSLASVSLGGQSSPRAARLD

SEQ ID NO: 26910 - protein, 300 aa, Triticum aestivum
MAGRLLAAPLLLFVLLQLPVPSQVRAYPLAAAHSGRCPRPEERPPPFLQGLRRTCRTSTEGHPAEEVNGEELIRELGGKEYTAVLFYASWCPFSHRMRPIFDDLSSMYPHIKHLAVEQSNVMPTVLSRYGVRSLPSILIAHESYAFWPLVAKDLNSLVNFYSAVTGQEPVAYLGPRKWITTERSTQYVKLWNGSVSESVKGEPYLAFSIFFICLRVFSFFFPKFFACIKGLWAQYFRHANFGVLAKLTQLLECVPHAVDVRKMWSKWRLMVGAINMRVWASSLASVSLGGQSSPRAARLD

SEQ ID NO: 26911 - protein, 204 aa, Triticum aestivum
MRPIFDDLSSMYPHIKHLAVEQSNVMPTVLSRYGVRSLPSILIAHESYAFWPLVAKDLNSLVNFYSAVTGQEPVAYLGPRKWITTERSTQYVKLWNGSVSESVKGEPYLAFSIFFICLRVFSFFFPKFFACIKGLWAQYFRHANFGVLAKLTQLLECVPHAVDVRKMWSKWRLMVGAINMRVWASSLASVSLGGQSSPRAARLD

SEQ ID NO: 26912 - DNA, 689 bp, Triticum aestivum
acccaggcagtcgtcacagccacacagaacaagcgagaaaccactctgtacgcactcccgcagatcagagagagaaagaggaagaggaagaggaagaggaagagagagataagagggagagggatcgacatccgtgtgattcatcatccatcatgaggccgatcagagaaggcgaggcgctggtgggagtcgccggggctccggcggcggccggccacggcgcgcacccggcgttctggaggacgccgacgccgtacctcttcctgggcttcacgctcatgatggggctcatcgccgtggcgctgctcgtgctcgtctgcacgcgccgcaagccgtcgggctcgtcgcggcgggggagcgccgccgaggaggcgtcggcgcgcgggatggtgccgctcgacagggagcccaaggtcgtcgtcatcatggccggcgacgacttgccgtccttcctcgccagcgccaggccgttcgcgttccctgatgccatcgagccgccacgccaggcggacgcggtttaagcgcgcgcgccgcgcccgtgtgcctgcgggactcgggaccaattttgttcatcaatcagatttctaggatttatcctaagtaattttgtcggtagtatgtagtagtcgttcacgacgttagcgcccggcggcgttgagatctgtgaaagcgaatgaagttccggcttt

SEQ ID NO: 26913 - protein, 172 aa, Triticum aestivum
PGSRHSHTEQARNHSVRTPADQREKEEEEEEEEERDKRERDRHPCDSSSIMRPIREGEALVGVAGAPAAAGHGAHPAFWRTPTPYLFLGFTLMMGLIAVALLVLVCTRRKPSGSSRRGSAAEEASARGMVPLDREPKVVVIMAGDDLPSFLASARPFAFPDAIEPPRQADAV

SEQ ID NO: 26914 - protein, 122 aa, Triticum aestivum
MRPIREGEALVGVAGAPAAAGHGAHPAFWRTPTPYLFLGFTLMMGLIAVALLVLVCTRRKPSGSSRRGSAAEEASARGMVPLDREPKVVVIMAGDDLPSFLASARPFAFPDAIEPPRQADAV

SEQ ID NO: 26915 - DNA, 839 bp, Triticum aestivum
actgccatatgcatgattgcacactgcaccgtgcgcaccagcatccagccatgtcgccgtttgcgcctccatacaacaccaacgtcctcctggccgcggtgaccgcgctctcggcggcgatcgccttcgtcgccgcgctccacctctacgcccggtgcttcctgcagcgtcgtgccaccaccgccgccgcattgagcaaccctcacgcgctggcgctggcgctgcagcggccgccggacggctacgagctcgaggtgatcaccgtcgacgccgcgtgcgcgccggagccagcggggctgggcgccaaggagctgggcgcgctgccggtgctcgtgtgggagtcttcgtctgccaaggtggcggccgccgccgccgccgagcattgcgccgtgtgcctcggggaggtggaggacggcgagctggggaggctgctcccggcgtgcagccatgcgttccacgtcggatgcatcgatgcgtggctccgactgagctccacgtgcccggtctgcaggtcggcggtgaggatgcaggaggatggggcggcgccggtggcctgagtggctggccccgtgagctagctagagctgccgagtgcagtgtacatgggtaaactatagacggctggcaatggttttctgttctttttgttttgtcttgttattaagattattaattccatcaaagttctagggattacatgctggaatttatagaaagggcagtgctacgcttcggcggcggatcttttaaaaagatctgccgcctcgcgagccgtccgattgtacaatgcgggtcgtttgttcttcttctttaattttctgcaaaaatactcttattgt

SEQ ID NO: 26916 - protein, 184 aa, Triticum aestivum
CHMHDCTLHRAHQHPAMSPFAPPYNTNVLLAAVTALSAAIAFVAALHLYARCFLQRRATTAAALSNPHALALALQRPPDGYELEVITVDAACAPEPAGLGAKELGALPVLVWESSSAKVAAAAAAEHCAVCLGEVEDGELGRLLPACSHAFHVGCIDAWLRLSSTCPVCRSAVRMQEDGAAPVA

SEQ ID NO: 26917 - protein, 182 aa, Triticum aestivum
MHDCTLHRAHQHPAMSPFAPPYNTNVLLAAVTALSAAIAFVAALHLYARCFLQRRATTAAALSNPHALALALQRPPDGYELEVITVDAACAPEPAGLGAKELGALPVLVWESSSAKVAAAAAAEHCAVCLGEVEDGELGRLLPACSHAFHVGCIDAWLRLSSTCPVCRSAVRMQEDGAAPVA

SEQ ID NO: 26918 - protein, 168 aa, Triticum aestivum
MSPFAPPYNTNVLLAAVTALSAAIAFVAALHLYARCFLQRRATTAAALSNPHALALALQRPPDGYELEVITVDAACAPEPAGLGAKELGALPVLVWESSSAKVAAAAAAEHCAVCLGEVEDGELGRLLPACSHAFHVGCIDAWLRLSSTCPVCRSAVRMQEDGAAPVA

SEQ ID NO: 26919 - DNA, 1613 bp, Triticum aestivum
atgatcgcctatttaagcttctcctgttctcgcccaccctgccccatcccattcccactctctcccagcagcggcggcagcggcacgtcgtcgtcctcctccccctcgccgtccgcgcgtccgtccaacagaggctgggaaccttaaagcggaacagggttcatggagggtggaggcgcaagaaatgtttctgcagcggcagcacagacaaaggaaagtgcggatgacggctcctgcaagccactgcctccttgctgtgtcaaggcgcaggctgctgtggcggaatctgaggccaagtgccacgctaccgtggtgtctgggtggttcacaggaacccggtcacgctctggcaaaccaagcaaagcgcagtacttcaacaatccaatgtggcctggggaggctcattcgttgaaagtagagaagattttgtaccaggggaaatcgccataccaagaagttttagtatttgagtcttcaacctatgggaatgtccttgtgcttgatggaattgttcagctcactgacaaggatgaatgtgcataccaggaaatggttactcaccttgcactgtgctcaattccatctcctaaaaatgttttggttgtcggaggtggtgatggtggtgtactacgagaaatagccaagcatgattcagtggagagtatagacatatgtgagattgatcagctagttattgatgtttgtaaagattttttcccacgtctatatgttggatataaagaccctcgtgtcaaacttcatgttggtgatgctgtggagttcttgagaaactctccagaaggaaaatatgatgccattattgttgattcatcagatccaattgggccagctcaggaacttgtggagaagcccttttttcagacaattgctagggctttaaagcctggcggtgttctttctaatctagctgaaagtatgtggctgcacacacatctaatccaggatatgctttctatctgtcgagaggtattcaagggtggcgtgcactatgcctgggcaagtgttccaacatatcctagtggtgtcattggatttttgctatgtgcgaaggaaggtccaccggtggacttcttaactcctgtgaatccaatcgagaaaattgaaggagctactaaagatggacgagagatgagattttacaattcagagattcataaggctgcttttattctgccaacgtttgtaaagagggagctggaggcatataactcttccactgaaaaggagagaccggagaagccaaccgcaaaaccagtgaagatgaaggtaatgcgggacagcgctattaccgcttcctagaccgcgggcggacacctgtgtgctatccatcttccccgatgagacccgccgcacctgtatatccacgttccacgcctgtcctttgctaccaaattttattcaatagttacatgattgtgtggtgctctagcatagttgcgtgacacaactgagggtgtaatatcactaaatgtgtatggtgtgttgcagttggtgaataaaggagcaaacagaaggggatgtgtgatgtgtttcccttatctgtaacatgtatgatgtttcattgttgcgtgagttctcgtggtgcaagtacc

SEQ ID NO: 26920 - protein, 385 aa, Triticum aestivum
MEGGGARNVSAAAAQTKESADDGSCKPLPPCCVKAQAAVAESEAKCHATVVSGWFTGTRSRSGKPSKAQYFNNPMWPGEAHSLKVEKILYQGKSPYQEVLVFESSTYGNVLVLDGIVQLTDKDECAYQEMVTHLALCSIPSPKNVLVVGGGDGGVLREIAKHDSVESIDICEIDQLVIDVCKDFFPRLYVGYKDPRVKLHVGDAVEFLRNSPEGKYDAIIVDSSDPIGPAQELVEKPFFQTIARALKPGGVLSNLAESMWLHTHLIQDMLSICREVFKGGVHYAWASVPTYPSGVIGFLLCAKEGPPVDFLTPVNPIEKIEGATKDGREMRFYNSEIHKAAFILPTFVKRELEAYNSSTEKERPEKPTAKPVKMKVMRDSAITAS

SEQ ID NO: 26921 - protein, 311 aa, Triticum aestivum
MWPGEAHSLKVEKILYQGKSPYQEVLVFESSTYGNVLVLDGIVQLTDKDECAYQEMVTHLALCSIPSPKNVLVVGGGDGGVLREIAKHDSVESIDICEIDQLVIDVCKDFFPRLYVGYKDPRVKLHVGDAVEFLRNSPEGKYDAIIVDSSDPIGPAQELVEKPFFQTIARALKPGGVLSNLAESMWLHTHLIQDMLSICREVFKGGVHYAWASVPTYPSGVIGFLLCAKEGPPVDFLTPVNPIEKIEGATKDGREMRFYNSEIHKAAFILPTFVKRELEAYNSSTEKERPEKPTAKPVKMKVMRDSAITAS

SEQ ID NO: 26922 - protein, 256 aa, Triticum aestivum
MVTHLALCSIPSPKNVLVVGGGDGGVLREIAKHDSVESIDICEIDQLVIDVCKDFFPRLYVGYKDPRVKLHVGDAVEFLRNSPEGKYDAIIVDSSDPIGPAQELVEKPFFQTIARALKPGGVLSNLAESMWLHTHLIQDMLSICREVFKGGVHYAWASVPTYPSGVIGFLLCAKEGPPVDFLTPVNPIEKIEGATKDGREMRFYNSEIHKAAFILPTFVKRELEAYNSSTEKERPEKPTAKPVKMKVMRDSAITAS

SEQ ID NO: 26923 - DNA, 847 bp, Triticum aestivum
accgatcccctcacccccaccggcggcgcacagcccgacgacccgagcgatcctgcggaggcggcagccatggtgcacgtcaacttctaccgcaactatggaaagaccttcaagaagccaaggcgtccgtatgagaaggagcgtcttgacgggcatgccgcaggtctacgtgggcaacgcggtaacgggcgccgtcggcagggccgccgtgggcgagatcctgggcgacggccggctaggctgggcggcgttgctcctgaaccgggccgtggctgcggtggacgaggcgagcgtgagggaggagctcgcggcgtggcctggaaaccccagcttcaagtacctggccggcggcggcgcggcgatcatggccacggggtcgccgcggttcgacgtgtacggcaacgacttcggatggggcaggccggtggccgtccggagcggccccgcgaacaaggtggacgggatggtcacggtttacggggacggcggagggagtgggggcttggagctgcaggtgtgcctcgcccctgacgtgctcgacaggctcgtcgccgacgaagagctgctgacctcgtacggtacgccggtctaggatgatgtgctcgccgacggacgacacgccgtggaaagttaccatgcatgcagctgcatttcctctttgtgtgggaataagaatcctcccagcgtaattttaaggtttcacttttgagtctgtcacgtctgctgcacactgttagccacaatgtggcgtttgcctgtatctagtcagcaaaaaatgttggggtggactgtaaaattcttctgtttttcatatgatgatgaagctcaaacaaacaaaaattcttac

SEQ ID NO: 26924 - protein, 196 aa, Triticum aestivum
PIPSPPPAAHSPTTRAILRRRQPWCTSTSTATMERPSRSQGVRMRRSVLTGMPQVYVGNAVTGAVGRAAVGEILGDGRLGWAALLLNRAVAAVDEASVREELAAWPGNPSFKYLAGGGAAIMATGSPRFDVYGNDFGWGRPVAVRSGPANKVDGMVTVYGDGGGSGGLELQVCLAPDVLDRLVADEELLTSYGTPV

SEQ ID NO: 26925 - protein, 176 aa, Triticum aestivum
TDPLTPTGGAQPDDPSDPAEAAAMVHVNFYRNYGKTFKKPRRPYEKERLDGHAAGLRGQRGNGRRRQGRRGRDPGRRPARLGGVAPEPGRGCGGRGEREGGARGVAWKPQLQVPGRRRRGDHGHGVAAVRRVRQRLRMGQAGGRPERPREQGGRDGHGLRGRRREWGLGAAGVPRP

SEQ ID NO: 26926 - protein, 164 aa, Triticum aestivum
MERPSRSQGVRMRRSVLTGMPQVYVGNAVTGAVGRAAVGEILGDGRLGWAALLLNRAVAAVDEASVREELAAWPGNPSFKYLAGGGAAIMATGSPRFDVYGNDFGWGRPVAVRSGPANKVDGMVTVYGDGGGSGGLELQVCLAPDVLDRLVADEELLTSYGTPV

SEQ ID NO: 26927 - DNA, 669 bp, Triticum aestivum
atccatctcatctcacctcactcacactactactgatatcagctaggagtactcgagttcactagctaccagttcgcttccttccttcggcaccagactctctcccacgaagatgcctacggtgacccgtgcctacctcgaccagaggctcgccgtcgccaaccgctgctccaaagaggctgccatggctggagccaaggccgcggccgtcgccaccgtcgctgccgcagtccccactctggcgagcgtgaggatgctgccgtgggcgagagcgcacctgaaccccaccgggcaggccctcatcatctccaccgtcgccgggatggcctacttcatcgtggccgacaagaccatcctctccatggccaggaagcactccttccagaacgcgccggaccacctcaagaacacctccttccactgattaggcagtagatcctgtagtataatgtctgctgaatccaccatgggtagtgcgcaataaacttcacgccgacccgtacggccgtacgtgtctgctgaatgatacagtagtataatgttcagcgagagaggcgaggcgatgcagatcaggccttgcgcttctatccgtgcaagcacttatcggatgatgaagttaccatgtaacccagccagtattttcttgaattaatgaataccagtatttgt

SEQ ID NO: 26928 - protein, 103 aa, Triticum aestivum
MPTVTRAYLDQRLAVANRCSKEAAMAGAKAAAVATVAAAVPTLASVRMLPWARAHLNPTGQALIISTVAGMAYFIVADKTILSMARKHSFQNAPDHLKNTSFH

SEQ ID NO: 26929 - protein, 79 aa, Triticum aestivum
MAGAKAAAVATVAAAVPTLASVRMLPWARAHLNPTGQALIISTVAGMAYFIVADKTILSMARKHSFQNAPDHLKNTSFH

SEQ ID NO: 26930 - protein, 56 aa, Triticum aestivum
MLPWARAHLNPTGQALIISTVAGMAYFIVADKTILSMARKHSFQNAPDHLKNTSFH

SEQ ID NO: 26931 - DNA, 795 bp, Triticum aestivum
acatcctaatcaaaaaaagcgcggcgcagtcgtctcgggtggactcgtcgtctcttctgagttcgagaccgaccgaaacgcacaggcgtcggagcggctaggcgaaggcggggcccaacgccggcgagcgtcggcagcgtgctcgccgccatggacgagcaggagttccggcgcatgctcgacctcttccccgtcgtccgatcccgcgactactgcaaggatgaagtggaatcatcaagcgaaggcaccacacagcaaacacgagctcaggagataaaaggaaccaaaaagaaggctgcagaagctctattcctgcggaaattgaagacggctgctgagaaaaaggttggagcaacgaaggcagaactattctgcaagacattcgaagaagctcacgagaaacttgtttacaaagaactggatctggatgctgctcaaaggttcctgaatgcctacaagagctgatgatgtgctgttgctagatgcctagaagatttggtttttattcatcggaaactgctgaagatgtgatgatgttaagatctctgatatttcctttgtggttctcatcttccgcgaaaccatgtagacagccctggtcaatcagctacattattcagatgtactgtgttatccttaacatagaccacatgtatttttcttccagctgcgatctgttcgccctgttcttcagagatagaactagcatgtttcttctgtttccaatgacaaaaagtctgaaccggcaaaaaaatatacataaaaaaaaaaaaaaaaaagcttatcgataccgtc

SEQ ID NO: 26932 - protein, 104 aa, Triticum aestivum
MDEQEFRRMLDLFPVVRSRDYCKDEVESSSEGTTQQTRAQEIKGTKKKAAEALFLRKLKTAAEKKVGATKAELFCKTFEEAHEKLVYKELDLDAAQRFLNAYKS

SEQ ID NO: 26933 - protein, 104 aa, Triticum aestivum
MPRRFGFYSSETAEDVMMLRSLIFPLWFSSSAKPCRQPWSISYIIQMYCVILNIDHMYFSSSCDLFALFFRDRTSMFLLFPMTKSLNRQKNIHKKKKKKAYRYR

SEQ ID NO: 26934 - protein, 96 aa, Triticum aestivum
MLDLFPVVRSRDYCKDEVESSSEGTTQQTRAQEIKGTKKKAAEALFLRKLKTAAEKKVGATKAELFCKTFEEAHEKLVYKELDLDAAQRFLNAYKS

SEQ ID NO: 26935 - DNA, 1059 bp, Triticum aestivum
cctgcctctgcgtcttcctctgcttcctcttctcctcccaatccaatccttgtagaatcttccaccggcgcccgggtaagatgaacggcctcctcgtgtccccgtgcacaaggccgcccctgctccgccccttcccgagcccggccacccgtctcctacccgccagaaccctagttcttcgcccgctccgcctcccccgtggcgtctgtgcgtcccctcctcccccgcgcgccgccgccgccgctgcgtctgcagtgggcggccttctggcgccgctcgaggttggcctgcgcagcatcaacctcgcgccgctgcgcccgccggttgcggcggccatgtcggcggccgtgcgctggctgggggtctaccgggaggttctgcttgtcggggtgctcttctcctggtttcccaacatcccctgggaccgccagcccttctccgctctgcgagacctctgcgacccttttctcgccctctgccgcgaggtcgtgccgcccgtcttcggccgcaagctcgatctcagcccgctcgtcgccttcatggcgatagacatcctcatcatgatccttcgcccacagccacgcatgtgatggaattgaaggatagtcgttggtatgttaagatccactatggttttgtcgttgctggatattacaagataagaagtggtggttgaatgatctttagcaagggtagcagaatttgagtgattttgagacgttttgtagacaagtgtagcttccttgataaaacttctgccaagtagatatgtgctagctacagtctttgtgattctgctctgttcccagacggatttgtctatgatatggcaacacggatctgcatgtagtgagcgattcagagaactgaatcgaaagctgagccattcctgaacggtttgcgagagaatcccaaactagcttaggcaggctcattaatgtgcatggtctacttttttcttctttttccttccaccatgaggatcttatctccttttctgacttggctaatgtgtttacctccagagccacttgttctggttgagtgttgatatactcg

SEQ ID NO: 26936 - protein, 195 aa, Triticum aestivum
CLCVFLCFLFSSQSNPCRIFHRRPGKMNGLLVSPCTRPPLLRPFPSPATRLLPARTLVLRPLRLPRGVCASPPPPRAAAAAASAVGGLLAPLEVGLRSINLAPLRPPVAAAMSAAVRWLGVYREVLLVGVLFSWFPNIPWDRQPFSALRDLCDPFLALCREVVPPVFGRKLDLSPLVAFMAIDILIMILRPQPRM

SEQ ID NO: 26937 - protein, 169 aa, Triticum aestivum
MNGLLVSPCTRPPLLRPFPSPATRLLPARTLVLRPLRLPRGVCASPPPPRAAAAAASAVGGLLAPLEVGLRSINLAPLRPPVAAAMSAAVRWLGVYREVLLVGVLFSWFPNIPWDRQPFSALRDLCDPFLALCREVVPPVFGRKLDLSPLVAFMAIDILIMILRPQPRM

SEQ ID NO: 26938 - DNA, 627 bp, Triticum aestivum
cattgggcatgtctatgcgtgttgaaagggcgtcactcgaacaggttcaaaaacggtttgaggcacttaagaagaggaaggacccagccagcttcagtgaacaagatttggatgagagaatatggaagcagcagcaagaggaggaggagaagaagcgtcaacgcagagaaaagaagaaagaaaagaagaaagagcaggctggccagaatgaacctgaggacattgaccctgatgttgctgctatgatgggcttcggcgggttcggcacctcttcaaagaagtgaaaattgctgcttcaggtggcgccattccgttggtctgtggctgctgaagacgtcgccgcggctccgtgcacctggatctcagcaaaggccagacacagctctgatgcagtgttgcgagtagtgtactggagccttgttgcaaccgctacctgataatgtcagcgaaacgatacttaatgctggaacaattcagcttctgtaatcggtgaccggtgatcatttgagaagcatttcatctttgagaaatgagatgactaattcgtctagatgctgctgtatcatttgagagacattttatctttgagaaatgagataactaattcgtttacacgctgttcgttgt

SEQ ID NO: 26939 - protein, 93 aa, Triticum aestivum
LGMSMRVERASLEQVQKRFEALKKRKDPASFSEQDLDERIWKQQQEEEEKKRQRREKKKEKKKEQAGQNEPEDIDPDVAAMMGFGGFGTSSKK

SEQ ID NO: 26940 - protein, 91 aa, Triticum aestivum
MSMRVERASLEQVQKRFEALKKRKDPASFSEQDLDERIWKQQQEEEEKKRQRREKKKEKKKEQAGQNEPEDIDPDVAAMMGFGGFGTSSKK

SEQ ID NO: 26941 - protein, 89 aa, Triticum aestivum
MRVERASLEQVQKRFEALKKRKDPASFSEQDLDERIWKQQQEEEEKKRQRREKKKEKKKEQAGQNEPEDIDPDVAAMMGFGGFGTSSKK

SEQ ID NO: 26942 - DNA, 1246 bp, Triticum aestivum
agaacatcctaatcgaaaaacgagaagccacagggaggcgaaccgaaagcaaaaccgcaggactagcaggagagacagagatcccccgaaccctaaccctaccagcacctcccgtcgccggttgagatggcgatggacgcggagcggaggcaggcggagctgatcgagcagttctcggcgcaggcggcggcgctctcctcggctcctcagctggcggcgctcgtgctcgaggccacctcccacccggcgctctttgccttctccgagctcctcacccttccagccctctccaagctaacgggcacgcagtacgcctcgtcgctggacctgctccgcctcttcgcctacggcaccctcaaggactacaagagtaattctagcgccctccctgcattgttgcctgatcaagcccggaagctgaagcaactcagcgtgctaactttggctgagtcaaccaaggtacttccatatgatcagctcatgcaagagctagacgtttccaatgtgagagaacttgaagatttcctcatcaacgagtgcatgtactcaggtattgtcagaggcaagttggaccaactgcggcggtgctttgaagtacaatttgcagctggaagggacctcacacctgatcagctaaccaacatgattgagaccttgtctgactggttgggaacatcagataatttattacaccacattcaggagaaaatcaagtgggctgatacaacaagtgaattgaacaagaagcaccagaaagaatttgaagacagagtggaagaagccaagaagtcagtcaaggcagacaatgacttacgggggcatgacgactttctctctgaatctggaggaataatggattttgaggaggaccgcatccgaccaaaaaggaggcgacaaccaatggcgtagtttgactgaagtatcacacctatggtccctgctcgcagaagtgccgatgctgttcttgagacattttgtcaccggagtttaggagcatcaattagggtgcttcccatgaagcgagtctctgttgagaaaacgcttgtttttggtatgagatgttacaaagagatgatttactgccgtatttatttagtagcacgaagggcatatgggtgacttcgcactgtaaagattatggttctgaaaagtttggtgacctaaggtgttcgccaaaaaaaaaaaaaaaaaagcttatcgataccgtcgactgtttaaacacaataaagtgggaactggagggggg

SEQ ID NO: 26943 - protein, 260 aa, Triticum aestivum
MAMDAERRQAELIEQFSAQAAALSSAPQLAALVLEATSHPALFAFSELLTLPALSKLTGTQYASSLDLLRLFAYGTLKDYKSNSSALPALLPDQARKLKQLSVLTLAESTKVLPYDQLMQELDVSNVRELEDFLINECMYSGIVRGKLDQLRRCFEVQFAAGRDLTPDQLTNMIETLSDWLGTSDNLLHHIQEKIKWADTTSELNKKHQKEFEDRVEEAKKSVKADNDLRGHDDFLSESGGIMDFEEDRIRPKRRRQPMA

SEQ ID NO: 26944 - protein, 258 aa, Triticum aestivum
MDAERRQAELIEQFSAQAAALSSAPQLAALVLEATSHPALFAFSELLTLPALSKLTGTQYASSLDLLRLFAYGTLKDYKSNSSALPALLPDQARKLKQLSVLTLAESTKVLPYDQLMQELDVSNVRELEDFLINECMYSGIVRGKLDQLRRCFEVQFAAGRDLTPDQLTNMIETLSDWLGTSDNLLHHIQEKIKWADTTSELNKKHQKEFEDRVEEAKKSVKADNDLRGHDDFLSESGGIMDFEEDRIRPKRRRQPMA

SEQ ID NO: 26945 - protein, 142 aa, Triticum aestivum
MQELDVSNVRELEDFLINECMYSGIVRGKLDQLRRCFEVQFAAGRDLTPDQLTNMIETLSDWLGTSDNLLHHIQEKIKWADTTSELNKKHQKEFEDRVEEAKKSVKADNDLRGHDDFLSESGGIMDFEEDRIRPKRRRQPMA

SEQ ID NO: 26946 - DNA, 1247 bp, Triticum aestivum
ccgtatatcccaacccaaccccagcaaaagcagtccgcgacttgcgagcagagtacacgacgcgaccgcgagccaaaccctaccgcgaacacgtcggcgatgagctcctccaacggcaacggcgggaagaagccggcaccgtccggcgggcgcgggggcatccgcaccctcgccgacatcaaccgcggcccctccgggttcccaggcgcaggcggcagcggcagcgactccgatgagccccaggagtactacaccggcggcgagaagagtgggatgcttgttcaagatccaacaaggagaaataatgtggactcaatctttgagcaagctagagtgatgggtgctcagcaagttccactgccttcttttgaaggccaatcttccagctcaaccagctttgcaggaacaggtcgtctgctttcaggggatgcgcagacagcaccagctgctcctcaaccaccgcaggatgttcttcacaatatacatttctggaacaatggtttcacagtagatgatggtccactaagagcctatgaggacgctgcaaatgcagacttcattgagagcatcaagaagtcccagtgcccccaagagctggagcctgctgatcgaaggacagctgtccatgtcaatgttataaaacgacatggagattatgaggaacctgcaaggcctcgatcagctttccagggtgttggtagaacccttggtgggtcttcagcagatgagagtcctgcaccagctcctgtgacacaagagccccacggtgctcccaggtcaattggcatagttgtggacgactcgcagccctttacatccatacagctaaggttagcggacggcactcgcatggtcgctcggtttaaccttaaccacaccgtgggcgacatcaggtctttcattgatgcatcccgcccaggagctgcgcggccgtatcagttgcagactggcttcccacccaagcagctgactgaccctacgcagactgttgaccaagctggactcaagaactccgttatcatgcagaagatgtagttctcaccgagctggatctgtcgcacagaatgtctttccgatgcaattattaaattagtgctgctgaatggtttatcatgtccactagatactgcactttgcatgcaacctgtgatgtactggttgttttgtcgataaacgtcagtggagtctatattcgtcttgctaccaattatgaatgtctatcaaagttaatgaatgtccggttgtct

SEQ ID NO: 26947 - protein, 344 aa, Triticum aestivum
PYIPTQPQQKQSATCEQSTRRDREPNPTANTSAMSSSNGNGGKKPAPSGGRGGIRTLADINRGPSGFPGAGGSGSDSDEPQEYYTGGEKSGMLVQDPTRRNNVDSIFEQARVMGAQQVPLPSFEGQSSSSTSFAGTGRLLSGDAQTAPAAPQPPQDVLHNIHFWNNGFTVDDGPLRAYEDAANADFIESIKKSQCPQELEPADRRTAVHVNVIKRHGDYEEPARPRSAFQGVGRTLGGSSADESPAPAPVTQEPHGAPRSIGIVVDDSQPFTSIQLRLADGTRMVARFNLNHTVGDIRSFIDASRPGAARPYQLQTGFPPKQLTDPTQTVDQAGLKNSVIMQKM

SEQ ID NO: 26948 - protein, 311 aa, Triticum aestivum
MSSSNGNGGKKPAPSGGRGGIRTLADINRGPSGFPGAGGSGSDSDEPQEYYTGGEKSGMLVQDPTRRNNVDSIFEQARVMGAQQVPLPSFEGQSSSSTSFAGTGRLLSGDAQTAPAAPQPPQDVLHNIHFWNNGFTVDDGPLRAYEDAANADFIESIKKSQCPQELEPADRRTAVHVNVIKRHGDYEEPARPRSAFQGVGRTLGGSSADESPAPAPVTQEPHGAPRSIGIVVDDSQPFTSIQLRLADGTRMVARFNLNHTVGDIRSFIDASRPGAARPYQLQTGFPPKQLTDPTQTVDQAGLKNSVIMQKM

SEQ ID NO: 26949 - protein, 253 aa, Triticum aestivum
MLVQDPTRRNNVDSIFEQARVMGAQQVPLPSFEGQSSSSTSFAGTGRLLSGDAQTAPAAPQPPQDVLHNIHFWNNGFTVDDGPLRAYEDAANADFIESIKKSQCPQELEPADRRTAVHVNVIKRHGDYEEPARPRSAFQGVGRTLGGSSADESPAPAPVTQEPHGAPRSIGIVVDDSQPFTSIQLRLADGTRMVARFNLNHTVGDIRSFIDASRPGAARPYQLQTGFPPKQLTDPTQTVDQAGLKNSVIMQKM

SEQ ID NO: 26950 - DNA, 1321 bp, Triticum aestivum
cacactccatgcactagtactctgcaggcactgagctcatcaaggtagcttagctaggatcaatggcgtcgagcaggacagcagcgatgctggtcctcgtggccgcggtgctgtgccctgcagccttgtccaagccgtcggcggcgttcatctctatgcccaccgaccacgtcggtggccgtattcctcccgtctcccccgccgatggactcgccttcgacttccatgccgactcctgcccgcagttgcaggacgtggtgcgctccgccgtggagaccgcgctccagagggagatcgccctcgccgccggcctccttcgcatcttcttccacgactgcttccctcagggctgtgacgcgtcggtccttctgacgggagacggcagcgagctccagttgccgccgaatctgacgctccaaccgcgggcgctgcagctcattgagtccatccgtgcccaggtgcacgccgcctgcggacccgtcgtctcctgcgccgacatcacggccctcgccacccgcgatgccgttgccttctccgggggtcagggctacgacgtgccgctcggcaggctcgacagcctcgcgccggcgccgagctcggccgtcttcgatctcccccaggccagctccaacgcctccacgctcatcgacgtcttcgagacccgcaacctcgacaatgtcgacctcgtcacgctctcaggtggccacaccatcgggaagggccactgcagctccttctccaaccgcttctccgaggactccgacttcgtccgaagcctcgcctccaactgctccagcgacttcaaccggctgcaggacctcgacgtcaccaccccggacgtgttcgacatcaagtacttcaccaacctgcaacagggaaagggggtgttcacctccgaccagaagctcaccgcggactggcgcaccgaatgggttgtcaacggctttgccgggaaccactggtggttcttcggccagtttgctgcttccatgaccaagctcgggaatctccaggggccccaaggaaacgtcggcgagatccgtcgcaacagctgcttcgtgcgcaatggacagagcatcctcaccaccaccagcgacgaggggctcgccgcctctgcttgagatcaccgatgttagcgagattaatgtcttaataagagctcgctagctaatgtagcccatgttattctagatttactcttgtttaaaatcatattatggcactttgttctgggactcctaaaaggcgcgcttcgcctcggtgtgctataattcttttatagggccaaaaaaaaaaaaaaaaaagcttatcgataccgtcg

SEQ ID NO: 26951 - protein, 352 aa, Triticum aestivum
MASSRTAAMLVLVAAVLCPAALSKPSAAFISMPTDHVGGRIPPVSPADGLAFDFHADSCPQLQDVVRSAVETALQREIALAAGLLRIFFHDCFPQGCDASVLLTGDGSELQLPPNLTLQPRALQLIESIRAQVHAACGPVVSCADITALATRDAVAFSGGQGYDVPLGRLDSLAPAPSSAVFDLPQASSNASTLIDVFETRNLDNVDLVTLSGGHTIGKGHCSSFSNRFSEDSDFVRSLASNCSSDFNRLQDLDVTTPDVFDIKYFTNLQQGKGVFTSDQKLTADWRTEWVVNGFAGNHWWFFGQFAASMTKLGNLQGPQGNVGEIRRNSCFVRNGQSILTTTSDEGLAASA

SEQ ID NO: 26952 - protein, 344 aa, Triticum aestivum
MLVLVAAVLCPAALSKPSAAFISMPTDHVGGRIPPVSPADGLAFDFHADSCPQLQDVVRSAVETALQREIALAAGLLRIFFHDCFPQGCDASVLLTGDGSELQLPPNLTLQPRALQLIESIRAQVHAACGPVVSCADITALATRDAVAFSGGQGYDVPLGRLDSLAPAPSSAVFDLPQASSNASTLIDVFETRNLDNVDLVTLSGGHTIGKGHCSSFSNRFSEDSDFVRSLASNCSSDFNRLQDLDVTTPDVFDIKYFTNLQQGKGVFTSDQKLTADWRTEWVVNGFAGNHWWFFGQFAASMTKLGNLQGPQGNVGEIRRNSCFVRNGQSILTTTSDEGLAASA

SEQ ID NO: 26953 - protein, 321 aa, Triticum aestivum
MPTDHVGGRIPPVSPADGLAFDFHADSCPQLQDVVRSAVETALQREIALAAGLLRIFFHDCFPQGCDASVLLTGDGSELQLPPNLTLQPRALQLIESIRAQVHAACGPVVSCADITALATRDAVAFSGGQGYDVPLGRLDSLAPAPSSAVFDLPQASSNASTLIDVFETRNLDNVDLVTLSGGHTIGKGHCSSFSNRFSEDSDFVRSLASNCSSDFNRLQDLDVTTPDVFDIKYFTNLQQGKGVFTSDQKLTADWRTEWVVNGFAGNHWWFFGQFAASMTKLGNLQGPQGNVGEIRRNSCFVRNGQSILTTTSDEGLAASA

SEQ ID NO: 26954 - DNA, 1032 bp, Triticum aestivum
aacaagctccattcatctattcttcgtctccaccgatccctttggtagaccaaccagcagcagctctcggctcacctctccctgctcctcgatctatctagtctagtcttcagtgtggccatggcgaaggtgcacccgaacctggccgtgccgtctctggggatggcggcggcggcggcggcccgcgacgacgagccggtgacactgacggtgtggcgcaagtcgctgctcttcaactgccgggggttcacggtgttcgacgccagcggcaacctggtgtaccgcgtggacatctacgcgtccgactcccgcgccgaggtggtgctcatggacgccgcggggcggccggtgctcaccgtccgccgcaagaaggccatcagcctcatgggcgaccagtggctggtgttccccggcgaggagacgcgcgcgccgccgctctacgcggtgaagcgcacgccgcagtacatgcgcggcggcggcaagtcgacggcgcacgtggcggcgtgcgcgggcggcgcgcggtacgaggtggaggggtcgtacgcgcggcggtgctgcgcggtgtacgacgagcagcggcgcgcggtggtggaggtgcagcccaaggaggcggtgggcacggacgtgttccggatggtggtgcggccggcgggcatggacgtgtcgctggccatggccgtcgtgctcgcgctggaccagatgctcgggaggccggggctgctcaggagctggtcctcgtagcgccactgagactgggtcgcctccttcggtttgcctccttcgatttccgaaattgtttgggcccgagagcagaacagctcccatgtgccccccttctctctcttttttttgtttcctttttggaaactttctctttgatatatatgaaggtctatgtgcatcgaaatccttcttgaggtgtatggttttgttcatttttactgtaataaaaccatgcattttgtaaagattattaaagtgggatgaaactgtattactcctatacttctataaaagaagtcacactaggcc

SEQ ID NO: 26955 - protein, 206 aa, Triticum aestivum
MAKVHPNLAVPSLGMAAAAAARDDEPVTLTVWRKSLLFNCRGFTVFDASGNLVYRVDIYASDSRAEVVLMDAAGRPVLTVRRKKAISLMGDQWLVFPGEETRAPPLYAVKRTPQYMRGGGKSTAHVAACAGGARYEVEGSYARRCCAVYDEQRRAVVEVQPKEAVGTDVFRMVVRPAGMDVSLAMAVVLALDQMLGRPGLLRSWSS

SEQ ID NO: 26956 - protein, 192 aa, Triticum aestivum
MAAAAAARDDEPVTLTVWRKSLLFNCRGFTVFDASGNLVYRVDIYASDSRAEVVLMDAAGRPVLTVRRKKAISLMGDQWLVFPGEETRAPPLYAVKRTPQYMRGGGKSTAHVAACAGGARYEVEGSYARRCCAVYDEQRRAVVEVQPKEAVGTDVFRMVVRPAGMDVSLAMAVVLALDQMLGRPGLLRSWSS

SEQ ID NO: 26957 - protein, 137 aa, Triticum aestivum
MDAAGRPVLTVRRKKAISLMGDQWLVFPGEETRAPPLYAVKRTPQYMRGGGKSTAHVAACAGGARYEVEGSYARRCCAVYDEQRRAVVEVQPKEAVGTDVFRMVVRPAGMDVSLAMAVVLALDQMLGRPGLLRSWSS

SEQ ID NO: 26958 - DNA, 1474 bp, Triticum aestivum
attattcttaaccctctcgccccgcctccccgtctcctcctccggtcgcccaaccgagcaggggtgtcgccattgttgtcgcctctcacccgcaggccgcctccgcgtccgtcactaggccacgagacctaggatcccccgccccctcgctgtgacctcgccgcgatgtggtggagggcggtggccagggctcgccgccggatcccgggagcgcggcccgtgtcgacggcggcggcggggaagagcggccgcgaggtggtggtgccgcggttcggcgggccggaggtgctgcagctgaggcagggggtgcccgcgcccgatctgaagcccggcgaggtgcttgtgcgcgcgcgcgccgtctccatcaaccccctcgacttgcgaatgcgggctggctatggccgttgcatattcgagccactcctacctctcatcattggccgggacatcagtggtgaagtcgcagctacagggacttctgtgtcgtcattctatattgggcaagaagtgtttggtgccttgcatccaacagcgattagagggacatgtgctgattatgcagttctttcacaggatgagcttacttctaaaccatctacgctcactcatgtggaggccagtgcaattccctttgctgcgttgactgcgtggcgtgctttatatggtactgctggaatttctaaaggacaaagattacttgtgcttggtggaggaggagcagttgggctttctgctgttcagcttgcggtagctgcagggtgtagtgtttcagctacctgtggagcccaaagtattgagcaagttttggcagccggtgctgaaaaggctattgattacgccactgaggatactgaatcaacagttacaggaaagtttgatgctgtgttagacacaataggagtagctgaaactgaaagaattggtattaatcttctgagaagaggcggacattatatgacccttcagggagaggcagcttcactagcagatagatatggattatatgtgggacttcctgctgctaccgctactttactgaagaaacagatgcagtatcgttgttctcatgggatagagtactggtggacatacatgagagctgatcctgacggtctccatgagatccagaggctgtccggagctggaaaactacagatacctgtggagaagacttttcctatcagccaagtaagagaagctcatgaggccaaggagaaaagactggtgcctggcaaggtggttctagagttcgactagtgttagcaggggttcgtccgacgatcacggaaggaccgacgttccttcttaattgtaccatgatgtttattttttgtctttctcccaaagaaaagtcgtgcggctttgaagctctaaatttgctcgttctctaggtagtactacagggttattttgtcggggtttagtgtaaatgcagtaaataatgatatgcaatacgaagagacttatttcagtg

SEQ ID NO: 26959 - protein, 363 aa, Triticum aestivum
MWWRAVARARRRIPGARPVSTAAAGKSGREVVVPRFGGPEVLQLRQGVPAPDLKPGEVLVRARAVSINPLDLRMRAGYGRCIFEPLLPLIIGRDISGEVAATGTSVSSFYIGQEVFGALHPTAIRGTCADYAVLSQDELTSKPSTLTHVEASAIPFAALTAWRALYGTAGISKGQRLLVLGGGGAVGLSAVQLAVAAGCSVSATCGAQSIEQVLAAGAEKAIDYATEDTESTVTGKFDAVLDTIGVAETERIGINLLRRGGHYMTLQGEAASLADRYGLYVGLPAATATLLKKQMQYRCSHGIEYWWTYMRADPDGLHEIQRLSGAGKLQIPVEKTFPISQVREAHEAKEKRLVPGKVVLEFD

SEQ ID NO: 26960 - protein, 290 aa, Triticum aestivum
MRAGYGRCIFEPLLPLIIGRDISGEVAATGTSVSSFYIGQEVFGALHPTAIRGTCADYAVLSQDELTSKPSTLTHVEASAIPFAALTAWRALYGTAGISKGQRLLVLGGGGAVGLSAVQLAVAAGCSVSATCGAQSIEQVLAAGAEKAIDYATEDTESTVTGKFDAVLDTIGVAETERIGINLLRRGGHYMTLQGEAASLADRYGLYVGLPAATATLLKKQMQYRCSHGIEYWWTYMRADPDGLHEIQRLSGAGKLQIPVEKTFPISQVREAHEAKEKRLVPGKVVLEFD

SEQ ID NO: 26961 - DNA, 1045 bp, Triticum aestivum
aaaactcgcaaagcccgtagcaaactcgcaatctctcaaacaagctcatggccacctcggcgatcacatccccagcggcgccggaagcgacgctgcccctggccggccgcgtggccatcgtcaccggcgcgtcccgcgggatcgggcgcggcatcgcgacccacctgtcgtccctcggcgccagcctggtcctcgggtacgcctccagctctcagcaggcggacgcgctggccgctgagctcccgcgcgccgtggcggtgaaggccgacgtctcggacgaggcgggcgtccggtccctctttgacgccgcggagaccgccttcggcggcccggcgcacatcctcgtggcctgcgctggccagggcatcgggacctacccgtccctcgccaacaccgccacctcggacttcgacaacgtgttcgccgtgaacacccgaggtgcgtttctgtgcctgcgcgaggcggcgaaccggctgcaccgcgggggcgggggccggatcgtggccgtgtcctcgacgctggcggcgacgctgctccccggctacgcggcgtacgtggcgtctaaggcggccgtggaggcgatggtgcgggtggccgcgaaggagctcgggtcggcacgggtgacggtgaactgcatcgcgccggggccggtggcgacggagctcttcttcgacgggaagagcgaggaggcggtggagaggttcagggctgggcacccgatggggcggcttggggaggtcggcgacatcgcgcctgcggtggggttcctctgcaccgacgcggccgagtgggtgaacggccaggtcattcggctcaacggcggcattgcttaattcattggcgtggctgtcgctctgtttctccctttcaaacggatatctccgttttcttaaaaaattgctgtgcctgtttttttgttggaggattgtgattagctgcttttggtgcttgaataaagaagaaaacacaatgatatggtgtactccgtaaactattgtaggtgctcagagttgcatgtatcttttttatgaaagaagttgcacgc

SEQ ID NO: 26962 - protein, 261 aa, Triticum aestivum
MATSAITSPAAPEATLPLAGRVAIVTGASRGIGRGIATHLSSLGASLVLGYASSSQQADALAAELPRAVAVKADVSDEAGVRSLFDAAETAFGGPAHILVACAGQGIGTYPSLANTATSDFDNVFAVNTRGAFLCLREAANRLHRGGGGRIVAVSSTLAATLLPGYAAYVASKAAVEAMVRVAAKELGSARVTVNCIAPGPVATELFFDGKSEEAVERFRAGHPMGRLGEVGDIAPAVGFLCTDAAEWVNGQVIRLNGGIA

SEQ ID NO: 26963 - DNA, 1492 bp, Triticum aestivum
ctcactcacgtcgcctctctgccagccctcgacatggcgcgttccactcgtctcgtcgcttccaccgccacggctctcctcctcctcctcctgtcggcgtgctcgtgccgcgcggccggcgacagcccgagcgccgtggtgctggcggtgaggaaggacggcgcgacggggcagtacctgacgggcttccggcagcgcacgccccaggtgccggtgacggccgtgctcgacctcggcggcggcacgctctgggtggactgcgacgccgggtacgtgtcctcgtcctacgcgcgcgtgccgtgcgcgtccaagctgtgccgcctcgccaagaccggcgcctgcgccaccagctgcgtcggcaagccatccccggggtgcctcaacgatacctgcggcgggttcccggagaacaccgtcacgcgcgtcagcaccggcgggaacctcatcacggacgtgctgtcggtgtccaccaccttccgcccggggccggggccgctcgccaccgcgccggcgtttctgttcacgtgcggagccacgttcctgaccgagggcctggccgccggcgccaccggcatggcgtcgctcagccgcgcccgcttcgcgctcccgacgcagctcgccgccgccttccgcttctcccgcaagttcgcgctctgcctcacttcgacctccgcggccggggccgtcgtcttcggcgacgcgccctacgcgttccagcccggggtggacctctccaagtcgctcctctacaccccgctgctcgtcaacaacgtgagcaccgccggcgtctccggcgagaaggacaagtcgaacgagtacttcatcggcgtgacggccatcaaggtgaacgggcgcgccgtgccgctgaacgcctcgctgctggtcatcgacaagcagggcggcggcggcaccaagctcagcacggtggcgccctacaccgtgctggagacctccatccacaaggcggtcacggacgcgttcgcggcggagacggccatgatcccccgggtgcgggccgtggcgccgttcaagctctgctacgacgggagcaaggtggggagcacgcgcgtgggcccggccgtgccgaccgtcgagctggtgctgcagagcgaggccgcgtcgtgggtggtgttcggggccaactcgatggtggccgtcaagggcggcgcgctgtgccttggcgtggtggacggcggcgcggccccgcggacgtcggtggtggtcgggggccacatgatggaggacaacctgctggagttcgatctgcagcggtcgcggctcgggttcagctcctccctgctcttccgccagaccacctgcaacaacttccgccttgggtagaaagaaacaaatggcatccggatgggatcgcagaagatgatctgggcgcttgcgtcaagcagactgcaatcgaaatttgtttgtgtgttgtgtttccccttgggttctgttttggctgtttgaataatcaacaggagatcgaacgattgtc

SEQ ID NO: 26964 - protein, 496 aa, Triticum aestivum
HSRRLSASPRHGAFHSSRRFHRHGSPPPPPVGVLVPRGRRQPERRGAGGEEGRRDGAVPDGLPAAHAPGAGDGRARPRRRHALGGLRRRVRVLVLRARAVRVQAVPPRQDRRLRHQLRRQAIPGVPQRYLRRVPGEHRHARQHRREPHHGRAVGVHHLPPGAGAARHRAGVSVHVRSHVPDRGPGRRRHRHGVAQPRPLRAPDAARRRLPLLPQVRALPHFDLRGRGRRLRRRALRVPARGGPLQVAPLHPAARQQREHRRRLRREGQVERVLHRRDGHQGERARRAAERLAAGHRQAGRRRHQAQHGGALHRAGDLHPQGGHGRVRGGDGHDPPGAGRGAVQALLRREQGGEHARGPGRADRRAGAAERGRVVGGVRGQLDGGRQGRRAVPWRGGRRRGPADVGGGRGPHDGGQPAGVRSAAVAARVQLLPALPPDHLQQLPPWVERNKWHPDGIAEDDLGACVKQTAIEICLCVVFPLGFCFGCLNNQQEIERL

SEQ ID NO: 26965 - protein, 446 aa, Triticum aestivum
LTHVASLPALDMARSTRLVASTATALLLLLLSACSCRAAGDSPSAVVLAVRKDGATGQYLTGFRQRTPQVPVTAVLDLGGGTLWVDCDAGYVSSSYARVPCASKLCRLAKTGACATSCVGKPSPGCLNDTCGGFPENTVTRVSTGGNLITDVLSVSTTFRPGPGPLATAPAFLFTCGATFLTEGLAAGATGMASLSRARFALPTQLAAAFRFSRKFALCLTSTSAAGAVVFGDAPYAFQPGVDLSKSLLYTPLLVNNVSTAGVSGEKDKSNEYFIGVTAIKVNGRAVPLNASLLVIDKQGGGGTKLSTVAPYTVLETSIHKAVTDAFAAETAMIPRVRAVAPFKLCYDGSKVGSTRVGPAVPTVELVLQSEAASWVVFGANSMVAVKGGALCLGVVDGGAAPRTSVVVGGHMMEDNLLEFDLQRSRLGFSSSLLFRQTTCNNFRLG

SEQ ID NO: 26966 - protein, 435 aa, Triticum aestivum
MARSTRLVASTATALLLLLLSACSCRAAGDSPSAVVLAVRKDGATGQYLTGFRQRTPQVPVTAVLDLGGGTLWVDCDAGYVSSSYARVPCASKLCRLAKTGACATSCVGKPSPGCLNDTCGGFPENTVTRVSTGGNLITDVLSVSTTFRPGPGPLATAPAFLFTCGATFLTEGLAAGATGMASLSRARFALPTQLAAAFRFSRKFALCLTSTSAAGAVVFGDAPYAFQPGVDLSKSLLYTPLLVNNVSTAGVSGEKDKSNEYFIGVTAIKVNGRAVPLNASLLVIDKQGGGGTKLSTVAPYTVLETSIHKAVTDAFAAETAMIPRVRAVAPFKLCYDGSKVGSTRVGPAVPTVELVLQSEAASWVVFGANSMVAVKGGALCLGVVDGGAAPRTSVVVGGHMMEDNLLEFDLQRSRLGFSSSLLFRQTTCNNFRLG

SEQ ID NO: 26967 - DNA, 595 bp, Triticum aestivum
cgcaactcctttgcacagtcaccggtctgtactgtacctgggagtataatggaacaaccaaacagtgagaaggatgagcacgagctcagccttgacctcaccctccgcgtgagctcggcagctgaggcggagcagggcggcttcttcctctgcgtctactgcgaccgcaagttccgcagctcgcaggcgcttggtggccaccagaacgcgcacaagcacgagcgcagcctcgcccaccgccggcgggagatggccgccgccacgggtgcacacggggccggaacgcgcgcgcatgcggcgcaggacgagaggcccaggtatgtttccgccggtgatttcgtcgagccttccgctgggaaggcggggaggacggaggcaagtccgtggaaggttgctgctgctcccatgactgatgatgtggacctgtcgctcaggctatgatcgatctcttcttctagctagttgagtttctctcatggaattccgacctgcgcgcgcgtcgcgccgtattttgggctcctatttcttgtgtattctccgatcaatctgactgaatgtacttaccgaaattttcttcaaatatatgtgtgccgcc

SEQ ID NO: 26968 - protein, 146 aa, Triticum aestivum
RNSFAQSPVCTVPGSIMEQPNSEKDEHELSLDLTLRVSSAAEAEQGGFFLCVYCDRKFRSSQALGGHQNAHKHERSLAHRRREMAAATGAHGAGTRAHAAQDERPRYVSAGDFVEPSAGKAGRTEASPWKVAAAPMTDDVDLSLRL

SEQ ID NO: 26969 - protein, 130 aa, Triticum aestivum
MEQPNSEKDEHELSLDLTLRVSSAAEAEQGGFFLCVYCDRKFRSSQALGGHQNAHKHERSLAHRRREMAAATGAHGAGTRAHAAQDERPRYVSAGDFVEPSAGKAGRTEASPWKVAAAPMTDDVDLSLRL

SEQ ID NO: 26970 - DNA, 1234 bp, Triticum aestivum
aaaaaaacaacacacgacgttacacgaccatctatctactgaccggcgccaagagaagatggcgaccaagctcgcagcgatcatcgtcttggccgcgttcctcgccgggccggcggcgtgcgagggcgccagcatttgcttcaacggttggatgaggttacccaccttcaacccgcggctctgtgctcgcggccccagggtgaaccgctggcagcggggggcttctcccgcggggttaggactcagctacggctactacgacaacaggaggtcgacgtcctactgccccagggcggaagggatcgtgaggggtgccgtgagggaggccgtggccgccaaccctggcattggtgcgggcctcatccgtctcttctttcacgactgcttcgttcgggggtgcgatgcttccgtcctcctcaccacgaccaactccaagaacagcgacacggagagggaaggccctcccaacaagaacagccttcgtgggttcgaggtgatcgacgcggccaaggcggcgatcgaggccgcctgccccagcagggtctcatgcgccgacatcgtcgccttctccgcccgcgacgtgtcctacttcctcagcaaccgtaggatcaacgtcccgatgccgggcggccgctacgacgggcgcgagtccttcgccaacgagaccgaccagctgcccgggcccttctccaacgtcacggagctccaggcgagtttcgcggccaaggggctcaccttcaacgagatggtcacgctctccggcgcgcacaccatcggccgcgccagctgcaggttcttctccagccgcttccctgagatggagccggcatttgccgccaagctcagggcccaatgcaacggcaacgacaacaccaacgtgaaccaagatgatgtgacccccgatgtcctggacaagcagtactaccggaacgtgatcgacaggaaagtgctcttcacctcggacgccgtgctcaactcgatggaaacgatgacgcaggtaatagaaaacgcgaacagggcagggacgtgggagagaaagttcgagaaagccatggagaatatgggaaaaatcgggatcaagaccagaggcgaccaaggcgcagagatcagaaaggtatggtcgagagtcaacaactagcgttggctagtagtaatgcgtggtggttggctggctccatggtgggatcgctcgatgtactaacttcgtccagcgaatgtcattgttggttttctc

SEQ ID NO: 26971 - protein, 378 aa, Triticum aestivum
KKQHTTLHDHLSTDRRQEKMATKLAAIIVLAAFLAGPAACEGASICFNGWMRLPTFNPRLCARGPRVNRWQRGASPAGLGLSYGYYDNRRSTSYCPRAEGIVRGAVREAVAANPGIGAGLIRLFFHDCFVRGCDASVLLTTTNSKNSDTEREGPPNKNSLRGFEVIDAAKAAIEAACPSRVSCADIVAFSARDVSYFLSNRRINVPMPGGRYDGRESFANETDQLPGPFSNVTELQASFAAKGLTFNEMVTLSGAHTIGRASCRFFSSRFPEMEPAFAAKLRAQCNGNDNTNVNQDDVTPDVLDKQYYRNVIDRKVLFTSDAVLNSMETMTQVIENANRAGTWERKFEKAMENMGKIGIKTRGDQGAEIRKVWSRVNN

SEQ ID NO: 26972 - protein, 359 aa, Triticum aestivum
MATKLAAIIVLAAFLAGPAACEGASICFNGWMRLPTFNPRLCARGPRVNRWQRGASPAGLGLSYGYYDNRRSTSYCPRAEGIVRGAVREAVAANPGIGAGLIRLFFHDCFVRGCDASVLLTTTNSKNSDTEREGPPNKNSLRGFEVIDAAKAAIEAACPSRVSCADIVAFSARDVSYFLSNRRINVPMPGGRYDGRESFANETDQLPGPFSNVTELQASFAAKGLTFNEMVTLSGAHTIGRASCRFFSSRFPEMEPAFAAKLRAQCNGNDNTNVNQDDVTPDVLDKQYYRNVIDRKVLFTSDAVLNSMETMTQVIENANRAGTWERKFEKAMENMGKIGIKTRGDQGAEIRKVWSRVNN

SEQ ID NO: 26973 - protein, 328 aa, Triticum aestivum
MRLPTFNPRLCARGPRVNRWQRGASPAGLGLSYGYYDNRRSTSYCPRAEGIVRGAVREAVAANPGIGAGLIRLFFHDCFVRGCDASVLLTTTNSKNSDTEREGPPNKNSLRGFEVIDAAKAAIEAACPSRVSCADIVAFSARDVSYFLSNRRINVPMPGGRYDGRESFANETDQLPGPFSNVTELQASFAAKGLTFNEMVTLSGAHTIGRASCRFFSSRFPEMEPAFAAKLRAQCNGNDNTNVNQDDVTPDVLDKQYYRNVIDRKVLFTSDAVLNSMETMTQVIENANRAGTWERKFEKAMENMGKIGIKTRGDQGAEIRKVWSRVNN

SEQ ID NO: 26974 - DNA, 504 bp, Triticum aestivum
ctgtgcttgaaccacaagacaagctcgatcacgattcacgcgccgcgcgttgtcagtgcgaagcagctgttgtgcgctctgcagagacgacccatggcctcgagaacagcggcggtgccggaggtggccctgcggtccggcgacgcgaggcccatgccggccatcggcatgggcaccgcccagtccccggtggtgccggacaccaccgtgaaggccgtgctggaggccgtggaggtgggctaccgccacttcgacacggcctccatgtacgcgacggagcggcccctgggcgaggccctcgcggaggcggtgcgccgcgggctcctggcgtcccgggaggaggtgttcgtcacgtccaagctctgttgcacgcagtgccacccgcacctcgtgctcccgtccctccaggagagcctccagaacctgcagatggagtacgtggacctgtatctgatccactggccgatcagcctgaagcccgggcccgtggtgttcccggtgaag

SEQ ID NO: 26975 - protein, 168 aa, Triticum aestivum
LCLNHKTSSITIHAPRVVSAKQLLCALQRRPMASRTAAVPEVALRSGDARPMPAIGMGTAQSPVVPDTTVKAVLEAVEVGYRHFDTASMYATERPLGEALAEAVRRGLLASREEVFVTSKLCCTQCHPHLVLPSLQESLQNLQMEYVDLYLIHWPISLKPGPVVFPVK

SEQ ID NO: 26976 - protein, 167 aa, Triticum aestivum
VLEPQDKLDHDSRAARCQCEAAVVRSAETTHGLENSGGAGGGPAVRRREAHAGHRHGHRPVPGGAGHHREGRAGGRGGGLPPLRHGLHVRDGAAPGRGPRGGGAPRAPGVPGGGVRHVQALLHAVPPAPRAPVPPGEPPEPADGVRGPVSDPLADQPEARARGVPGE

SEQ ID NO: 26977 - protein, 137 aa, Triticum aestivum
MASRTAAVPEVALRSGDARPMPAIGMGTAQSPVVPDTTVKAVLEAVEVGYRHFDTASMYATERPLGEALAEAVRRGLLASREEVFVTSKLCCTQCHPHLVLPSLQESLQNLQMEYVDLYLIHWPISLKPGPVVFPVK

SEQ ID NO: 26978 - DNA, 1421 bp, Triticum aestivum
attcccaggcacatcccatttccaatcccccacccttcctctctctctcccccgcccctagccgtcgccggagagagagagggacgcggccgcgggagaagaaggagggaagatgatgatgacacgggcctccatgggggccatggagggcgcggcgctggacgaggtggtgcggcgattggtcgagggcggccgcggcgggcggcaggtgcagctgtccgaggcggagatccggcagctctgcgtcgacgccaagcgggttttcctgtcccagccgaacctcctccgcatccaggcccccgtcaagatctgcggtgatatccatggtcagtttgttgatcttctgaggttgtttgatttgggtggttatcctccaacctcaacctatgtattcctcggagactacgtagatagaggcaaacagagcttggaaactatatgcttactgctggcctacaaaataaggtaccctgacaaggttttcctgttaaggggtaaccatgaagatgcaaaaatcaacagagtttatggtttctatgatgaatgcaagaggaggttcaatgttcgactgtggaagatattctctgattgcttcaactgcctgcctattgcagcactcattgacgacaagatactgtgcatgcatggtggcctttcacctgaactgactaacctggaccaaataaaggatattgagaggccggctgagattcctgattatggtctcctgtgtgatttgctttggtctgatcctagccctgacggagaagggtggggggagagtgacagaggtgtttcatgtacgtttggtgcagatatgcttatagagttcttggagaaaaatgatcttgatcttatctgccgagcccatcaggtggtagaagatggttatgagttcttcgcacagcggagattagtcaccatcttctcagctccaaattactgcggggaattcgataatgtaggtgctctgttgagcatagatgaaaatctaatgtgctcatttcaaatcttgaagccaaatgaaacaggcacatcgcgggtaaaaagacaaattccaaataagccagcaaccgggggaagtgcctgatctgatcaacatccattccttcaatattagcatcgtcggctcgaagggggtgatctgatctattgtttggatccaccatggcatggcaatattcatccaccagccaattgtcttgcttaaccaccctttgccgagcatttgtaaatgtccattggctctgcactcgttttctctgtacagaattaggccggatttaacagcaccacctattctggttgttcttcctggttgcgcggcatctgtttttgtaagttacttttgtggtacatttttgcctgtggatgttgatagcttctgtttgtgagcatctattatttgccttatgtttgtc

SEQ ID NO: 26979 - protein, 325 aa, Triticum aestivum
MMMTRASMGAMEGAALDEVVRRLVEGGRGGRQVQLSEAEIRQLCVDAKRVFLSQPNLLRIQAPVKICGDIHGQFVDLLRLFDLGGYPPTSTYVFLGDYVDRGKQSLETICLLLAYKIRYPDKVFLLRGNHEDAKINRVYGFYDECKRRFNVRLWKIFSDCFNCLPIAALIDDKILCMHGGLSPELTNLDQIKDIERPAEIPDYGLLCDLLWSDPSPDGEGWGESDRGVSCTFGADMLIEFLEKNDLDLICRAHQVVEDGYEFFAQRRLVTIFSAPNYCGEFDNVGALLSIDENLMCSFQILKPNETGTSRVKRQIPNKPATGGSA

SEQ ID NO: 26980 - protein, 324 aa, Triticum aestivum
MMTRASMGAMEGAALDEVVRRLVEGGRGGRQVQLSEAEIRQLCVDAKRVFLSQPNLLRIQAPVKICGDIHGQFVDLLRLFDLGGYPPTSTYVFLGDYVDRGKQSLETICLLLAYKIRYPDKVFLLRGNHEDAKINRVYGFYDECKRRFNVRLWKIFSDCFNCLPIAALIDDKILCMHGGLSPELTNLDQIKDIERPAEIPDYGLLCDLLWSDPSPDGEGWGESDRGVSCTFGADMLIEFLEKNDLDLICRAHQVVEDGYEFFAQRRLVTIFSAPNYCGEFDNVGALLSIDENLMCSFQILKPNETGTSRVKRQIPNKPATGGSA

SEQ ID NO: 26981 - protein, 323 aa, Triticum aestivum
MTRASMGAMEGAALDEVVRRLVEGGRGGRQVQLSEAEIRQLCVDAKRVFLSQPNLLRIQAPVKICGDIHGQFVDLLRLFDLGGYPPTSTYVFLGDYVDRGKQSLETICLLLAYKIRYPDKVFLLRGNHEDAKINRVYGFYDECKRRFNVRLWKIFSDCFNCLPIAALIDDKILCMHGGLSPELTNLDQIKDIERPAEIPDYGLLCDLLWSDPSPDGEGWGESDRGVSCTFGADMLIEFLEKNDLDLICRAHQVVEDGYEFFAQRRLVTIFSAPNYCGEFDNVGALLSIDENLMCSFQILKPNETGTSRVKRQIPNKPATGGSA

SEQ ID NO: 26982 - DNA, 866 bp, Triticum aestivum
aaacactagccacactcgctgacagagtcactgggaagaggcgattcctcccaccaccaggttcccccaaatcgctcgcacccgccactaaccctagcgacatctgcgctcccaatcgctcggcctctcgccggagctccagatccgcggccgcttcctcccgcgctggtggtgaccttcccggatcggagccaagatgacggagtcgatggtgcggaacaagccggggatggcgagcgtcaaggacatgccggtgctgcaggacgggccgccgccgggcgggttcgcgcccgtgcgctacgcgcgccgcatccccaacaagggccccagcgccatcgccctcttcctcaccaccttcggcgccttctcctggggcatgtaccaggtcggacaggggaacaaggtccgccgtgcactcaaggaggagaaaattgctgcccgtagtgctatactgccgatgctccaagctgaagaggatgaaagatttgtcaaagaatggaagaagtatcttgaggaggaagcgaggatcatgaaaaatgttcctggatggaaagttggtgagagcgtgtacaattctgggaaatggatgcctcctgcaaccggtgagctgcgtccggaggtttggtaaggtccaaggtcttgcttcagcccatcgaggatggcatcgtgccttgagggcatgaataaggctttcagacctggatacccaaaatttgctacgaggaatacatacttgagcattcgtcgtgtatttcttctgttgacggaatttgaatggctaataattggacagagcaagccgactttggtctttatatgaaccatcttcttttgttgatgtaacgtgtctttgtattgctacggct

SEQ ID NO: 26983 - protein, 143 aa, Triticum aestivum
MTESMVRNKPGMASVKDMPVLQDGPPPGGFAPVRYARRIPNKGPSAIALFLTTFGAFSWGMYQVGQGNKVRRALKEEKIAARSAILPMLQAEEDERFVKEWKKYLEEEARIMKNVPGWKVGESVYNSGKWMPPATGELRPEVW

SEQ ID NO: 26984 - protein, 139 aa, Triticum aestivum
MVRNKPGMASVKDMPVLQDGPPPGGFAPVRYARRIPNKGPSAIALFLTTFGAFSWGMYQVGQGNKVRRALKEEKIAARSAILPMLQAEEDERFVKEWKKYLEEEARIMKNVPGWKVGESVYNSGKWMPPATGELRPEVW

SEQ ID NO: 26985 - protein, 132 aa, Triticum aestivum
MASVKDMPVLQDGPPPGGFAPVRYARRIPNKGPSAIALFLTTFGAFSWGMYQVGQGNKVRRALKEEKIAARSAILPMLQAEEDERFVKEWKKYLEEEARIMKNVPGWKVGESVYNSGKWMPPATGELRPEVW

SEQ ID NO: 26986 - DNA, 1338 bp, Triticum aestivum
ttacctagaacatcctaatcgaaaaaatttactcccaaaccaagccaaacgaaccagcgccgcagcccgcagcgcacccatcccaccaaacaaacagctagcaggcgaggcgacccgctccgacctcgagccgatgccgacgccgtacagcgcggcggcgctgcagcagcaccagcgtctggtctcctcctccggcggcctggcggcgacgggggcccacaggtgcggcgagcacgacgggacggtgccgccggaggtggcgcggcaccacgagcacgcggcgccgggggggcgctgctgctgctcggcggtggtgcagcgcgtggcggcgccggcggcggacgtgtgggccgtggtccggcgcttcgaccagccgcaggcgtacaagagcttcgtgcgcagctgcgcgctgctggacggcgacggcggcgtgggcacgctgcgcgaggtgcgcgtggtgtcgggcctccccgcggcgtccagccgggagcggctggagatcctggacgacgagcggcacgtgctgagcttcagcgtggtgggcggcgagcaccggctccgcaactaccggtcggtgaccacggtgcacccggcgccgggggagagcgcgtcggcgacgctggtggtggagtcgtacgtggtggacgtgccccccgggaacacccccgaggacacccgcgtcttcgtggacaccatcgtcaagtgcaacctccagtccctcgcccgcaccgccgagaagctcgccggccggggggcggcctacggcgcgctgccgtgatcgatcgatccgaccggaacccgcagtcgccggcccgcgcctccctccggtggtcaactcgagcccggccctcccggctcggccgcaggggcgtttcggtaaaatcgcgcaccgattttccgattaatgaatccaaatccatggtggtggtggtgcgcgggtggtggcgaccgattatttttctcttgttctttctggcgtgaaggcgaggggtcggtgggtcggttcggaccggtcggtgcgctttcgcggctggcccctcgctgtttctccttatcgcgagacacacccccctgtagtagtggtagctctagtttttgttcgttcccctttgtttgatctcgggtaagatgatgataagatttgacaggaattgaggagtaaaaactagcttcgaccgatgcaaggctcatcgacatctctgtatatatacttttagtttcccgttccattgtgtgtgttgtcatcatcaccattttggtcgtgacatttcatcaatcaaatttacaagatgttcaacgaggcacaacggaccagagccgtcacggtcttgttggacc

SEQ ID NO: 26987 - protein, 258 aa, Triticum aestivum
YLEHPNRKNLLPNQAKRTSAAARSAPIPPNKQLAGEATRSDLEPMPTPYSAAALQQHQRLVSSSGGLAATGAHRCGEHDGTVPPEVARHHEHAAPGGRCCCSAVVQRVAAPAADVWAVVRRFDQPQAYKSFVRSCALLDGDGGVGTLREVRVVSGLPAASSRERLEILDDERHVLSFSVVGGEHRLRNYRSVTTVHPAPGESASATLVVESYVVDVPPGNTPEDTRVFVDTIVKCNLQSLARTAEKLAGRGAAYGALP

SEQ ID NO: 26988 - protein, 214 aa, Triticum aestivum
MPTPYSAAALQQHQRLVSSSGGLAATGAHRCGEHDGTVPPEVARHHEHAAPGGRCCCSAVVQRVAAPAADVWAVVRRFDQPQAYKSFVRSCALLDGDGGVGTLREVRVVSGLPAASSRERLEILDDERHVLSFSVVGGEHRLRNYRSVTTVHPAPGESASATLVVESYVVDVPPGNTPEDTRVFVDTIVKCNLQSLARTAEKLAGRGAAYGALP

SEQ ID NO: 26989 - DNA, 1027 bp, Triticum aestivum
cgcctgccaccaccaccagcacaccgtcgtcctcacacttgcctctcatcctccctgccgaggccgcagcggtcagcaggcggcgcggacgcttctcctgggcaaggacaggcaagcgacaggcatgggcttcccggtcggctactccgagcttctgctccccaagcagctgctccacctcctcctcctgctcggttacctccgccgcttcctcctctgggccttcgacgccgtcggcctcggcgacctgctggatctcggggacgagcacctgccgcaggaccacgcgcgcgccgaccacgccgccgcggcggcgcagctgctgcagcaccggcggcccgagttccggcccgtcacggccatggtcatcgaggaggtgctccccgtggtgcggttcgacgagctggaggccgcggcgtgcgtcgacggggactgcgccgtgtgcctcagcggcatcggcggcggcgacgaggtgcggcggctcagcaactgccgccacgccttccaccggggctgcctggaccgctggatggagcacgaccagcgcacctgcccgctctgccgcgcgccgctcatccccgacgagatggccggcgcgctctgggccgccgccgccggcgtgcccgacgcctccgacttcgacttcttctacctgggcgccgcctcggcgccggccaccccgacgctgctgcggccgcacgagctgctgctcaccggcctgggcggctaccagtgagccgagcccccgattcggtccaggcatccggccgccgccgccccgaatgcgcaattttacaggactgaattggtctccgcgtccggacgccggcgagctgcctggccccagccgtgtacatagggcgaaatgagtaaagtaaccgccccgaaaagggctaggagattagattcttgttatgtatagctagattccatcttccaagtttgcggagctgtggatcttcctttcttctgccaattaaatttgttgatgagctaaaaaaaaaaaaaaaaaagcttatcgataccg

SEQ ID NO: 26990 - protein, 288 aa, Triticum aestivum
PATTTSTPSSSHLPLILPAEAAAVSRRRGRFSWARTGKRQAWASRSATPSFCSPSSCSTSSSCSVTSAASSSGPSTPSASATCWISGTSTCRRTTRAPTTPPRRRSCCSTGGPSSGPSRPWSSRRCSPWCGSTSWRPRRASTGTAPCASAASAAATRCGGSATAATPSTGAAWTAGWSTTSAPARSAARRSSPTRWPARSGPPPPACPTPPTSTSSTWAPPRRRPPRRCCGRTSCCSPAWAATSEPSPRFGPGIRPPPPRMRNFTGLNWSPRPDAGELPGPSRVHRAK

SEQ ID NO: 26991 - protein, 267 aa, Triticum aestivum
RLPPPPAHRRPHTCLSSSLPRPQRSAGGADASPGQGQASDRHGLPGRLLRASAPQAAAPPPPPARLPPPLPPLGLRRRRPRRPAGSRGRAPAAGPRARRPRRRGGAAAAAPAARVPARHGHGHRGGAPRGAVRRAGGRGVRRRGLRRVPQRHRRRRRGAAAQQLPPRLPPGLPGPLDGARPAHLPALPRAAHPRRDGRRALGRRRRRARRLRLRLLLPGRRLGAGHPDAAAAARAAAHRPGRLPVSRAPDSVQASGRRRPECAILQD

SEQ ID NO: 26992 - protein, 244 aa, Triticum aestivum
ACHHHQHTVVLTLASHPPCRGRSGQQAARTLLLGKDRQATGMGFPVGYSELLLPKQLLHLLLLLGYLRRFLLWAFDAVGLGDLLDLGDEHLPQDHARADHAAAAAQLLQHRRPEFRPVTAMVIEEVLPVVRFDELEAAACVDGDCAVCLSGIGGGDEVRRLSNCRHAFHRGCLDRWMEHDQRTCPLCRAPLIPDEMAGALWAAAAGVPDASDFDFFYLGAASAPATPTLLRPHELLLTGLGGYQ

SEQ ID NO: 26993 - protein, 203 aa, Triticum aestivum
MGFPVGYSELLLPKQLLHLLLLLGYLRRFLLWAFDAVGLGDLLDLGDEHLPQDHARADHAAAAAQLLQHRRPEFRPVTAMVIEEVLPVVRFDELEAAACVDGDCAVCLSGIGGGDEVRRLSNCRHAFHRGCLDRWMEHDQRTCPLCRAPLIPDEMAGALWAAAAGVPDASDFDFFYLGAASAPATPTLLRPHELLLTGLGGYQ

SEQ ID NO: 26994 - DNA, 1117 bp, Triticum aestivum
tctggggtgcaccgtacaattccacgccgcgttttctgcactttccagacagcacggaagcaaaacgatagaggcgtatccactatggcggcaacctactgcgcctaccccgccgccgccgccgccgccgccgcaaaccctaccagacgccgcctgcaaaccctaaccgcgccgggcgccctacctgctgctcggaaacccagccgccaaccccccaccttcctctctttccggctccccaatgcagcgctgccgccgctccgcgtcgctggcgctgacccgcaggttgtaaatggcgaagatttccctcctatgaatgacctaattcgactatacaagaaagcctttctagatggaaacgaagatgttgttagtgacatcgagaaggcaatcactagcatggaggaagagagaagtaaatcagcttctcagtttgaaagtatcacagctgaaatagcttcagggaagaataagtttcttcgcttaaatgctgatctagagaattttcggaagcagactgaaaaggaccgtgcaaagtttacatcgaatatacaagtggaacttgtacagagtctgttgcctctggttgacagctttgagaaaacaaatgtagagatcaccctagagactgagaaagagcagaagattagcgcaagctatcaaggcatatacaagcaattagtagaaacactgaaaaacttaggcgtaggggttgtggaaactgttggcaagccatttgatccagtggttcatgaggctatcgcgcgtgaagaatctacagagttcaaggcaggcatcgtctcacacgaagtccaccgagggttccttctgagggagagggtgctaaggcctgccgcggtgaaggtctctaatggtcctggtgaccaaaacgtgagctccacatcttcggaggagcctgtggaggataccaaagaggatgccgctgtgtgaatccgccagaaacctggcgccaacatttaccaagtcgttgtagctggagcaccattgtttgggagctctcgttgtactgttaatatggagcagagtcatttatgagaatgtacatctatggtgatctgcaactttgcaagtatcctaaagaattttactttggtgc

SEQ ID NO: 26995 - protein, 316 aa, Triticum aestivum
SGVHRTIPRRVFCTFQTARKQNDRGVSTMAATYCAYPAAAAAAAANPTRRRLQTLTAPGALPAARKPSRQPPTFLSFRLPNAALPPLRVAGADPQVVNGEDFPPMNDLIRLYKKAFLDGNEDVVSDIEKAITSMEEERSKSASQFESITAEIASGKNKFLRLNADLENFRKQTEKDRAKFTSNIQVELVQSLLPLVDSFEKTNVEITLETEKEQKISASYQGIYKQLVETLKNLGVGVVETVGKPFDPVVHEAIAREESTEFKAGIVSHEVHRGFLLRERVLRPAAVKVSNGPGDQNVSSTSSEEPVEDTKEDAAV

SEQ ID NO: 26996 - protein, 288 aa, Triticum aestivum
MAATYCAYPAAAAAAAANPTRRRLQTLTAPGALPAARKPSRQPPTFLSFRLPNAALPPLRVAGADPQVVNGEDFPPMNDLIRLYKKAFLDGNEDVVSDIEKAITSMEEERSKSASQFESITAEIASGKNKFLRLNADLENFRKQTEKDRAKFTSNIQVELVQSLLPLVDSFEKTNVEITLETEKEQKISASYQGIYKQLVETLKNLGVGVVETVGKPFDPVVHEAIAREESTEFKAGIVSHEVHRGFLLRERVLRPAAVKVSNGPGDQNVSSTSSEEPVEDTKEDAAV

SEQ ID NO: 26997 - protein, 212 aa, Triticum aestivum
MNDLIRLYKKAFLDGNEDVVSDIEKAITSMEEERSKSASQFESITAEIASGKNKFLRLNADLENFRKQTEKDRAKFTSNIQVELVQSLLPLVDSFEKTNVEITLETEKEQKISASYQGIYKQLVETLKNLGVGVVETVGKPFDPVVHEAIAREESTEFKAGIVSHEVHRGFLLRERVLRPAAVKVSNGPGDQNVSSTSSEEPVEDTKEDAAV

SEQ ID NO: 26998 - DNA, 984 bp, Triticum aestivum
acaccaaccaccacctcctccgaggcacgaagtccaccacgcccccgcccgccccgcagccggccggcgacgatgtgcaccctggagcggcgcggccgggtcttcgtcctcaccctgacgggcgaggaccagcaccggctgggccacccgctcatcgccgccatccgctccgcgctggccgaggtcctggccgcggcccaggcccagccgcagggcccgggggcggccctggtgacggtcgccgagggccgcttcttctccaacgggctcgacatcgggtgggcgggcacctcccgcgcgcggctcggggagctcgtcgacgcgctccgccccgtcgccgccgacctgctggccctccccatgcccaccgtcgccgccgtcacgggccacgcctccgccgccggcttcctcctcgcgctctgccacgactaccgcgtcatgcgcgccgaccgcggcgtgctctacatgagcgaggtcgacatcggcctccccctcccgccctacttcgtgcacgtgctccgcgccaagatctcccaggcgcaggccctgcgggacgtggtgctgcgcgggaagaagctccgggcgcccgaggccagggagatgggcgtcgtcgacgtcgtctgccccggcgcccccgagaccgccgccgaggccctcaagctcgccgagcagctcgccgccaggaagtgggacggcgccgtgtacgcgtcgattaggatgtccatgttccccgatgcgtgcagggccgtcgggatcgccgtggagagcgacgaggagaagagcaggcacttcgcctccaggctctgatcaggacacagattggagagtgtctatgtaacctgaaatctctcttggtattctgcacctgtacattgatcagccatcggtgctctgtatgaagcaagcagtacatacttctgcagacgttgtatctccttgctttgggagcatgaaataaacacaacgcttgtgtacgactgttgg

SEQ ID NO: 26999 - protein, 268 aa, Triticum aestivum
TPTTTSSEARSPPRPRPPRSRPATMCTLERRGRVFVLTLTGEDQHRLGHPLIAAIRSALAEVLAAAQAQPQGPGAALVTVAEGRFFSNGLDIGWAGTSRARLGELVDALRPVAADLLALPMPTVAAVTGHASAAGFLLALCHDYRVMRADRGVLYMSEVDIGLPLPPYFVHVLRAKISQAQALRDVVLRGKKLRAPEAREMGVVDVVCPGAPETAAEALKLAEQLAARKWDGAVYASIRMSMFPDACRAVGIAVESDEEKSRHFASRL

SEQ ID NO: 27000 - protein, 244 aa, Triticum aestivum
MCTLERRGRVFVLTLTGEDQHRLGHPLIAAIRSALAEVLAAAQAQPQGPGAALVTVAEGRFFSNGLDIGWAGTSRARLGELVDALRPVAADLLALPMPTVAAVTGHASAAGFLLALCHDYRVMRADRGVLYMSEVDIGLPLPPYFVHVLRAKISQAQALRDVVLRGKKLRAPEAREMGVVDVVCPGAPETAAEALKLAEQLAARKWDGAVYASIRMSMFPDACRAVGIAVESDEEKSRHFASRL

SEQ ID NO: 27001 - protein, 237 aa, Triticum aestivum
TNHHLLRGTKSTTPPPAPQPAGDDVHPGAARPGLRPHPDGRGPAPAGPPAHRRHPLRAGRGPGRGPGPAAGPGGGPGDGRRGPLLLQRARHRVGGHLPRAARGARRRAPPRRRRPAGPPHAHRRRRHGPRLRRRLPPRALPRLPRHARRPRRALHERGRHRPPPPALLRARAPRQDLPGAGPAGRGAAREEAPGARGQGDGRRRRRLPRRPRDRRRGPQARRAARRQEVGRRRVRVD

SEQ ID NO: 27002 - DNA, 706 bp, Triticum aestivum
cccatccaatctcgtttccaaggaaggaaggaagaaaatccagagaaactccagagaagaagaagaagaaggtcgacgacgatggcggtgttggtggagctgaccaaggagtacggctacgtggtgctcaccgtggtggcctacgccttcctcaacttctggatgagcttccaggtcggcgccgcccgcaagaagtacaaggtgttctaccccacgctgtacgccatcgagtcggagaacaaggacgccaagcgcttcaactgcgtccagagggggcaccagaactcgctggagatgatgccgctcttcttcgtcacggtgctgctcggtggcctgcagcacccggtggtcgccgccgcgctgggggtcctctacacagtcgccaggttcttctacttcaagggctacgccaccggcgtcccggacaaccgcctcaagcttggggggctcaacttcttggcgatcatcgggctgatcctctgcacggcgtccttcggcatcaaccttgtcatcagggaggcgatctgaggctccggactgatgtgcctgacttgataggcgtttgtgactcgagtcatttagacatggcggtggtgtcttttatagtgtccaaaaatgtgtgtgcctctgttttactctcacagaataaagctagatggagacggtttgtaacatcgaggttttgtagcttttgcagcacagtttt

SEQ ID NO: 27003 - protein, 234 aa, Triticum aestivum
HPISFPRKEGRKSRETPEKKKKKVDDDGGVGGADQGVRLRGAHRGGLRLPQLLDELPGRRRPQEVQGVLPHAVRHRVGEQGRQALQLRPEGAPELAGDDAALLRHGAARWPAAPGGRRRAGGPLHSRQVLLLQGLRHRRPGQPPQAWGAQLLGDHRADPLHGVLRHQPCHQGGDLRLRTDVPDLIGVCDSSHLDMAVVSFIVSKNVCASVLLSQNKARWRRFVTSRFCSFCSTV

SEQ ID NO: 27004 - protein, 175 aa, Triticum aestivum
PIQSRFQGRKEENPEKLQRRRRRRSTTMAVLVELTKEYGYVVLTVVAYAFLNFWMSFQVGAARKKYKVFYPTLYAIESENKDAKRFNCVQRGHQNSLEMMPLFFVTVLLGGLQHPVVAAALGVLYTVARFFYFKGYATGVPDNRLKLGGLNFLAIIGLILCTASFGINLVIREAI

SEQ ID NO: 27005 - protein, 148 aa, Triticum aestivum
MAVLVELTKEYGYVVLTVVAYAFLNFWMSFQVGAARKKYKVFYPTLYAIESENKDAKRFNCVQRGHQNSLEMMPLFFVTVLLGGLQHPVVAAALGVLYTVARFFYFKGYATGVPDNRLKLGGLNFLAIIGLILCTASFGINLVIREAI

SEQ ID NO: 27006 - DNA, 532 bp, Triticum aestivum
agcaagcagctgatccgagttaaccattagccaaaagtaatcttgcttttccatttcccgagagagctcagttcgtgtctgcactccagtccagtgtttgtttgagcagcagccatggcctccaaccaggacaaggcaagctaccgcgccggcgaggccaaggcccacaccgaggagaaggccggacaggtgaccggcgcggccaaggacgaggcgtgcgacgccaaggaccgggcgtcgggcgcggcggggcaagcgacggggaaggggcagggcgccgtggaggccacgaagcagaaggccggcgaggcggggcagaagacgtccgagacggcgcaggccggcaaggaccgggccgccgagggcaaggaccggaccggcagctacctcggccacgcgaccgaggggaccaagcagaaggcctccgaggcgacggggtacacgcaggacagggcttccgacgcggcgcagtacaccaaggactccgccgtcgccggcaaggacaagaccggcagcgtcctcagccaggccc

SEQ ID NO: 27007 - protein, 139 aa, Triticum aestivum
MASNQDKASYRAGEAKAHTEEKAGQVTGAAKDEACDAKDRASGAAGQATGKGQGAVEATKQKAGEAGQKTSETAQAGKDRAAEGKDRTGSYLGHATEGTKQKASEATGYTQDRASDAAQYTKDSAVAGKDKTGSVLSQA

SEQ ID NO: 27008 - DNA, 1264 bp, Triticum aestivum
aaaaacaaaatccacaaaagatcttgcagaaattaaaaataggaaacggaaacgcccccctctctctcttccagctcctcctccacgccaccccgattcgatcactccccgagcagaatccccccgattcgatcaccggcgaggagaggagggaggggatgaggaagcgggagcgggagaacccgtgcgggatctgcgggcactaccacaagtacgaggagggggagccgtgcggggtgtgcggccaccgcccgccggcgctggggcccgccgggccggcggccgcgccgcggcaggagtcggcgttcccctcggagatactcaaggacttcctcttcctcggcagctacgacaacgcctcccgctccgagctcctcaagaccatcggcatctcccacatcctcaacactgtacccttatgccaaaacctttaccggaactcttttacttatcactgccttcaagacgacaagactttgcagtttgatgatgcaatccaattcctagaacaatgcgagagggataaagcacgagtgctagtccattgcatgtcagggaaaagtaggtcagctgcatttgttgtagccttcttgatgaagtccagaggctggcgacttgcacaatgttttcagtgggtgaaagaacggaggccacaagtgcaactggctgatgcggcacagcagcagttgattgagtatgagcagaagcttttcagttgcaatgttgctccaacggattcattcccttctcttggatttggttttccgaagccgtctggtgatgtccaggtgcctatctttaaccagcaggctccagggtccatctttgagcgggtcagcccgaataacatcccgagtaatttcacatttggggccaccgaagctaagctcccggatggcagtaacttcggtgtggtcaacttggctgggactgatagcatgatggacagctcctaggttactactattgcaatgctataaacggatgagctgcccatttagtcagatttcttggaacattttgaatttctgggaaggaaggttgcattctttgtacgaggcttcttacaatatgtgcaagcattttggccgttgtgatgttctgcagtttaacatgcacgtgcgcttttgttcaactttgtagagtaattcaggtgaactgaaattacgctagaaagtttgagtagaagtatcatatgtggctgttaaattgtacagattcgtgtgtcaagaaagtacagctcaaaatctatacatgttgcccc

SEQ ID NO: 27009 - protein, 317 aa, Triticum aestivum
KQNPQKILQKLKIGNGNAPLSLFQLLLHATPIRSLPEQNPPDSITGEERREGMRKRERENPCGICGHYHKYEEGEPCGVCGHRPPALGPAGPAAAPRQESAFPSEILKDFLFLGSYDNASRSELLKTIGISHILNTVPLCQNLYRNSFTYHCLQDDKTLQFDDAIQFLEQCERDKARVLVHCMSGKSRSAAFVVAFLMKSRGWRLAQCFQWVKERRPQVQLADAAQQQLIEYEQKLFSCNVAPTDSFPSLGFGFPKPSGDVQVPIFNQQAPGSIFERVSPNNIPSNFTFGATEAKLPDGSNFGVVNLAGTDSMMDSS

SEQ ID NO: 27010 - protein, 265 aa, Triticum aestivum
MRKRERENPCGICGHYHKYEEGEPCGVCGHRPPALGPAGPAAAPRQESAFPSEILKDFLFLGSYDNASRSELLKTIGISHILNTVPLCQNLYRNSFTYHCLQDDKTLQFDDAIQFLEQCERDKARVLVHCMSGKSRSAAFVVAFLMKSRGWRLAQCFQWVKERRPQVQLADAAQQQLIEYEQKLFSCNVAPTDSFPSLGFGFPKPSGDVQVPIFNQQAPGSIFERVSPNNIPSNFTFGATEAKLPDGSNFGVVNLAGTDSMMDSS

SEQ ID NO: 27011 - protein, 161 aa, Triticum aestivum
KTKSTKDLAEIKNRKRKRPPLSLPAPPPRHPDSITPRAESPRFDHRRGEEGGDEEAGAGEPVRDLRALPQVRGGGAVRGVRPPPAGAGARRAGGRAAAGVGVPLGDTQGLPLPRQLRQRLPLRAPQDHRHLPHPQHCTLMPKPLPELFYLSLPSRRQDFAV

SEQ ID NO: 27012 - DNA, 1481 bp, Triticum aestivum
acaactcctgctccggcacccccttccctccccagccttctccaccgctctccctcccccctcgtcggcggcgaaaatctccggatccatcccggcctccgttccatcgccaccctctccacccgcaagggtttaattctgaggggaatttccgagcatttcctgcctgcctacggcgtaaatacaggtctgcgggctgtcctgcttcgtctcgcggtcttcgatgcgtggtggaggcaacacggataggatgcagcaggttcagcacacggttcagacgcacggatatggactggccagaaagcacacttatgactgggtcgttcttacgctcctagctgcggccgtggtcgtcttgcattatgctccgccgtttaatcggttcgttgggaaggatatgatggctgatattaggtacccggtgaaacagagtactgtgccagcatgggctgttcctgtaatctctatgctgtgtccagtgcttgttttcgtagcggtgtatgttgctagaagggacgtctatgaccttcaccacgcaacgctaggtgttattttcgctgtgctgatcactgccgcgttcactgatgtgataaagactgcagtagggagaccaaggccagacttcttttggcggtgttttcctgatggaaggcaggtatatgatcaagtgacaggtggtgtgatttgccatggcgagaaaggtttcttaaccgatgggcgcaagagttttcctagtggacacacgtcgtggtcttttgctggacttggatttttgtcactatacttatctggcaaaattaaggcgtttgatcgcaaaggtcatgtggcaaaactttgcatcgtgattcttcctcttcttcttgcttcgcttgttggggtttctagaatagacaactatcggcaccactgggaggatgtgcttgtcggtggcctgattggatatatcatggcagtgctgtgctatctgcacttctttcctcctccatatcaccatcaaggttggggtccctatgcgtacttccacatgctggaagagcttgaggtgcacaattcaaataatgcacaaaaccagcagtctgcaggtgagcatcatatcggattgaccggccaacaccataacgggagatcaagaaatgatttggaatctggaagtgtgtaactcacccctctgtggaaccgactagcataccttgtacagtaagcatgcgttaaaaacttttttatgtgtgcactaagcaagtattaggagtttagaactagatatgtgctatctccccctcatgtttgtgtacaaaagtcattcgctcagtatattctgacctagttgttctagggccacctgttgtatctaaatgatgtgttaacgtcgtagaccgtgtgagtggccggtggacgtactgagtacgaacttattccgctgttcaacaagcacaactgagcgatgataatgacaagcatatctagagccattgaacattccc

SEQ ID NO: 27013 - protein, 311 aa, Triticum aestivum
MRGGGNTDRMQQVQHTVQTHGYGLARKHTYDWVVLTLLAAAVVVLHYAPPFNRFVGKDMMADIRYPVKQSTVPAWAVPVISMLCPVLVFVAVYVARRDVYDLHHATLGVIFAVLITAAFTDVIKTAVGRPRPDFFWRCFPDGRQVYDQVTGGVICHGEKGFLTDGRKSFPSGHTSWSFAGLGFLSLYLSGKIKAFDRKGHVAKLCIVILPLLLASLVGVSRIDNYRHHWEDVLVGGLIGYIMAVLCYLHFFPPPYHHQGWGPYAYFHMLEELEVHNSNNAQNQQSAGEHHIGLTGQHHNGRSRNDLESGSV

SEQ ID NO: 27014 - protein, 302 aa, Triticum aestivum
MQQVQHTVQTHGYGLARKHTYDWVVLTLLAAAVVVLHYAPPFNRFVGKDMMADIRYPVKQSTVPAWAVPVISMLCPVLVFVAVYVARRDVYDLHHATLGVIFAVLITAAFTDVIKTAVGRPRPDFFWRCFPDGRQVYDQVTGGVICHGEKGFLTDGRKSFPSGHTSWSFAGLGFLSLYLSGKIKAFDRKGHVAKLCIVILPLLLASLVGVSRIDNYRHHWEDVLVGGLIGYIMAVLCYLHFFPPPYHHQGWGPYAYFHMLEELEVHNSNNAQNQQSAGEHHIGLTGQHHNGRSRNDLESGSV

SEQ ID NO: 27015 - protein, 253 aa, Triticum aestivum
MMADIRYPVKQSTVPAWAVPVISMLCPVLVFVAVYVARRDVYDLHHATLGVIFAVLITAAFTDVIKTAVGRPRPDFFWRCFPDGRQVYDQVTGGVICHGEKGFLTDGRKSFPSGHTSWSFAGLGFLSLYLSGKIKAFDRKGHVAKLCIVILPLLLASLVGVSRIDNYRHHWEDVLVGGLIGYIMAVLCYLHFFPPPYHHQGWGPYAYFHMLEELEVHNSNNAQNQQSAGEHHIGLTGQHHNGRSRNDLESGSV

SEQ ID NO: 27016 - DNA, 640 bp, Triticum aestivum
aaaaaagggcaagattgcgcagtgcggcctccatcctctgttcttcactttttccatctgagccgtccgagccctccgaatttcccggccagaatgggggagtccagcgcgcttcagtccatcctctacgaccgcggcgcgcttcgcctcctcgatcagaggaagctgcccctcgaggaggtctacatcgatgtcaaggactccgcggatggatggaccgtcagagcaagagggtcattggaactggccatcgccgtagaggatccacatccctctacatccttgacaccttacaccttcctttagcttccaccacatccgcgttccggatggctgcatcaacatcaagatccacttcgtcgttttcttttgccacgtggcaccatcgcttaggtcacttgtgtggttcttgtttatctacccttgttcgacaaggtgttttgggtcatgtttccatagatgctggttttcactgtaagggttgtaagctagggaaacaaatacagcttccatactcttccagcactactcattctagtcatccttttgatttagtgcactctcatgtatggggtccttccccctttgtttcgaaaggtggccacaaacattatgtcatatttgttgatgatcactctcg

SEQ ID NO: 27017 - protein, 212 aa, Triticum aestivum
KRARLRSAASILCSSLFPSEPSEPSEFPGQNGGVQRASVHPLRPRRASPPRSEEAAPRGGLHRCQGLRGWMDRQSKRVIGTGHRRRGSTSLYILDTLHLPLASTTSAFRMAASTSRSTSSFSFATWHHRLGHLCGSCLSTLVRQGVLGHVSIDAGFHCKGCKLGKQIQLPYSSSTTHSSHPFDLVHSHVWGPSPFVSKGGHKHYVIFVDDHS

SEQ ID NO: 27018 - protein, 142 aa, Triticum aestivum
MDRQSKRVIGTGHRRRGSTSLYILDTLHLPLASTTSAFRMAASTSRSTSSFSFATWHHRLGHLCGSCLSTLVRQGVLGHVSIDAGFHCKGCKLGKQIQLPYSSSTTHSSHPFDLVHSHVWGPSPFVSKGGHKHYVIFVDDHS

SEQ ID NO: 27019 - DNA, 782 bp, Triticum aestivum
ctttattgtgtttaacaaaatcaaaaaataaaaaactgaaatattctcctgtcctctctcttccccttgccgacgatgctgctgatgaggtccgccgccgccccctgctccttcacctccatgctcctccgccgcctcacctcctcctcctcggcttcatacgccatccgccgtcaggccaccctggccctctcttccctatcctccccctcctcctctgctagattcaccacctggtcccctccccatctttccggcagcacccggaccgggcgcttctcggcctgggcgtcggcgccgggaccggcgggacccacaggctccaccatcacgcagtctatggagaccaagatcaaggagcagctggaggcggacactgtcaccgtcgtcgacgcctcaggggatggccgccacatctgcatagacgtggtttcgaaggcgttcgaggggaaatccgctgtgaacaggcagagaatggtttacaaggttatatgggaggagcttcagagcaccgtgctgctgtggaccaaatgaccaccaagactccaggtgaggcggctggcaactagtaatcgagatctgcatggcaaaaattaaatttggaacgcggataaactgttgtacaccaagaccgggccactgccaggaccgacatgaagacattcttttgtaggacacacttttcatgtacacgtcaactgatggatcaataatttggggtgtgattggcattacttccgtaagaaatatattttttggctataattagcattttgtttttt

SEQ ID NO: 27020 - protein, 152 aa, Triticum aestivum
MLLMRSAAAPCSFTSMLLRRLTSSSSASYAIRRQATLALSSLSSPSSSARFTTWSPPHLSGSTRTGRFSAWASAPGPAGPTGSTITQSMETKIKEQLEADTVTVVDASGDGRHICIDVVSKAFEGKSAVNRQRMVYKVIWEELQSTVLLWTK

SEQ ID NO: 27021 - protein, 149 aa, Triticum aestivum
MRSAAAPCSFTSMLLRRLTSSSSASYAIRRQATLALSSLSSPSSSARFTTWSPPHLSGSTRTGRFSAWASAPGPAGPTGSTITQSMETKIKEQLEADTVTVVDASGDGRHICIDVVSKAFEGKSAVNRQRMVYKVIWEELQSTVLLWTK

SEQ ID NO: 27022 - protein, 137 aa, Triticum aestivum
MLLRRLTSSSSASYAIRRQATLALSSLSSPSSSARFTTWSPPHLSGSTRTGRFSAWASAPGPAGPTGSTITQSMETKIKEQLEADTVTVVDASGDGRHICIDVVSKAFEGKSAVNRQRMVYKVIWEELQSTVLLWTK

SEQ ID NO: 27023 - DNA, 1780 bp, Triticum aestivum
acaggatactctccccccctccccactgccgcaccaacacgccagtctcggcgacgccaaaccctcgcccgctctccagaaacccccctatggccgccaccggcgctgccgcgcccgcgcccgcggccgtgcagccgccgcggcagttcaagctcgacccgcagagcgagctccgcgtggaggtgctcccggacgcgaccctccgcgtgcgcctcgtctccggcacggcggagatcttcggcaccgagctcccgcccgagggctggctcaccatcccgccccgctccaagatcgccattttcacgtggcacggcgcgacggtggagctggacggggtcagcgagagcgagtacacgtccgacgagacgccgatggtaatttatgtcaacacgcatgcgattctcgatgcacggagggcgagggcgagggcagcgcagggaggcgacttggaggcctcacagggacctagagtgattgttgtggggccaactgattctggaaaaagcactctgtgcaaaatgctccttagctgggctgccaaactgggatggaagcctacatatgtggatttagatattggccagggttccataaccatacctggatgtatttctgctacaccaatagagaaacccatagatatagttgatgggattcctttggagatgccgcttgcatacttttatggccatccaaatccaagtattaatccagatgtttacaaagcgctcatgagagagctagctcaaacattagagacacagttctctgggaatgctgaatctagggcggccggtatggttattaacacaatggggtgggttgaaggccttggctatgagttacttcttaatgcaattgacatcttcaaggctaatgtagtgctggtattgggacaggagaagctctggaagatgttaaaagatgcagtacaaagtaagcccaatatcgatgtcgtaaaacttcataaatctgagggtgttgtcctaaggaattcaaaatatcgtcaaaagactaggagctttcgtatcaaggagtacttttatgggattgcaaacgatctggcaccacattcaaatgtagtcaactttagtgatgtttctgttttcagaattggtagtggacatcaagctccacggtcagctttaccaattggtgcagagcctgtggcagatcccactcggcttgttgctgtcaacatcagcactgatatggtccacacagtgcttgctgtttcttatgcgaaggaacctgatgaaataatttcgagcaacgttgccggattcatccatgtcacagatgttgacatccaaaggaagaagctgacgtacatcgcgccttgcccaggagacctgccaagcaggctgttaatcgcgagctccctgacatggtacgagcaggcttgacccggttcgaggttggacattgtaggtaggtaaccagatggctgatgacatgttgtaacgccgaaatggatactctgtgcatttgataactggaacactgctggtaaagctgaaaagctgaatgggttggacgatatctcaggcatcttgctgcgaagctttctgctgacttgcttatgctttctatgctgctgtggcggcgaagatacaaatagttaggtcaatgaaagattggtgtgctcttttgtacgctgttgggaactaagatatactagaagacgagtcctttggcctcttctcaactgtatccagatataaacatcggaactagttattactagaagaacgtccgtgcgttgcaatggggccacatt

SEQ ID NO: 27024 - protein, 467 aa, Triticum aestivum
RILSPPPHCRTNTPVSATPNPRPLSRNPPMAATGAAAPAPAAVQPPRQFKLDPQSELRVEVLPDATLRVRLVSGTAEIFGTELPPEGWLTIPPRSKIAIFTWHGATVELDGVSESEYTSDETPMVIYVNTHAILDARRARARAAQGGDLEASQGPRVIVVGPTDSGKSTLCKMLLSWAAKLGWKPTYVDLDIGQGSITIPGCISATPIEKPIDIVDGIPLEMPLAYFYGHPNPSINPDVYKALMRELAQTLETQFSGNAESRAAGMVINTMGWVEGLGYELLLNAIDIFKANVVLVLGQEKLWKMLKDAVQSKPNIDVVKLHKSEGVVLRNSKYRQKTRSFRIKEYFYGIANDLAPHSNVVNFSDVSVFRIGSGHQAPRSALPIGAEPVADPTRLVAVNISTDMVHTVLAVSYAKEPDEIISSNVAGFIHVTDVDIQRKKLTYIAPCPGDLPSRLLIASSLTWYEQA

SEQ ID NO: 27025 - protein, 438 aa, Triticum aestivum
MAATGAAAPAPAAVQPPRQFKLDPQSELRVEVLPDATLRVRLVSGTAEIFGTELPPEGWLTIPPRSKIAIFTWHGATVELDGVSESEYTSDETPMVIYVNTHAILDARRARARAAQGGDLEASQGPRVIVVGPTDSGKSTLCKMLLSWAAKLGWKPTYVDLDIGQGSITIPGCISATPIEKPIDIVDGIPLEMPLAYFYGHPNPSINPDVYKALMRELAQTLETQFSGNAESRAAGMVINTMGWVEGLGYELLLNAIDIFKANVVLVLGQEKLWKMLKDAVQSKPNIDVVKLHKSEGVVLRNSKYRQKTRSFRIKEYFYGIANDLAPHSNVVNFSDVSVFRIGSGHQAPRSALPIGAEPVADPTRLVAVNISTDMVHTVLAVSYAKEPDEIISSNVAGFIHVTDVDIQRKKLTYIAPCPGDLPSRLLIASSLTWYEQA

SEQ ID NO: 27026 - protein, 344 aa, Triticum aestivum
MVIYVNTHAILDARRARARAAQGGDLEASQGPRVIVVGPTDSGKSTLCKMLLSWAAKLGWKPTYVDLDIGQGSITIPGCISATPIEKPIDIVDGIPLEMPLAYFYGHPNPSINPDVYKALMRELAQTLETQFSGNAESRAAGMVINTMGWVEGLGYELLLNAIDIFKANVVLVLGQEKLWKMLKDAVQSKPNIDVVKLHKSEGVVLRNSKYRQKTRSFRIKEYFYGIANDLAPHSNVVNFSDVSVFRIGSGHQAPRSALPIGAEPVADPTRLVAVNISTDMVHTVLAVSYAKEPDEIISSNVAGFIHVTDVDIQRKKLTYIAPCPGDLPSRLLIASSLTWYEQA

SEQ ID NO: 27027 - DNA, 1072 bp, Triticum aestivum
acctagaacatcctaatcgaaaatttttatccttttccgctttttgtcgccgcaaagcgcgaagctttctcgctcgcgctctcccggctcgacagcgcggcgcggccgcgtcgtcggatgcgccacgtgctgccggccgtccaccgggccgtctcgcgcggggcgcgggcggcggcgatggggtcgtcggcgggggcgggggcgagggacccgggcgggaacccgacggtggggaggctgcgggagatcttccggggcggcggcgacgcggcagatggctgggagaagtcctgggagactggcgtaaccccgtgggatctggggaagccgacgcctatcatcgagcatctcgttaaatcaggaactctccctaaaggaagggcgttggtcccgggatgtggcatgggttatgatgtggttgctttggcaagccctgagagatttgtcgttggcttagagatttctaatatagctgctgagaaggctaagcagattggtttacttttctggttgctgatttcttcaagtggagaccaagtgaaccatttgacctcattttcgattatacgttcttttgtgcacttgatccgagcatgaggctggcttgggcagagacagttagtcgccttctgaaaccagatggagagcttatcaccttgatatatttgatcagcgatcaagaaggggggccgccctacaataatacagttgctgactatcagaaggtgctggagccgctgggtttcaaggctgtttgtatggaagacaacgagctcgctattaaaccgcgcaagggtgtcgagaaacttggaaggtggaagagatgcggcaggccgcaatcttctttgtgagcatatatgaaggccttgctgtatagtttgtatacactgtgtattgtgttagctgctgtgcgcagttcgtgatgtgcacttcctgaatgatgcatgcgtgatgtgcgatttactgcctccgtcggagatgaatcggccgtgtgaaatttccgtgtgctctaaatgagcaccgtatggtatggtgagatgctgtgtgtgttttaagtatgctggcaacttgg

SEQ ID NO: 27028 - protein, 159 aa, Triticum aestivum
MRHVLPAVHRAVSRGARAAAMGSSAGAGARDPGGNPTVGRLREIFRGGGDAADGWEKSWETGVTPWDLGKPTPIIEHLVKSGTLPKGRALVPGCGMGYDVVALASPERFVVGLEISNIAAEKAKQIGLLFWLLISSSGDQVNHLTSFSIIRSFVHLIRA

SEQ ID NO: 27029 - protein, 139 aa, Triticum aestivum
MGSSAGAGARDPGGNPTVGRLREIFRGGGDAADGWEKSWETGVTPWDLGKPTPIIEHLVKSGTLPKGRALVPGCGMGYDVVALASPERFVVGLEISNIAAEKAKQIGLLFWLLISSSGDQVNHLTSFSIIRSFVHLIRA

SEQ ID NO: 27030 - protein, 117 aa, Triticum aestivum
LEHPNRKFLSFSAFCRRKARSFLARALPARQRGAAASSDAPRAAGRPPGRLARGAGGGDGVVGGGGGEGPGREPDGGEAAGDLPGRRRRGRWLGEVLGDWRNPVGSGEADAYHRASR

SEQ ID NO: 27031 - DNA, 1570 bp, Triticum aestivum
ttacctagaacatcctaatctaaaaatggaaagcacgcaccggaagcatcttagaagaagaagagccagcaacaaggaacgatatccgtctgtgttggacgcgccaagacgatcgaggcatgcctgctgccgtctctgggtgcctcttggcgaggagcatggcgagccaccacaaacaccagcagcggggagcggcggcgacggcgccgggggcactgccggtgatcaacattggccggctcggcgacaaggaccccgccgcgcgggcgctcgtggtccaggacatcgcccgggcgtgccgcgaccgggggtgcttccaggtggtaaaccacggcgtcagcaagtcggccatggacggcgccctggaggccgcctcggagttcttcgacatgcccgcggagcgcaaggcggcgttcgcctgcgccgacatccgcagcccggtccggtacgacaccagctccaaggacggcatcagcaaggccaggtctttcctcaagcactacgccaatcccctcgaccactgggtcgactcctggccaacccaaccagcaacatacaggaagaagatggggacgtacgcggtggagatacataaactgtcaatgcagctcacaggggccatcgtgcaggggctggggctatgcccaatgcacctgcaggagaagctcggagcagggatgcagttcatggggctcaacaactacccgcaggggtcgtcccgggcgggcgacacggtcgggctggcgccgcactccgacattggcttcatcaccatcctgctgcagagctcgccggggctcgaggtgacgcaccacgacgacggcggcgtctggacgcccgtcccggccatcccgggggcgctccacgtcgacctcggcgaccacctggaggtgctgagcaacgggcggctcaggtccctcctgcaccgggccatcctcaacaccgacgaggcgaggatctccatcgccagcatccacggcgcggccatggacgagaaggtcgggtgcgccgaggagctcgtcgacgagcgccacccgaggatgtacagggagagcagcttccatgacttcctcgacttcctgcccaccaacgtcaaggcgtaccggaggttcgtcgagaccctcaagatcgacagcgcttaattccttctgctgcattaagacacacttagctgaatgagacactgcacataagtgtccatttagttgtgtagtcttactgctagctgaagaacaaaattacggtttaattatgcctccattatcaagtagtatctcagtacgaataagggagtatggtatcagcagctggataggcgtgtgattagcagggtgccttttttttcactccatttctttctttggggaaatgcagtatgtctgcatgtctcttccatcaaaaggaggatcaaaggaaccttgccaagttcttccggttctttggtagtacctacatacaccatgtgttgatcagtgcagtcctatatgtgtatcagttgatttcacctatagaaatttactttctcatgggatatattgcgcaacgatatattaaatacaatttactgttt

SEQ ID NO: 27032 - protein, 340 aa, Triticum aestivum
MPAAVSGCLLARSMASHHKHQQRGAAATAPGALPVINIGRLGDKDPAARALVVQDIARACRDRGCFQVVNHGVSKSAMDGALEAASEFFDMPAERKAAFACADIRSPVRYDTSSKDGISKARSFLKHYANPLDHWVDSWPTQPATYRKKMGTYAVEIHKLSMQLTGAIVQGLGLCPMHLQEKLGAGMQFMGLNNYPQGSSRAGDTVGLAPHSDIGFITILLQSSPGLEVTHHDDGGVWTPVPAIPGALHVDLGDHLEVLSNGRLRSLLHRAILNTDEARISIASIHGAAMDEKVGCAEELVDERHPRMYRESSFHDFLDFLPTNVKAYRRFVETLKIDSA

SEQ ID NO: 27033 - protein, 327 aa, Triticum aestivum
MASHHKHQQRGAAATAPGALPVINIGRLGDKDPAARALVVQDIARACRDRGCFQVVNHGVSKSAMDGALEAASEFFDMPAERKAAFACADIRSPVRYDTSSKDGISKARSFLKHYANPLDHWVDSWPTQPATYRKKMGTYAVEIHKLSMQLTGAIVQGLGLCPMHLQEKLGAGMQFMGLNNYPQGSSRAGDTVGLAPHSDIGFITILLQSSPGLEVTHHDDGGVWTPVPAIPGALHVDLGDHLEVLSNGRLRSLLHRAILNTDEARISIASIHGAAMDEKVGCAEELVDERHPRMYRESSFHDFLDFLPTNVKAYRRFVETLKIDSA

SEQ ID NO: 27034 - protein, 263 aa, Triticum aestivum
MDGALEAASEFFDMPAERKAAFACADIRSPVRYDTSSKDGISKARSFLKHYANPLDHWVDSWPTQPATYRKKMGTYAVEIHKLSMQLTGAIVQGLGLCPMHLQEKLGAGMQFMGLNNYPQGSSRAGDTVGLAPHSDIGFITILLQSSPGLEVTHHDDGGVWTPVPAIPGALHVDLGDHLEVLSNGRLRSLLHRAILNTDEARISIASIHGAAMDEKVGCAEELVDERHPRMYRESSFHDFLDFLPTNVKAYRRFVETLKIDSA

SEQ ID NO: 27035 - DNA, 687 bp, Triticum aestivum
agtttgggctgttttatgccttcattgatacaatggcactagtccctggatggctattcctgatgatcttcatgactgtctacttctttgtggtgagacggaagtggtcgccgcactttttgcgctatcacatcatattggccattcttcttgacacgggctcccaggctctggcgaccatgtgcaactggaatccaagcatcgtctttcagggtaaaccaatggcgtatttctggatgacactggccttcattcagatcttcacagttgtcgagtgtatgaggtgtgccctttcaggaatgtatcctaacgttccattcatatcccacacagcgttcatccattctgatttgaacctgttcaggtaattggctagtgcaaatgtgcatctggaaatgtaagaggggttaaggaaccgtgtgtgagatagagaactagctgaggaaaaaatggtttggaagtgtattttgggacataagaaggggatgcaagtatatgcaatcatcacgggtaattgtagtagcttctcaagactctgcagtgttggcagtgttatactgcatgttttcatgaagttccaggggacacctgactttaaattttgtgtgtggcttggtttgtaaacgacaagcaattcgaaatgatgtttaatttggccagtatgcttatgttggagctcctaagtct

SEQ ID NO: 27036 - protein, 121 aa, Triticum aestivum
FGLFYAFIDTMALVPGWLFLMIFMTVYFFVVRRKWSPHFLRYHIILAILLDTGSQALATMCNWNPSIVFQGKPMAYFWMTLAFIQIFTVVECMRCALSGMYPNVPFISHTAFIHSDLNLFR

SEQ ID NO: 27037 - protein, 111 aa, Triticum aestivum
MALVPGWLFLMIFMTVYFFVVRRKWSPHFLRYHIILAILLDTGSQALATMCNWNPSIVFQGKPMAYFWMTLAFIQIFTVVECMRCALSGMYPNVPFISHTAFIHSDLNLFR

SEQ ID NO: 27038 - protein, 101 aa, Triticum aestivum
MIFMTVYFFVVRRKWSPHFLRYHIILAILLDTGSQALATMCNWNPSIVFQGKPMAYFWMTLAFIQIFTVVECMRCALSGMYPNVPFISHTAFIHSDLNLFR

SEQ ID NO: 27039 - DNA, 1109 bp, Triticum aestivum
aaatgctcgtactctctctcccatctcccgcccggctgcttaaaagcccattatcggcgccgcctgtgacctcacctcactccgcctcgcagtcataattctccctagcatctttcttaccactagtattagtaggaggacctcctcctgttgctgctggagtggttgcttgtgtggtagagaggagaggagagggagatggaaggaggaggcgcggacggggtgacgagggtgctgctggtggacgactccccggtggacaggaaggtggtggaactggtgctcggcagcaacaccttcgccggctccttccacgtcgtcgccgtggacagcgccaagaaggccatggagttcctggggctcaaggacggcaaggagcaggccgtcgacatggtgctcactgactactgcatgcctgagatgaccggctacgacctcctcaaagccatcaaggcgatgagtcctctcaagcccatcccggtgatcgtcatgtcgtcggagaacgagccccagaggatcagcagatgcctcaaggctggtgctgaagattacatcgtcaagcctcttcagagcaaggatgtgccgcgtctgaggagctgctcgaacgtgaaacccaaggaccctccatgcagcactgtgagcaagagctcggaccatatagctgctgtcgatggcaagtcgtcgctgcgacggcgagcacacctcaccgatattgccatggttctccactcgtcgagcgccgggctctcgcactacttcccgttcctcttcaagttcatcctgctggtctacgccatcctgtgcgtcggcgagctcctgcacagatggtccaacggctgcttcctctcctacctgaggtgatggtgccgcggtccagtgacatgctgcagctctgcaaggagtagctcgtgtgtcgtagcttatgagtgagcagtgaacctccatgtttcaacaaccatggatggagctttaggtagtagattcgtttgctttgagattctctgaccgggcgtcagttcttggccttgttgggctgacgagttgaggaagaaccccttgtatccatccttgtacaaaacgcacaatgaggcaggcggtatctgatgtcc

SEQ ID NO: 27040 - protein, 220 aa, Triticum aestivum
MEGGGADGVTRVLLVDDSPVDRKVVELVLGSNTFAGSFHVVAVDSAKKAMEFLGLKDGKEQAVDMVLTDYCMPEMTGYDLLKAIKAMSPLKPIPVIVMSSENEPQRISRCLKAGAEDYIVKPLQSKDVPRLRSCSNVKPKDPPCSTVSKSSDHIAAVDGKSSLRRRAHLTDIAMVLHSSSAGLSHYFPFLFKFILLVYAILCVGELLHRWSNGCFLSYLR

SEQ ID NO: 27041 - protein, 171 aa, Triticum aestivum
MEFLGLKDGKEQAVDMVLTDYCMPEMTGYDLLKAIKAMSPLKPIPVIVMSSENEPQRISRCLKAGAEDYIVKPLQSKDVPRLRSCSNVKPKDPPCSTVSKSSDHIAAVDGKSSLRRRAHLTDIAMVLHSSSAGLSHYFPFLFKFILLVYAILCVGELLHRWSNGCFLSYLR

SEQ ID NO: 27042 - protein, 156 aa, Triticum aestivum
MVLTDYCMPEMTGYDLLKAIKAMSPLKPIPVIVMSSENEPQRISRCLKAGAEDYIVKPLQSKDVPRLRSCSNVKPKDPPCSTVSKSSDHIAAVDGKSSLRRRAHLTDIAMVLHSSSAGLSHYFPFLFKFILLVYAILCVGELLHRWSNGCFLSYLR

SEQ ID NO: 27043 - DNA, 818 bp, Triticum aestivum
accagccacctactgcaagaggaagcaaatcaaagcaatttccaaagcaaatcagtttcaaacagcagaatcctgtagctagccgatcggcaatggcgaccaagatctacatcgtgtactactcgacatgggggcacgtcgccacgctcgcggaggagatcaagaaaggcgccgactccgtccctgacgtcgaggtcaccatctggcgggtgccggagacgctgccggaggaggtgctggggaagatgcacgcggcgccggggcgcgaggaccaccccgtcataacggcgcggcagctggccgaggccgacggcgtgctgttcggcttcccgacgcggttcggcatgatggcggcgcagatgaaggccttcttcgactccaccggcggcctctggcaggaggggtccctcgccggcaagcccgcgggcgtcttcttcgccacgggcacgcagggcggcggccaggagaccacggccctcacggccgtgacgcagctgacgcaccacggaatgatcttcgtgcccgtcggctacacgcacggcgccggcatgttcgccatggacgaggtcaagggcggcagcccatacggagccggcaccttcgccggcgctgatggcagcaggacgcccaccgatgccgagctcgccttgggggcgcaccaggggaagtacttcgctggcatcgccaagaagctgaaggccgtctgaaccgctcacgtcacatggcgtcagcgtgtcaacttggagcaaaatttgtttacttagcaattactacaccatactggtatctatatcttgtctgaaaagaataataatgcg

SEQ ID NO: 27044 - protein, 234 aa, Triticum aestivum
QPPTARGSKSKQFPKQISFKQQNPVASRSAMATKIYIVYYSTWGHVATLAEEIKKGADSVPDVEVTIWRVPETLPEEVLGKMHAAPGREDHPVITARQLAEADGVLFGFPTRFGMMAAQMKAFFDSTGGLWQEGSLAGKPAGVFFATGTQGGGQETTALTAVTQLTHHGMIFVPVGYTHGAGMFAMDEVKGGSPYGAGTFAGADGSRTPTDAELALGAHQGKYFAGIAKKLKAV

SEQ ID NO: 27045 - protein, 204 aa, Triticum aestivum
MATKIYIVYYSTWGHVATLAEEIKKGADSVPDVEVTIWRVPETLPEEVLGKMHAAPGREDHPVITARQLAEADGVLFGFPTRFGMMAAQMKAFFDSTGGLWQEGSLAGKPAGVFFATGTQGGGQETTALTAVTQLTHHGMIFVPVGYTHGAGMFAMDEVKGGSPYGAGTFAGADGSRTPTDAELALGAHQGKYFAGIAKKLKAV

SEQ ID NO: 27046 - protein, 153 aa, Triticum aestivum
MHAAPGREDHPVITARQLAEADGVLFGFPTRFGMMAAQMKAFFDSTGGLWQEGSLAGKPAGVFFATGTQGGGQETTALTAVTQLTHHGMIFVPVGYTHGAGMFAMDEVKGGSPYGAGTFAGADGSRTPTDAELALGAHQGKYFAGIAKKLKAV

SEQ ID NO: 27047 - DNA, 1353 bp, Triticum aestivum
attcgaaaaccttcctcgcgaaaccccagccccgctcctccgctccaccccccacctcccctggtccctcgcgagagcaggtccgggtcgcgtctccggcggcggagaagcaagacaagggcggcggagatgtcggtcagcaacatagggatgatggacggcgcctacttcgtggggcggaacgagatcctcgcctggatcaacactaccctgcagctcggcctcgccaaggtcgaggaggcggcgtcgggcgcggtggcgtcccagctcatggacgcggcgcaccccggggcggtgcccatgcacaaggtcaacttcgacgccaagaacgagtacgacatgatccagaactacaaggtcctgcaggatgtgttcaacaagctgaagatcaccaagcacattgaggttaataagctcatcaaaggaaggcccctagacaacctggagttcatgcagtggatgaaaagatactgtgattctgttaatggtggattcatgaccagctacaatgcttccgagagaagagaaagcagcaagggtgggaaagacaccaacagaaggacatcagggacttcccaggcgcctgccaagtctgcatccgccacccacaaagctcagcctccgtcgcacgcagctaagcgggccaacgggcatgcttcaaatgctccacagcggtgcgcaaagccgcctccagcttatgatgcacagatgaccgagctgaaactccttgttgatagcgccgagaaagagagagatttctatttctctaagctgcgggacgttgagatcttgtgccagagccccgaggttgagcatttaccgattgcgaaggctatccagaagatactctatgcttcggaggacgacccctcgacggtggcggaagcccaggcagagatggtggcgcagcagaaccagatgcagcagcagccaatgctgagccccatcctggaggcgtccgaggccccaagcatcacccccaaggattcttccgaggagagcttgaggcaggaagcagcggcagcacacaagaggaagagcatctcggacctggaggagttcgagatggggtcgagctccaggatgaggctctcagacgtctcggacgtgcagctgtgcggctcaccgttgatgagcttcacctgaaagaaaggagggaccgaattgcaggggctgagttgatgtcattgccggttatgacttgtgggtttatcttgtgttgtttcgtttgttgtttggtgtcataatgtgtgtgctcttgtggagctggagttgaacctgcctttgactgtgatcgatctgccacagcatttgtggccttctgcaacatgttattattgaatagcctctttt

SEQ ID NO: 27048 - protein, 381 aa, Triticum aestivum
IRKPSSRNPSPAPPLHPPPPLVPRESRSGSRLRRRRSKTRAAEMSVSNIGMMDGAYFVGRNEILAWINTTLQLGLAKVEEAASGAVASQLMDAAHPGAVPMHKVNFDAKNEYDMIQNYKVLQDVFNKLKITKHIEVNKLIKGRPLDNLEFMQWMKRYCDSVNGGFMTSYNASERRESSKGGKDTNRRTSGTSQAPAKSASATHKAQPPSHAAKRANGHASNAPQRCAKPPPAYDAQMTELKLLVDSAEKERDFYFSKLRDVEILCQSPEVEHLPIAKAIQKILYASEDDPSTVAEAQAEMVAQQNQMQQQPMLSPILEASEAPSITPKDSSEESLRQEAAAAHKRKSISDLEEFEMGSSSRMRLSDVSDVQLCGSPLMSFT

SEQ ID NO: 27049 - protein, 338 aa, Triticum aestivum
MSVSNIGMMDGAYFVGRNEILAWINTTLQLGLAKVEEAASGAVASQLMDAAHPGAVPMHKVNFDAKNEYDMIQNYKVLQDVFNKLKITKHIEVNKLIKGRPLDNLEFMQWMKRYCDSVNGGFMTSYNASERRESSKGGKDTNRRTSGTSQAPAKSASATHKAQPPSHAAKRANGHASNAPQRCAKPPPAYDAQMTELKLLVDSAEKERDFYFSKLRDVEILCQSPEVEHLPIAKAIQKILYASEDDPSTVAEAQAEMVAQQNQMQQQPMLSPILEASEAPSITPKDSSEESLRQEAAAAHKRKSISDLEEFEMGSSSRMRLSDVSDVQLCGSPLMSFT

SEQ ID NO: 27050 - protein, 331 aa, Triticum aestivum
MMDGAYFVGRNEILAWINTTLQLGLAKVEEAASGAVASQLMDAAHPGAVPMHKVNFDAKNEYDMIQNYKVLQDVFNKLKITKHIEVNKLIKGRPLDNLEFMQWMKRYCDSVNGGFMTSYNASERRESSKGGKDTNRRTSGTSQAPAKSASATHKAQPPSHAAKRANGHASNAPQRCAKPPPAYDAQMTELKLLVDSAEKERDFYFSKLRDVEILCQSPEVEHLPIAKAIQKILYASEDDPSTVAEAQAEMVAQQNQMQQQPMLSPILEASEAPSITPKDSSEESLRQEAAAAHKRKSISDLEEFEMGSSSRMRLSDVSDVQLCGSPLMSFT

SEQ ID NO: 27051 - DNA, 625 bp, Triticum aestivum
  misc_feature (547)..(549): n is a, c, g, or t
aaggagaaatctgctcgtcgtggtctctcttgtggagtgcggtttctaaattcgagagagaagagagtcctacccgctcctatctcctcttgcgagtccaatcgcgaggatagggatggagagctccaacggcaagccgccgcggggagaggaagaggggaaggcggcggggtcgatcggaggccacgagtcgctgcacaggctcctcgagtccaatctccctcccgagctcttcaaggaggcaagccggttgcttttggggttgaattgtgcacaccctcttgaggctatttccctgcctggggccaccactgatcttgctggagcgcataatttcgatgtgcaggcattccgttttaacgctgacaaagagcatatgagacagccgcggattgttcgagttggcttaattcagaactcaattgctgttccaacgacttgtcattttgctgatcaaaagaagtctatcatggagaaagtaaaaccccatcatagacgcagctgttgcttctggtgtcaatattttgtgcttacaggaagcctggannntgccatttgccttctgcacgcgtgaaaaacgatggtgtgagtttgctgagcctgttgatggagaatctactcagtt

SEQ ID NO: 27052 - protein, 152 aa, Triticum aestivum
  misc_feature (144)..(145): Xaa can be any naturally occurring amino acid
MESSNGKPPRGEEEGKAAGSIGGHESLHRLLESNLPPELFKEASRLLLGLNCAHPLEAISLPGATTDLAGAHNFDVQAFRFNADKEHMRQPRIVRVGLIQNSIAVPTTCHFADQKKSIMEKVKPHHRRSCCFWCQYFVLTGSLXXAICLLHA

SEQ ID NO: 27053 - protein, 94 aa, Triticum aestivum
KEKSARRGLSCGVRFLNSREKRVLPAPISSCESNREDRDGELQRQAAAGRGRGEGGGVDRRPRVAAQAPRVQSPSRALQGGKPVAFGVELCTPS

SEQ ID NO: 27054 - DNA, 422 bp, Triticum aestivum
cgaaaacgaaaacacaacaccgagtccaaactaacccccggctgcaccagctcccattcctcgccggcgagctcaccggacacagcccgaagccaagatgactacttccaggcgccttgctgacaggaagacagcgaagttccagaagaacatcaccgagaggggttcggtgcctgaaaccactgtgaagaaggggaatgactatcctgttggacctatagtgcttggattcttcatctttgtggtcgtcggatcatctctgtttcagataatcaggacagcgagcagtggtgggatggcctgaacgccgtcatacattaatacagttgcagctaaattcgtttgatgtcgtcatagtttgtcttacttaaaagtacccagtttcagctgatgttgtaagaactgtaagagttatcaatctt

SEQ ID NO: 27055 - protein, 68 aa, Triticum aestivum
MTTSRRLADRKTAKFQKNITERGSVPETTVKKGNDYPVGPIVLGFFIFVVVGSSLFQIIRTASSGGMA

SEQ ID NO: 27056 - protein, 40 aa, Triticum aestivum
RKRKHNTESKLTPGCTSSHSSPASSPDTARSQDDYFQAPC

SEQ ID NO: 27057 - DNA, 630 bp, Triticum aestivum
  misc_feature (568)..(569): n is a, c, g, or t
  misc_feature (571)..(571): n is a, c, g, or t
  misc_feature (578)..(578): n is a, c, g, or t
  misc_feature (580)..(580): n is a, c, g, or t
aacatttcacatgccatctagcatcactcactgcaatcacactctatcactagctagctcagctgccctacagtgcacgcggattaactagccatggcagctcacgactcggacctcggcggcgccgtccacgtcctcctgctcccgtacccgagccagggccacatcaaccccatcctccagttcggcaagcgcctcgcctcccacgccggcgtccgctgcacgctcgccgtcacgcgctacctcctcggccagggccgggacccgtgcccgggcgccgtgcacctcgccgagatctccgacggctttgaccgcggcggcttcgccgaggccgacggcgacgtcgcggcgtacctcgcccggctggagtccgtcgggtcacgcactgtcgacgagctgctgcggtccgaggcggagaagggccggcccgtgcgcgccgtggtgtacgacgcgttcctgcagccgtgggcgccccgcgtggcccggcagcacggcgccgcgtgcgcgtccctcttcacgcaggcgcccgcggtgaacgtggcgtacgcgcacgccggtgctgggcgcnngnccgttcngntcctcgcgggcacggtgccgccggagcttcccgggctgcctgccgggctc

SEQ ID NO: 27058 - protein, 179 aa, Triticum aestivum
  misc_feature (159)..(160): Xaa can be any naturally occurring amino acid
  misc_feature (162)..(163): Xaa can be any naturally occurring amino acid
MAAHDSDLGGAVHVLLLPYPSQGHINPILQFGKRLASHAGVRCTLAVTRYLLGQGRDPCPGAVHLAEISDGFDRGGFAEADGDVAAYLARLESVGSRTVDELLRSEAEKGRPVRAVVYDAFLQPWAPRVARQHGAACASLFTQAPAVNVAYAHAGAGRXXVXXLAGTVPPELPGLPAGL

SEQ ID NO: 27059 - DNA, 1039 bp, Triticum aestivum
ccaccgattccgccggcgggactcctgtccgggaaacgccgatctagaatggcggccaacttctggacgtcgtcgcacagcaagcagctgctggacccggaggaggtggacgtggtgccggcgcaagaccgggagcggggcgtcacgcccgtggagttccgcctcgtcaagatccacatgtccttccatatatggcggttggcccagcaggtcaaagttagacaaagagtcatagctactgcaatcacgtacttcaggtgtgtgtacacaagaaagagcatgacagagtatgatcctcgtttggtagcaccagcttgtttgtatttggcatcaaaggtagaggaaagcacagtgcaagcaaggcttcttgtattttacataaagaagatgtgtggttcggatgacaagtaccgatttgaaatcaaagatatccttgaaatggaaatgaagctcctggaagcacttgactattatttggttgtttaccatccataccgtcctcttctacagttattgcaggatgctggcataacagatctgacacaatttgcctggggcctcgtcaatgatacttacaagatggatctcattctcatatatcctccttatatgattgcattggcctgcatatacattgcaagcgttcttaaagataaggacacaacctcatggtttgaagaactccgtgttgacatgaacattgttaagaatatctcaatggaaatcttggacttctacgacacctacaagattgatcctcaaaggggcctccaggaggataagatcatccctgtgatgaacaagttgccatcaaaggcctgaaggccgatttgacacctgaccatttaaccaccttacaccgcctcatctggattgtgtaaccccgtagccctgaacatcttcggaggcgagagatccagggaatggcatcaaattgttaggcgccgcgatggcaatcccaatgttagggggttatctgtaatacttaagcatctgatttctgtatcatacaaaacccaagtggaattgtttcaacttg

SEQ ID NO: 27060 - protein, 273 aa, Triticum aestivum
PPIPPAGLLSGKRRSRMAANFWTSSHSKQLLDPEEVDVVPAQDRERGVTPVEFRLVKIHMSFHIWRLAQQVKVRQRVIATAITYFRCVYTRKSMTEYDPRLVAPACLYLASKVEESTVQARLLVFYIKKMCGSDDKYRFEIKDILEMEMKLLEALDYYLVVYHPYRPLLQLLQDAGITDLTQFAWGLVNDTYKMDLILIYPPYMIALACIYIASVLKDKDTTSWFEELRVDMNIVKNISMEILDFYDTYKIDPQRGLQEDKIIPVMNKLPSKA

SEQ ID NO: 27061 - protein, 257 aa, Triticum aestivum
MAANFWTSSHSKQLLDPEEVDVVPAQDRERGVTPVEFRLVKIHMSFHIWRLAQQVKVRQRVIATAITYFRCVYTRKSMTEYDPRLVAPACLYLASKVEESTVQARLLVFYIKKMCGSDDKYRFEIKDILEMEMKLLEALDYYLVVYHPYRPLLQLLQDAGITDLTQFAWGLVNDTYKMDLILIYPPYMIALACIYIASVLKDKDTTSWFEELRVDMNIVKNISMEILDFYDTYKIDPQRGLQEDKIIPVMNKLPSKA

SEQ ID NO: 27062 - protein, 214 aa, Triticum aestivum
MSFHIWRLAQQVKVRQRVIATAITYFRCVYTRKSMTEYDPRLVAPACLYLASKVEESTVQARLLVFYIKKMCGSDDKYRFEIKDILEMEMKLLEALDYYLVVYHPYRPLLQLLQDAGITDLTQFAWGLVNDTYKMDLILIYPPYMIALACIYIASVLKDKDTTSWFEELRVDMNIVKNISMEILDFYDTYKIDPQRGLQEDKIIPVMNKLPSKA

SEQ ID NO: 27063 - DNA, 1406 bp, Triticum aestivum
actcctcacttcactcgcctcccgcgtcgcccgccgatcgagtgcacccacccaccacagtgccctgtgcccgaggccattccgtacgcactggagatggcgcgcaggagcggagtcttgtcgcgcttggccgtcgtcgtcgtcgcggcctactgcctcgccgcggcgacgcccggtgctgccgactggatgaggggctcggccacgttctacggagggagcaacgccgccggcaccatgggcggcgcttgcgggtacggcaacctgtactcgacggggtacgggacggacacggcggcgctgagcacgtccctcttcaacgacggggcggcgtgcggggagtgctaccaggtgcagtgcgaccagggcagctccccgaactgcaagccgggggtgacggtcaccatcaccgccaccaacctctgcccgacggactactccaagcccaacgacaacggcggctggtgcaacccgccgcgcaagcacctggacatggcgcagcccgcgtgggagcgcatcggcgtctaccgcgccggcatcgtgcccatcctgttccagcgggtgtcctgctccaggagcggcggcgtgcggttcaccatcaacggcaacagctacttcgagctggtgctcatcaccaacgtcggcgggccggggtcggtcagggcggtgcagatcaaggggtcccgcaccgggtggaccaccatgtcccggaactggggcgcgaactggcagtccaacagctacctcaacgggcagtccatctccttcgccgtcaccgccaccaacggccagaaggtggtcttccaggacgtggcgcccagcaactgggggttcggccagaccttcaccaactccggccagttctactagcgattcccgcgcgccgccgtgcgtgcgtgcgcgccggcgccggagcggtcgcctttcctttccgtttacgccttttcgatttcgcatttgggaagttaagtaagatttgcctcattctcatggatgggaagtggtaggtagtaggtagctaggtgccgcgcgtagggcggtttgcatggctgaggtgcctgatcgatcaattacccgccgtgcctgccgccttgcttgcgatgaccggctgatgtgctagctgaaatggcgccccgatcctcgctgcaaggcgcggactgtttactgttgaccaccgatccattgatgattttaatttatatagaatgtgatggccaaaatggggtggacatcgaagtgtgtggtctgaagtaaacgattaattggatcactacgttattacatgtgcgtaaagtgtccttagtcggagaatcaatgtactccctcactctatgaataagtgtacttccaccctttttttactaaaagaaaaaaaaaaaaaaaaaagcttatcgataccgtcgacc

SEQ ID NO: 27064 - protein, 334 aa, Triticum aestivum
SSLHSPPASPADRVHPPTTVPCARGHSVRTGDGAQERSLVALGRRRRRGLLPRRGDARCCRLDEGLGHVLRREQRRRHHGRRLRVRQPVLDGVRDGHGGAEHVPLQRRGGVRGVLPGAVRPGQLPELQAGGDGHHHRHQPLPDGLLQAQRQRRLVQPAAQAPGHGAARVGAHRRLPRRHRAHPVPAGVLLQERRRAVHHQRQQLLRAGAHHQRRRAGVGQGGADQGVPHRVDHHVPELGRELAVQQLPQRAVHLLRRHRHQRPEGGLPGRGAQQLGVRPDLHQLRPVLLAIPARRRACVRAGAGAVAFPFRLRLFDFAFGKLSKICLILMDGKW

SEQ ID NO: 27065 - protein, 289 aa, Triticum aestivum
TPHFTRLPRRPPIECTHPPQCPVPEAIPYALEMARRSGVLSRLAVVVVAAYCLAAATPGAADWMRGSATFYGGSNAAGTMGGACGYGNLYSTGYGTDTAALSTSLFNDGAACGECYQVQCDQGSSPNCKPGVTVTITATNLCPTDYSKPNDNGGWCNPPRKHLDMAQPAWERIGVYRAGIVPILFQRVSCSRSGGVRFTINGNSYFELVLITNVGGPGSVRAVQIKGSRTGWTTMSRNWGANWQSNSYLNGQSISFAVTATNGQKVVFQDVAPSNWGFGQTFTNSGQFY

SEQ ID NO: 27066 - protein, 257 aa, Triticum aestivum
MARRSGVLSRLAVVVVAAYCLAAATPGAADWMRGSATFYGGSNAAGTMGGACGYGNLYSTGYGTDTAALSTSLFNDGAACGECYQVQCDQGSSPNCKPGVTVTITATNLCPTDYSKPNDNGGWCNPPRKHLDMAQPAWERIGVYRAGIVPILFQRVSCSRSGGVRFTINGNSYFELVLITNVGGPGSVRAVQIKGSRTGWTTMSRNWGANWQSNSYLNGQSISFAVTATNGQKVVFQDVAPSNWGFGQTFTNSGQFY

SEQ ID NO: 27067 - DNA, 1444 bp, Triticum aestivum
acaacaccacaattcactcctcttgctccgctcctctcctctcccgccggcgaccatggcgaaggccgcaacagcagcagcagcggcgcctctccacagcggcctcccggacgagatcgccatctgggagatcctcgtccgcctgccccccaaatcgctcctccgctgtcgcgccgtctgccgcgcctggcgcagcgccacctccgcccgcgacttcctcctcgcccaccacgcccgccagcccgccctccccctcgcctgcggcctggaagacgacggtggcagctgctactacctggcggcccagcaccagcccgtcgcccggcttgccaaggccttctatctgtgcgcctcctgcgacggcctcctcctcctctccaagcgcaaccagctctccatctgcaacccggccactcgtcagtatgctcccctgccggcgagttctgccttcattccgttgggaatgtaccggcaccgccccacaggcgagtaccgaatactgctgtacaaggaaattggtcttccagcgaccgacgggcaagatgcctgccacatcttcgcattgggctctgtccagccgccgaggagcatcgggtcgctgcaggaggcggagcaactgaggttcagcggggtacctgtcccgttccgcggtaacctgcattggcacctgaataagcattggtacctacaaaagtattggtacttgcccgagaatcatgagagcagaagcaacattataattgtattcgacaccacagccgagaggtttcgtgagatgtgtgctccggttgttcctgaccaccataaactgtttgagatggatggcatgctcggcatgtccagctttaacaatacatggccaatcattgatgtctggatgatgcaggagcaggactatgaaagtgaggtctggaccttgaaataccgagttgaattgtccaatgcagatcttctccttgtgcagtttggtcagtttgtcgattattggaatgtggtggtcgcctcttgtgatggcgctgtgcttgtgctggtcaagtttggcaagtctatacttcagtttgatattgatggcaagttggtcagttttcatcacaaagacctcttagttactcaacatcggctcaagcaaactcttgttccacataccttctttccgagactagatggtcattccgtgaatgcttggcctttcatctgagtggtgttgagtgagttggtccttcttagaggccaacctgtctttatccttgaagcctgcaatatgtatgaatttgatccaccatgagccctagcttctttatcgatgtaatgcaaagttatgatcaagaacctcctactgtaatatgattgcatgaaattcatatttctttggatatggttttgggctgaagtggctaacggacaagctgatgctaaaattaccaactctttaggttagtgtttg

SEQ ID NO: 27068 - protein, 398 aa, Triticum aestivum
QHHNSLLLLRSSPLPPATMAKAATAAAAAPLHSGLPDEIAIWEILVRLPPKSLLRCRAVCRAWRSATSARDFLLAHHARQPALPLACGLEDDGGSCYYLAAQHQPVARLAKAFYLCASCDGLLLLSKRNQLSICNPATRQYAPLPASSAFIPLGMYRHRPTGEYRILLYKEIGLPATDGQDACHIFALGSVQPPRSIGSLQEAEQLRFSGVPVPFRGNLHWHLNKHWYLQKYWYLPENHESRSNIIIVFDTTAERFREMCAPVVPDHHKLFEMDGMLGMSSFNNTWPIIDVWMMQEQDYESEVWTLKYRVELSNADLLLVQFGQFVDYWNVVVASCDGAVLVLVKFGKSILQFDIDGKLVSFHHKDLLVTQHRLKQTLVPHTFFPRLDGHSVNAWPFI

SEQ ID NO: 27069 - protein, 380 aa, Triticum aestivum
MAKAATAAAAAPLHSGLPDEIAIWEILVRLPPKSLLRCRAVCRAWRSATSARDFLLAHHARQPALPLACGLEDDGGSCYYLAAQHQPVARLAKAFYLCASCDGLLLLSKRNQLSICNPATRQYAPLPASSAFIPLGMYRHRPTGEYRILLYKEIGLPATDGQDACHIFALGSVQPPRSIGSLQEAEQLRFSGVPVPFRGNLHWHLNKHWYLQKYWYLPENHESRSNIIIVFDTTAERFREMCAPVVPDHHKLFEMDGMLGMSSFNNTWPIIDVWMMQEQDYESEVWTLKYRVELSNADLLLVQFGQFVDYWNVVVASCDGAVLVLVKFGKSILQFDIDGKLVSFHHKDLLVTQHRLKQTLVPHTFFPRLDGHSVNAWPFI

SEQ ID NO: 27070 - protein, 244 aa, Triticum aestivum
MYRHRPTGEYRILLYKEIGLPATDGQDACHIFALGSVQPPRSIGSLQEAEQLRFSGVPVPFRGNLHWHLNKHWYLQKYWYLPENHESRSNIIIVFDTTAERFREMCAPVVPDHHKLFEMDGMLGMSSFNNTWPIIDVWMMQEQDYESEVWTLKYRVELSNADLLLVQFGQFVDYWNVVVASCDGAVLVLVKFGKSILQFDIDGKLVSFHHKDLLVTQHRLKQTLVPHTFFPRLDGHSVNAWPFI

SEQ ID NO: 27071 - DNA, 594 bp, Triticum aestivum
atcaacccatccatccaccgagcgatcggcactcccactctaagagctccgagccagccaacaatggcgtcctctccgctgctcgtggcgcttgtgatggtctcggcgtgcttcctggccgtgtccggccagaagttcaacgccatctacagcttcggcgactccatgtcggacaccggcaacctctgcgtcaacgggccccccgccggcctcaccctcacccagcccccctacggcgagaccttctttggccgtgccacctgccgctgctccgacggccgcctcgtcgtcgacttcctcgccgagaagttcgggctgccgctgctgaagccgtcgaagcagggcggcgcggacttcaagcagggcgccaacatggccatcatcggcgccaccgccatgggctccagcttcttccagtcgctcggcgtcggcgacaagatctggaacaacgggcccctcgacacccagatccagtggttccagaacctcctcccctccgtctgcggctcatcgtgcaagacgtacctgtccaagtccctgttcgtgctgggcgagctgggcgggaacgactacaacgcgcagctcttcggcggc

SEQ ID NO: 27072 - protein, 198 aa, Triticum aestivum
INPSIHRAIGTPTLRAPSQPTMASSPLLVALVMVSACFLAVSGQKFNAIYSFGDSMSDTGNLCVNGPPAGLTLTQPPYGETFFGRATCRCSDGRLVVDFLAEKFGLPLLKPSKQGGADFKQGANMAIIGATAMGSSFFQSLGVGDKIWNNGPLDTQIQWFQNLLPSVCGSSCKTYLSKSLFVLGELGGNDYNAQLFGG

SEQ ID NO: 27073 - protein, 197 aa, Triticum aestivum
QPIHPPSDRHSHSKSSEPANNGVLSAARGACDGLGVLPGRVRPEVQRHLQLRRLHVGHRQPLRQRAPRRPHPHPAPLRRDLLWPCHLPLLRRPPRRRLPRREVRAAAAEAVEAGRRGLQAGRQHGHHRRHRHGLQLLPVARRRRQDLEQRAPRHPDPVVPEPPPLRLRLIVQDVPVQVPVRAGRAGRERLQRAALRR

SEQ ID NO: 27074 - protein, 177 aa, Triticum aestivum
MASSPLLVALVMVSACFLAVSGQKFNAIYSFGDSMSDTGNLCVNGPPAGLTLTQPPYGETFFGRATCRCSDGRLVVDFLAEKFGLPLLKPSKQGGADFKQGANMAIIGATAMGSSFFQSLGVGDKIWNNGPLDTQIQWFQNLLPSVCGSSCKTYLSKSLFVLGELGGNDYNAQLFGG

SEQ ID NO: 27075 - DNA, 583 bp, Triticum aestivum
catcctaatcgaaaactaaccttacccgcttcatacataacccggcggccgcatctcagatcccccaattcggaagttctccttctccaagcaaaaatcagagggttttagggttctagaacgagcgggtcggcgagaacagccatggacgcctcccccgagctgcaacagttcctggagcaagagaagcagaagatggtgatgagtgagatggtaaccaagttgacaaatgtgtgctgggacaaatgcatcaccagcaccccaggaagcaagttcagctccggtgaaactacctgcctgaccaattgtgctcagaggtatcttgacatgagcatgataattgcgaagaggttccagatgcagtagggcgtctccagctgcagctggttgcgtcatcaaaaaaattccaaactctgaacatgccaacaatggccagttgtaacagtgaaaatatttaatcttctgtcgtaaacgcttggttagtactcagtgtagttgcatctgtggtgaacctttggttagctttcttgtgaagctactgtcattttattctccaatcacttagttggtttcgtttcaagtc

SEQ ID NO: 27076 - protein, 73 aa, Triticum aestivum
MDASPELQQFLEQEKQKMVMSEMVTKLTNVCWDKCITSTPGSKFSSGETTCLTNCAQRYLDMSMIIAKRFQMQ

SEQ ID NO: 27077 - protein, 56 aa, Triticum aestivum
MVMSEMVTKLTNVCWDKCITSTPGSKFSSGETTCLTNCAQRYLDMSMIIAKRFQMQ

SEQ ID NO: 27078 - protein, 54 aa, Triticum aestivum
MSEMVTKLTNVCWDKCITSTPGSKFSSGETTCLTNCAQRYLDMSMIIAKRFQMQ

SEQ ID NO: 27079 - DNA, 781 bp, Triticum aestivum
ctctaaccctgcagccgccgccccgtccatgttctgatcggcttcgccacccacgtcgcgccgcgcgccgccgccgccgccctgcgctgtccgctgcatccccggctcgccgcgcggtacgactccggccccacgtgctctccgagagaaaccagtaacaatggtcgtccctccaccagacagggccgctaggatcgtcggttttctcaagccctaccttttgaggatgcatttctcgaacaagtatgtaactgcccaggtcatccataccccaacagcaaccgtcgcgtgttctgcaagctcgcaggagaagctgctgagaccgaacttggagtcgacccgcgacgtatctgccgccgcaaagattgggaagttgctgggggagcgcctgctgctcaaggggatacctgccgtgtccatccacatgaagagagagcagaagtaccacgggaaagtcaaggctgttatagattctgtcagagaatctggtgtcaagctgttgtgatggtgaaaacatagagctcggcttagcatttgcgcagtcttgagctgcatttctgatttttggactgattgcaacttttgtgttcatgaatttggcaatgaacgaacgtttgtccgggactccaggtcaataaaaggactctgttgtaggagctcgacctgataatctgcagtagcactttttatttgaaacaaatctgctgtagcacttgatgacttgaggatcaacagcctgttatgtttctcctctccgaaatgcaacggagattattgggcg

SEQ ID NO: 27080 - protein, 114 aa, Triticum aestivum
MVVPPPDRAARIVGFLKPYLLRMHFSNKYVTAQVIHTPTATVACSASSQEKLLRPNLESTRDVSAAAKIGKLLGERLLLKGIPAVSIHMKREQKYHGKVKAVIDSVRESGVKLL

SEQ ID NO: 27081 - protein, 92 aa, Triticum aestivum
MHFSNKYVTAQVIHTPTATVACSASSQEKLLRPNLESTRDVSAAAKIGKLLGERLLLKGIPAVSIHMKREQKYHGKVKAVIDSVRESGVKLL

SEQ ID NO: 27082 - DNA, 1421 bp, Triticum aestivum
ctagaacatcctaatcgaaaaagagcaacaaacagctcatcagagctcccgccgccgccggcttcgcatctcccgcgccaccacctccgcggccgtcctcctccgcggtaggatcctccgagtacctgcgcgacagccgtccccgctgcgcctgcctggtcctcgccgaatcttcagcaaggtgccgcatggaggaggttgtccccgcttcggctaatagccaagcttcgactggtgatgccgcggcagatcagcctatcaacgtgtacgtgtgggacttggatgaaacgcttattctgctcaagtccctgctagatgggtcgtttgccgggcattttgaaggcctcaaggaccatgaaaaaggtaccgaaatagggaagcgctgggagaacattattcttgaactctgcgatgagcacttcttctatgaggagattgagaactacaatcaaccctatctcagttctttacatgagtatgatgacgggaaagacttgacaaaatatgattttgaggccgactgctttagttctccttttgatgatgtgaataaaaggaagcttgcctacaggcatcgtgctattggagacaaggtttgcaaaaaattctggaccaccgcatgtttaaagtctggagtgatttgtatagttcgacagacaaatatactgatggctggctttcttcagctcataagttgctggaagaagcgctgtgtaaatcaacagctgagcctgctatcaaatcttcaagtatcaattgcatagttacttcagggtccctggttccgagcattgccaaatgtttgctgtatcgcctggacgatgtggtctcatcagataatgtttacagctcgtgggaatcggggaagctgcagtgcttcaagtggatcaaggaacgccacggcggcccgaacgtccgcttctgcgcggttggagacggccccgaggagcgcagcgcagcttccataatgaaatggccgtttgttaagatcgagatccgccccgatgctcctcacaggttccccggcctgagcctgtcgacaatccatggcatcatggacgccgtgtaccagtcatcgggcaaagacggttgacctccggtgtgcgagacggcgtacatgtcttgaggcatcggtcgccgtggacgaggaggccagtctggtgatagttccatggaaccgcatagtggagataccatatatataggaggcatattgccctccctgcctggaggatccggagacgcctgtgagataaataagagcgcccgaccatatagtttgatccgttccggcatgtttgaattgaattctgccagtgttggcccatcttactgtcatctggggaatcatctgctgttgtaagtcgtaaccggttggttggttgttgtcgcaagtctgtatctttgtgctttggcatcgc

SEQ ID NO: 27083 - protein, 191 aa, Triticum aestivum
MEEVVPASANSQASTGDAAADQPINVYVWDLDETLILLKSLLDGSFAGHFEGLKDHEKGTEIGKRWENIILELCDEHFFYEEIENYNQPYLSSLHEYDDGKDLTKYDFEADCFSSPFDDVNKRKLAYRHRAIGDKVCKKFWTTACLKSGVICIVRQTNILMAGFLQLISCWKKRCVNQQLSLLSNLQVSIA

SEQ ID NO: 27084 - protein, 157 aa, Triticum aestivum
MFKVWSDLYSSTDKYTDGWLSSAHKLLEEALCKSTAEPAIKSSSINCIVTSGSLVPSIAKCLLYRLDDVVSSDNVYSSWESGKLQCFKWIKERHGGPNVRFCAVGDGPEERSAASIMKWPFVKIEIRPDAPHRFPGLSLSTIHGIMDAVYQSSGKDG

SEQ ID NO: 27085 - DNA, 1156 bp, Triticum aestivum
gaaaaatctaggcatgcatctcgccgccgactacccccaccgcggcggtggccgcctcggcctagggccattcgcggcagcggtgctccgcaccgacaaccgtcgccgtgcgattgcaggcggcgcggtcctcgcctcggcgctgcttctcgtggccacaccacgactccgccactcgccggcgctccacctcttcgccgacatgcgcaacctcctcggcgtgcccaacaccctcaacgtgctcaccgcctacccgcttctccttgctggagtaccaggactcatcctgtgcctcttcggcggtggatgcttcggcataagcttaaggtgggaggccttgggatggttcctcttctatgtggggaatgtaggggcagcatttggctcagcttactatcacctcaagccagatgatgaccggttaatttgggacaggttgccgatgatgatgtcggcctcctcgcttttgtcgatattggtaattgaaagagttgatgagagggctgggttatcttgtttgatctcgctcttgtctcttttactggtgagcagtgcgtgtgaaaggattcttgatgatatgcgcctgtgggtagttttaaacctggttccttgtgttgccattcctgcaatgctattcttgttcgcgccaaagtatacacactcaagattttggtttcttgctacaggcttttaccttctggcaagattcgaaggccttgccgacagaaaggtttacagtgtgaatagatatttcattagcggtcattccttggagcacctttgcttcgccatggttacattgatacttactgtgatgctatccttcagaaatattaagatcaccagggactcgtgactacaactccaccattgcttgtttgtaacaaatggcaaatttcctgtcagaatttctatgttcggaagggcccctccagagtccggaagcacctgaagaaacataaataggtgatctatgtatcctatctttccactacctgggtgactgacgccctccatccctgggcggcatagacaagtcctgtgagattatttcaatgtgtgttcatgtcgtgagttatttgtgtttggagcttgttaactggaccagcagaaacattggacgactatattgcaatttatacagatttcagctgtc

SEQ ID NO: 27086 - protein, 284 aa, Triticum aestivum
KNLGMHLAADYPHRGGGRLGLGPFAAAVLRTDNRRRAIAGGAVLASALLLVATPRLRHSPALHLFADMRNLLGVPNTLNVLTAYPLLLAGVPGLILCLFGGGCFGISLRWEALGWFLFYVGNVGAAFGSAYYHLKPDDDRLIWDRLPMMMSASSLLSILVIERVDERAGLSCLISLLSLLLVSSACERILDDMRLWVVLNLVPCVAIPAMLFLFAPKYTHSRFWFLATGFYLLARFEGLADRKVYSVNRYFISGHSLEHLCFAMVTLILTVMLSFRNIKITRDS

SEQ ID NO: 27087 - protein, 280 aa, Triticum aestivum
MHLAADYPHRGGGRLGLGPFAAAVLRTDNRRRAIAGGAVLASALLLVATPRLRHSPALHLFADMRNLLGVPNTLNVLTAYPLLLAGVPGLILCLFGGGCFGISLRWEALGWFLFYVGNVGAAFGSAYYHLKPDDDRLIWDRLPMMMSASSLLSILVIERVDERAGLSCLISLLSLLLVSSACERILDDMRLWVVLNLVPCVAIPAMLFLFAPKYTHSRFWFLATGFYLLARFEGLADRKVYSVNRYFISGHSLEHLCFAMVTLILTVMLSFRNIKITRDS

SEQ ID NO: 27088 - protein, 217 aa, Triticum aestivum
MRNLLGVPNTLNVLTAYPLLLAGVPGLILCLFGGGCFGISLRWEALGWFLFYVGNVGAAFGSAYYHLKPDDDRLIWDRLPMMMSASSLLSILVIERVDERAGLSCLISLLSLLLVSSACERILDDMRLWVVLNLVPCVAIPAMLFLFAPKYTHSRFWFLATGFYLLARFEGLADRKVYSVNRYFISGHSLEHLCFAMVTLILTVMLSFRNIKITRDS

SEQ ID NO: 27089 - DNA, 631 bp, Triticum aestivum
atcaagtaccacaagctcatctgccaatccacaaaccactccaaagcaaacaagtaccggctaaggagcaaacaagtaccggctaaggagctcaaatggcgtcccagctggttgagagccaccgtgccggctccgaggtccacaaggggaacgatatctgcaagaagaagaccgtcgagcttctcgaagtgcttggcctcccgaaaggcctctttcctatggatgacattgaggaggtcgggcacaactgtgagagtgggttcgtgtggatacttcaaaagaataagaaaaagcacatgttcaacaagctcaaccagaccgtcttctacgacactgaggtgaccgcttttgtggaaaagggcaagatgaagaaggtcaccggggtcaaggtcgaggagttttctttggtcgaggtctatgtggatgagtcttctgctgataaggtcaccatcaagaccgacaccggtctggctgacacccatgatgcggtcgtgttcgctctgggagaataggaagctactagttaagaaggccagaggaataaagtcagtgaatagtttggcactacagttcacatgttatgcagaagtatatgtttccgttttctttataatccaataaagaatgttgc

SEQ ID NO: 27090 - protein, 138 aa, Triticum aestivum
MASQLVESHRAGSEVHKGNDICKKKTVELLEVLGLPKGLFPMDDIEEVGHNCESGFVWILQKNKKKHMFNKLNQTVFYDTEVTAFVEKGKMKKVTGVKVEEFSLVEVYVDESSADKVTIKTDTGLADTHDAVVFALGE

SEQ ID NO: 27091 - protein, 113 aa, Triticum aestivum
IKYHKLICQSTNHSKANKYRLRSKQVPAKELKWRPSWLRATVPAPRSTRGTISARRRPSSFSKCLASRKASFLWMTLRRSGTTVRVGSCGYFKRIRKSTCSTSSTRPSSTTLR

SEQ ID NO: 27092 - protein, 97 aa, Triticum aestivum
MDDIEEVGHNCESGFVWILQKNKKKHMFNKLNQTVFYDTEVTAFVEKGKMKKVTGVKVEEFSLVEVYVDESSADKVTIKTDTGLADTHDAVVFALGE

SEQ ID NO: 27093 - DNA, 778 bp, Triticum aestivum
agctatcatcctgctagcacccgtgaactccagccattcacgctgcgtcgatcgtttggtttcgtgcgtgcgttgtttgtgatcgtgtgatctgttcgggagatggaggcttacatgctgttcccgcggagcaatggaaagagctgcgaggaggagcaggaggaggacatcggctgcccgtccgagtccgaggtgtcggcggccggctccatgctgtcgtcggacgaggagctcgacgacgacgccacctccagctccagctcctccggatccaccgacaacttccagatgtcctccctcatggcgcagctcccgctcaagaggggtctgtccaagttcttcgacggcaagtcgcagtcgttcgcgtcgctcgcggcggtgggcggcctggaggacctggccaagccgccgggcaagcggatcaagacgtcgcggagctgcgaggtcgggctgcaggacgcgcaccgccggcggttcgcgcgccacaatgccgcggccttcaagaaggtgtccaaagggcggctgtccgcgctcggcagggcgccgccgctccggccgctgacagcgagcgcggcgaggcccaagggcttgcccgtgcgggctccgctgttcgtttaggagatttcgcccgcagattagtcgtgtcggttgtggcgtgctcaaagagcagttggtgcggttgttacgtggattttgacatggtaactgaccggaaggtggccggctggtcgatggatgtgtaaatacagaaatgagaaacatgccttgttcagtatcc

SEQ ID NO: 27094 - protein, 171 aa, Triticum aestivum
MEAYMLFPRSNGKSCEEEQEEDIGCPSESEVSAAGSMLSSDEELDDDATSSSSSSGSTDNFQMSSLMAQLPLKRGLSKFFDGKSQSFASLAAVGGLEDLAKPPGKRIKTSRSCEVGLQDAHRRRFARHNAAAFKKVSKGRLSALGRAPPLRPLTASAARPKGLPVRAPLFV

SEQ ID NO: 27095 - protein, 167 aa, Triticum aestivum
MLFPRSNGKSCEEEQEEDIGCPSESEVSAAGSMLSSDEELDDDATSSSSSSGSTDNFQMSSLMAQLPLKRGLSKFFDGKSQSFASLAAVGGLEDLAKPPGKRIKTSRSCEVGLQDAHRRRFARHNAAAFKKVSKGRLSALGRAPPLRPLTASAARPKGLPVRAPLFV

SEQ ID NO: 27096 - protein, 142 aa, Triticum aestivum
MERAARRSRRRTSAARPSPRCRRPAPCCRRTRSSTTTPPPAPAPPDPPTTSRCPPSWRSSRSRGVCPSSSTASRSRSRRSRRWAAWRTWPSRRASGSRRRGAARSGCRTRTAGGSRATMPRPSRRCPKGGCPRSAGRRRSGR

SEQ ID NO: 27097 - DNA, 1401 bp, Triticum aestivum
gctcttctccagtccgcctccctatccccacctcctccacaacccccaccccaccccacccctcctccgctgcccatcccagcacagcggaagcgatcggcaatggcgtcctccacccagggccaggtcatcacctgcaaagcggcggtggcgtacgaggcgaacaagccgctggtggtcgaggacgtgcaggtggcgccgccgcaggccggcgaggtccgcatcaagatcctctccaccgcgctctgccacaccgactactacacctggagcggcaaggatcctgagggtctctttccttgcattctcggtcacgaggctgctggaattgttgagagtgtcggcgaaggggtgaccgacgtgcagcctggggaccatgtcatcccttgctaccaagcggaatgcagggactgcaagatgtgcaacagcgggaagaccaacctctgcggcaaagttcgcggcgccactggggttggggtcatgatgagcgaccgcaagagccgcttctcggttaatgggaagcccatctaccatttcatggggacgtccacgttcagtcagtacactgttgtgcatgacgtcagtgttgccaagatcaacccacaggcgcccctggataaggtctgcctgctcggctgtggtgtttctactggccttggagcagtatggaatactgcaaaggttgaagcaggttccattgttgctgtttttgggcttggcacagtcggacttgcagttgctgagggggcaaaatcagctggtgcttctcggattattggcattgacattgataccaagaagtttgatgttgctaagaactttggagtcacagagtttgtgaacccaaaagaccatgacaaaccaatccagcaggtccttgttgaccttacagatggtggtgtggattacagttttgagtgcatcggaaatgtttctatcatgagggctgcactcgaatgctgccacaagggctggggtacctctgttgtcgttggcgtagctgcgtctggccaggagattgccacacggccattccagctagtcactggccgtgtctggaagggaacagctttcggcggcttcaagagccgaagccaggtcccgtggctcgtcgagaagtacatgaacaaggaaatcaaggtggacgagtacatcacccacaacatgaaccttaccgacatcaacaaggcgttcgacctgctgcacgaaggcggctgcctgcggtgcgtgctggccatggagcactgaggatcctgctatgtgaagccgagcagtttgcgtcgtgtgaaattgtaatgcagatctatcctccgccctgggactatagaactcgtttggccccgtttggcctagaaactcttgaacacgaaccgctgctataataatatgttgtgttggatg

SEQ ID NO: 27098 - protein, 415 aa, Triticum aestivum
ALLQSASLSPPPPQPPPHPTPPPLPIPAQRKRSAMASSTQGQVITCKAAVAYEANKPLVVEDVQVAPPQAGEVRIKILSTALCHTDYYTWSGKDPEGLFPCILGHEAAGIVESVGEGVTDVQPGDHVIPCYQAECRDCKMCNSGKTNLCGKVRGATGVGVMMSDRKSRFSVNGKPIYHFMGTSTFSQYTVVHDVSVAKINPQAPLDKVCLLGCGVSTGLGAVWNTAKVEAGSIVAVFGLGTVGLAVAEGAKSAGASRIIGIDIDTKKFDVAKNFGVTEFVNPKDHDKPIQQVLVDLTDGGVDYSFECIGNVSIMRAALECCHKGWGTSVVVGVAASGQEIATRPFQLVTGRVWKGTAFGGFKSRSQVPWLVEKYMNKEIKVDEYITHNMNLTDINKAFDLLHEGGCLRCVLAMEH

SEQ ID NO: 27099 - protein, 381 aa, Triticum aestivum
MASSTQGQVITCKAAVAYEANKPLVVEDVQVAPPQAGEVRIKILSTALCHTDYYTWSGKDPEGLFPCILGHEAAGIVESVGEGVTDVQPGDHVIPCYQAECRDCKMCNSGKTNLCGKVRGATGVGVMMSDRKSRFSVNGKPIYHFMGTSTFSQYTVVHDVSVAKINPQAPLDKVCLLGCGVSTGLGAVWNTAKVEAGSIVAVFGLGTVGLAVAEGAKSAGASRIIGIDIDTKKFDVAKNFGVTEFVNPKDHDKPIQQVLVDLTDGGVDYSFECIGNVSIMRAALECCHKGWGTSVVVGVAASGQEIATRPFQLVTGRVWKGTAFGGFKSRSQVPWLVEKYMNKEIKVDEYITHNMNLTDINKAFDLLHEGGCLRCVLAMEH

SEQ ID NO: 27100 - protein, 276 aa, Triticum aestivum
MCNSGKTNLCGKVRGATGVGVMMSDRKSRFSVNGKPIYHFMGTSTFSQYTVVHDVSVAKINPQAPLDKVCLLGCGVSTGLGAVWNTAKVEAGSIVAVFGLGTVGLAVAEGAKSAGASRIIGIDIDTKKFDVAKNFGVTEFVNPKDHDKPIQQVLVDLTDGGVDYSFECIGNVSIMRAALECCHKGWGTSVVVGVAASGQEIATRPFQLVTGRVWKGTAFGGFKSRSQVPWLVEKYMNKEIKVDEYITHNMNLTDINKAFDLLHEGGCLRCVLAMEH

SEQ ID NO: 27101 - DNA, 1387 bp, Triticum aestivum
cgaaaagcgcccagcaagcttgtatattcgctcagcctctctctctcttctccttacccagccgcctcgtgcccttgtcctctcccgtctccgaccgcgccgccgccactaggccacgaccgccgccccctcccccagcctcgcttcgctccggcggggatggaaaaccgcgatggttcctcattgccagactttcttgagctccagcgcacccgtgttctctgcaaggccgatgcccccactcatacagaggggtttcaatactcgggggcttttgctgctatgggagttgatactagtgtctcagttgagaagttctgcaagaactttaaaatcgagataaatcgacttacagatgaggatatggagtttgatatgattggcgttgatgcatcgatagctaatgctttccggagaatcctcattgcagaggttcctacaatggccattgagaaagtcttcatggttgacaatacatcagttatagcagatgaggtcctttcacaccgactaggccttattccacttgatgctgatccaaggctttttgattatatctctgatgatgtcccaaatgaaaggaatactattgtgtacaaactgcatgtttcatgtgaaaagggttcccaaagacttacagttaagtctggtcaattggagtggttgccagaaggcagtcaattaactatggcatctcctgcgcaatctggggacaatcagaggacctacacatcctttggtcaaagccaacagaatacctctgaaaggcctctcggtgtgaagtataatgacataacaattgccaggcttgggccaggacaggctattgagcttgaggcacatgctgttaagggagtggggaaagttcatgcgaagtggtctccagttgctacagcctggtacaggatgctccccgaggttgttcttctcaaagaaattaaaaatggtgatgcagaggagctagtgaaaagatgcccagttaatgtttttgacattgaagacctgggaaagggggagaagagagcagttgttgcaaagccaagagcatgcaccctttgtagggaatgtgtcagactggctgatgatcaagtagagctacggcgtgttagagaccacttcatttttacaatcgagtccaccggagctctaccgccggaggtgctcttcacagaggccgtgaagatccttgaggagaagtgcgagcgagtgatatccgaactttcctgagcccgacataaagttttcagtactgttctgatgcagtttttctattgctatgttgtgctgaggacgaaatcttagtgtactagtataggttactgtaaaacttctgcatccaatactctggagtcacattcagctaatttattaccgagccggtatatgc

SEQ ID NO: 27102 - protein, 408 aa, Triticum aestivum
RKAPSKLVYSLSLSLSSPYPAASCPCPLPSPTAPPPLGHDRRPLPQPRFAPAGMENRDGSSLPDFLELQRTRVLCKADAPTHTEGFQYSGAFAAMGVDTSVSVEKFCKNFKIEINRLTDEDMEFDMIGVDASIANAFRRILIAEVPTMAIEKVFMVDNTSVIADEVLSHRLGLIPLDADPRLFDYISDDVPNERNTIVYKLHVSCEKGSQRLTVKSGQLEWLPEGSQLTMASPAQSGDNQRTYTSFGQSQQNTSERPLGVKYNDITIARLGPGQAIELEAHAVKGVGKVHAKWSPVATAWYRMLPEVVLLKEIKNGDAEELVKRCPVNVFDIEDLGKGEKRAVVAKPRACTLCRECVRLADDQVELRRVRDHFIFTIESTGALPPEVLFTEAVKILEEKCERVISELS

SEQ ID NO: 27103 - protein, 355 aa, Triticum aestivum
MENRDGSSLPDFLELQRTRVLCKADAPTHTEGFQYSGAFAAMGVDTSVSVEKFCKNFKIEINRLTDEDMEFDMIGVDASIANAFRRILIAEVPTMAIEKVFMVDNTSVIADEVLSHRLGLIPLDADPRLFDYISDDVPNERNTIVYKLHVSCEKGSQRLTVKSGQLEWLPEGSQLTMASPAQSGDNQRTYTSFGQSQQNTSERPLGVKYNDITIARLGPGQAIELEAHAVKGVGKVHAKWSPVATAWYRMLPEVVLLKEIKNGDAEELVKRCPVNVFDIEDLGKGEKRAVVAKPRACTLCRECVRLADDQVELRRVRDHFIFTIESTGALPPEVLFTEAVKILEEKCERVISELS

SEQ ID NO: 27104 - protein, 314 aa, Triticum aestivum
MGVDTSVSVEKFCKNFKIEINRLTDEDMEFDMIGVDASIANAFRRILIAEVPTMAIEKVFMVDNTSVIADEVLSHRLGLIPLDADPRLFDYISDDVPNERNTIVYKLHVSCEKGSQRLTVKSGQLEWLPEGSQLTMASPAQSGDNQRTYTSFGQSQQNTSERPLGVKYNDITIARLGPGQAIELEAHAVKGVGKVHAKWSPVATAWYRMLPEVVLLKEIKNGDAEELVKRCPVNVFDIEDLGKGEKRAVVAKPRACTLCRECVRLADDQVELRRVRDHFIFTIESTGALPPEVLFTEAVKILEEKCERVISELS

SEQ ID NO: 27105 - DNA, 916 bp, Triticum aestivum
gtcaaccaaacggccagctctgtttatctcgcccgtggactctccttctcggaggctgcgtagtggaacgactaaacagatctgccctctctctctctcgtccgcggcgatacgatccgagatggcgatgagggcgtggaggcggagcgcggcggcgagggccccggcgcacctgtgcctgtggctggcgctcgtcgccgccaccctggtgctcgcccagggtaagaagtcgaacctgtcggaggtgacgcacaaggtctacttcgacattgagatcgacggcaagcccgcaggtcgggttgtcatgggacttttcggcaaggctgttcctaaaaccgcagagaacttcagagcactctgcacaggagagaaaggcatgggcaacagcggcaagcctctccactacaaggggagttcgttccacagaattatccccagcttcatgatccaaggaggtgacttcactcttggcgatggaaggggcggtgaatcaatctacggcacaaagttcgccgatgagaacttcaagctcaagcacactggaccaggctacctttccatggccaatgctgggagagataccaatggatcccagttcttcatcaccactgtaaccacgagctggttggatggcaagcacgtcgtgttcggcaaggtgttgtctggaatggacgtggtctacaaggttgaggccgagggcaagcagaacgggacgccaaagagcaaggttgtcatcgccgacagcggagaagtgccgctgtgatgagacctgaaatggcctctggtggaaagctacggtgactagttttcattgtagaaccgttatcgtcgggactgttttcgtgtacttccgtgtgaatttagacggcaaagttttttctcttactataaaaaaagtataataacttgcttaccc

SEQ ID NO: 27106 - protein, 253 aa, Triticum aestivum
STKRPALFISPVDSPSRRLRSGTTKQICPLSLSSAAIRSEMAMRAWRRSAAARAPAHLCLWLALVAATLVLAQGKKSNLSEVTHKVYFDIEIDGKPAGRVVMGLFGKAVPKTAENFRALCTGEKGMGNSGKPLHYKGSSFHRIIPSFMIQGGDFTLGDGRGGESIYGTKFADENFKLKHTGPGYLSMANAGRDTNGSQFFITTVTTSWLDGKHVVFGKVLSGMDVVYKVEAEGKQNGTPKSKVVIADSGEVPL

SEQ ID NO: 27107 - protein, 213 aa, Triticum aestivum
MAMRAWRRSAAARAPAHLCLWLALVAATLVLAQGKKSNLSEVTHKVYFDIEIDGKPAGRVVMGLFGKAVPKTAENFRALCTGEKGMGNSGKPLHYKGSSFHRIIPSFMIQGGDFTLGDGRGGESIYGTKFADENFKLKHTGPGYLSMANAGRDTNGSQFFITTVTTSWLDGKHVVFGKVLSGMDVVYKVEAEGKQNGTPKSKVVIADSGEVPL

SEQ ID NO: 27108 - protein, 211 aa, Triticum aestivum
MRAWRRSAAARAPAHLCLWLALVAATLVLAQGKKSNLSEVTHKVYFDIEIDGKPAGRVVMGLFGKAVPKTAENFRALCTGEKGMGNSGKPLHYKGSSFHRIIPSFMIQGGDFTLGDGRGGESIYGTKFADENFKLKHTGPGYLSMANAGRDTNGSQFFITTVTTSWLDGKHVVFGKVLSGMDVVYKVEAEGKQNGTPKSKVVIADSGEVPL

SEQ ID NO: 27109 - DNA, 1428 bp, Triticum aestivum
actcaccaacttttcctttgctggtttgttctcttgcgctttcccgaaaggaggaaagggggagaaaaaaatcgcacccaaatccttcgagcagaaccaaatccgtcacgactccacgagcgctcgagcagggcaacacagattcgcgcagcccacctcgtcgagcattccccatcagatcggatcgaatccggcggcggtgatggcggcggagaagctggccccggcgaaggtgctctactgcggcgtgtgcggcctccccgcggagtactgcgagttcggccccgacttcgagcgctgcaagccgtggctccgcgcccacgcgcccggcgtctaccccgacgagctcgtggcctcctcctccggcggcgatgataaggacgtcggcaaggtcggcgagcgcctccagggcgtcagcatctccaccgccgacggctccacaagcgcagggggtgcttcggcatcttctaagactgaagaggtgaaacgactgcccggtggcaagctcaagaaaaaggacaagcaagaggttattattgagaagattgtccgcaacaagcgcaagtgtgtcactgtggtgaaaggcctggatttgtttggtgtaaagctgagtgatgcttcaaagaagcttggaaagaagtttgctactggagcttcggttgtcaagggcccaactgagaaggagcaaatcgatgtccaaggagacatatcatatgatgttgtggacttcattacagctacatggcctgatgttcctgaatccgccgtatatttcatagaagatggaaggaaggttgctgctgcttgattgcatatggtttacaaggcaatacaccagtggagctacaaatatgatagaaatataaggcaagagatggccgttaaggcatgcctgtcaaatgggttctttatccttactcccaagacacaactcgctccattttgacttgtgggtcagttcacaagtggtgttttaattactgctggcatgtcgccttcgtgtatcatcttttatttgatagccgagttcctcctgcaggcaagtatgacatccatatgtggtttatatatgtttaatgtgcttttgaatcctagtttcagaacaattcagtaccaactatctgtggacctgcagagataagtgcagattagtagtgctccagtctcctgtgctttcataggaacagtctggtgttttgtgttactttgtattgcatccagcaagttataacctacttttagggagatagatcgttgtcggtgtgcaccattggtattttgtcatcattttgttgcagagtcctgtgtgaagcccattattataaaaaagaagcaagatagatctggatgatgcatcatgaattagtgtggccatgtaattattataaaagtatttccgataaattgccattttcattaaacttgttc

SEQ ID NO: 27110 - protein, 268 aa, Triticum aestivum
LTNFSFAGLFSCAFPKGGKGEKKIAPKSFEQNQIRHDSTSARAGQHRFAQPTSSSIPHQIGSNPAAVMAAEKLAPAKVLYCGVCGLPAEYCEFGPDFERCKPWLRAHAPGVYPDELVASSSGGDDKDVGKVGERLQGVSISTADGSTSAGGASASSKTEEVKRLPGGKLKKKDKQEVIIEKIVRNKRKCVTVVKGLDLFGVKLSDASKKLGKKFATGASVVKGPTEKEQIDVQGDISYDVVDFITATWPDVPESAVYFIEDGRKVAAA

SEQ ID NO: 27111 - protein, 201 aa, Triticum aestivum
MAAEKLAPAKVLYCGVCGLPAEYCEFGPDFERCKPWLRAHAPGVYPDELVASSSGGDDKDVGKVGERLQGVSISTADGSTSAGGASASSKTEEVKRLPGGKLKKKDKQEVIIEKIVRNKRKCVTVVKGLDLFGVKLSDASKKLGKKFATGASVVKGPTEKEQIDVQGDISYDVVDFITATWPDVPESAVYFIEDGRKVAAA

SEQ ID NO: 27112 - DNA, 572 bp, Triticum aestivum
tttttacaaaccccccgtctttcgcccctgatcccgcatccggcatctcccactcctcctccggcacctgctccgatcccgcggacgccgtccgctgcctacatcgtctccggcgagctcccctgccccgccaagcaaggatgactacttcaaggcgtcttgctgacaggaagagtgcgaagtttcagaagaacattacaaagaggggctcagtgcctgaaactactgtgaagaaggggaatgactatcctgttggacccatcgtgcttggattcttcatctttgtcgtcataggatcatccttgtttcagattatcaggacggctactagtggtgggatggcttaatatcgagctaaaaacaagactatcattatcagagatttattatccatgtgtttgggaggcaatatcatatctgtaccctgtagcaaacttcgaccctgatgatgttatgtagagatttaaatcttgtgcagtcgtgtttacctcctgttaccaagaacctagtctaaacttgaaactaaatggtgcaagttgaaactttaaaattatataaaacttcaaatatcc

SEQ ID NO: 27113 - protein, 114 aa, Triticum aestivum
FTNPPSFAPDPASGISHSSSGTCSDPADAVRCLHRLRRAPLPRQARMTTSRRLADRKSAKFQKNITKRGSVPETTVKKGNDYPVGPIVLGFFIFVVIGSSLFQIIRTATSGGMA

SEQ ID NO: 27114 - protein, 68 aa, Triticum aestivum
MTTSRRLADRKSAKFQKNITKRGSVPETTVKKGNDYPVGPIVLGFFIFVVIGSSLFQIIRTATSGGMA

SEQ ID NO: 27115 - DNA, 1065 bp, Triticum aestivum
ctagaacatcctaatcgaaaagatttgttcccgtttcatttggtgtctttgctcagcagcgtgtctctgttgagctctagctgtactgcatcgttatccaatactggcgatacttgtggtgggttttgggttttggatgagcacccacaatgacgagtgccggcggtcactcacaatccctgtcatgggtcttggaggagtcatttttctcatgtcgctggcgggatttgtgggtgcttggaagaacatttcttgcttgctttggacatatctaataatgctgttcgtggtcctggtggcaatcatggtcttcacagtgcttgcgtttatcattacaaatactggaactggtcatgctgttcctgggtccagatataaagagtatcgtcttcaggactacagttcttggttcgtcaaacagctcaatgacactgataaatggactcatctgagaagttgccttgtgaagtcggatgattgcaatagcttgtcaaaaagatataagactctaaaacaatacaagctcgctgagctgactcccattgagtctggctgttgccgcccaccagcggagtgtggatatccagctttgaatgcttccaattttgatctgagctaccatccggtgagcacaaacgtcgactgcaaactgtacaaaaatgatcggttcctcaggtgctatgactgtaattcttgcaaagctggtgttgcgcaatacatgaagacagagtggcgagtggttgccatcttcaatgtgatattgtttatcattttgtcattcgtgtactttgttggctgctgcgcacgtcgacatgctggaggtagtgattctaaagttcctcgaagatgactcttactttgaagtgaatcctctctatgattcacgtgtcacagcgagagttagctttaccgtcccttgtaaaacattgttcattcaagttcagctgatgaaatggagtgtcaaggcttctgttctgtgggcgatttctttgtgccagtagcattttggacatctatgaaaatgaacgtcccacaatcttctgaaatacagcctcatgatcttgt

SEQ ID NO: 27116 - protein, 237 aa, Triticum aestivum
MSTHNDECRRSLTIPVMGLGGVIFLMSLAGFVGAWKNISCLLWTYLIMLFVVLVAIMVFTVLAFIITNTGTGHAVPGSRYKEYRLQDYSSWFVKQLNDTDKWTHLRSCLVKSDDCNSLSKRYKTLKQYKLAELTPIESGCCRPPAECGYPALNASNFDLSYHPVSTNVDCKLYKNDRFLRCYDCNSCKAGVAQYMKTEWRVVAIFNVILFIILSFVYFVGCCARRHAGGSDSKVPRR

SEQ ID NO: 27117 - protein, 221 aa, Triticum aestivum
MGLGGVIFLMSLAGFVGAWKNISCLLWTYLIMLFVVLVAIMVFTVLAFIITNTGTGHAVPGSRYKEYRLQDYSSWFVKQLNDTDKWTHLRSCLVKSDDCNSLSKRYKTLKQYKLAELTPIESGCCRPPAECGYPALNASNFDLSYHPVSTNVDCKLYKNDRFLRCYDCNSCKAGVAQYMKTEWRVVAIFNVILFIILSFVYFVGCCARRHAGGSDSKVPRR

SEQ ID NO: 27118 - protein, 212 aa, Triticum aestivum
MSLAGFVGAWKNISCLLWTYLIMLFVVLVAIMVFTVLAFIITNTGTGHAVPGSRYKEYRLQDYSSWFVKQLNDTDKWTHLRSCLVKSDDCNSLSKRYKTLKQYKLAELTPIESGCCRPPAECGYPALNASNFDLSYHPVSTNVDCKLYKNDRFLRCYDCNSCKAGVAQYMKTEWRVVAIFNVILFIILSFVYFVGCCARRHAGGSDSKVPRR

SEQ ID NO: 27119 - DNA, 722 bp, Triticum aestivum
caccccagatccccagcccagaaaactctcgccccgccgccgcaacgcatcacgcttcctccgaccccctctgcccccctccccggagctaagcacccatcccacccaaatggcggcggcggcggcgaggaacctggtgctgcgacacctccgcttggccgcggcccccgcgtcgtcggtggccctcaggccggcagcggcactgcagggggccctgtcgcggcggcggtggatgtcgtcggaggacgccaaggggtcgttcctggacaaggacgaggtcaccgagcgcaccatcaaggtcgtcaagaacttccagaagatcgacgacccatccaaggtgaaagcagatgcccactttaaggatgatcttggcctagacagtttggatgcagtagaggttgtgatgtccttggaagaggaatttggctttgagatacctgacaatgaagctgacaaaattgactccattaaagctgcagtggacttcatcgcctcgcaccccaaagccaaataagcaaaggacttggtcctctacttctagtttttaccgccatgaagctcgtgtcagatgagaaacagttcctctggggttgtgtgccatgttcaatttcaagcaccgccttatccgaataatatgtttgatatgagaaggataacgtattcctgtatggagttctcgctagctattaaaagatctatgtccggagcctccggttgtttcg

SEQ ID NO: 27120 - protein, 170 aa, Triticum aestivum
TPDPQPRKLSPRRRNASRFLRPPLPPSPELSTHPTQMAAAAARNLVLRHLRLAAAPASSVALRPAAALQGALSRRRWMSSEDAKGSFLDKDEVTERTIKVVKNFQKIDDPSKVKADAHFKDDLGLDSLDAVEVVMSLEEEFGFEIPDNEADKIDSIKAAVDFIASHPKAK

SEQ ID NO: 27121 - protein, 134 aa, Triticum aestivum
MAAAAARNLVLRHLRLAAAPASSVALRPAAALQGALSRRRWMSSEDAKGSFLDKDEVTERTIKVVKNFQKIDDPSKVKADAHFKDDLGLDSLDAVEVVMSLEEEFGFEIPDNEADKIDSIKAAVDFIASHPKAK

SEQ ID NO: 27122 - protein, 119 aa, Triticum aestivum
HPRSPAQKTLAPPPQRITLPPTPSAPLPGAKHPSHPNGGGGGEEPGAATPPLGRGPRVVGGPQAGSGTAGGPVAAAVDVVGGRQGVVPGQGRGHRAHHQGRQELPEDRRPIQGESRCPL

SEQ ID NO: 27123 - DNA, 877 bp, Triticum aestivum
atcatccacgccgagagtccaagctccaaaaccaaaacagaaccggttgatccgtcagtagccgcggccgccggcgatggagaagggcaagggcctcgcccgccgctgggcagtggagctccacgacgcatcttcctcctcatcctcgcctgccttccccgatcctcccggcttcaccagatctgccccggaagcggatgacgccgccagcgcgcggcagcgcaaggagaccgaagccgcctggaaggggcagaaggcctgggaggtggcgcaggcgcccttcaagaacctgatgatgatgggttttatgatgtggatggccgggagcacagtccacctgttcagcattggcatcgtcttctctgctctctggcagcccttcaacgcactccgatctgtcgggaaagtttttgaaccatttaaggacccaagggtggatacacttgcacctaagttgctcttcactgctctcaacttggccgctatgggtttgggtgtttggaagctcaatacattgggtcttcttccaacaaatgcatcagactgggtatcttcactgtctcctgctcgggaggttgaatatgctggtggagggatccccttgatgtaatttcccttatgatcttcaattgcttggaggatggtatctgtactaaagcgaaatttcccctgctgaagggagaaattttacgcgggtttgttgtattttttgtttcacatgtaccaaatttggattgatatctatagacaaatcacaggcttagctaaagatagcttgctcctttttttttctcttctgcttaccatgtctgatccaatagagatgttgctaactctcccattcaatgtagtggacgaactgcttttgttttgttcg

SEQ ID NO: 27124 - protein, 177 aa, Triticum aestivum
MEKGKGLARRWAVELHDASSSSSSPAFPDPPGFTRSAPEADDAASARQRKETEAAWKGQKAWEVAQAPFKNLMMMGFMMWMAGSTVHLFSIGIVFSALWQPFNALRSVGKVFEPFKDPRVDTLAPKLLFTALNLAAMGLGVWKLNTLGLLPTNASDWVSSLSPAREVEYAGGGIPLM

SEQ ID NO: 27125 - protein, 105 aa, Triticum aestivum
MMMGFMMWMAGSTVHLFSIGIVFSALWQPFNALRSVGKVFEPFKDPRVDTLAPKLLFTALNLAAMGLGVWKLNTLGLLPTNASDWVSSLSPAREVEYAGGGIPLM

SEQ ID NO: 27126 - protein, 104 aa, Triticum aestivum
MMGFMMWMAGSTVHLFSIGIVFSALWQPFNALRSVGKVFEPFKDPRVDTLAPKLLFTALNLAAMGLGVWKLNTLGLLPTNASDWVSSLSPAREVEYAGGGIPLM

SEQ ID NO: 27127 - DNA, 1363 bp, Triticum aestivum
accccaacggaccccgcttcttcctccggaaaacgtcgtctccggagcaccagagtcgcgaccgccggtagccctcctcactcccgcttaaccatcctcgccgtcggatgcgaccgcggcggccccaatggcgtcctcctccgccgccgagccaggcgcccgcctctccgatcggacgaggaggtcgcccctgggcctgagggccatggttctcctgatgcacgtggtcttcgtcggcgccgtcttcctgctcgattcgaccctcgataggcggatccacgaggagccgtggtatattggagtgtatggtgtgcttgttctgatcaccttagcgcaatacttctacactgctggttcatctccaggctatgttattgatgcaatgcaagccagtggtgggatgcatgcaaccttcatcaatactgccactctttcaaaaaaagacaatccagttcaaaacatggaagcttaaagtcctccacaaaccggcctgatctagagaaacttagaccaatgtcttcttcatcgtcatggttgcatcaaattgtggatctttatcctcctgggtcaagcaacagggattggacttgccaatattgcaaaattatccagccacctcgtaccaggcactgccatgattgtgataaatgcgtccttcagtttgaccatcactgtgtttggcttggaacgtgcattggcaaaaagaaccattgtcgtttttggtggtacatatttgaagaatcaatcctgtctacctggactgttgctctgtacattgagtcactgcatttagatattgagaaagtctggtggaaggattttattggtgtaatcctattggcaatattgatatttatccttatgttcctgctgttgttgttgatgtttcatacttatattgctctcacaaatcaaacaacctatgaagtggccagaaggaagcggatattctacttaaggggaattcctgatagagttcatccgttcagtaaaggcatatgcaggaacatctatgacttctgcttcactagagagaatggatttgttctcgaggccgtgcccccaattgaggagctggaagccagagcagccccgtacacatgccgagatctgttttgctgccggtgctgttgatacaaaccatcattcgaacttgctcgccagtggaagcatgtctttcgtgagctccgccagtagatgccctttgagttcattttcatgagaaagtgcatgtacattcttagcgacaagaaaatgtgtgtgcggtccgtggtatagatgactgtccctatgatatgagcaacatttgactgaaactaggtctcgaggacagaaactgtatcgggcgactgctcgtgcttct

SEQ ID NO: 27128 - protein, 206 aa, Triticum aestivum
MSSSSSWLHQIVDLYPPGSSNRDWTCQYCKIIQPPRTRHCHDCDKCVLQFDHHCVWLGTCIGKKNHCRFWWYIFEESILSTWTVALYIESLHLDIEKVWWKDFIGVILLAILIFILMFLLLLLMFHTYIALTNQTTYEVARRKRIFYLRGIPDRVHPFSKGICRNIYDFCFTRENGFVLEAVPPIEELEARAAPYTCRDLFCCRCC

SEQ ID NO: 27129 - protein, 114 aa, Triticum aestivum
MASSSAAEPGARLSDRTRRSPLGLRAMVLLMHVVFVGAVFLLDSTLDRRIHEEPWYIGVYGVLVLITLAQYFYTAGSSPGYVIDAMQASGGMHATFINTATLSKKDNPVQNMEA

SEQ ID NO: 27130 - DNA, 1476 bp, Triticum aestivum
aaaaatcctcctcgcgtcacgcgtgaacccagccggatccccaaacctccttccggtccgacgcctcgtgccgccggcgccgacgggggacccctccgcctctcacgcgtgccgccgcccccgccgtcgccgtcccgtctccctcgccggggcatcgcgttccaccccgccggcgactaggaacacggcaccctgaagctcctgagctagagtaggaggggcaaaccatccagctgaagaatgaaaacacatgagcgtgctgccaacttggctcttgctggtttgagcttggcaccgctcgtgatcaatgtgaacccaaatttgaatgtgatactgacagcatgtcttactgtctatgtgggctgttaccgttctgtcaagtcaactccacccgctgagacaatgtccaaagagcatgctatgcggttccctttggtggggagtgctatgcttctgtcgctattccttctattcaagtttctctccaaggacctggtcaatactgttctcactgcctactttttcattcttggcattgctgcgctctgtgcaacgttgctccctaccgtcaaacgttttcttccagaaggatggaatgataatgccatcgtctggcgtgctccatatttccactcactgtcggtggagtttaccaagtctcaagttgtcgcttcagtccctggttttttcttttgcgtatggtatgccatgaagaagcattggctagcaaacaatgttttgggacttgctttctgcattcagggaattgagatgttatcactaggatcattcaaaaccggtggtattctcttggctggactttttgtgtatgacattttctgggttttcttcactccagttatggtcagtgttgctaaatcatttgatgctccaataaagcttctatttcccaccgcggatgccgcacggccgttctctatgcttggtcttggtgatattgttatacctggtatatttgttgcacttgcactccgtttcgatgtctcgagaaacattaagaaccgttacttcaatagtgcatttttgggatacactgcgggcatgacagtaacaatcgttgtgatgaactggtttcaagctgcacagcctgctctgctatacatcgttcctggcgtgactggttttgtggctgttcactctttgtggaatggtgaagtaaagccgctactggagttcaccgagacgcagcccgaggagggagccgccgaggaagaagaagattccagtcagagcaaaaaggtggactagcgctcgctcgggtcgggtcgggtctttttaattaattaggagaggagaaccaaaccaaagcaggatttcaaataggctgtatgatcttgagaatcgaaaaacgattcacatgatagaactctttttgttttgaaaggtcattaactatctgttttggtgagtggtagatgatggacgaaaagggaacatatatgctaaaagacttgc

SEQ ID NO: 27131 - protein, 342 aa, Triticum aestivum
MKTHERAANLALAGLSLAPLVINVNPNLNVILTACLTVYVGCYRSVKSTPPAETMSKEHAMRFPLVGSAMLLSLFLLFKFLSKDLVNTVLTAYFFILGIAALCATLLPTVKRFLPEGWNDNAIVWRAPYFHSLSVEFTKSQVVASVPGFFFCVWYAMKKHWLANNVLGLAFCIQGIEMLSLGSFKTGGILLAGLFVYDIFWVFFTPVMVSVAKSFDAPIKLLFPTADAARPFSMLGLGDIVIPGIFVALALRFDVSRNIKNRYFNSAFLGYTAGMTVTIVVMNWFQAAQPALLYIVPGVTGFVAVHSLWNGEVKPLLEFTETQPEEGAAEEEEDSSQSKKVD

SEQ ID NO: 27132 - protein, 288 aa, Triticum aestivum
MSKEHAMRFPLVGSAMLLSLFLLFKFLSKDLVNTVLTAYFFILGIAALCATLLPTVKRFLPEGWNDNAIVWRAPYFHSLSVEFTKSQVVASVPGFFFCVWYAMKKHWLANNVLGLAFCIQGIEMLSLGSFKTGGILLAGLFVYDIFWVFFTPVMVSVAKSFDAPIKLLFPTADAARPFSMLGLGDIVIPGIFVALALRFDVSRNIKNRYFNSAFLGYTAGMTVTIVVMNWFQAAQPALLYIVPGVTGFVAVHSLWNGEVKPLLEFTETQPEEGAAEEEEDSSQSKKVD

SEQ ID NO: 27133 - protein, 282 aa, Triticum aestivum
MRFPLVGSAMLLSLFLLFKFLSKDLVNTVLTAYFFILGIAALCATLLPTVKRFLPEGWNDNAIVWRAPYFHSLSVEFTKSQVVASVPGFFFCVWYAMKKHWLANNVLGLAFCIQGIEMLSLGSFKTGGILLAGLFVYDIFWVFFTPVMVSVAKSFDAPIKLLFPTADAARPFSMLGLGDIVIPGIFVALALRFDVSRNIKNRYFNSAFLGYTAGMTVTIVVMNWFQAAQPALLYIVPGVTGFVAVHSLWNGEVKPLLEFTETQPEEGAAEEEEDSSQSKKVD

SEQ ID NO: 27134 - DNA, 466 bp, Triticum aestivum
gcaaaagaaaacgattggagacgtggctccgtcccaagcgcgaccaaaagcttcaggaggcggcggcggccggtggcgcagtccagcaggcattagttaatcatggtgttcagcaaggtggaagtgaacctgaaaaggctgcttgaggcggccccccgccagcagaatcaggctaagcttgtccattacataaccacagccagggagctgttggagcagcttggagctgaaattacaccagaaggaatatcaagtgtttcaaaagctaagctcagtgagtattcagaaaagattgaagcactagctgccacgcttgcttctctagtgccagaaaatgaaaatctggttgatgagagtagagagcaagacaactcttatgaaagagaaaaggttgggagtccaatatccttatcatcaggattgcggaggagatcgacggctcagatggaggttggaccaagcagtc

SEQ ID NO: 27135 - protein, 121 aa, Triticum aestivum
MVFSKVEVNLKRLLEAAPRQQNQAKLVHYITTARELLEQLGAEITPEGISSVSKAKLSEYSEKIEALAATLASLVPENENLVDESREQDNSYEREKVGSPISLSSGLRRRSTAQMEVGPSS

SEQ ID NO: 27136 - DNA, 1658 bp, Triticum aestivum
agcgcaccacggtcgacctaccgcgcaggaccaccgagcccctcccttctcccgtgcctgctgcggatcccctttcctttgccttctctcctccagtcagctcctcttccgcgcgtgtggtggccgatggcggcggcggcggacacttccgcggcttccacgaccgggctcgcgctctcggaggcgagcatcaactgggagaggttggacaagacaaagtttcatgtcattggagcaatcctatttacggcccagcaaggtgttctgcacccaacagctgttgtgaagactagaatgcaggttgccgaaggaggactttcacatatgtctggctttgtcgtttttagaaagatattgaggagtgatggcatccctggtgttttcagaggatttggcaccagtgcagttggagctctgcctggacgaatcttggctctaacttcactagagatctccaaagaaatggcatttaaatactctgagcatttcgatatgtccgaggcatcaaggattgctgttgctaatggtgtagcaggcttagtgtcaagtaccttttcaagttcatattctgtacccctagatgtggtttgtcagagactcatggttcagggattgccagggatgcaaacatatagaggcccatttgatgtgataaataaggttgtcaggagtgaaggcctccggggcctttaccgaggttttggaattacccttttaactcaatcaccagcttctgccctttggtggagttcatatggtggggctcaacatgctatctggaggagcttgggctatggaaatggtacgcagaagaaaccctcccatacagaacttgttgctgtgcaagcaacagctggaacaattgctggagcttgctcatcgattatcactacaccaatagataccatcaagacccggcttcaggtaatggacaactacgggagtggaaggccatccgtcatgaagactaccaggctgctactgcgagaagaaggttggagaggtttataccgagggtttggaccacgctttcttaacatgtctctttggggtacatcaatgattgtcacatatgagctaataaaaagactttctgtgaaacctgagcaatgaaccttttggcttctgctccgcctatctggtcatcatttccgttttggccatctagtgaattccttttggtacagggattggcatgtaacactggttggaaattcttgatgcaagtccccttataaagtctgacatgtttctgtacggaactaccctgtaaatacctccaagtgcaagggtgctcgtttcagatgagagccagaggatcgatctgggcactggagcgccttgtagttgttgagcaaaaatttccctgtaagtgctgaagggagctcgtttcaggatgagagccagaggctggatctgggtactgagcaccttgtagttgttcagcaaaaattccggaaacatagttttgtgtcttcccatctaattggcatagttaccccacttgaattttcaatttcgcattacttttgtagctcacttcttgggatgagatgtggcatgtccaaatcaatttagcatcatcagtgaggtggtaggctgcaatgtataccttgtcgagtgtcgacattctacagtgagaggtagatactttcttt

SEQ ID NO: 27137 - protein, 370 aa, Triticum aestivum
SAPRSTYRAGPPSPSLLPCLLRIPFPLPSLLQSAPLPRVWWPMAAAADTSAASTTGLALSEASINWERLDKTKFHVIGAILFTAQQGVLHPTAVVKTRMQVAEGGLSHMSGFVVFRKILRSDGIPGVFRGFGTSAVGALPGRILALTSLEISKEMAFKYSEHFDMSEASRIAVANGVAGLVSSTFSSSYSVPLDVVCQRLMVQGLPGMQTYRGPFDVINKVVRSEGLRGLYRGFGITLLTQSPASALWWSSYGGAQHAIWRSLGYGNGTQKKPSHTELVAVQATAGTIAGACSSIITTPIDTIKTRLQVMDNYGSGRPSVMKTTRLLLREEGWRGLYRGFGPRFLNMSLWGTSMIVTYELIKRLSVKPEQ

SEQ ID NO: 27138 - protein, 328 aa, Triticum aestivum
MAAAADTSAASTTGLALSEASINWERLDKTKFHVIGAILFTAQQGVLHPTAVVKTRMQVAEGGLSHMSGFVVFRKILRSDGIPGVFRGFGTSAVGALPGRILALTSLEISKEMAFKYSEHFDMSEASRIAVANGVAGLVSSTFSSSYSVPLDVVCQRLMVQGLPGMQTYRGPFDVINKVVRSEGLRGLYRGFGITLLTQSPASALWWSSYGGAQHAIWRSLGYGNGTQKKPSHTELVAVQATAGTIAGACSSIITTPIDTIKTRLQVMDNYGSGRPSVMKTTRLLLREEGWRGLYRGFGPRFLNMSLWGTSMIVTYELIKRLSVKPEQ

SEQ ID NO: 27139 - protein, 272 aa, Triticum aestivum
MQVAEGGLSHMSGFVVFRKILRSDGIPGVFRGFGTSAVGALPGRILALTSLEISKEMAFKYSEHFDMSEASRIAVANGVAGLVSSTFSSSYSVPLDVVCQRLMVQGLPGMQTYRGPFDVINKVVRSEGLRGLYRGFGITLLTQSPASALWWSSYGGAQHAIWRSLGYGNGTQKKPSHTELVAVQATAGTIAGACSSIITTPIDTIKTRLQVMDNYGSGRPSVMKTTRLLLREEGWRGLYRGFGPRFLNMSLWGTSMIVTYELIKRLSVKPEQ

SEQ ID NO: 27140 - DNA, 1003 bp, Triticum aestivum
atcgaaaatcgtatttacggttttgccctcattgacttccctcctatccccttccactccgccgctcgtcgtttcctccgtctctcctcaggcaggcgctctccctcccctcctggtcctggagccgcgactcatctgaaccctaaaccgtagatcccggcgcagcaggagcgagatatcctccagcaagcaagcatgagtcgccacccgagcaccaagtgggcgcagaggctggacaaggtttacctgacgattgagctgcccgacgccaaggatgtgaagctcaacttgaggcctgatggccatttcaacttctcggcaaaggcccctgctgatggcatgcagtatgagcttgaccttgagctctttgatgctgtcagcgttgaggagagccaagcggctgttgccccgagggctatatgctaccttgtcaagaaagctgaggccaagtggtggcctaggctgctcaagaaggaaggcaggccgcctgtgttcctcaaggttgactgggataaatggcaagatgaggatgatgaagacgctggatttggtgactttggtgatatggacttctcgaagctggacatgggaggtggtgatgacgatgatgatgatgagattgaggaggatgatgatgaagacaatgtggtcgacagttctaacaaaggtgatgtagatgctgagacagagccggggagcaagggaggggaagctccatcagctgctggtgaagaagcaaagccataagattggaggcgatggcatcgatcgttacaacttatgatggttatgagatctgtttctagacgcgaggtagaattttggtgtgcccctgaagttgggtagtagaggtgggtgttggtagcttttggcccggggctatctgtagtgttcaacgttattctgcaccttttgtttactagtaaattgtatgtgctttgcacgtcacttaaatatataaaagcatgggaaaatacatttgaatatgtatttcctttcctag

SEQ ID NO: 27141 - protein, 183 aa, Triticum aestivum
MSRHPSTKWAQRLDKVYLTIELPDAKDVKLNLRPDGHFNFSAKAPADGMQYELDLELFDAVSVEESQAAVAPRAICYLVKKAEAKWWPRLLKKEGRPPVFLKVDWDKWQDEDDEDAGFGDFGDMDFSKLDMGGGDDDDDDEIEEDDDEDNVVDSSNKGDVDAETEPGSKGGEAPSAAGEEAKP

SEQ ID NO: 27142 - protein, 135 aa, Triticum aestivum
MQYELDLELFDAVSVEESQAAVAPRAICYLVKKAEAKWWPRLLKKEGRPPVFLKVDWDKWQDEDDEDAGFGDFGDMDFSKLDMGGGDDDDDDEIEEDDDEDNVVDSSNKGDVDAETEPGSKGGEAPSAAGEEAKP

SEQ ID NO: 27143 - protein, 125 aa, Triticum aestivum
MAISTSRQRPLLMACSMSLTLSSLMLSALRRAKRLLPRGLYATLSRKLRPSGGLGCSRRKAGRLCSSRLTGINGKMRMMKTLDLVTLVIWTSRSWTWEVVMTMMMMRLRRMMMKTMWSTVLTKVM

SEQ ID NO: 27144 - DNA, 1129 bp, Triticum aestivum
atcaaccattcatctattcatgtccaagctagaagaggcaatccatcggtgtgcgctgtaaagatctggggtgttggggtttggccacagactcatccagatggccttcgcagtctcggacgagctactgggcacgttcgtgcccatcgcggtgtactggctctactcggggctgtacatcgtgctggacgcgctggggacggccgactgctaccgcctccaccccaaggaggacgaggagacgaggaacataccctccaagcgcaccgtcctcaagggcgtcctcctccaacaggccgtccaggtcgccgtctccctcatcgtcttcaagatcaccggcgatggaagccacgacacgagggagcagcctccggcaccggtgatagcgctgcagttcgtcgtggcgatgttcgccatggacacgtggcaatacttcgtgcacaggtatctccacaccaacaagttcctgtacaagcacgtccacgcgcagcaccacaccatcctggtgccctacgccttcggggcgctctacagccacccgcttgagggcctgctcatggacacggccagcggcgccgtcggcttcctcgcgtccgggatgaccccccggaccgccatcttcttcatctcgttcggcgccatcaagaccgtcgacgaccactgtggcctctggctgcccggcaacgtcttccacgctgtcttcgccaacaacagcgccttccacaacatccaccaccagctctacggcaacaagcacaacttctcgcagcccttcttcgtcgtgtgggacaagatcctcggaacgtacatgcccttcacgctccagagccgtgagggtggaggggtagaggcgcgcccggttaagcacgcccttgcggcgcacgagcagcacaagtccgattgagcagctggtttggtttcccctgatatatatgcatgttcacttggcaagatatatagaacttcactacagccgtacgtgctcatgttctcgcactaataatgtggtttctcactatttatatgttgtgctcccttatgaatattatatcttgtgctccctataaaaaaaaaaaaaaaaaagcttatcgatatgtttaaacacaataaagttggaacgggagggggg

SEQ ID NO: 27145 - protein, 267 aa, Triticum aestivum
MAFAVSDELLGTFVPIAVYWLYSGLYIVLDALGTADCYRLHPKEDEETRNIPSKRTVLKGVLLQQAVQVAVSLIVFKITGDGSHDTREQPPAPVIALQFVVAMFAMDTWQYFVHRYLHTNKFLYKHVHAQHHTILVPYAFGALYSHPLEGLLMDTASGAVGFLASGMTPRTAIFFISFGAIKTVDDHCGLWLPGNVFHAVFANNSAFHNIHHQLYGNKHNFSQPFFVVWDKILGTYMPFTLQSREGGGVEARPVKHALAAHEQHKSD

SEQ ID NO: 27146 - protein, 181 aa, Triticum aestivum
INHSSIHVQARRGNPSVCAVKIWGVGVWPQTHPDGLRSLGRATGHVRAHRGVLALLGAVHRAGRAGDGRLLPPPPQGGRGDEEHTLQAHRPQGRPPPTGRPGRRLPHRLQDHRRWKPRHEGAASGTGDSAAVRRGDVRHGHVAILRAQVSPHQQVPVQARPRAAPHHPGALRLRGALQPPA

SEQ ID NO: 27147 - protein, 165 aa, Triticum aestivum
MFAMDTWQYFVHRYLHTNKFLYKHVHAQHHTILVPYAFGALYSHPLEGLLMDTASGAVGFLASGMTPRTAIFFISFGAIKTVDDHCGLWLPGNVFHAVFANNSAFHNIHHQLYGNKHNFSQPFFVVWDKILGTYMPFTLQSREGGGVEARPVKHALAAHEQHKSD

SEQ ID NO: 27148 - DNA, 1209 bp, Triticum aestivum
agcgccttccccatttccacaaccgcccgtcctcctcctcctccccctcccacgctacagcagagcagcagcagcagccccgtcgatctactccgcgctcctctcccccccagacccggccgctcctcgccgccatggcgcctcgcgtgccctcctccctcctcctcgtcggcgccgcgctgctcctgggcctggcggccggcgcggcgcgggcgtccaacgaggagggggacgcgctgtacgcgctgcggatgcggctgtcggaccccaacggcgtgctccagagctgggatcccaccctcgtcaacccctgcacctggttccacgtcacctgcgacaccgccagccgcgtcgtgcgcctggatttaggcaactccaacgtctccggctccatcggccccgagctcagccgccttgtgaatcttcagtacctggagctgtacaggaacaacctcaacggcgagatcccaaaagagttgggcaagctgaagaatttgatcagcttggatctgtatgccaataagctcaccggaagaatccccaagtcgctttccaagctcagctcgctgagattcatgcgtttgaacaacaacaaacttgctggatcaattccacgggagctggccaaactctccaaccttaaagtcattgatttgtctaacaatgacttatgtgggacgatccctgtcgatggtccattctcaagcttccctcttagaagcttcgagaacaacagcagactgaacggcccggagctgcaaggattggtttcctatgactttggatgctagaaagcgctgatgcacacgacaatgcacgtggaaggaaggcaaaaaattatagtagtacaacaaatagtaggaagcttagcactacaacatgtatggcttgcgatacatgcagcagaagatgaagaaggtatgtgagcatagggtctgcgttcggtactcagaccccagaaggaaaataatgggatgtgagaagtcttagcttgatcgattgttattgccgtattgtaaattgtaataagctgcttagtaccgcagctaagctgaccgcttgggtccattgagtaagcctttgccagttcggaactaaatcccagctgatgaagaatgtatctcaagttttatctacaaacgatccacatctctttgttatgtcaaaaaaaaaaaaaaaaaacctatagtgagtcgtattccaatacgg

SEQ ID NO: 27149 - protein, 262 aa, Triticum aestivum
RLPHFHNRPSSSSSPSHATAEQQQQPRRSTPRSSPPQTRPLLAAMAPRVPSSLLLVGAALLLGLAAGAARASNEEGDALYALRMRLSDPNGVLQSWDPTLVNPCTWFHVTCDTASRVVRLDLGNSNVSGSIGPELSRLVNLQYLELYRNNLNGEIPKELGKLKNLISLDLYANKLTGRIPKSLSKLSSLRFMRLNNNKLAGSIPRELAKLSNLKVIDLSNNDLCGTIPVDGPFSSFPLRSFENNSRLNGPELQGLVSYDFGC

SEQ ID NO: 27150 - protein, 218 aa, Triticum aestivum
MAPRVPSSLLLVGAALLLGLAAGAARASNEEGDALYALRMRLSDPNGVLQSWDPTLVNPCTWFHVTCDTASRVVRLDLGNSNVSGSIGPELSRLVNLQYLELYRNNLNGEIPKELGKLKNLISLDLYANKLTGRIPKSLSKLSSLRFMRLNNNKLAGSIPRELAKLSNLKVIDLSNNDLCGTIPVDGPFSSFPLRSFENNSRLNGPELQGLVSYDFGC

SEQ ID NO: 27151 - protein, 179 aa, Triticum aestivum
MRLSDPNGVLQSWDPTLVNPCTWFHVTCDTASRVVRLDLGNSNVSGSIGPELSRLVNLQYLELYRNNLNGEIPKELGKLKNLISLDLYANKLTGRIPKSLSKLSSLRFMRLNNNKLAGSIPRELAKLSNLKVIDLSNNDLCGTIPVDGPFSSFPLRSFENNSRLNGPELQGLVSYDFGC

SEQ ID NO: 27152 - DNA, 1043 bp, Triticum aestivum
attctctcggaagtcgcgctcccaaaccctagctcccaccgcagcggcccccgccccctcccggtgcgcgcttgctgctgcagacgagaagcggctgaggcgaagaagaggaatcgaccatggcgacccgtatccagtttgagaacaactgtgaagttggtgttttctccaagctcacaaatgcctactgtctggttgcaattggaggatcagagaatttctacagtacatttgagtctgagcttgcagatgtcattcctgtggtcaagacctctatcggtggcactagaataattggtcgcctctgcgttggaaacaagaatggacttctcttgccacacacaaccactgatcaagagcttcagcatctgaggaactgcatacctgatcaagtggttgttcagcgcatcgatgaaaggctgtctgcccttggcaattgcatatcctgcaatgaccatgttgcgctcacacaccctgaccttgacaaggcaactgaggagcttattgcagatgtgcttggggttgaggtgttccgtcagacgattgcaggaaatatccttgttggcagctactgtgcattctctaacaggggtggactggtccatcctcacacatccattgaagatcttgatgagctgtccacactcctccaagtccctcttgtcgctggaaccgtgaaccgtggtagcgaggtcattgctgcgggcatgacggtgaacgactggaccgccttctgtggctcagacaccacggctaccgagctgtccgtcatcgagagcgtcttcaagttgagagaaggccagcccacagcgatcgtcgatgacatgaggaagtcgctgattgacagctatgtctaaatgatcaaagggcatgcggtgcggtgtggttggttcttgagctgtactcttggttgacagtagcaaaaaaaacgtgcctgtctaagctgttacttctgtctgtcttctgaatctggaactacacacttatatgctttgtactcgtaaagcttacggtatcggaagacgtgctcttgcgcttttgcg

SEQ ID NO: 27153 - protein, 245 aa, Triticum aestivum
MATRIQFENNCEVGVFSKLTNAYCLVAIGGSENFYSTFESELADVIPVVKTSIGGTRIIGRLCVGNKNGLLLPHTTTDQELQHLRNCIPDQVVVQRIDERLSALGNCISCNDHVALTHPDLDKATEELIADVLGVEVFRQTIAGNILVGSYCAFSNRGGLVHPHTSIEDLDELSTLLQVPLVAGTVNRGSEVIAAGMTVNDWTAFCGSDTTATELSVIESVFKLREGQPTAIVDDMRKSLIDSYV

SEQ ID NO: 27154 - DNA, 719 bp, Triticum aestivum
ccctcttccctacctccgctttcctccctctcgcgccgccgccgccgctgccgccacctccgcaggcagcccaccgcgaagcgaggtcgaatcagccatggcagacgccaaggccacgacggcggtcaccctccgcacccgcaagttcatgaccaaccgcctgctcgcccgtaagcagttcgtgctcgaggtcatccacccgggccgcgccaacgtctccaaggcggagctgaaggagaggctcgccaaggtgtacgaggtgaaggaccccaactgcatcttcgtcttcaagttccgcacccacttcggaggcggcaagtcctccggattcggtctcatctacgacaacctcgagtccgccaagaagttcgagcccaagtaccgcctcatcaggaatggccttgctaccaaggtagagaagtcacgcaagcagatcaaggaaaggaagaacaggacaaagaagatccgtggtgtgaagaagaccaaggccggagatgccaagaagaaataagaacatttctgtcttcatcttttcactatcagcctttgcttggtttaggacggtatccctgtggcaatgttgctgagtgcttaattatgactagaaaagactatgccatttgtgtcatctcccgctatgttaagaggcattttgtagtatcttatgctaagattttgaagaacttggtcagactatctcatatacacctgttgtcgct

SEQ ID NO: 27155 - protein, 169 aa, Triticum aestivum
PLPYLRFPPSRAAAAAAATSAGSPPRSEVESAMADAKATTAVTLRTRKFMTNRLLARKQFVLEVIHPGRANVSKAELKERLAKVYEVKDPNCIFVFKFRTHFGGGKSSGFGLIYDNLESAKKFEPKYRLIRNGLATKVEKSRKQIKERKNRTKKIRGVKKTKAGDAKKK

SEQ ID NO: 27156 - protein, 137 aa, Triticum aestivum
MADAKATTAVTLRTRKFMTNRLLARKQFVLEVIHPGRANVSKAELKERLAKVYEVKDPNCIFVFKFRTHFGGGKSSGFGLIYDNLESAKKFEPKYRLIRNGLATKVEKSRKQIKERKNRTKKIRGVKKTKAGDAKKK

SEQ ID NO: 27157 - protein, 120 aa, Triticum aestivum
MTNRLLARKQFVLEVIHPGRANVSKAELKERLAKVYEVKDPNCIFVFKFRTHFGGGKSSGFGLIYDNLESAKKFEPKYRLIRNGLATKVEKSRKQIKERKNRTKKIRGVKKTKAGDAKKK

SEQ ID NO: 27158 - DNA, 504 bp, Triticum aestivum
atccttttggttatctgcagagagtcttccgtcccctccaacaaaccttctcctcaccctccaatggcggccgcgacctcctccttcgccacgctcgccatcgcccgcccggcggcggcggggccggcggcgcagagggcgctcctcgcctcgaaggccccctcgtcggcgctctccctccgcggcggccgcatcgcgtccccggccctctccgtctcccagcagagccgcgcgcgcttcgtcgcctccgccagcgccgaaccctatgcacctgagcttcagtccaaagttacaaacaaggtgtactttgacataagcattggcaaccctgtcgggaagaacgttgggaggattgtcatcgggctgtatggggatgatgttccccaaaccgttgagaacttccgtgctctctgcactggggagaaagggttcggatacaagggatcaagtttccaccgtgtcattaaggacttcatgattcaggggggagactttgacaagggc

SEQ ID NO: 27159 - protein, 168 aa, Triticum aestivum
ILLVICRESSVPSNKPSPHPPMAAATSSFATLAIARPAAAGPAAQRALLASKAPSSALSLRGGRIASPALSVSQQSRARFVASASAEPYAPELQSKVTNKVYFDISIGNPVGKNVGRIVIGLYGDDVPQTVENFRALCTGEKGFGYKGSSFHRVIKDFMIQGGDFDKG

SEQ ID NO: 27160 - protein, 147 aa, Triticum aestivum
MAAATSSFATLAIARPAAAGPAAQRALLASKAPSSALSLRGGRIASPALSVSQQSRARFVASASAEPYAPELQSKVTNKVYFDISIGNPVGKNVGRIVIGLYGDDVPQTVENFRALCTGEKGFGYKGSSFHRVIKDFMIQGGDFDKG

SEQ ID NO: 27161 - protein, 104 aa, Triticum aestivum
SFWLSAESLPSPPTNLLLTLQWRPRPPPSPRSPSPARRRRGRRRRGRSSPRRPPRRRSPSAAAASRPRPSPSPSRAARASSPPPAPNPMHLSFSPKLQTRCTLT

SEQ ID NO: 27162 - DNA, 1020 bp, Triticum aestivum
agttcacttgttcaaagggagttctgaagacatggctatggatcagtgcaccgatgatgtcaagtatgaagaggagtttatcgtgaactcccgggacaccaagctgttcacctgctcatggatgccgcacaattcagagcccaaagctttgatattcatctgccatgggattgcagcagagtgcagtgtatcaatgagagatactgcctcccgtttggtgcgcgccgggtacgccgtctacgggatagatcacgaggggcacggcaggtcgtctggccagagatgctacgtgccgaacttcagcgacgtcgttgccgactgctccagccatttcatgagcgtctgcgataagccggagaacagggggaagaagcggttcctgtacgggatctccatgggcgggagcatagcgcttctcctccacaggaaggagccggcctactgggacggcgccgttctgcttgctccaatgtgcaagatttctgatgacatgaggcctcatccggtggtggtgagcgctctgaagatggtatgcgcggtggcgcccggttggaggatcatacccatcccggacatcatcgacaaagtctgcaaagatccagagatgagaaaacaggttcgctccaatccgtatatttacaggggaaagctcccattgaagacctgtcatgaactcctcatggtgagcctagacattgagaagaacttgcacgaggtgagcctgccgttcttggtgctgcacggaggagacgacatcgtgacggatccttcggtgagcaagctgctgttcgaggaagcgtcgagcggggacaaggacttgaagctctaccctgggatgtggcacgcgctcatggcagagttccctcaggacgccgagcgcgtctactccgacatcatctcttggctggaccagagggcgaattgtgcagccaatgtttcagcgaatactggcacggcaagtgcctagaaggtgttagttaattaattatgcaatgcaaaatatgccaagtgttctgttct

SEQ ID NO: 27163 - protein, 321 aa, Triticum aestivum
VHLFKGSSEDMAMDQCTDDVKYEEEFIVNSRDTKLFTCSWMPHNSEPKALIFICHGIAAECSVSMRDTASRLVRAGYAVYGIDHEGHGRSSGQRCYVPNFSDVVADCSSHFMSVCDKPENRGKKRFLYGISMGGSIALLLHRKEPAYWDGAVLLAPMCKISDDMRPHPVVVSALKMVCAVAPGWRIIPIPDIIDKVCKDPEMRKQVRSNPYIYRGKLPLKTCHELLMVSLDIEKNLHEVSLPFLVLHGGDDIVTDPSVSKLLFEEASSGDKDLKLYPGMWHALMAEFPQDAERVYSDIISWLDQRANCAANVSANTGTASA

SEQ ID NO: 27164 - protein, 311 aa, Triticum aestivum
MAMDQCTDDVKYEEEFIVNSRDTKLFTCSWMPHNSEPKALIFICHGIAAECSVSMRDTASRLVRAGYAVYGIDHEGHGRSSGQRCYVPNFSDVVADCSSHFMSVCDKPENRGKKRFLYGISMGGSIALLLHRKEPAYWDGAVLLAPMCKISDDMRPHPVVVSALKMVCAVAPGWRIIPIPDIIDKVCKDPEMRKQVRSNPYIYRGKLPLKTCHELLMVSLDIEKNLHEVSLPFLVLHGGDDIVTDPSVSKLLFEEASSGDKDLKLYPGMWHALMAEFPQDAERVYSDIISWLDQRANCAANVSANTGTASA

SEQ ID NO: 27165 - protein, 309 aa, Triticum aestivum
MDQCTDDVKYEEEFIVNSRDTKLFTCSWMPHNSEPKALIFICHGIAAECSVSMRDTASRLVRAGYAVYGIDHEGHGRSSGQRCYVPNFSDVVADCSSHFMSVCDKPENRGKKRFLYGISMGGSIALLLHRKEPAYWDGAVLLAPMCKISDDMRPHPVVVSALKMVCAVAPGWRIIPIPDIIDKVCKDPEMRKQVRSNPYIYRGKLPLKTCHELLMVSLDIEKNLHEVSLPFLVLHGGDDIVTDPSVSKLLFEEASSGDKDLKLYPGMWHALMAEFPQDAERVYSDIISWLDQRANCAANVSANTGTASA

SEQ ID NO: 27166 - DNA, 850 bp, Triticum aestivum
aaactctagggtttcccaaccacccccgcaaccgcaaacccccacccagccacgactcgatccgaaaaccaccaccccaccaccaccggcgatgtcgacggcggcggcgcagggcggcgagaagccggcgctcaggaagccggtgttcgtcaaggtggaccagctcaagccgggcaccaacggccacaccctcatcgtcaaggtcgtcagcgccaaccccgtccctggccgcgtgcgcactggtgcgcccgcctcctcctccgcccgcgccccccgcatcgcggagtgcctcgtgggcgacgagaccggctccatcatctttactgcccgcaacgaccaagttgacctgttgaaggctggtgctacagccatcttgcgcaatgctaaaattgacatgttcaaagcttcgatgaggcttgcggtggacaagtgggggcgggtagaagctacagaacctgccagctttactgtgaatgaagagaacaacttgtcgcaagtagagtacgagctggttaacgtggccgagtaattgttgaagtttccctgcccttttcccgccataaaaacgaagcactatgaatgaatattgtcaagccgttggtaagcttgtttatttcttatggtggtagtagataagatcaagattgtatcacttgagctagaatgttcgatggatcaaactgagctttccatgcatcttactggattgtgattcctcttggcactgcttgtattgctgttgtaatggaacaagctcagcgtggcgccatgttgcgctgagctttagagatcaaacggaatgaactgccattacatgttgtgttgaattgctgttacgttgtgttgatgt

SEQ ID NO: 27167 - protein, 175 aa, Triticum aestivum
NSRVSQPPPQPQTPTQPRLDPKTTTPPPPAMSTAAAQGGEKPALRKPVFVKVDQLKPGTNGHTLIVKVVSANPVPGRVRTGAPASSSARAPRIAECLVGDETGSIIFTARNDQVDLLKAGATAILRNAKIDMFKASMRLAVDKWGRVEATEPASFTVNEENNLSQVEYELVNVAE

SEQ ID NO: 27168 - protein, 145 aa, Triticum aestivum
MSTAAAQGGEKPALRKPVFVKVDQLKPGTNGHTLIVKVVSANPVPGRVRTGAPASSSARAPRIAECLVGDETGSIIFTARNDQVDLLKAGATAILRNAKIDMFKASMRLAVDKWGRVEATEPASFTVNEENNLSQVEYELVNVAE

SEQ ID NO: 27169 - protein, 116 aa, Triticum aestivum
TLGFPNHPRNRKPPPSHDSIRKPPPHHHRRCRRRRRRAARSRRSGSRCSSRWTSSSRAPTATPSSSRSSAPTPSLAACALVRPPPPPPAPPASRSASWATRPAPSSLLPATTKLTC

SEQ ID NO: 27170 - DNA, 1458 bp, Triticum aestivum
cagctctgcgattctagctgcaaaaagtcccttcttttacaagcttttctcaaatggcatgaaagaatccgaccagaggcatgcaactcttagaataactgcttcagaggaaagtgcccttatggagcttttaagttttatttacagtggaaagttgacgaccaatcagccaacccttctgcttgatatcttgatgatgtctgacaaatttgaagttgtttcttgcatgagacactgcagtcaactactaagaagcttacctatgaccacagaatctgcacttctctatctagatctgccttccagcatttcaatggctgcagcagttcagccactgactgatgctgccaaggaattccttgccaacaaatacaaggacttgactaagtttcaggatgaagtgatgaacattccccttgctgggattgaagctatcttatgtagtaacgaccttcaggtggcatcagaggatgcagtctatgactttgtgatcaagtgggctcgtgctcaatactcaagaacggaagaaagacgtgaaatcttggggactcggttgctgccacttgttaggttttctcatatgacctgcaggaagttgcggaaggtccttgcatgcagtgacctggataatgagcaagcaactaaaagtgtcactgatgcactcctgtacaaagctgatgcaccacatcgacagcgtgcccttgctacagatgtgttgacctctaggaaatatactgaacgagcttacaaatatcgtccacttaaggtggtggaatttgaccgaccgtatcctcagtgcatagcatacttggatctgaagcgtgaggagtgtggccgactattcccatctgggcggatttactcgcaagcattccatcttgccggacagggattcttcttgtcagcacattgcaacatggatcagcaaagtgctttccactgctttggtctcttcttagggatgcaagagaaaggctcaacgagtgttaccgtggactacgagtttgctgcaaggacaaggccatcgggtgagtttgtcagcaagtacaagggctgctacaccttcactggtggaaaggcggttggctaccgcaatctctttgcaattccctggccgtcgtttatggctgatgatagcctcttcttcatcaatggagtactacatctgagagcagaattgaccataaagcaactctagatggtgcttggcgcactactaacctcatctgtgtccttgctcacacctcagttcgtgcaacgatgggcctcagtgtggaaaatcttgtgtcattcaaacatgtttttactctgcgccaaaatagacacttctgaaacgagaagccaaatcctttgttttacataaaaaagaggactgtcatgtcatgcattagttttgaactttggaaactgtagctttgacgctgagaatcaaagttacattcgtaacatgttcagatg

SEQ ID NO: 27171 - protein, 398 aa, Triticum aestivum
SSAILAAKSPFFYKLFSNGMKESDQRHATLRITASEESALMELLSFIYSGKLTTNQPTLLLDILMMSDKFEVVSCMRHCSQLLRSLPMTTESALLYLDLPSSISMAAAVQPLTDAAKEFLANKYKDLTKFQDEVMNIPLAGIEAILCSNDLQVASEDAVYDFVIKWARAQYSRTEERREILGTRLLPLVRFSHMTCRKLRKVLACSDLDNEQATKSVTDALLYKADAPHRQRALATDVLTSRKYTERAYKYRPLKVVEFDRPYPQCIAYLDLKREECGRLFPSGRIYSQAFHLAGQGFFLSAHCNMDQQSAFHCFGLFLGMQEKGSTSVTVDYEFAARTRPSGEFVSKYKGCYTFTGGKAVGYRNLFAIPWPSFMADDSLFFINGVLHLRAELTIKQL

SEQ ID NO: 27172 - protein, 379 aa, Triticum aestivum
MKESDQRHATLRITASEESALMELLSFIYSGKLTTNQPTLLLDILMMSDKFEVVSCMRHCSQLLRSLPMTTESALLYLDLPSSISMAAAVQPLTDAAKEFLANKYKDLTKFQDEVMNIPLAGIEAILCSNDLQVASEDAVYDFVIKWARAQYSRTEERREILGTRLLPLVRFSHMTCRKLRKVLACSDLDNEQATKSVTDALLYKADAPHRQRALATDVLTSRKYTERAYKYRPLKVVEFDRPYPQCIAYLDLKREECGRLFPSGRIYSQAFHLAGQGFFLSAHCNMDQQSAFHCFGLFLGMQEKGSTSVTVDYEFAARTRPSGEFVSKYKGCYTFTGGKAVGYRNLFAIPWPSFMADDSLFFINGVLHLRAELTIKQL

SEQ ID NO: 27173 - protein, 358 aa, Triticum aestivum
MELLSFIYSGKLTTNQPTLLLDILMMSDKFEVVSCMRHCSQLLRSLPMTTESALLYLDLPSSISMAAAVQPLTDAAKEFLANKYKDLTKFQDEVMNIPLAGIEAILCSNDLQVASEDAVYDFVIKWARAQYSRTEERREILGTRLLPLVRFSHMTCRKLRKVLACSDLDNEQATKSVTDALLYKADAPHRQRALATDVLTSRKYTERAYKYRPLKVVEFDRPYPQCIAYLDLKREECGRLFPSGRIYSQAFHLAGQGFFLSAHCNMDQQSAFHCFGLFLGMQEKGSTSVTVDYEFAARTRPSGEFVSKYKGCYTFTGGKAVGYRNLFAIPWPSFMADDSLFFINGVLHLRAELTIKQL

SEQ ID NO: 27174 - DNA, 898 bp, Triticum aestivum
acgaatgtcgtcgcgtgcggccaccagaattttcctgacgccgtcgttgctcccactcccacttcccaagtgactgcgtacgcggcggccaagcatctgcccagcgggaagagccttcgcgatggcggcgtctggattcggaggcggcgaggcgttccggctgtcggctgcggcgggggccggcgcgctgaagctgcacaagggcgacatcaccctatggtccgtcgacggcgccaccgacgccatcgtcaatgctgctaatgaacgaatgctaggagggggaggtgttgatggagctatacatcaagctgctggaccacagcttgtgcaagcatgccgtgaagttccagaggttaaacctggagtccgttgccctactggagaagctagaattactccagcttttgagcttcccgtgtcccgtgtgatccatacagttgggcccatatatgatatggacaggaagcctgaggtgtcactaaagaatgcatacgaaaatagcttaaaggttgctaaagagaatggcattcagtacgttgcattccctgctatatcttgtggtattttccgttaccctccaaaggaagcatcaaatatagctatttcagctgctcaacaattttcagcggatattaaagaggtgcattttgttctgttctcggatgagctctacaaagtttggcgtgagactgcccaggagatgctgacgcagtttgagaaatgaataactatgatatcagtgtagtatgcgcatgttagccagcatccaatatgaccactagagtctgttgaccatgatcgtatgtatggcgcagtttgaatgtgtttatctgaaagatagttggatggatatgccggatgagtgccctgaataatatttcaccgttctttatgttcc

SEQ ID NO: 27175 - protein, 200 aa, Triticum aestivum
MAASGFGGGEAFRLSAAAGAGALKLHKGDITLWSVDGATDAIVNAANERMLGGGGVDGAIHQAAGPQLVQACREVPEVKPGVRCPTGEARITPAFELPVSRVIHTVGPIYDMDRKPEVSLKNAYENSLKVAKENGIQYVAFPAISCGIFRYPPKEASNIAISAAQQFSADIKEVHFVLFSDELYKVWRETAQEMLTQFEK

SEQ ID NO: 27176 - protein, 151 aa, Triticum aestivum
MLGGGGVDGAIHQAAGPQLVQACREVPEVKPGVRCPTGEARITPAFELPVSRVIHTVGPIYDMDRKPEVSLKNAYENSLKVAKENGIQYVAFPAISCGIFRYPPKEASNIAISAAQQFSADIKEVHFVLFSDELYKVWRETAQEMLTQFEK

SEQ ID NO: 27177 - DNA, 670 bp, Triticum aestivum
taaaatattccacacacaagaagactcctcaatcatccatagacatggccaccgtcacttctgcagcagtttctattccctcattcactggcctcaaggcaagcgcaggcaaagtgagtgccgccgcagttaaagtctcagctccccaagccacaaggttctgcggcatcaaggcttccctcaaagacgttggagtcgctgttgtggccactgctgcgagcgcagttctagctagcaacgccatggccattgaagtgttactgggcactgatgacgggtctctggttttctctcccaactctttctccgtggcccctggggaaaagatcgtgttcaagaacaacgcaggtttcccccacaacgttgtgttcgacgaggacgagattcctagcggcgtggatgcagggaaaatctccatgagcgaagaagaccttctcaatgcggctggtgagacttacagcgttactttggatgccaagggaacctacagtttctactgttcgcctcaccaaggagctggtatggtgggaaaagtcaccgttaattaattatatattgtctcctacgtctaagttctcatatgcttgttttcctagaagagcctaattcatctttcttgttagggcctatgggatgaatcaacaatataatgcctttgtgtaattcattt

SEQ ID NO: 27178 - protein, 181 aa, Triticum aestivum
KYSTHKKTPQSSIDMATVTSAAVSIPSFTGLKASAGKVSAAAVKVSAPQATRFCGIKASLKDVGVAVVATAASAVLASNAMAIEVLLGTDDGSLVFSPNSFSVAPGEKIVFKNNAGFPHNVVFDEDEIPSGVDAGKISMSEEDLLNAAGETYSVTLDAKGTYSFYCSPHQGAGMVGKVTVN

SEQ ID NO: 27179 - protein, 167 aa, Triticum aestivum
MATVTSAAVSIPSFTGLKASAGKVSAAAVKVSAPQATRFCGIKASLKDVGVAVVATAASAVLASNAMAIEVLLGTDDGSLVFSPNSFSVAPGEKIVFKNNAGFPHNVVFDEDEIPSGVDAGKISMSEEDLLNAAGETYSVTLDAKGTYSFYCSPHQGAGMVGKVTVN

SEQ ID NO: 27180 - protein, 101 aa, Triticum aestivum
MAIEVLLGTDDGSLVFSPNSFSVAPGEKIVFKNNAGFPHNVVFDEDEIPSGVDAGKISMSEEDLLNAAGETYSVTLDAKGTYSFYCSPHQGAGMVGKVTVN

SEQ ID NO: 27181 - DNA, 411 bp, Triticum aestivum
ccctaataacttcttcccctttccaccttgtcggcgaacacccaccataatccccacgcccgaggcttcctcccgcgccgaaaccctagcgaccggagcgctcggcggcggcagccatggcggacgacgattacaatgaagttgacatggggtatgaggatgagcctccagaagctgatattgaggaaggggttgaagaagatcctgagaacaatgaggatgcccctgatgatgtggtagggggtgagggtgaagaaaaggaacaggaaaagactgcccgtccacgcaatacaacaaaatatatgaccaagtatgagcgggcacgcatccttggcacacgtgctttgcagataagcatgaatgccccagttatggttgagcttgagggcgaaactgatcctcttgagattg

SEQ ID NO: 27182 - protein, 98 aa, Triticum aestivum
MADDDYNEVDMGYEDEPPEADIEEGVEEDPENNEDAPDDVVGGEGEEKEQEKTARPRNTTKYMTKYERARILGTRALQISMNAPVMVELEGETDPLEI

SEQ ID NO: 27183 - protein, 88 aa, Triticum aestivum
MGYEDEPPEADIEEGVEEDPENNEDAPDDVVGGEGEEKEQEKTARPRNTTKYMTKYERARILGTRALQISMNAPVMVELEGETDPLEI

SEQ ID NO: 27184 - DNA, 799 bp, Triticum aestivum
accaatccgatcgcagcagcagcagcagcagcagcagccaacaaacaaacatacctccactcattggagagccgctgctgctcgccggccctccctcggttccccatttctccacctcggagcagccgagccgacgcctccctcgccgccagcgtctccgtgaccgtaacccaccatgtcggggatgaaggacgccaatgctgctgggcatgataatgttggaaattctgaacctatggaccaaagtggagataatgccatgccatcggctcagcaacaggaacaagtaatcaagaagaagtttggaggactaattcctaaaaagccaccgctcatctcaaaggatcacgagcgggcctattttgactctgctgattgggctctcggaaagtctggacagcaaggtgttgcaaaacccaaaggaccgctcgaggcactcaggccaaagttgcagcccacacgacaacagcaacagcgttcaaggagctctatctacagttcatccgaaaacgaggatggagatggcgctgggtcggaggacatgaatatcaactgatcaacagcgtggaatctcgtgttgtcggtgagaaggggcctcgtcgtctaaagaagcagcttgctttcattgtctgtggaccgcagggaagggatgtatgcttgcgtccatagataagaaaagagacggttgtaatttcaaggactgcggctgcgggtttgtacttcatcgaacagctaccttgctatgtgcccattatagactggaccattgtcctatttgtgaatggatatctctgttttc

SEQ ID NO: 27185 - protein, 126 aa, Triticum aestivum
MSGMKDANAAGHDNVGNSEPMDQSGDNAMPSAQQQEQVIKKKFGGLIPKKPPLISKDHERAYFDSADWALGKSGQQGVAKPKGPLEALRPKLQPTRQQQQRSRSSIYSSSENEDGDGAGSEDMNIN

SEQ ID NO: 27186 - protein, 123 aa, Triticum aestivum
MKDANAAGHDNVGNSEPMDQSGDNAMPSAQQQEQVIKKKFGGLIPKKPPLISKDHERAYFDSADWALGKSGQQGVAKPKGPLEALRPKLQPTRQQQQRSRSSIYSSSENEDGDGAGSEDMNIN

SEQ ID NO: 27187 - protein, 106 aa, Triticum aestivum
MDQSGDNAMPSAQQQEQVIKKKFGGLIPKKPPLISKDHERAYFDSADWALGKSGQQGVAKPKGPLEALRPKLQPTRQQQQRSRSSIYSSSENEDGDGAGSEDMNIN

SEQ ID NO: 27188 - DNA, 673 bp, Triticum aestivum
  misc_feature (638)..(640): n is a, c, g, or t
attcacaaaccgtgacggccacccacctgacctcagccgccttcccctctcctcccccgtccgccctccgtctcccgctccccggcctcccgcggacgcgcgctgcagatgggtcccgctacgcagcagcgccaccggacgcgcgctgggcggccggccgccaggcggcccagggcggcggccgacgacgacggcggcgtcaggtgcgaggcgtgcggatccggccgccacgcggacgagctgctgctctgcgacggctgcgaccgcggcctccacatcttctgcctccgccccatcctcccgcgcgtgcccgccggcgactggttctgcccctcctgcgccgccgcaaccaccaccaccgcccattcggccaaatccgccgccgtcgtccagaccaagatgcccaaacagttcccgctgatccagacgaagatcgtcgatttcttcaagatccagcggcgcccggcgttcgcggcccccgagccgccggaggggaggaagaggaagcggaaggccgccagcgcgctggtggtgtccaagaagaagagcaggaagctgctgccattcacccccagcgaggaccccgtccggcgactcacgcagatggcgtccctcgccacggcgctcacggctaccgnnnccgtcttcagcaacgacctcacctacgtgcccg

SEQ ID NO: 27189 - protein, 223 aa, Triticum aestivum
  misc_feature (212)..(213): Xaa can be any naturally occurring amino acid
SQTVTATHLTSAAFPSPPPSALRLPLPGLPRTRAADGSRYAAAPPDARWAAGRQAAQGGGRRRRRRQVRGVRIRPPRGRAAALRRLRPRPPHLLPPPHPPARARRRLVLPLLRRRNHHHRPFGQIRRRRPDQDAQTVPADPDEDRRFLQDPAAPGVRGPRAAGGEEEEAEGRQRAGGVQEEEQEAAAIHPQRGPRPATHADGVPRHGAHGYXXRLQQRPHLRA

SEQ ID NO: 27190 - protein, 188 aa, Triticum aestivum
  misc_feature (177)..(178): Xaa can be any naturally occurring amino acid
MGPATQQRHRTRAGRPAARRPRAAADDDGGVRCEACGSGRHADELLLCDGCDRGLHIFCLRPILPRVPAGDWFCPSCAAATTTTAHSAKSAAVVQTKMPKQFPLIQTKIVDFFKIQRRPAFAAPEPPEGRKRKRKAASALVVSKKKSRKLLPFTPSEDPVRRLTQMASLATALTATXXVFSNDLTYVP

SEQ ID NO: 27191 - protein, 139 aa, Triticum aestivum
FTNRDGHPPDLSRLPLSSPVRPPSPAPRPPADARCRWVPLRSSATGRALGGRPPGGPGRRPTTTAASGARRADPAATRTSCCSATAATAASTSSASAPSSRACPPATGSAPPAPPQPPPPPIRPNPPPSSRPRCPNSSR

SEQ ID NO: 27192 - DNA, 634 bp, Triticum aestivum
cacgcgcacacacacagaggcggagacaatcccccagacgaggcgacaccggaccgagaagaggcggacggcggcgatgggcggcggcggcggcacgacgtacaagggctacaccatcccccacaacaagcgctggcacaccatcgccggcaagggcctctgcgccaccatgtggttttggattttctacagggctaaacaggacggcgctgtgctcttgggtatgcgtcatccttgggatggccatgatgatcatgcgcatggtcatggacatgcacacgagcaggaggcttcatcgtcgtcatcgccgtcccattgagctcaacgctgaaagtggctgacagagaccctgacgcatcgcatgtttcgacgcaagtctctgctaataaaaaacagtcacaactatcattattcacccctgttgtttgcaagtatattttttttagcacacaaactggctttgttatgtattttggtttggagctgtggcgtcctgggaatgcttcggcatgcacgtgttgttgcctattgtgatagccgcagctgttgtcgcacgctctgagaaatcctctgacaatatatgtatcccgttcgagtagcgcattgcaaacatgcctaagcgttactgctgttt

SEQ ID NO: 27193 - protein, 112 aa, Triticum aestivum
RAHTQRRRQSPRRGDTGPRRGGRRRWAAAAARRTRATPSPTTSAGTPSPARASAPPCGFGFSTGLNRTALCSWVCVILGMAMMIMRMVMDMHTSRRLHRRHRRPIELNAESG

SEQ ID NO: 27194 - protein, 105 aa, Triticum aestivum
TRTHTEAETIPQTRRHRTEKRRTAAMGGGGGTTYKGYTIPHNKRWHTIAGKGLCATMWFWIFYRAKQDGAVLLGMRHPWDGHDDHAHGHGHAHEQEASSSSSPSH

SEQ ID NO: 27195 - protein, 80 aa, Triticum aestivum
MGGGGGTTYKGYTIPHNKRWHTIAGKGLCATMWFWIFYRAKQDGAVLLGMRHPWDGHDDHAHGHGHAHEQEASSSSSPSH

SEQ ID NO: 27196 - DNA, 1061 bp, Triticum aestivum
tacctagaacatcctaatcgaaaaaatagtccttcgcctgagccgctgaacccgaaccgaaccattttcactctctaaaccctacgccctcctccgccgccgcatccggccacccttcgccgccgcatccgaccatgggtagcaggctgggccgccgcgtgctccacttcgccaacctccccatcaagctcatgctccccccggcccccctatcctccgtccaggagttcgctgtcaggaccgtcccctccgcctccaaggtcgacatccgccgctgcctcgagtccgtctacggcttctccatcgccgaagtccgcaccctcaacatggagggaaagaagcaccgccgaggacccttcctcgccgccaagccagactacaagaaggcctacgtcactcttcaggccccgctctccgtttcccccgacatcttccccatcggcgcgatcctcggggagagggaacggaaggccagcgcagccgcggcgaggaggaaggttgtggaaggggcagaggtcgagggggagagggaggggaaggggaaacattggatggaggacgagagggagggcttctccagggccggatgcggcaagatcgtgtatgggaaccctgggaggctggggaacaagaggaggggacgtgccagggcgaatgagcaagctgacgaaaaggggggaaacttcccgtggaacgggatgcagctggctaccgagaaacctgctaggaaaagacactatcctcccaaggcacagggaggcatggtcttgaagcagagatcacacaggggatcagcgctgcgtggaaagagttgagttgtcgtcgcctcaaccatgagagagcaccgcgccatgaaacgcgatgcagtacgtgcatccatgactaatccgccagatccatgccgttttgcagtcacacaataaagatgcgttgatttagtatttataattggctttggttcccttttactttgctattaaagcgtgtagtgatttcagtctctcatgcacatggctggttacaatgtaacagcatttccttatctaaatttgattgtcttc

SEQ ID NO: 27197 - protein, 226 aa, Triticum aestivum
MGSRLGRRVLHFANLPIKLMLPPAPLSSVQEFAVRTVPSASKVDIRRCLESVYGFSIAEVRTLNMEGKKHRRGPFLAAKPDYKKAYVTLQAPLSVSPDIFPIGAILGERERKASAAAARRKVVEGAEVEGEREGKGKHWMEDEREGFSRAGCGKIVYGNPGRLGNKRRGRARANEQADEKGGNFPWNGMQLATEKPARKRHYPPKAQGGMVLKQRSHRGSALRGKS

SEQ ID NO: 27198 - protein, 207 aa, Triticum aestivum
MLPPAPLSSVQEFAVRTVPSASKVDIRRCLESVYGFSIAEVRTLNMEGKKHRRGPFLAAKPDYKKAYVTLQAPLSVSPDIFPIGAILGERERKASAAAARRKVVEGAEVEGEREGKGKHWMEDEREGFSRAGCGKIVYGNPGRLGNKRRGRARANEQADEKGGNFPWNGMQLATEKPARKRHYPPKAQGGMVLKQRSHRGSALRGKS

SEQ ID NO: 27199 - protein, 162 aa, Triticum aestivum
MEGKKHRRGPFLAAKPDYKKAYVTLQAPLSVSPDIFPIGAILGERERKASAAAARRKVVEGAEVEGEREGKGKHWMEDEREGFSRAGCGKIVYGNPGRLGNKRRGRARANEQADEKGGNFPWNGMQLATEKPARKRHYPPKAQGGMVLKQRSHRGSALRGKS

SEQ ID NO: 27200 - DNA, 1005 bp, Triticum aestivum
agcagcttgtaatatatctatccaacctctcgtacacgcacctactgatatacgcctcgttcgagagcccgaagctagctatagcttcgcccgaatcgaacatgggagaacaccacctcccgccggagccagccgaccaccacaaaggcgggaaggccatccacgccgatgacctgaagcccgcccgcggccgccgctacagctactacggcagcacgggctcccgcggggccctgagcaccatctgctccgtccttctgcttctaatcctcctcgccggcgtcatcgcgctcgtgctctacctcgtgtaccgccccaacagcccggccttcaccgtcaccaacatcgccgtctactcgctctccaacgtcaccggcccctccgcgggcctgccggccgcgggtgcccgggcgccgaacgccgtggcggcgtcgttccagtgcgccctcgtcatccgcaaccccagcgggcggtcgtccgcgcggtacgaccggctgacggcgtacgtggtgtaccgcggggaggccatcacggcgccggcggagatgccgccgctggtgcaggacccggacagcgcggtggtggtggcgcccgtgatcgggggcggcggggcggcccctgtgcccgtgtcgccggagaccgcggcggccctggccaacgacgtgtcctacggcgtggtgtcgctgcgggtggtgctgctcggccgcgtgcggttcgtgtccgggccgttccggaccgggtggcgctccatgtacgcgcgctgcgacctgctcgtcggcgtccggaaggccccgggcagcgtcggcgccgccggtgtccccgaggcgccgctgttcggtaacccctcctgcaacgtcgatgtgtgatataccggcagccccgcccgcgccataattacattgcatcggacaaacaccatggccgtgcgtccgcgtgctcccctcacccgtcgtggtttgtatgccaaaaaatgtactccaataacatgcaatgtatttacttcgt

SEQ ID NO: 27201 - protein, 287 aa, Triticum aestivum
QLVIYLSNLSYTHLLIYASFESPKLAIASPESNMGEHHLPPEPADHHKGGKAIHADDLKPARGRRYSYYGSTGSRGALSTICSVLLLLILLAGVIALVLYLVYRPNSPAFTVTNIAVYSLSNVTGPSAGLPAAGARAPNAVAASFQCALVIRNPSGRSSARYDRLTAYVVYRGEAITAPAEMPPLVQDPDSAVVVAPVIGGGGAAPVPVSPETAAALANDVSYGVVSLRVVLLGRVRFVSGPFRTGWRSMYARCDLLVGVRKAPGSVGAAGVPEAPLFGNPSCNVDV

SEQ ID NO: 27202 - protein, 254 aa, Triticum aestivum
MGEHHLPPEPADHHKGGKAIHADDLKPARGRRYSYYGSTGSRGALSTICSVLLLLILLAGVIALVLYLVYRPNSPAFTVTNIAVYSLSNVTGPSAGLPAAGARAPNAVAASFQCALVIRNPSGRSSARYDRLTAYVVYRGEAITAPAEMPPLVQDPDSAVVVAPVIGGGGAAPVPVSPETAAALANDVSYGVVSLRVVLLGRVRFVSGPFRTGWRSMYARCDLLVGVRKAPGSVGAAGVPEAPLFGNPSCNVDV

SEQ ID NO: 27203 - DNA, 580 bp, Triticum aestivum
  misc_feature (544)..(544): n is a, c, g, or t
  misc_feature (546)..(548): n is a, c, g, or t
acacgtcgcattctccccctttcgttgtccttccccgtcccattccctccgcttcccagtccgcagcagttccgcaccgacaccctcaccctccccaaagccctaaccgctcgcccgctccgccgccatgaggtccaaggccaacggagacaccgcgttcaaggcctccggcaagaacaagacggccaccggcggcgtcgccaagccgaagcgcgcccccacccccttcttcgccttcctggctgagttcaggccacagtacatggagaagcaccccgaggcaaagggcgtcgcggccgtcaccaaggcggctggggagaagtggcgcagcatgtcggatgaggagaaggcaaagtatggcggcaagaaggcagatgccccagcaagcaaggcggtgaacaagaaggagagcaccagctccaagaagaccaagactaacgctgacgaagaaggttctgacgttgaggatgatgaggaggatgaggagtaaatagtagatgagggaacagcagcggtgcaaatcagcgtttgctgcttagggttngnnnggcatgtcgatgtccggattatgtaatgttat

SEQ ID NO: 27204 - protein, 120 aa, Triticum aestivum
MRSKANGDTAFKASGKNKTATGGVAKPKRAPTPFFAFLAEFRPQYMEKHPEAKGVAAVTKAAGEKWRSMSDEEKAKYGGKKADAPASKAVNKKESTSSKKTKTNADEEGSDVEDDEEDEE

SEQ ID NO: 27205 - protein, 81 aa, Triticum aestivum
TRRILPLSLSFPVPFPPLPSPQQFRTDTLTLPKALTARPLRRHEVQGQRRHRVQGLRQEQDGHRRRRQAEARPHPLLRLPG

SEQ ID NO: 27206 - protein, 75 aa, Triticum aestivum
MEKHPEAKGVAAVTKAAGEKWRSMSDEEKAKYGGKKADAPASKAVNKKESTSSKKTKTNADEEGSDVEDDEEDEE

SEQ ID NO: 27207 - DNA, 717 bp, Triticum aestivum
aaccagagcacgcagctcaaaagaaaatggagcaggccggtcaaggagcgcagccaaccaagaagccggccgcggaggtgacgctccggctgttcggcctggccgacgtggacgccatgatggcgtgggcgtcggacccgcaggtggccgccccctgccgctgggagccctacgagtccacggagcccctgctcgccttcatccacgacgccgtgctcccgcacccctggttccgcgccatctgcctcgccggcgacgacgaccgccccgtcggcgcgatctccgtgtcgccgacggacgacgcctgccgcgcggagctcgggtacgtgctggcgcgcgcgcactggggcaagggcgtggccacggcggccgtgcggcgggcggtggccgcggtgttcggcgaggtggaggggctgcagcgcgtggaggcgctggtggacgtggccaacgtggcgtcgcagcgggtgctggagaaggccggcttccggcgggaggccgtgctgcggcggtactgcgtgctcaagggcgccgtcaaggacatggtcatcttcagcttcatctccaccgacactgtgctggtggactgattggtgtgataactcagcttgatgtatatccacgccaaaagaaaatttcataatgtcatagtatgaaactttgctttctttattaattgttcagtcaagtagtcctccatccgttcacaaaggcaacacg

SEQ ID NO: 27208 - protein, 212 aa, Triticum aestivum
TRARSSKENGAGRSRSAANQEAGRGGDAPAVRPGRRGRHDGVGVGPAGGRPLPLGALRVHGAPARLHPRRRAPAPLVPRHLPRRRRRPPRRRDLRVADGRRLPRGARVRAGARALGQGRGHGGRAAGGGRGVRRGGGAAARGGAGGRGQRGVAAGAGEGRLPAGGRAAAVLRAQGRRQGHGHLQLHLHRHCAGGLIGVITQLDVYPRQKKIS

SEQ ID NO: 27209 - protein, 194 aa, Triticum aestivum
PEHAAQKKMEQAGQGAQPTKKPAAEVTLRLFGLADVDAMMAWASDPQVAAPCRWEPYESTEPLLAFIHDAVLPHPWFRAICLAGDDDRPVGAISVSPTDDACRAELGYVLARAHWGKGVATAAVRRAVAAVFGEVEGLQRVEALVDVANVASQRVLEKAGFRREAVLRRYCVLKGAVKDMVIFSFISTDTVLVD

SEQ ID NO: 27210 - protein, 186 aa, Triticum aestivum
MEQAGQGAQPTKKPAAEVTLRLFGLADVDAMMAWASDPQVAAPCRWEPYESTEPLLAFIHDAVLPHPWFRAICLAGDDDRPVGAISVSPTDDACRAELGYVLARAHWGKGVATAAVRRAVAAVFGEVEGLQRVEALVDVANVASQRVLEKAGFRREAVLRRYCVLKGAVKDMVIFSFISTDTVLVD

SEQ ID NO: 27211 - DNA, 1214 bp, Triticum aestivum
agagagagagaggtagccaagaacgccatggcctccgctgcttgctagctagccagccagtagtatataaggagcggcaccgcctgtgcgacccggccccgtatcccaagtcagtcgtctcatgctccggtccacgcacccgctcagccccagcagcagcagctcggccccggcgtccagctccggcgagacgatggtggggggcgcgccgagcggggcgaagctgctgcagatcctgaacgtgcgcgtggtgggcaccggcgagcgcgtggtggtgctgtcgcacggcttcggcacggaccagtcggcgtggagccgcgtgctgccgtacctcatccgtgagcaccgcgtggtgctctacgacctcgtctgcgccggcagcgtcaacccggaccacttcgacttccgccgctacaacaacctggacgcctacgtggacgacctcctctccatcctcgacgcgctccgcatcccgcgctgcgccttcgtcggccactccgtctccgccatgatcggcatcctcgcctccatccgccgccccgacctcttcgccaagctcgtcctcatcggcgcctcgcctaggttcttgaacgacagcgactaccacggcgggttcgagctggaggagatccagcaggtgttccaggcgatgtcggccaactacgaggcgtgggccaaggggtacgcgccgctggcggtgggcgcggacgtgccggcggcggtgcaggagttcagccggacgctgttcaacatgcggccggacatctcgctccacgtctgccagagcgtgttcaagacggacctccgcggcgtgctgggcatggtgcaggcgccgtgcgtggtggtgcagaccacccgcgacgtctccgtgccggccaacgtggcggcgtacctcagggcccacctcggcgggcgcaccaccatcgagcccctgccgacggagggccacctcccccacctcagcgcccccagcctcctcgcccaggtgctccgccgcgcgctcgcccggttctagcacgagaaaaaagtgagagagaagaaattactgcagctgcctgctggtttcaccgacccgcgcgtacgtacggggtctaccccgtatttcttctctgtatttttaccgcatccgcatgaatttgtacttgcctcatagactcggaagaaaatgccaggagtgtgtcctgtagcacgtatgagcactcgaaatatttctc

SEQ ID NO: 27212 - protein, 297 aa, Triticum aestivum
MLRSTHPLSPSSSSSAPASSSGETMVGGAPSGAKLLQILNVRVVGTGERVVVLSHGFGTDQSAWSRVLPYLIREHRVVLYDLVCAGSVNPDHFDFRRYNNLDAYVDDLLSILDALRIPRCAFVGHSVSAMIGILASIRRPDLFAKLVLIGASPRFLNDSDYHGGFELEEIQQVFQAMSANYEAWAKGYAPLAVGADVPAAVQEFSRTLFNMRPDISLHVCQSVFKTDLRGVLGMVQAPCVVVQTTRDVSVPANVAAYLRAHLGGRTTIEPLPTEGHLPHLSAPSLLAQVLRRALARF

SEQ ID NO: 27213 - protein, 273 aa, Triticum aestivum
MVGGAPSGAKLLQILNVRVVGTGERVVVLSHGFGTDQSAWSRVLPYLIREHRVVLYDLVCAGSVNPDHFDFRRYNNLDAYVDDLLSILDALRIPRCAFVGHSVSAMIGILASIRRPDLFAKLVLIGASPRFLNDSDYHGGFELEEIQQVFQAMSANYEAWAKGYAPLAVGADVPAAVQEFSRTLFNMRPDISLHVCQSVFKTDLRGVLGMVQAPCVVVQTTRDVSVPANVAAYLRAHLGGRTTIEPLPTEGHLPHLSAPSLLAQVLRRALARF

SEQ ID NO: 27214 - protein, 168 aa, Triticum aestivum
MIGILASIRRPDLFAKLVLIGASPRFLNDSDYHGGFELEEIQQVFQAMSANYEAWAKGYAPLAVGADVPAAVQEFSRTLFNMRPDISLHVCQSVFKTDLRGVLGMVQAPCVVVQTTRDVSVPANVAAYLRAHLGGRTTIEPLPTEGHLPHLSAPSLLAQVLRRALARF

SEQ ID NO: 27215 - DNA, 1044 bp, Triticum aestivum
agccagacccgaagaatcccaggggcgaagaagggaaaatatcgcacctccgccgccgccggtcgaagctcgtgccttccccccgccgatcagcgcctccggttccggacccccgcgagcatccgcatcgccgactctcgagcccaggcaaggtgctactactgtttggtcatttgagttgtgggcactgagtcaagtgctggcatgggaggcgtgtttggacgccaggacaccagcaggcggggctcgcatggtatgaagctagagtcgaggatggtggagtccatgaagcagagagcggcacatggaacttcggtcaagtcgttcaatagtattatcatgaagttcccgaaaatcgacgagggattgagaaaatgcaagactatctttgagcaattcgatgaagattccaatggtgaaattgataaagaagagctgaagaattgctttcataagctggaaatctcattcacagaggaggagataagtgatctctttgaagcctgcgacataaatgaagatatgggcatgaagtacaatgagttcattgtctttctgtgccttgtttatcttctcaatgatccggctgcgtcagaagcgaagacaaagatgggattaggagatctcgagtcaacttttgagaccttggttgatgcatttgtcttcttggataagaataaggacggatatgtgagtaaggatgagatgattcaagcaataaatgagagcataccaggggaacgctctgctggccgtatagccatgaaaagatttgaggagatggattgggacaagaatgggatggttaccttcaaggaatttctgtttgcattcactcgctgggtagggataggcgaaaacgaggacgacgatgaatgaacaatgtggaagcgacagctgaagaatatggccgactataaattggttgcatggtggttttatcttcttttatgttcgtgatagaatgactgacatgtctgaacacctgtatcgacagtgtctgtaacagcttcgcctccattgcacaaattatgctgtatcgtt

SEQ ID NO: 27216 - protein, 224 aa, Triticum aestivum
MGGVFGRQDTSRRGSHGMKLESRMVESMKQRAAHGTSVKSFNSIIMKFPKIDEGLRKCKTIFEQFDEDSNGEIDKEELKNCFHKLEISFTEEEISDLFEACDINEDMGMKYNEFIVFLCLVYLLNDPAASEAKTKMGLGDLESTFETLVDAFVFLDKNKDGYVSKDEMIQAINESIPGERSAGRIAMKRFEEMDWDKNGMVTFKEFLFAFTRWVGIGENEDDDE

SEQ ID NO: 27217 - protein, 207 aa, Triticum aestivum
MKLESRMVESMKQRAAHGTSVKSFNSIIMKFPKIDEGLRKCKTIFEQFDEDSNGEIDKEELKNCFHKLEISFTEEEISDLFEACDINEDMGMKYNEFIVFLCLVYLLNDPAASEAKTKMGLGDLESTFETLVDAFVFLDKNKDGYVSKDEMIQAINESIPGERSAGRIAMKRFEEMDWDKNGMVTFKEFLFAFTRWVGIGENEDDDE

SEQ ID NO: 27218 - protein, 201 aa, Triticum aestivum
MVESMKQRAAHGTSVKSFNSIIMKFPKIDEGLRKCKTIFEQFDEDSNGEIDKEELKNCFHKLEISFTEEEISDLFEACDINEDMGMKYNEFIVFLCLVYLLNDPAASEAKTKMGLGDLESTFETLVDAFVFLDKNKDGYVSKDEMIQAINESIPGERSAGRIAMKRFEEMDWDKNGMVTFKEFLFAFTRWVGIGENEDDDE

SEQ ID NO: 27219 - DNA, 1016 bp, Triticum aestivum
cctaatcgaaaacccttccgtccccatggccttctcgcgccttctcccctcccgccgcctcctctccgccctcctccacaccccgaccccgatccccgccgcgcgcgtcaccggcgccgccgccgccaccgccaccctgtccgcccacaccctccatcccgcgcgcttcttctccgcgacgaggcggctcgggccgggcgccccgcggcagcgtgcggcggacatcggcgcgcgggcgcggcagctgcagagccggcgcctctggacctacgcgctcaccttcggctgcgcggccgggttcgtggtcaccgtgctcgccacgttccaggaccagctcgtcttctacctcacccccaccgacgcgctcgcgcgcttcgccaccgacccctccaagacccgctgccggctcggcgggctcgtcctcgagggctccgtcgcccatccctcttcctcctcctccgagatcgagttcgtcgtcaccgacctcgtcaccgacgtcctcgtccgctacgagggcgccctccccgacctcttccgcgagggccactccgtcgtcgtcgaggggttcctcaagccactgacggacgatctccgccgcgactgggcggggagaaaggtctccgataaggcgctggagggccagtgcttcttgcgtggcacggaggtgctcgccaagcacgacgagaagtacatgcccaaggaggtcggcgaggcgatcgagcgcaacaagaagcagatcgaggcggatgcggctgccgccgccgctgaggagaacgcggcggttgcggtggatggagccaaagcaaactcgtaagatttgctttttttttgctttacgatttggatctcgagtgcgtgggattgaggcatagatagatttgattgtctgaatgagatgagttggggactctctgcagcatgattcaattgaagctgttgtaattggagttgtaattttgagccctgaaaaaggggattttggccggggaaataatgaaaactgactgtgataatcc

SEQ ID NO: 27220 - protein, 270 aa, Triticum aestivum
LIENPSVPMAFSRLLPSRRLLSALLHTPTPIPAARVTGAAAATATLSAHTLHPARFFSATRRLGPGAPRQRAADIGARARQLQSRRLWTYALTFGCAAGFVVTVLATFQDQLVFYLTPTDALARFATDPSKTRCRLGGLVLEGSVAHPSSSSSEIEFVVTDLVTDVLVRYEGALPDLFREGHSVVVEGFLKPLTDDLRRDWAGRKVSDKALEGQCFLRGTEVLAKHDEKYMPKEVGEAIERNKKQIEADAAAAAAEENAAVAVDGAKANS

SEQ ID NO: 27221 - protein, 262 aa, Triticum aestivum
MAFSRLLPSRRLLSALLHTPTPIPAARVTGAAAATATLSAHTLHPARFFSATRRLGPGAPRQRAADIGARARQLQSRRLWTYALTFGCAAGFVVTVLATFQDQLVFYLTPTDALARFATDPSKTRCRLGGLVLEGSVAHPSSSSSEIEFVVTDLVTDVLVRYEGALPDLFREGHSVVVEGFLKPLTDDLRRDWAGRKVSDKALEGQCFLRGTEVLAKHDEKYMPKEVGEAIERNKKQIEADAAAAAAEENAAVAVDGAKANS

SEQ ID NO: 27222 - protein, 208 aa, Triticum aestivum
PNRKPFRPHGLLAPSPLPPPPLRPPPHPDPDPRRARHRRRRRHRHPVRPHPPSRALLLRDEAARAGRPAAACGGHRRAGAAAAEPAPLDLRAHLRLRGRVRGHRARHVPGPARLLPHPHRRARALRHRPLQDPLPARRARPRGLRRPSLFLLLRDRVRRHRPRHRRPRPLRGRPPRPLPRGPLRRRRGVPQATDGRSPPRLGGEKGLR

SEQ ID NO: 27223 - DNA, 534 bp, Triticum aestivum
ctcggtcctcgcccacccgcctctccctttcccatctcccttgccttcgccaaaccctcagagatggcctcgacctgcttccgcgccgccgcccgcgccgccaccgcggcatgccgctcggcggcctcccgctccatgccctccgtcggccgctccgccgcccgccgcgccccgctaatctccagggtgccgctggagctgggatgctgcgcgggaatgtcgctgctgccgctgcacagcgcggtggccgcggcgaggctgacttcgcggctgagcacggcgtcccggagctcctccgctctctctcaggatgaaaatgatgatacgtgaaacatttacacaatgtcttaaggtgggcgcttggctattgtggatatgctccaaacatattgctcgacatctgtcttagccgtagtgttatgtcttagacagtcaattccttgtaacattattatttctagtatcaggaacacttcaacgctgtatgcttccatgcttataaatttaaagaataaaggtgctgttgcgatgttc

SEQ ID NO: 27224 - protein, 109 aa, Triticum aestivum
LGPRPPASPFPISLAFAKPSEMASTCFRAAARAATAACRSAASRSMPSVGRSAARRAPLISRVPLELGCCAGMSLLPLHSAVAAARLTSRLSTASRSSSALSQDENDDT

SEQ ID NO: 27225 - protein, 103 aa, Triticum aestivum
RSSPTRLSLSHLPCLRQTLRDGLDLLPRRRPRRHRGMPLGGLPLHALRRPLRRPPRPANLQGAAGAGMLRGNVAAAAAQRGGRGEADFAAEHGVPELLRSLSG

SEQ ID NO: 27226 - protein, 88 aa, Triticum aestivum
MASTCFRAAARAATAACRSAASRSMPSVGRSAARRAPLISRVPLELGCCAGMSLLPLHSAVAAARLTSRLSTASRSSSALSQDENDDT

SEQ ID NO: 27227 - DNA, 1403 bp, Triticum aestivum
cgaaaaaaaatagatcatggcgacccctcagatctaccgcaaaaccctcctccccgtcctcctcctgctcgccgccgcggcgctctacccagccgccgccgacggcgacgaggtgctcgccctcacggagtccaccttcgagaaggaggtcggccaggatcgtggcgcgctcgtcgagttctacgctccctggtgtggccactgcaagaagcttgctccagaatatgagaagcttgctgcaagttttaaaaaggctaaatcagtcttgattgccaaggttgactgcgatgagcacaagagtgtgtgcagcaagtatggagtttctggctaccccacaatccagtggtttcccaaaggttccttggagcccaagaagtatgagggtcaacgcactgctgaagcccttacagaatatgttaactctgaagcagcaaccaatgtgaagatagcagcagttccttcaagtgttgtggttctgaccgaggaaacctttgactcagttgtccttgatgaaaccaaagatgtccttgttgagttctatgccccatggtgtggtcactgcaagagtcttgctccgatatatgagaaggtggcctctgttttcaagcaagatgagggtgtcgtgattgctaatcttgatgctgacaaatacacaagcttggctgagaagtatggagtttctggttttcccacattgaagttcttcccgaagggtaacaaagctggtgaagagtatgagagcggtcgggagttggatgactttgttaagttcattaatgagaaaagtggaactagccgtgattcgaagggtcagcttacttcagaggctgggcttgtggcaagtttggatgctcttgtcaaggaattccacagtgctgctgatgacaagcggaaggaaatcctctctaaaattgaagaggaggctgcgaagctcagtggtcctgctgtcaagcacggaaagatctatgtgaatgttgcaaagaagatattgcagaagggctctgactataccaagaaggaaactgagaggcttcatcgcttgttggagaagtcgatcagtccttccaaagccgatgaattcgccatcaagaagaacattctttcagccttctcctcttagtggtggtgacccacgtgccatagtcagtagtgcaacagtaccacctgccacaagagagaagtgaagaaagacaaagagagatagagatcagagagatggcagtgaaagtttagcggcgatagatttatcttattttggttcaatgttgaacaacatctgatatctgttttctctgccgtttacctttatggttacagggatttactttagcagtaaaagggtttactcaagaacaaacagtaccaactggtaatgacattaataaatttgccatttgtgtttg

SEQ ID NO: 27228 - protein, 367 aa, Triticum aestivum
MATPQIYRKTLLPVLLLLAAAALYPAAADGDEVLALTESTFEKEVGQDRGALVEFYAPWCGHCKKLAPEYEKLAASFKKAKSVLIAKVDCDEHKSVCSKYGVSGYPTIQWFPKGSLEPKKYEGQRTAEALTEYVNSEAATNVKIAAVPSSVVVLTEETFDSVVLDETKDVLVEFYAPWCGHCKSLAPIYEKVASVFKQDEGVVIANLDADKYTSLAEKYGVSGFPTLKFFPKGNKAGEEYESGRELDDFVKFINEKSGTSRDSKGQLTSEAGLVASLDALVKEFHSAADDKRKEILSKIEEEAAKLSGPAVKHGKIYVNVAKKILQKGSDYTKKETERLHRLLEKSISPSKADEFAIKKNILSAFSS

SEQ ID NO: 27229 - DNA, 926 bp, Triticum aestivum
aacaagaacaccactagtgctgcattcgcagcgagcgaggaagaggaagagggtgagagagagggatggcgtgcctgcacgatcacgagtgtggggatcacaactgcgccgccgattggtcgctctacaatcacatcgacatccccaaggtggtggctctgaacgaatctgtggccgggagcgtcaaatcggtcttcaagtcgtgggaccagcgcctcgagacttccgggggttttctggagagcaatgagggtgaccctgagttacttgttttcatcccatttacctcagatgtgaagatcaagagcatcgctgttgttggtggtgctgatgggacaagcccttcaagaatgagagtatttatcaatagagaaggtattgacttttctgatgctcaaaacatgcagcctgtgcaggaatgggaactggcagagaatttgcagggagttcttgagtatcaaacaaggtattcaaggttccaaggtgtggccaacttaactctgcattttcctgataactttggtggtgatacgactaagatatattacattggtttgcgtggtgaagctactcagaacaaaagggatgttgtggccacaattgtgtatgaagtaatgcccaatccgtctgatcacaaaacaaaatccgagactggaggtggtttctcacatgttgagtaggcatgtcagtgacatgcttcctcggttggagagaaacttgacctctgatgagttctgtatgaataaaaccagtccagctcttagattcatagttttgagtgtaaaccagtgtatttgtcggttgtcaatggctcgatgatgtaacttaacttgccttgtggttgccggtggctcgatgaggtaacttaactatgtcgcccatgtcatcagagttgctaacaagttactgtgattctaccggtcttc

SEQ ID NO: 27230 - protein, 204 aa, Triticum aestivum
MACLHDHECGDHNCAADWSLYNHIDIPKVVALNESVAGSVKSVFKSWDQRLETSGGFLESNEGDPELLVFIPFTSDVKIKSIAVVGGADGTSPSRMRVFINREGIDFSDAQNMQPVQEWELAENLQGVLEYQTRYSRFQGVANLTLHFPDNFGGDTTKIYYIGLRGEATQNKRDVVATIVYEVMPNPSDHKTKSETGGGFSHVE

SEQ ID NO: 27231 - protein, 109 aa, Triticum aestivum
MRVFINREGIDFSDAQNMQPVQEWELAENLQGVLEYQTRYSRFQGVANLTLHFPDNFGGDTTKIYYIGLRGEATQNKRDVVATIVYEVMPNPSDHKTKSETGGGFSHVE

SEQ ID NO: 27232 - DNA, 993 bp, Triticum aestivum
cctagaacatcctaatcgaaaactcactgtatccatcccaccacacccacaccgcaccgctccctcgcccagaccaccccgaaagaaggcgcaaattgcagacgggtccccggatcgatccccattcctcctccaggccgccgcgatgggcatctccagcatgccggcgcccaaggagagcctcctgatctacctgctctaccacgccgtcgtctcgatcgccgccctggcgggcctcctccgcgccgcgctcgtcttcctcggcctgcccgcgccgccctcgctgctggccggggaggacgccgacggcgccgaccagctcacggccgccaccccggcgggccccagcctggccgagaggttcaggagcaggttccgccccgcgcggttcggccggaggcggggcgcggcggcctcgccgacgcccgactgccgcgtctgccttgttcgcttcgaggcggacgccgtggtgaaccgcctgccctgtggccacctcttccaccgcgcctgcctcgagacctggctggactacgaccacgccacctgcccgctctgccgctcccggctcctcccggccgccaccaccgccgccgacgagtcgtggtcgccgccggcccccaccctgacggcctggatttagggacgagtggagggaagagaagagagagattcgccccgtcgcgtcgcccccggctatgtgctagctccgtgtgtggcctctccgtgtgcgcgtaggaatttagatggatcctagcagagggctcttatgcccctcgcctttcgcatttgccttttggtttcgttttctgtacgcctcgtgccatcgctgtaccctgtaaatatttttcagcagagagcgctcccaccgggtgtagcgctttgtgtgatgagaaatctgtgtacggctctcggctttttttacgagaaacggaaaattgatggaacaaggattgtgtgtcttatgaacaccagagggccggtgttcttgcttgc

SEQ ID NO: 27233 - protein, 212 aa, Triticum aestivum
LEHPNRKLTVSIPPHPHRTAPSPRPPRKKAQIADGSPDRSPFLLQAAAMGISSMPAPKESLLIYLLYHAVVSIAALAGLLRAALVFLGLPAPPSLLAGEDADGADQLTAATPAGPSLAERFRSRFRPARFGRRRGAAASPTPDCRVCLVRFEADAVVNRLPCGHLFHRACLETWLDYDHATCPLCRSRLLPAATTAADESWSPPAPTLTAWI

SEQ ID NO: 27234 - protein, 164 aa, Triticum aestivum
MGISSMPAPKESLLIYLLYHAVVSIAALAGLLRAALVFLGLPAPPSLLAGEDADGADQLTAATPAGPSLAERFRSRFRPARFGRRRGAAASPTPDCRVCLVRFEADAVVNRLPCGHLFHRACLETWLDYDHATCPLCRSRLLPAATTAADESWSPPAPTLTAWI

SEQ ID NO: 27235 - protein, 159 aa, Triticum aestivum
MPAPKESLLIYLLYHAVVSIAALAGLLRAALVFLGLPAPPSLLAGEDADGADQLTAATPAGPSLAERFRSRFRPARFGRRRGAAASPTPDCRVCLVRFEADAVVNRLPCGHLFHRACLETWLDYDHATCPLCRSRLLPAATTAADESWSPPAPTLTAWI

SEQ ID NO: 27236 - DNA, 790 bp, Triticum aestivum
aagtgggaagccatccgttcgtctctctcccccattccccaatccccacgacgagatccatccaccccagaggccaagaagagaggagagagagagagagaggccggcggcggcggcggaggagcaggcgatcggagatggtgcggaaggcgaaggtcgagttcgacgagaggccgccggatgacttcgacccgaagaacccgtacggggacccggtggcgatgctggagtacagggagcacctggtgcgggagaagtggatccagattgagaccgccaagatcatccgcgaccgcctccgctggtgctaccggatcgagggcgtcaaccaccaccagaagtgccgccacctcgtcgaccagtacctcgagtccacccgcggcgtcgggtggggcaaggaccaccgcccggcggacctccacgagcccaagaaggtggtcgaggtcgaggagtagcacggtcgcttccgtcgccgttcctggaatggagaggtcatctttccattcgaagtgaaggaagtaacttgaactgccacagctcctctcttacctctgaagttgctgataggcatttaataaatgatgatgcgaagcaaacattgttgtgtggtgtctgtattttttttgttaacttcaaggagttaagcaaatcgttgcttggacttacctaccctgtttccaatttcatttatacaaatgatgtttagttgcctttgcctttgcatcttgagtttacaagtgtgtatgaaagacggctcttgctgtgctgtacaagttctttctactctgtc

SEQ ID NO: 27237 - protein, 170 aa, Triticum aestivum
KWEAIRSSLSPIPQSPRRDPSTPEAKKRGEREREAGGGGGGAGDRRWCGRRRSSSTRGRRMTSTRRTRTGTRWRCWSTGSTWCGRSGSRLRPPRSSATASAGATGSRASTTTRSAATSSTSTSSPPAASGGARTTARRTSTSPRRWSRSRSSTVASVAVPGMERSSFHSK

SEQ ID NO: 27238 - protein, 150 aa, Triticum aestivum
VGSHPFVSLPHSPIPTTRSIHPRGQEERRERERGRRRRRRSRRSEMVRKAKVEFDERPPDDFDPKNPYGDPVAMLEYREHLVREKWIQIETAKIIRDRLRWCYRIEGVNHHQKCRHLVDQYLESTRGVGWGKDHRPADLHEPKKVVEVEE

SEQ ID NO: 27239 - protein, 110 aa, Triticum aestivum
MTSTRRTRTGTRWRCWSTGSTWCGRSGSRLRPPRSSATASAGATGSRASTTTRSAATSSTSTSSPPAASGGARTTARRTSTSPRRWSRSRSSTVASVAVPGMERSSFHSK

SEQ ID NO: 27240 - protein, 105 aa, Triticum aestivum
MVRKAKVEFDERPPDDFDPKNPYGDPVAMLEYREHLVREKWIQIETAKIIRDRLRWCYRIEGVNHHQKCRHLVDQYLESTRGVGWGKDHRPADLHEPKKVVEVEE

SEQ ID NO: 27241 - DNA, 1687 bp, Triticum aestivum
ccttcccccttccccgtctgactttttctccaagttcaactccgccgcccgccccctctccccgatcccgggagagagagagagagatgtcctggcggtgggctctggcgcggcgcgtcgccacgctcgtcggcggcggcaccggcggcccaggcgccgcccaggcgcagaggctcttctcctcctccggcgccctcccggggaggctccaccctgcgccgcctcagattcggaacaaggtggtgggttgcagaggagctgctttcgtgaactcgcggtggctgcatgatgccacccaatgccagactcgccaggacggagtttcgagggctgaagaacaacatgatccatttgaattggttgctgatgaactatcgattcttggaaatagactacggtccatggtggttgctgaggtccctaaactagaatcagctgctgaatatttttttaaagtaggagctgagggaaaaagattccgacctacggttttattgctgatggcatcagctctgaaattcccaataccagaatcgacagatgttggagttttcagtatattggcaagtaagctgcgcacacggcagcaaaacattgccgagataactgaaatgatccatgttgcaagtcttctgcatgatgatgttctggatgatgctgacactaggcgaggtgtcacttcattgaattgcattatgggcaacaagctttctgttttggctggtgactttctcctgtccagagcatgtgtggcacttgcagcacttgggaatacagaggtggtatctctaatggcaactgcagttggacatctagttactggtgaaactatgcaaatgtcaacaagcagagagcaacggcgaagtatggagtactacttgcagaagacgtactacaaaacagcatcattgatatcaaacagttgcaaggctgttgctattcttgcagggcacactgctgagatttcagtgcttgcatacgaatatggtcgaaacctgggtctagccttccagttgatcgacgatgttcttgatttcacaggaacctctgcttcacttgggaagggttcattatctgatattcgtcatggaatcattactgctccaatgctatatgcgatggaagaattcccacaactacaagatgtcgttgaccagggttttgacaatcctgcaaatgttgagatcgccttggactacctccagaagagccggggaatcgaaagaacaaaagagcttgcgcaagaacacgttaaccttgcggtcaaagccatcgaatctctcccagacagtgacgatgaagatgttctgatttcaaggcgcgctcttattgatatcacacagagagtcatcacaaggacaaaatagcatgattatacacagggtggagaagataaggcggagtttcgccacaggtgtagtgttccgcttggaaatttttggtcgccttggtcattgcattctttccattgcccgggttttgtgtaacatttgatgagacttcagggtaaccattcctgggaatcatcctaagtcgcagctgtagtggttttagttactggtggcagcagaatctgtgtattaatatcacgattggcgattgcacgatgacctgatcataagactgtaaccttataaatcgaagtatgtaacactatatacgaggaaaaagtaacctgcttgtgttg

SEQ ID NO: 27242 - protein, 454 aa, Triticum aestivum
FPLPRLTFSPSSTPPPAPSPRSREREREMSWRWALARRVATLVGGGTGGPGAAQAQRLFSSSGALPGRLHPAPPQIRNKVVGCRGAAFVNSRWLHDATQCQTRQDGVSRAEEQHDPFELVADELSILGNRLRSMVVAEVPKLESAAEYFFKVGAEGKRFRPTVLLLMASALKFPIPESTDVGVFSILASKLRTRQQNIAEITEMIHVASLLHDDVLDDADTRRGVTSLNCIMGNKLSVLAGDFLLSRACVALAALGNTEVVSLMATAVGHLVTGETMQMSTSREQRRSMEYYLQKTYYKTASLISNSCKAVAILAGHTAEISVLAYEYGRNLGLAFQLIDDVLDFTGTSASLGKGSLSDIRHGIITAPMLYAMEEFPQLQDVVDQGFDNPANVEIALDYLQKSRGIERTKELAQEHVNLAVKAIESLPDSDDEDVLISRRALIDITQRVITRTK

SEQ ID NO: 27243 - protein, 426 aa, Triticum aestivum
MSWRWALARRVATLVGGGTGGPGAAQAQRLFSSSGALPGRLHPAPPQIRNKVVGCRGAAFVNSRWLHDATQCQTRQDGVSRAEEQHDPFELVADELSILGNRLRSMVVAEVPKLESAAEYFFKVGAEGKRFRPTVLLLMASALKFPIPESTDVGVFSILASKLRTRQQNIAEITEMIHVASLLHDDVLDDADTRRGVTSLNCIMGNKLSVLAGDFLLSRACVALAALGNTEVVSLMATAVGHLVTGETMQMSTSREQRRSMEYYLQKTYYKTASLISNSCKAVAILAGHTAEISVLAYEYGRNLGLAFQLIDDVLDFTGTSASLGKGSLSDIRHGIITAPMLYAMEEFPQLQDVVDQGFDNPANVEIALDYLQKSRGIERTKELAQEHVNLAVKAIESLPDSDDEDVLISRRALIDITQRVITRTK

SEQ ID NO: 27244 - protein, 321 aa, Triticum aestivum
MVVAEVPKLESAAEYFFKVGAEGKRFRPTVLLLMASALKFPIPESTDVGVFSILASKLRTRQQNIAEITEMIHVASLLHDDVLDDADTRRGVTSLNCIMGNKLSVLAGDFLLSRACVALAALGNTEVVSLMATAVGHLVTGETMQMSTSREQRRSMEYYLQKTYYKTASLISNSCKAVAILAGHTAEISVLAYEYGRNLGLAFQLIDDVLDFTGTSASLGKGSLSDIRHGIITAPMLYAMEEFPQLQDVVDQGFDNPANVEIALDYLQKSRGIERTKELAQEHVNLAVKAIESLPDSDDEDVLISRRALIDITQRVITRTK

SEQ ID NO: 27245 - DNA, 474 bp, Triticum aestivum
caataacaacatgtactatggtacgccgttctatggcgggtacggctacgcgtcccccgtgccgcaccccaacatgtacgcccctgcgtatggagcctaccccttctacggtaaccagcagctggtgagctagagagagaaagagcttcgtcccactccctccgatggggaacaaggttttgatccgatgagagcatagcagcgtcagaagagagagagtgagagagagagaaagagagagagagagagattatatagatcgtcctaaagtaagagggtgagacaggttattaaagagtgaaagaaacgagtggtgtctgtactctgtagcgtctgttgtgtgtgtgtgtgtgtgtgtgtgttgcaagaactagaagagcctctaggcttgtagacacggtcggagcgtcatggatgttgattcattcaagaaattttgacttgcttaataagttacaacactgtttgtgcccc

SEQ ID NO: 27246 - protein, 43 aa, Triticum aestivum
NNNMYYGTPFYGGYGYASPVPHPNMYAPAYGAYPFYGNQQLVS

SEQ ID NO: 27247 - protein, 41 aa, Triticum aestivum
ITTCTMVRRSMAGTATRPPCRTPTCTPLRMEPTPSTVTSSW

SEQ ID NO: 27248 - protein, 40 aa, Triticum aestivum
MYYGTPFYGGYGYASPVPHPNMYAPAYGAYPFYGNQQLVS

SEQ ID NO: 27249 - DNA, 816 bp, Triticum aestivum
cctagaacattctaatcgaaaaacacacccaacccccccacccccccaccccctcccccagcagccgccgcaaaagagagcaggaagcgaggaggaactttacaagatagggcatcgaatccgcctccttcttcctcgcgcggtcgtctccgaggcctccgacatggcgaacgcggcatcgggcatggctgtggacgacgaatgcaagctcaagttcctggagctgaaggcgaagcgaacccaccgcttcatcatctacaagatagacgacaagaagaagatggttgttgtggagaaagtcggtgagcctgccctgaactatgaggactttgctgccagcctccccaccaatgaatgcagatacgcgatattcgactatgactttgtcaccgaggagaactgccaaaagagcaagatattcttcgtcgcatggtctcctgacaccgcacgcgtgaggagcaagatgatctacgcaagctccaaggagaggttcaagagggagctcgacggcatccaggtggagctgcaggcgacagacccgaccgaggtcggcttcgatgtcatccaaggccgtgccaactgagcaccatggctgtgctgctgcttaccttaagtatgagcctctgatgaggatttagcgtgctcgccgaggctggtcatgagctgtttaccatgaggcaattgtgatttgagttgccagtatgtaccacctaaggaagatgtaagctatgactggcgcgacgacaaatgtatcctttctggttgttgattcgtggatcctgatatccccttcttgcctgctaaagatcagttgcg

SEQ ID NO: 27250 - protein, 193 aa, Triticum aestivum
LEHSNRKTHPTPPPPHPLPQQPPQKRAGSEEELYKIGHRIRLLLPRAVVSEASDMANAASGMAVDDECKLKFLELKAKRTHRFIIYKIDDKKKMVVVEKVGEPALNYEDFAASLPTNECRYAIFDYDFVTEENCQKSKIFFVAWSPDTARVRSKMIYASSKERFKRELDGIQVELQATDPTEVGFDVIQGRAN

SEQ ID NO: 27251 - protein, 139 aa, Triticum aestivum
MANAASGMAVDDECKLKFLELKAKRTHRFIIYKIDDKKKMVVVEKVGEPALNYEDFAASLPTNECRYAIFDYDFVTEENCQKSKIFFVAWSPDTARVRSKMIYASSKERFKRELDGIQVELQATDPTEVGFDVIQGRAN

SEQ ID NO: 27252 - protein, 132 aa, Triticum aestivum
MAVDDECKLKFLELKAKRTHRFIIYKIDDKKKMVVVEKVGEPALNYEDFAASLPTNECRYAIFDYDFVTEENCQKSKIFFVAWSPDTARVRSKMIYASSKERFKRELDGIQVELQATDPTEVGFDVIQGRAN

SEQ ID NO: 27253 - DNA, 1258 bp, Triticum aestivum
acacaccagctcctagtagcagtgggtagcactggagagcagcagatacagacagggggctagctagcagcaatggccaggcaggatgttgcttccatgtttgccgttgctctcttcatcggagcattcgtttctgttcctacaagtgtgcaatccatcggcgtgtgctacggcgtgatcgccaacaacctcccgccggcgaacgacgtggtgcagctctacaggtccaagggcatcaccggcatgcgcatctacttcgccgacgccaaggccctctccgcgctccgtaactccggcatcagcctcatcctcgacgtcggcaacgaccagctcgccagcctcgccgccagcacctccaacgcggcgtcctgggtgcagaaaaacgtccggccatactacccggccgtgaacatcaagtacatcgccgccggtaacgaggtccagggaggcgccacccagagcatcgtgccggccatgcggaacctcaacgcggctctctccgccgctgggctcggcgccatcaaggtgtccacctccatccggttcgacgaggtggccaagtccttcccgccctccgagggcgtgttcgcgaatgcctacatgacggacgtggcccggctcctggcgagcaccggcgcgccgctgctggccaacgtgtacccctacttcgcctacaagcgcgacccgcagaacatcaagctcaactacgccacgttccggccgggacccacggtgcgggacgacaagaacgggctgacctacacgtgcctgttcgacgcgatggtggacgccgtggtcgccgccctggagaaggccggggcgccgggggtgagggtggtggtgtcggagagcgggtggccgtcggcgagcgggttcgctgcgacggcggacaacgcgagagcctacaaccagggactgatcgaccacgtcggcgggggcacgcccaagaggcgtggcgcgctggagacgtacatcttcggcatgttcaacgaaaacttcaagagaggggagctcgtggagaagcacttcgggctgttcaacccggacaagtcgccggcgtaccccatccagttcaagtgatctagtcttctagtctagtcgagctagcttacacgtgtacgtacccaggtcttctagtctagtaagtacacacgttcgacacgtactccatgggagagggaagccaatgacttcctgttcctggtggtgatacatcatcatgttatgaataaagagagggaagcagttatgaatttgt

SEQ ID NO: 27254 - protein, 335 aa, Triticum aestivum
MARQDVASMFAVALFIGAFVSVPTSVQSIGVCYGVIANNLPPANDVVQLYRSKGITGMRIYFADAKALSALRNSGISLILDVGNDQLASLAASTSNAASWVQKNVRPYYPAVNIKYIAAGNEVQGGATQSIVPAMRNLNAALSAAGLGAIKVSTSIRFDEVAKSFPPSEGVFANAYMTDVARLLASTGAPLLANVYPYFAYKRDPQNIKLNYATFRPGPTVRDDKNGLTYTCLFDAMVDAVVAALEKAGAPGVRVVVSESGWPSASGFAATADNARAYNQGLIDHVGGGTPKRRGALETYIFGMFNENFKRGELVEKHFGLFNPDKSPAYPIQFK

SEQ ID NO: 27255 - protein, 327 aa, Triticum aestivum
MFAVALFIGAFVSVPTSVQSIGVCYGVIANNLPPANDVVQLYRSKGITGMRIYFADAKALSALRNSGISLILDVGNDQLASLAASTSNAASWVQKNVRPYYPAVNIKYIAAGNEVQGGATQSIVPAMRNLNAALSAAGLGAIKVSTSIRFDEVAKSFPPSEGVFANAYMTDVARLLASTGAPLLANVYPYFAYKRDPQNIKLNYATFRPGPTVRDDKNGLTYTCLFDAMVDAVVAALEKAGAPGVRVVVSESGWPSASGFAATADNARAYNQGLIDHVGGGTPKRRGALETYIFGMFNENFKRGELVEKHFGLFNPDKSPAYPIQFK

SEQ ID NO: 27256 - protein, 278 aa, Triticum aestivum
MRIYFADAKALSALRNSGISLILDVGNDQLASLAASTSNAASWVQKNVRPYYPAVNIKYIAAGNEVQGGATQSIVPAMRNLNAALSAAGLGAIKVSTSIRFDEVAKSFPPSEGVFANAYMTDVARLLASTGAPLLANVYPYFAYKRDPQNIKLNYATFRPGPTVRDDKNGLTYTCLFDAMVDAVVAALEKAGAPGVRVVVSESGWPSASGFAATADNARAYNQGLIDHVGGGTPKRRGALETYIFGMFNENFKRGELVEKHFGLFNPDKSPAYPIQFK

SEQ ID NO: 27257 - DNA, 857 bp, Triticum aestivum
acggccacaacccgactcaccaccgcgcctcttcctcctcccgctcacccacccatggcgacggctatgatggctgcagccaccacctcctgctccccgcctcgagcgctcctcaagcccgcggcctcctccagccccgcgccgccgcccaggccgcagccacggtccttcctcaagcagctcccggggctcgccgcgacggcggcggcggcggccgtcgcctacgtgcctctcccggcgctggccgtggagatggagaaggctgcgctgttcgacttcaacctgacgctcccggcgatcacgatcgagttcctgctgctgatggtggcgctggacaagctctacttctcgccgctgggcaagttcatggacgagcgggacgccaagatccgcgcggagctcggcggcgtcaaggacgcctccgaggaggtgcggcagctagaggagcaggcccaggccattctcaaggcggctcgcgcggagatcgcggcggcgctcaacaagatgaagaaggagacgaccacagagctggaggcgaagctcgacgagggccgccgccgcgtggaggcagagctcgtggaggcgctcgcgagcctcgaggggcagaaggaggaggccatcaaggcgctggacgcgcagatcgtgtcgctcagcgacgagatcgtcaagaaggtgctcccatccgcgtgaaaactagtagatcacgcagcgcgcagcagccggcgcaatcccccgtttcatagtaaagatttctagttcttgatgtgtaatgtatacgcccactgggctgcctcccctaagaatgtaactgaatcaaacattctgtgatcgggtataaatgaatgatccttttgtac

SEQ ID NO: 27258 - protein, 246 aa, Triticum aestivum
GHNPTHHRASSSSRSPTHGDGYDGCSHHLLLPASSAPQARGLLQPRAAAQAAATVLPQAAPGARRDGGGGGRRLRASPGAGRGDGEGCAVRLQPDAPGDHDRVPAADGGAGQALLLAAGQVHGRAGRQDPRGARRRQGRLRGGAAARGAGPGHSQGGSRGDRGGAQQDEEGDDHRAGGEARRGPPPRGGRARGGAREPRGAEGGGHQGAGRADRVAQRRDRQEGAPIRVKTSRSRSAQQPAQSPVS

SEQ ID NO: 27259 - protein, 229 aa, Triticum aestivum
TATTRLTTAPLPPPAHPPMATAMMAAATTSCSPPRALLKPAASSSPAPPPRPQPRSFLKQLPGLAATAAAAAVAYVPLPALAVEMEKAALFDFNLTLPAITIEFLLLMVALDKLYFSPLGKFMDERDAKIRAELGGVKDASEEVRQLEEQAQAILKAARAEIAAALNKMKKETTTELEAKLDEGRRRVEAELVEALASLEGQKEEAIKALDAQIVSLSDEIVKKVLPSA

SEQ ID NO: 27260 - protein, 211 aa, Triticum aestivum
MATAMMAAATTSCSPPRALLKPAASSSPAPPPRPQPRSFLKQLPGLAATAAAAAVAYVPLPALAVEMEKAALFDFNLTLPAITIEFLLLMVALDKLYFSPLGKFMDERDAKIRAELGGVKDASEEVRQLEEQAQAILKAARAEIAAALNKMKKETTTELEAKLDEGRRRVEAELVEALASLEGQKEEAIKALDAQIVSLSDEIVKKVLPSA

SEQ ID NO: 27261 - DNA, 937 bp, Triticum aestivum
gtaaggagccattcgcaattcgaaacattccagaggtggtgggtcgaaaactcccgaaccccctagaacaggacacgcccccaccgaccggcggcgaggaagaggaggaggacatggcggcggcgcgggggcaaaaggcgctggcgacgctggtgaggtcgctgcggagcgattccatctccaactccaacgctcccaggctcaggcacctcccgtctctcaggaggaccttctcgctctacgaccagatcaacctcatcgacaccgtccccgaagaccagctccgcttccaaacttacgatgacactggattcaagattaacaatgtaaagtatgaagggagcttgctgatagtagaaaacaagataatgacctggacacccaaaacatttgcggatataactgctgaaagtttatcaatcttcaaaattgtgcacccaatcccagagattctgattcttggttgcgggaaatacgtccagccagtcagtcctgagctgcgcaagttcattcggtcaactgggatgaaactggaggccatcgattcgaggaatgcggcttcgacctataatattctgaatgaagaggggagggcagtggcggccgcagttcttccgtttggagtcgactcttaatcactgtcagcagagcggtttgtgttctccttgaagtccatagagctgacatgagacctctcttgcacctcggcgtcgaaacctgtaacgatcggtggcaagtgttgttccccactcctttttctgttgtcccttaggaagcatcaccctggttgtgaagtgtgttttcttgtgaccgcgaaaacaaaaacaaaagcagtctaccttgtgtacatcagaataatctgcacgagccgaacggtgttttccgtattagccagggtttatttaaaaaacaaaaaaaaaaaaaaaaaagcttatcg

SEQ ID NO: 27262 - protein, 210 aa, Triticum aestivum
KEPFAIRNIPEVVGRKLPNPLEQDTPPPTGGEEEEEDMAAARGQKALATLVRSLRSDSISNSNAPRLRHLPSLRRTFSLYDQINLIDTVPEDQLRFQTYDDTGFKINNVKYEGSLLIVENKIMTWTPKTFADITAESLSIFKIVHPIPEILILGCGKYVQPVSPELRKFIRSTGMKLEAIDSRNAASTYNILNEEGRAVAAAVLPFGVDS

SEQ ID NO: 27263 - protein, 173 aa, Triticum aestivum
MAAARGQKALATLVRSLRSDSISNSNAPRLRHLPSLRRTFSLYDQINLIDTVPEDQLRFQTYDDTGFKINNVKYEGSLLIVENKIMTWTPKTFADITAESLSIFKIVHPIPEILILGCGKYVQPVSPELRKFIRSTGMKLEAIDSRNAASTYNILNEEGRAVAAAVLPFGVDS

SEQ ID NO: 27264 - DNA, 712 bp, Triticum aestivum
cagagttgctctcagttcccctttctcgccagcgactcgcgaaccgcaacaatcagctagcaccgcgccggaactcgaacagcaagcgaagatggcaccgcagccggaggacgcgcccaagccttcgccagaggagtctcgcgagtggacgctgcggttcatccaggccctcggagtggacgcgtccctcccggcctcggcggagcgtcccgacgcctactccgccctcgtccgcgcgctcctgtcctccgccaccgtctcctcctcccccgcgccgcgcgtctcctgcaccctcaccgtctcatccgccgcaactaatacctacaacacgctccacggcggcgcggtggcggccgtcgcggaggccgtcgggatggcgtgcgcgcgtgctgcggcgggggataaggagatgttcctcggcgagctcagcacagcgtatctctcagccgcccgccttgattctgaagtggaagtagaagcgcagatactgaggaagggcagatctgttgtggttactacagttgaatttcggctcaaggacagcaagaagctctgctacacatctcgagccaccttctacatcatgcctgtggcaagcctgtaaattatctttttcggtacatgtaacagtttcgtatttgcacaatcaaagctatacatgaacatacgtgctattgcaccgataaataaagtaaagaccaaattgcaattt

SEQ ID NO: 27265 - protein, 200 aa, Triticum aestivum
RVALSSPFSPATREPQQSASTAPELEQQAKMAPQPEDAPKPSPEESREWTLRFIQALGVDASLPASAERPDAYSALVRALLSSATVSSSPAPRVSCTLTVSSAATNTYNTLHGGAVAAVAEAVGMACARAAAGDKEMFLGELSTAYLSAARLDSEVEVEAQILRKGRSVVVTTVEFRLKDSKKLCYTSRATFYIMPVASL

SEQ ID NO: 27266 - protein, 170 aa, Triticum aestivum
MAPQPEDAPKPSPEESREWTLRFIQALGVDASLPASAERPDAYSALVRALLSSATVSSSPAPRVSCTLTVSSAATNTYNTLHGGAVAAVAEAVGMACARAAAGDKEMFLGELSTAYLSAARLDSEVEVEAQILRKGRSVVVTTVEFRLKDSKKLCYTSRATFYIMPVASL

SEQ ID NO: 27267 - protein, 157 aa, Triticum aestivum
ELLSVPLSRQRLANRNNQLAPRRNSNSKRRWHRSRRTRPSLRQRSLASGRCGSSRPSEWTRPSRPRRSVPTPTPPSSARSCPPPPSPPPPRRASPAPSPSHPPQLIPTTRSTAARWRPSRRPSGWRARVLRRGIRRCSSASSAQRISQPPALILKWK

SEQ ID NO: 27268 - DNA, 944 bp, Triticum aestivum
agaacatccctaatcgaaaaatccctcataaatcgccgcggtcggtggctcgctggaatccgatccgattccgttcccattcacactccaattccagccggagcggagcggccgggcgccatggcggcggcacgcggcggcggatcggcggcgagggtcggcgactgggacgtcgagctggggcccggctgggattggcgctccatcccgcagttgctctcctccgcctgcatcttcatctgctccggaggctgttttggatgctgtgagaaggccgcaaaacacgtaggccatctttccaagagcttaatggcccatgctcagaatcccacggtggcagaggaattttggagtacgaccaccatcgaggttgatccagcagacctacgagcaccatacaacacatcctcttgggaccttgatctgcatggagtgggaagcagccataacctgggcgactctgctaatcatggtttttctctttggcaacaaactagggatgaatggactgagaatacaaggttaaggcaacaacctgtggtgaaacagatccaggaaccagtgttgagttggaatgcagcgtatgaaagtttgcttggatcaaataaaccattcacgcagcccatccctctacatgagatggttgatttccttgtggacatctgggagcaagaggggctgtatgactagcacagatgtgttccgcgagaataacatagctgtagatctgatgtggtaaggagggtgaggcctgtcatacttgttttttgtgcatggaggcctgtgggctgtggcggttgtattggtagaaagaacggtccagatttaatcaccttgtcgaatttgtcaaagaaagcagctggtgagaaagatgcgtgacagcgatttgtgaacataaatgtcatctgtattgattgagaaatgagaagaagaaattagcttcg

SEQ ID NO: 27269 - protein, 229 aa, Triticum aestivum
RTSLIEKSLINRRGRWLAGIRSDSVPIHTPIPAGAERPGAMAAARGGGSAARVGDWDVELGPGWDWRSIPQLLSSACIFICSGGCFGCCEKAAKHVGHLSKSLMAHAQNPTVAEEFWSTTTIEVDPADLRAPYNTSSWDLDLHGVGSSHNLGDSANHGFSLWQQTRDEWTENTRLRQQPVVKQIQEPVLSWNAAYESLLGSNKPFTQPIPLHEMVDFLVDIWEQEGLYD

SEQ ID NO: 27270 - protein, 189 aa, Triticum aestivum
MAAARGGGSAARVGDWDVELGPGWDWRSIPQLLSSACIFICSGGCFGCCEKAAKHVGHLSKSLMAHAQNPTVAEEFWSTTTIEVDPADLRAPYNTSSWDLDLHGVGSSHNLGDSANHGFSLWQQTRDEWTENTRLRQQPVVKQIQEPVLSWNAAYESLLGSNKPFTQPIPLHEMVDFLVDIWEQEGLYD

SEQ ID NO: 27271 - protein, 126 aa, Triticum aestivum
MAHAQNPTVAEEFWSTTTIEVDPADLRAPYNTSSWDLDLHGVGSSHNLGDSANHGFSLWQQTRDEWTENTRLRQQPVVKQIQEPVLSWNAAYESLLGSNKPFTQPIPLHEMVDFLVDIWEQEGLYD

SEQ ID NO: 27272 - DNA, 733 bp, Triticum aestivum
acatcctaatcgaaaatcggcctcctcctctcttcctcccttcctcgagccccgaccccttctccccccctccgccgccgcggccgcccccgcccgcctccgagatccggccgcctccgtcctcgcgacgcccagctcgccgcctccacccggtcgtacgcaggctgatccgccgccgcgtcacggcaacgggccccgccgcaagcgagcaatggaccgagtcggcagcggcgagaagcacctcgaggactgcaccgtcgccaatgccctcggaacttgggtcttctctgttgctggtgccctccttgccattcctgtgggcataaagaggaagtccttcgctccgctggtgttctttggcacaactggaactatgctcgacatcatcatgggcattagccagtgtgagagggagcatgctgagcggcagatgaagcttttagaagcgcaaaaccttgcagccaatgcttcaatagagagtgaaagcttgactgattcctttgccaatgtggataagtgaaatgtgtcctggtgtgggtttttctttcatgaattcctgagtttaattgtcgatggtcctttggaaacattgttgttcttcctatttccaaataatgtgtattgaagaaatgatcagtgtgagtcagtgttcgtcaagatgacaatggaaaggccatgtgagtccctaatgtgttaaaaaaaaaaaaaaaaaagcttatcgataccgtcgacc

SEQ ID NO: 27273 - protein, 172 aa, Triticum aestivum
HPNRKSASSSLPPFLEPRPLLPPSAAAAAPARLRDPAASVLATPSSPPPPGRTQADPPPRHGNGPRRKRAMDRVGSGEKHLEDCTVANALGTWVFSVAGALLAIPVGIKRKSFAPLVFFGTTGTMLDIIMGISQCEREHAERQMKLLEAQNLAANASIESESLTDSFANVDK

SEQ ID NO: 27274 - protein, 107 aa, Triticum aestivum
ILIENRPPPLFLPSSSPDPFSPPPPPRPPPPASEIRPPPSSRRPARRLHPVVRRLIRRRVTATGPAASEQWTESAAARSTSRTAPSPMPSELGSSLLLVPSLPFLWA

SEQ ID NO: 27275 - protein, 102 aa, Triticum aestivum
MDRVGSGEKHLEDCTVANALGTWVFSVAGALLAIPVGIKRKSFAPLVFFGTTGTMLDIIMGISQCEREHAERQMKLLEAQNLAANASIESESLTDSFANVDK

SEQ ID NO: 27276 - DNA, 1117 bp, Triticum aestivum
gccggcgagctctctccttcctctcgaccttcctagttcctacacacggacagacagagctcagctagttagttcaatataatggcgcctcagagcctggatcttggcctgagccttggcctgggcctcgtttcccggccctcacagccgagcttctggtactccggcggcaatgtggcggcggaccaagaagtgggcccgactccgaccgcggcggcggtggaggagaggaggtgttcgccaggcagcccggcctcgagcggcagcggcagcgggctgaagcgcggcgccgagaggtccgccggcagcggcgacgaggaccaggacgacgacggcggcaacgcgcgcaagaagctccggctgtccaaggaccaggcggccgtcctcgaggagtgcttcaagacgcaccacaccctcactccgaagcagaagctggcgctggccaacagcctcgggctgcgcccgcggcaggtggaggtgtggttccagaaccgtcgggcccgcaccaagctgaagcagacggaggtggactgcgagtacatgaagcgctggtgcgagcagctcgccgagcagaaccgccgcctcgagaaggaggtggccgagctcagggcgctcaaggccgcaccgccggcgcataacggcgccgcggcggggcccctcaccaccctaaccatgtgcctctcctgcaagcgcgtcgcgtcgacgtcgtctgcctcggcgtgcaccgtgcccagcttctccgccaatgccggcatcggcatgccaatgccatcgcccgtggcgcagcccgaacaccggcagttcttctgcgggttccgagacaccggagcggcgtacggcggccccgccgggctaacgaaggtggtcaaggcggccagatagaacgagcaatctctgtgacgccaccgtgctcagcatgccaagcaagctaacaaaaaaaatggcggcattgtcacgactcacaaatttaagcaagtgtagcagaaagtttaatcctttcccttctctgtctctgagggaaattcaagttaattagttttaacaatctaggatcggtcaatcgacgagttccagcggggatgaatgtatccatgtgaaaagttgatgaaataacatt

SEQ ID NO: 27277 - protein, 266 aa, Triticum aestivum
MAPQSLDLGLSLGLGLVSRPSQPSFWYSGGNVAADQEVGPTPTAAAVEERRCSPGSPASSGSGSGLKRGAERSAGSGDEDQDDDGGNARKKLRLSKDQAAVLEECFKTHHTLTPKQKLALANSLGLRPRQVEVWFQNRRARTKLKQTEVDCEYMKRWCEQLAEQNRRLEKEVAELRALKAAPPAHNGAAAGPLTTLTMCLSCKRVASTSSASACTVPSFSANAGIGMPMPSPVAQPEHRQFFCGFRDTGAAYGGPAGLTKVVKAAR

SEQ ID NO: 27278 - DNA, 998 bp, Triticum aestivum
accactcagttgacgatcaacgagaagagcagtttgagcacctacggcgatcggtctatctcattctcgagagagcgaattttacttgttcaggtcttcaggatgtcgcagcagccagcacagggcccggcgccggtgaggctcatcacggcgttcggcagcccgttcgcgcaccgcgtggaggtggcgctcacgctcaagggggtgccatacgagctgctcgtggaggacctgaccaacaagagcgagctgctgctcgcccacaaccccgtccaccagtccgtgcccgtcctcctccacggcgaccgcgccatctgcgagtccctcgtcatcgttgagtacgtcgacgaggccttccacgacgacggcgacgggtcggcgccccggctccttccggcggacccctacgagcgcgccacggcccgcttctgggctgacttcatcgccaacaagtgcttgaagccgctgtggcaggcgatgtggacggacggcgcggagcaggcgcggctggcgagggagaccaaggagagcctgtgggtcctggacgcgcagctggaggggaagcggttcttcgggggcgacgcgctcggcttcgtcgacctcgccgcatgcacgctggctcactggctcggcgtgctggaggaagtcgccggggtgcggctgatgaaggacggcgagtaccctgctcttggccggtgggccagggagtacacctccgacgaggtggtgaggcggtccctgccggacagggacgagctcatcgcctacttcaccaaaaacaaggagaggtacaggtcgttcatggtcaaggcagcagcagcggtgcagtgaagcggtagtgagtgacgcgatcgtcgcagcagtacagcgaagcagcagccacatcagagcttatgctacagtctataaatacgcaatgtatttttttagatgtacggagtactaaataactaataagcatgtattttgttctacaccataatcatgcatggtttgcc

SEQ ID NO: 27279 - protein, 276 aa, Triticum aestivum
TTQLTINEKSSLSTYGDRSISFSRERILLVQVFRMSQQPAQGPAPVRLITAFGSPFAHRVEVALTLKGVPYELLVEDLTNKSELLLAHNPVHQSVPVLLHGDRAICESLVIVEYVDEAFHDDGDGSAPRLLPADPYERATARFWADFIANKCLKPLWQAMWTDGAEQARLARETKESLWVLDAQLEGKRFFGGDALGFVDLAACTLAHWLGVLEEVAGVRLMKDGEYPALGRWAREYTSDEVVRRSLPDRDELIAYFTKNKERYRSFMVKAAAAVQ

SEQ ID NO: 27280 - protein, 242 aa, Triticum aestivum
MSQQPAQGPAPVRLITAFGSPFAHRVEVALTLKGVPYELLVEDLTNKSELLLAHNPVHQSVPVLLHGDRAICESLVIVEYVDEAFHDDGDGSAPRLLPADPYERATARFWADFIANKCLKPLWQAMWTDGAEQARLARETKESLWVLDAQLEGKRFFGGDALGFVDLAACTLAHWLGVLEEVAGVRLMKDGEYPALGRWAREYTSDEVVRRSLPDRDELIAYFTKNKERYRSFMVKAAAAVQ

SEQ ID NO: 27281 - DNA, 600 bp, Triticum aestivum
atttagagtccaccccctccccttcctcctctgttccacctcaccaaccgaaaccaaaccaaccaatctaccacccctctccaatggcaaccgcgcccacgtcgcaccagctcgccgccggggcgccctggagctccctcccccgcggcgggttccgggcgctcacggactccgcccccgcctccgtccgcttctccgtcggtcgccgccgcgccgcccgcctagaggtgaaagcagctggaaacatcttcggggactacttccaggttgcaacttatggagagtctcatggaggcggtgttggctgcgttatcagtggttgtccacccagaatcccactcacggaggaagacatgcaaggagaccttgatcgaaggcggccgggtcagagcagaataacaaccccaaggaaggagaccgatacttgtaaaatcctttcagggacatacgaaggaatgaccactgggacaccaattcatgttcttgtcccaaacacggatcaaagagggggtgattacactgaaatggctaaggcgtacagaccttcccatgcggatttaacttatgaccctcaaatacgtgttagatctgtgcagggag

SEQ ID NO: 27282 - protein, 199 aa, Triticum aestivum
LESTPSPSSSVPPHQPKPNQPIYHPSPMATAPTSHQLAAGAPWSSLPRGGFRALTDSAPASVRFSVGRRRAARLEVKAAGNIFGDYFQVATYGESHGGGVGCVISGCPPRIPLTEEDMQGDLDRRRPGQSRITTPRKETDTCKILSGTYEGMTTGTPIHVLVPNTDQRGGDYTEMAKAYRPSHADLTYDPQIRVRSVQG

SEQ ID NO: 27283 - protein, 172 aa, Triticum aestivum
MATAPTSHQLAAGAPWSSLPRGGFRALTDSAPASVRFSVGRRRAARLEVKAAGNIFGDYFQVATYGESHGGGVGCVISGCPPRIPLTEEDMQGDLDRRRPGQSRITTPRKETDTCKILSGTYEGMTTGTPIHVLVPNTDQRGGDYTEMAKAYRPSHADLTYDPQIRVRSVQG

SEQ ID NO: 27284 - protein, 122 aa, Triticum aestivum
FRVHPLPFLLCSTSPTETKPTNLPPLSNGNRAHVAPARRRGALELPPPRRVPGAHGLRPRLRPLLRRSPPRRPPRGESSWKHLRGLLPGCNLWRVSWRRCWLRYQWLSTQNPTHGGRHARRP

SEQ ID NO: 27285 - DNA, 1852 bp, Triticum aestivum
aggattggttgagttcgtctccgcgccgccgccgccgccgtcaatctcctcggtatatcaagccactccagatggcaacctatgagcccaagaacatcctcataaccggtgccgcaggtttcatcgcgtcccacgtggcaaaccgtctggtcaggaattacccgcgctacaacatcgtcattctcgacagggtcgactattgctccagccttagaaacctcgacccttctcgtggatccccgaatttcaagtttgtcaggggcgacatcgccagtgccgacttggtgaaccacctcctggtcaccgagtcgatcgataccgtcatgcactttgctgcccagactcacgtcgacaactccttcagctgttcctttgagttcaccaaaaacaatgtgtacggtacccacatcctcctcgaggcatgcaagcaggttaagatcagaaggttcattcatgtcagcaccgatgaagtctacggagaaactgatgtcaatgctgttgttggtaaccatgaggaatctcggctgcttccgacgaacccgtattcggctacgaaagccggggcagagatgctggtgatggcctacgcaaggtcctataatcttccggtgatcaccacacgaggtaacaatgtgtatgggccaaaccagttccccgagaagctcatccccaaatttgctctcctggcaatgagaggcctgccactcccggtttatgggaatggctcgaatgccaggagctacttgtactgtgaggatgtcgcagaagcctttgatgttgttcttcacagaggagaggttgggcatgtgtataacatcgccgcggctaaggagaggggagtggtggatgtggccagggacatatgtgagattcttggggtggaccctgagaaggccatcaagttcgtggaggacaggccgttcaatgaccaaaggtactttgtggacggtgagaagatgaggaggctggggtggttggagcgcacaacgtgggaggagggactgaggaagacggtggagtggtacgccagcaatgctgattactggggagatgttggcgttgtcttgcgagggcagcatcgtaactggacatatgctgcctcatcaccgcaagctgatgaagcagttgaggatcctaagttgaaaagcgcaagatcgaagtgcagggcaatgttataaactttacacccatgcatccataggcacaggaggcaacaacacgattcaagcctcaaataagagtgagtttcctaagctactactgccattgtgtcttgcacacaactgttacgagtgcacagattttgcctaaaggttcagtctattttaatggaggcatgcctttcttttcctgatgaattaatggaggcagtctagtggtgatttgcttacatcttaaatcttcataattcttttacatggatgaattacaaatgcctttttccatctccaagatctagtgcatcaccttgagttgtagagaaaatctcctttgtatcagtgaattacgctagttggactcgaggatatagccaagattaattatctccaagatcagttgtcagccataagtgctggcctgctgggagcttcttaatcttgatgcagtaagtagtctttttaaggccggtaatactttcaggtatagcatgaactagtaatgtgagcgcgctttgctgcgccgctcttcactgggacgtctatcttccagaaaatctgttcacttgttctcaaataacaacttaacgatctgaagagaactgtgagattgatgtgaatctgttttcttgttttttagttgaaatcttatttcttgttggcatgaaagaaatcatggactcttttctagtgac

SEQ ID NO: 27286 - protein, 391 aa, Triticum aestivum
DWLSSSPRRRRRRQSPRYIKPLQMATYEPKNILITGAAGFIASHVANRLVRNYPRYNIVILDRVDYCSSLRNLDPSRGSPNFKFVRGDIASADLVNHLLVTESIDTVMHFAAQTHVDNSFSCSFEFTKNNVYGTHILLEACKQVKIRRFIHVSTDEVYGETDVNAVVGNHEESRLLPTNPYSATKAGAEMLVMAYARSYNLPVITTRGNNVYGPNQFPEKLIPKFALLAMRGLPLPVYGNGSNARSYLYCEDVAEAFDVVLHRGEVGHVYNIAAAKERGVVDVARDICEILGVDPEKAIKFVEDRPFNDQRYFVDGEKMRRLGWLERTTWEEGLRKTVEWYASNADYWGDVGVVLRGQHRNWTYAASSPQADEAVEDPKLKSARSKCRAML

SEQ ID NO: 27287 - protein, 368 aa, Triticum aestivum
MATYEPKNILITGAAGFIASHVANRLVRNYPRYNIVILDRVDYCSSLRNLDPSRGSPNFKFVRGDIASADLVNHLLVTESIDTVMHFAAQTHVDNSFSCSFEFTKNNVYGTHILLEACKQVKIRRFIHVSTDEVYGETDVNAVVGNHEESRLLPTNPYSATKAGAEMLVMAYARSYNLPVITTRGNNVYGPNQFPEKLIPKFALLAMRGLPLPVYGNGSNARSYLYCEDVAEAFDVVLHRGEVGHVYNIAAAKERGVVDVARDICEILGVDPEKAIKFVEDRPFNDQRYFVDGEKMRRLGWLERTTWEEGLRKTVEWYASNADYWGDVGVVLRGQHRNWTYAASSPQADEAVEDPKLKSARSKCRAML

SEQ ID NO: 27288 - protein, 284 aa, Triticum aestivum
MHFAAQTHVDNSFSCSFEFTKNNVYGTHILLEACKQVKIRRFIHVSTDEVYGETDVNAVVGNHEESRLLPTNPYSATKAGAEMLVMAYARSYNLPVITTRGNNVYGPNQFPEKLIPKFALLAMRGLPLPVYGNGSNARSYLYCEDVAEAFDVVLHRGEVGHVYNIAAAKERGVVDVARDICEILGVDPEKAIKFVEDRPFNDQRYFVDGEKMRRLGWLERTTWEEGLRKTVEWYASNADYWGDVGVVLRGQHRNWTYAASSPQADEAVEDPKLKSARSKCRAML

SEQ ID NO: 27289 - DNA, 739 bp, Triticum aestivum
aatgtccagcatctgcttaatggcagagacctatgtggatcacggtgcagtcttcaagttgattaccgcagcagcaccagttcctatgagcccactcgagagtttggcatcgtcagctgttcggacggctaatgtctccaaggcatcgctcatcttggtcctcacgaggggaggtacgactgcaaggctcgtcgcgaagtacaggccagcgatgccagtcttgaactgcgtggttccagagctgaagaccgacaatgatttcgactggacttgcagcgacgaggctcctgcaaggcagagtcaaattgttaggggcctgatcccaatgttgagtgccgctaccgcaaaggcttctgatactgaggccaccgaggaggccgtcagttttgccctggattatgccaagaagctcggcctctgcaagtcgggagattcagttgttgcggtgcatcgtctcagcgcatcatccctcgtcaggatcttgacagtggattagggtcaggtgatgttggctcatgggggcaaattttgttaggttgttatcggatcatcgctatcattttgttggctcatcccacgtcgtgagtcctatattacgtcttgtgttcagctacgcatagtaaagagttggtgtcgcccattctgaatatcttgctaaataatacatactcgctactcaatatatatgccacttcaaaaaaaaaagaaaaaaaaaaaaaaaaaagcttatcgataccgt

SEQ ID NO: 27290 - protein, 164 aa, Triticum aestivum
MSSICLMAETYVDHGAVFKLITAAAPVPMSPLESLASSAVRTANVSKASLILVLTRGGTTARLVAKYRPAMPVLNCVVPELKTDNDFDWTCSDEAPARQSQIVRGLIPMLSAATAKASDTEATEEAVSFALDYAKKLGLCKSGDSVVAVHRLSASSLVRILTVD

SEQ ID NO: 27291 - protein, 158 aa, Triticum aestivum
MAETYVDHGAVFKLITAAAPVPMSPLESLASSAVRTANVSKASLILVLTRGGTTARLVAKYRPAMPVLNCVVPELKTDNDFDWTCSDEAPARQSQIVRGLIPMLSAATAKASDTEATEEAVSFALDYAKKLGLCKSGDSVVAVHRLSASSLVRILTVD

SEQ ID NO: 27292 - protein, 136 aa, Triticum aestivum
MSPLESLASSAVRTANVSKASLILVLTRGGTTARLVAKYRPAMPVLNCVVPELKTDNDFDWTCSDEAPARQSQIVRGLIPMLSAATAKASDTEATEEAVSFALDYAKKLGLCKSGDSVVAVHRLSASSLVRILTVD

SEQ ID NO: 27293 - DNA, 1415 bp, Triticum aestivum
attaaaccgagcgccagtggatctctcctcgggcatcggcatcggagcggagagagagagagagagagccacccagccatgagatggtatgcatcggtaggctgagggcgctggtgcttcgtgcggcggcgggcgcgggcgcgggcaggcgccggtgggccagggtcctgtgcggtcgggcggtcgatgtgtgcgtgacaccccgtccgcgcgggcacggttggcgtggattccgggcggtggctggcgccaggacgaagatgatgctcgattcctccgactctgactccggcgctccggcggggcagctgcagctgcagcgccgcgcggttgctgctgggacccagccgcaggatggagggtacgccagtgcggggtggcagagggaagatggtaaactgaaatgtgggtattcaagttttagagggaaaagggctacaatggaggatttctatgatgtaaaactaactgaaattgatggacacgctgttagcctatttggtgtattcgatggtcatggggggtcacgtgctgctgagtatttgaaggagcatttgttcgagaaccttatgaaacaccccaagttcttgactgatacaaagcttgctataagtgaaacatatcagaagacagatgcagatttcttagaatcagaatcaagtgctttcagggatgatggttccacagcttcgactgcggttttagtgggtggccatctatatgtagcaaatgttggtgactcccgtgctgttatttcaaaagccgggaaagctagggcactctcagtagatcacaaacctaacaggtctgatgaacgcaagagaattgaaaatgctggaggtgttgtcatctgggctggtacttggagggtaggtggcgtactggcaatgtcccgtgcgtttggtaatcgtctactgaagccatttgtggtggcagaacctgaaattcaggaagaattgattaatggagaattggagagcctggttcttgccagtgatgggctttgggatgccgtagaaaatgaggaagctgtgtcccttgcaaaaacagaagatgtgccagagtctgcggccaggaaactgacggagattgcctactctcgtggcagcgctgacaatattacatgcatcgtggtgcaattccaccatgataaaattacaggatgagatggactacagctgatttaaggtttctctgcttcaggcctctttttatcctgcaagcggagtggggtttctcccacatctatttttgcctctgtggcaactgctcaggacttcctctattgattctttcctttgtgtggcagaccttttctcttttgagaattgtaatgggaatttttgagtttgatgtatccatgtctatgtctgtactaatacttgttatatttaatataaaaagagtgagttacg

SEQ ID NO: 27294 - protein, 360 aa, Triticum aestivum
MVCIGRLRALVLRAAAGAGAGRRRWARVLCGRAVDVCVTPRPRGHGWRGFRAVAGARTKMMLDSSDSDSGAPAGQLQLQRRAVAAGTQPQDGGYASAGWQREDGKLKCGYSSFRGKRATMEDFYDVKLTEIDGHAVSLFGVFDGHGGSRAAEYLKEHLFENLMKHPKFLTDTKLAISETYQKTDADFLESESSAFRDDGSTASTAVLVGGHLYVANVGDSRAVISKAGKARALSVDHKPNRSDERKRIENAGGVVIWAGTWRVGGVLAMSRAFGNRLLKPFVVAEPEIQEELINGELESLVLASDGLWDAVENEEAVSLAKTEDVPESAARKLTEIAYSRGSADNITCIVVQFHHDKITG

SEQ ID NO: 27295 - protein, 301 aa, Triticum aestivum
MMLDSSDSDSGAPAGQLQLQRRAVAAGTQPQDGGYASAGWQREDGKLKCGYSSFRGKRATMEDFYDVKLTEIDGHAVSLFGVFDGHGGSRAAEYLKEHLFENLMKHPKFLTDTKLAISETYQKTDADFLESESSAFRDDGSTASTAVLVGGHLYVANVGDSRAVISKAGKARALSVDHKPNRSDERKRIENAGGVVIWAGTWRVGGVLAMSRAFGNRLLKPFVVAEPEIQEELINGELESLVLASDGLWDAVENEEAVSLAKTEDVPESAARKLTEIAYSRGSADNITCIVVQFHHDKITG

SEQ ID NO: 27296 - protein, 300 aa, Triticum aestivum
MLDSSDSDSGAPAGQLQLQRRAVAAGTQPQDGGYASAGWQREDGKLKCGYSSFRGKRATMEDFYDVKLTEIDGHAVSLFGVFDGHGGSRAAEYLKEHLFENLMKHPKFLTDTKLAISETYQKTDADFLESESSAFRDDGSTASTAVLVGGHLYVANVGDSRAVISKAGKARALSVDHKPNRSDERKRIENAGGVVIWAGTWRVGGVLAMSRAFGNRLLKPFVVAEPEIQEELINGELESLVLASDGLWDAVENEEAVSLAKTEDVPESAARKLTEIAYSRGSADNITCIVVQFHHDKITG

SEQ ID NO: 27297 - DNA, 1570 bp, Triticum aestivum
aaaaccctagagaaaccccgagccaagcacgacaccagatggcctccgccggcggcaagcccaacgccaacaccggcggcgacaccaaggggaggaagcgcaagttcctgccccacggcaagccggtgcggaagggcgcgtacccgctgcgccccggcgtgcagggcttcttcatcacctgcgacggcggccgcgagcaccaggccacccgtgaggcgatctccctcctggacaccttttacgaggacctggttgacgggaaagtatttgatgagaagcccaagagcatccctgacaagccgctgaacaaaaaaataaagtttgaggactctgattcctctgatgatgaggatgaaggtcattcagtggaggaggctgacaatggaaatgatgtagaaaaaggtgaagcaaagtcatctgagcagcaacaagaggtacctggtgccttggaagttgtcagcaaggaggatgaagaacaagttgaaactgccgacggatcagcgccaaagaaacaacgtatagaagatcctttggtttctgaacagacagaaccaaaagtgcccactgatgaaccaacagagactactgatgataagccaaaggagtccactgataaaccagcagagactactgatgataagccaaaagagtccactgataagccagcagagactactgatgataagccaaaagagtccactgataaaccaacagagactagtgataaaccaaaagcgtccaacgataaaccaaaagagttcactggtaaaccaaaagcgtccaatgacatacctattgatgatttaattgatgaggacctgaaacaactgggggacaggaaaaagaggctgtttgcaagcgtcgattccggttgcaatggttgcatcttcattcaaatgcacaaaagaggtggagaccctggtccagttgagattgtacaaaacatgatgtcttcggctgcttcaactcgtaaacatatgtccaggtttattctgagggtgttgcctgctgaggtggtatgttatgcttcagaagaggaaataacaagagccgttactccacttgttgaaaagtacttccccaaagaatctccttcgggacataagtttgctgtgttatacgaagcaaggtcaaacacaggaatcgatagaatgaaaattataaatgcagtagcaaaatctatacctcaacctcacaaagttgacctcagcaaccccgacaagactattattgtccagattgccaagactatatgcatgattggagtggtggagagatacaaagagctttcgaagttcaacctaaggcagctgacctcgccaccggagaagtagtttctgcgtgacaaattcttcctcctggttgagttttaagcagatgcagcatcagttggttactacgagtagctaccgtgaaagtcattgccaaatgattcaggtgtattatgccgttaaaacagatggccattgtcgtgtggatgcatcctgaatcgcttgcttaatgccgtatggtgcaattttggaacctgttgaatttcctacagcgatcgttggaataaagggttaattag

SEQ ID NO: 27298 - protein, 443 aa, Triticum aestivum
NPRETPSQARHQMASAGGKPNANTGGDTKGRKRKFLPHGKPVRKGAYPLRPGVQGFFITCDGGREHQATREAISLLDTFYEDLVDGKVFDEKPKSIPDKPLNKKIKFEDSDSSDDEDEGHSVEEADNGNDVEKGEAKSSEQQQEVPGALEVVSKEDEEQVETADGSAPKKQRIEDPLVSEQTEPKVPTDEPTETTDDKPKESTDKPAETTDDKPKESTDKPAETTDDKPKESTDKPTETSDKPKASNDKPKEFTGKPKASNDIPIDDLIDEDLKQLGDRKKRLFASVDSGCNGCIFIQMHKRGGDPGPVEIVQNMMSSAASTRKHMSRFILRVLPAEVVCYASEEEITRAVTPLVEKYFPKESPSGHKFAVLYEARSNTGIDRMKIINAVAKSIPQPHKVDLSNPDKTIIVQIAKTICMIGVVERYKELSKFNLRQLTSPPEK

SEQ ID NO: 27299 - protein, 431 aa, Triticum aestivum
MASAGGKPNANTGGDTKGRKRKFLPHGKPVRKGAYPLRPGVQGFFITCDGGREHQATREAISLLDTFYEDLVDGKVFDEKPKSIPDKPLNKKIKFEDSDSSDDEDEGHSVEEADNGNDVEKGEAKSSEQQQEVPGALEVVSKEDEEQVETADGSAPKKQRIEDPLVSEQTEPKVPTDEPTETTDDKPKESTDKPAETTDDKPKESTDKPAETTDDKPKESTDKPTETSDKPKASNDKPKEFTGKPKASNDIPIDDLIDEDLKQLGDRKKRLFASVDSGCNGCIFIQMHKRGGDPGPVEIVQNMMSSAASTRKHMSRFILRVLPAEVVCYASEEEITRAVTPLVEKYFPKESPSGHKFAVLYEARSNTGIDRMKIINAVAKSIPQPHKVDLSNPDKTIIVQIAKTICMIGVVERYKELSKFNLRQLTSPPEK

SEQ ID NO: 27300 - DNA, 834 bp, Triticum aestivum
agaacatcctaatcgaaaaaactctcccgatccgcccgacccgatccccaaatccctccgcatctcatggcggcgagcctgtggcgagcggtgatgggcaccggcgccccgcccgcggacgccacggacggcatcgagttctggcgcgagccggagcgcggcgggtggctggacaagcagggcgagtacatcaagacgtggcggcggcggtggttcgtgctcaagcaggggaagatcttctggttcaaggactcgtccgtcacgcgcgcgtccgtgccccgcggcgtcatcgccgtcgcctcctgcctcaccgtcaagggcgccgaggacgtgctcaaccgcaagttcgccttcgagctctccaccccgggcgagaccatgtacttcgtcgccgactccgacaaggagaaggaggactggatcaactccatcggccgctccattgtccagcactcccgatccatgaccgacgacgagatcgtcgactacgacagcggccgccccgcggccggcggcaaatcatagattcgtcgattgattcggtgagcaaaaggaccggtgaggcggtggcacctgtaactctactattctacatgtctttgtcatagattcttttagttcatattttccacagatatggtgtgtgcacatgtatattattagagatttttattggtgattttaggtgtctttatttatactatggatcggttttgttcttataactttctttaagtatactgttcgatttgtatttggtccttaaatgttcttattatccaagtgtatatctcaagccgtagcaaattgaacaaggggatatttctcggtgct

SEQ ID NO: 27301 - protein, 201 aa, Triticum aestivum
NILIEKTLPIRPTRSPNPSASHGGEPVASGDGHRRPARGRHGRHRVLARAGARRVAGQAGRVHQDVAAAVVRAQAGEDLLVQGLVRHARVRAPRRHRRRLLPHRQGRRGRAQPQVRLRALHPGRDHVLRRRLRQGEGGLDQLHRPLHCPALPIHDRRRDRRLRQRPPRGRRQIIDSSIDSVSKRTGEAVAPVTLLFYMSLS

SEQ ID NO: 27302 - protein, 152 aa, Triticum aestivum
MAASLWRAVMGTGAPPADATDGIEFWREPERGGWLDKQGEYIKTWRRRWFVLKQGKIFWFKDSSVTRASVPRGVIAVASCLTVKGAEDVLNRKFAFELSTPGETMYFVADSDKEKEDWINSIGRSIVQHSRSMTDDEIVDYDSGRPAAGGKS

SEQ ID NO: 27303 - protein, 143 aa, Triticum aestivum
MGTGAPPADATDGIEFWREPERGGWLDKQGEYIKTWRRRWFVLKQGKIFWFKDSSVTRASVPRGVIAVASCLTVKGAEDVLNRKFAFELSTPGETMYFVADSDKEKEDWINSIGRSIVQHSRSMTDDEIVDYDSGRPAAGGKS

SEQ ID NO: 27304 - DNA, 1153 bp, Triticum aestivum
gaatagatagacacgcggtgcgaactaccctctgtgatcacttccgaggcagtttatccagcgaagctagcaggcagcagcaatggcggccgagcccgagatctgcgtgctctccaatggcaggatcacggcgaacatcgccagctggggcgccaccatcacctccctcctcgtccccgacgcgcaaggggatctcgcggatgtcgttcttgggttcgacacactggagccgtacttgaaaggcatggcaccttattttggttgcatagttggccgagttgcaaataggatcaagaatgggaagtttgatctgaacggagtcgagtattcattgcctatcaacaatgggccgaacagccttcatggtggattgaaggggtttgacaaggttgtgtgggatgttgtagagcgtaaagatggcgagtacccatcaataacctttcaatatgagagcaaagatggcgaagaaggttaccctggcgatgtaaccgtccgagcaacgtattctcttccggaggccaccactctaagacttgatatggaagctataccagctaacaaagccactcctatcagcttggcacagcatacttactggaaccttgcaggccacaactctggcagcatcttggatcattcgatccagatctgggcaaaacacgtcactccagtcaatgaaaacacgattcctaccggagaaataatgcccgtccaggacacgccttttgatttcaccacggagcacaagattggagaccgcatcagcgatgttcctggagggtacgaccataactatgtgttggactcgggtgatgagaagaatggcttgaagcacacagccaagctgaaggacccatcgagctcacgaactctggacctctggaccgatgcgcctggcatgcagttctatactgccaactatgtgaatggcatcacgggcaaaggtggagctgtttacggtaagcatgccggagtatgcttggaaacccaggggttccccaatgccatcaaccagcccaatttcccgtctgtggtggtgcagcctggtgcgaagtataagcacgccatgttgtttgagttctcggcatgattagatatgctgccggcagcttaaatggctgcaactgcaatagttatagagtggaataaaacg

SEQ ID NO: 27305 - protein, 335 aa, Triticum aestivum
MAAEPEICVLSNGRITANIASWGATITSLLVPDAQGDLADVVLGFDTLEPYLKGMAPYFGCIVGRVANRIKNGKFDLNGVEYSLPINNGPNSLHGGLKGFDKVVWDVVERKDGEYPSITFQYESKDGEEGYPGDVTVRATYSLPEATTLRLDMEAIPANKATPISLAQHTYWNLAGHNSGSILDHSIQIWAKHVTPVNENTIPTGEIMPVQDTPFDFTTEHKIGDRISDVPGGYDHNYVLDSGDEKNGLKHTAKLKDPSSSRTLDLWTDAPGMQFYTANYVNGITGKGGAVYGKHAGVCLETQGFPNAINQPNFPSVVVQPGAKYKHAMLFEFSA

SEQ ID NO: 27306 - protein, 281 aa, Triticum aestivum
MAPYFGCIVGRVANRIKNGKFDLNGVEYSLPINNGPNSLHGGLKGFDKVVWDVVERKDGEYPSITFQYESKDGEEGYPGDVTVRATYSLPEATTLRLDMEAIPANKATPISLAQHTYWNLAGHNSGSILDHSIQIWAKHVTPVNENTIPTGEIMPVQDTPFDFTTEHKIGDRISDVPGGYDHNYVLDSGDEKNGLKHTAKLKDPSSSRTLDLWTDAPGMQFYTANYVNGITGKGGAVYGKHAGVCLETQGFPNAINQPNFPSVVVQPGAKYKHAMLFEFSA

SEQ ID NO: 27307 - protein, 183 aa, Triticum aestivum
MEAIPANKATPISLAQHTYWNLAGHNSGSILDHSIQIWAKHVTPVNENTIPTGEIMPVQDTPFDFTTEHKIGDRISDVPGGYDHNYVLDSGDEKNGLKHTAKLKDPSSSRTLDLWTDAPGMQFYTANYVNGITGKGGAVYGKHAGVCLETQGFPNAINQPNFPSVVVQPGAKYKHAMLFEFSA

SEQ ID NO: 27308 - DNA, 1578 bp, Triticum aestivum
accaagcacaccggcacctaccatcgctctactccgcttcgagtccacagcacctcgcgcgcgctctacccaccataagccttcgggccttccgggagcccaagccatggcgcgcaagaagatccgggagtacgactccaagcgcctcctcaaggagcacctcaagcgcctggccggcatcgacctgcacatcctctccgcccaggtcacacaattgacggactttgcggagcttgtgaaccagcatccatggctgtcgaccaccaaactggttgtgaagcctgacatgctgttcgggaagcgtgggaagagtggccttgtggcactcaacctggatgtagcccaagtcaaggagtttgtgaaggagcggttgggagtcgaggtcgagatgggtggctgcaaagctccaattaccactttcatagttgagccgtttgtcccccacgatcaagagtactacctttcagttgtgtccgaaaggttgggtagcaccattagcttctcggaatgtggaggcattgaaatcgaggagaactgggacaaggttaagacagtctttcttccgaccgagaagccaatgacacctgatgcttgtgctcccttgattgcaacccttccactggaggcacgcggaaagattggtgatttcattaaaggagtgtttgctgtcttccaagacttagatttctcatttattgagatgaacccattcaccatggtgaatggggagccatatccgctggacatgagaggagaattggatgacactgcatctttcaagaacttcaagaagtggggaaatttagaattccctctaccattcggcagagttctcagttctacagaaagttttatccatgagctggacgacaagaccagcgcgtctttgaagttcacagttttgaacccaaagggacgcatctggacaatggttgctggaggtggtgccagtgtcatatatgctgacacggttggagatttgggatatgcttcagagttaggaaattatgcagaatacagtggtgctcccaaccaggaggaggttctgcagtatgctagagtagtacttgattgtgcgactgcggaccctgatggccgcaagagagcccttctcattggaggtggtatagccaacttcactgatgtcgctgccacttttagtggcatcattcaggcattaagagagaaggaatccaagttaaaggcatccaggatgcacctctatgttcgacgaggcggtccaaattaccaaactggactggcgaaaatgcgcaagcttggtgcagaaatcggtgttccgattgaggtgtatggaccggaagagacaatgactggcatctgcaagcaagcaattgaatgcattatggcggcatcataaatcaggatacagttgagaagtagtttgagatctacaaacaagaaactggctgccgcataaatgagagcatagtggcactaggttcacatcacatggttgattagtttcttcagaagttatttggacaaagacacatatattattgtcgtaaaggaacctgtactgttgtaatgtgacaaacaaaagatttattaccatgc

SEQ ID NO: 27309 - protein, 458 aa, Triticum aestivum
PSTPAPTIALLRFESTAPRARSTHHKPSGLPGAQAMARKKIREYDSKRLLKEHLKRLAGIDLHILSAQVTQLTDFAELVNQHPWLSTTKLVVKPDMLFGKRGKSGLVALNLDVAQVKEFVKERLGVEVEMGGCKAPITTFIVEPFVPHDQEYYLSVVSERLGSTISFSECGGIEIEENWDKVKTVFLPTEKPMTPDACAPLIATLPLEARGKIGDFIKGVFAVFQDLDFSFIEMNPFTMVNGEPYPLDMRGELDDTASFKNFKKWGNLEFPLPFGRVLSSTESFIHELDDKTSASLKFTVLNPKGRIWTMVAGGGASVIYADTVGDLGYASELGNYAEYSGAPNQEEVLQYARVVLDCATADPDGRKRALLIGGGIANFTDVAATFSGIIQALREKESKLKASRMHLYVRRGGPNYQTGLAKMRKLGAEIGVPIEVYGPEETMTGICKQAIECIMAAS

SEQ ID NO: 27310 - protein, 423 aa, Triticum aestivum
MARKKIREYDSKRLLKEHLKRLAGIDLHILSAQVTQLTDFAELVNQHPWLSTTKLVVKPDMLFGKRGKSGLVALNLDVAQVKEFVKERLGVEVEMGGCKAPITTFIVEPFVPHDQEYYLSVVSERLGSTISFSECGGIEIEENWDKVKTVFLPTEKPMTPDACAPLIATLPLEARGKIGDFIKGVFAVFQDLDFSFIEMNPFTMVNGEPYPLDMRGELDDTASFKNFKKWGNLEFPLPFGRVLSSTESFIHELDDKTSASLKFTVLNPKGRIWTMVAGGGASVIYADTVGDLGYASELGNYAEYSGAPNQEEVLQYARVVLDCATADPDGRKRALLIGGGIANFTDVAATFSGIIQALREKESKLKASRMHLYVRRGGPNYQTGLAKMRKLGAEIGVPIEVYGPEETMTGICKQAIECIMAAS

SEQ ID NO: 27311 - protein, 363 aa, Triticum aestivum
MLFGKRGKSGLVALNLDVAQVKEFVKERLGVEVEMGGCKAPITTFIVEPFVPHDQEYYLSVVSERLGSTISFSECGGIEIEENWDKVKTVFLPTEKPMTPDACAPLIATLPLEARGKIGDFIKGVFAVFQDLDFSFIEMNPFTMVNGEPYPLDMRGELDDTASFKNFKKWGNLEFPLPFGRVLSSTESFIHELDDKTSASLKFTVLNPKGRIWTMVAGGGASVIYADTVGDLGYASELGNYAEYSGAPNQEEVLQYARVVLDCATADPDGRKRALLIGGGIANFTDVAATFSGIIQALREKESKLKASRMHLYVRRGGPNYQTGLAKMRKLGAEIGVPIEVYGPEETMTGICKQAIECIMAAS

SEQ ID NO: 27312 - DNA, 845 bp, Triticum aestivum
acaccaacgcaacacgctcctagcattccaactcccgggcttctctccttccagagcatcccctcccctgtcgctctcactttcatctgcacgcctcctgcttctcggacccgacgcaaaaacaggggatacctctgaggatgagccgcagcaacaggaagagctcatcaaagggccttgacctgaagctgaacctctcgctgcccgcaagaggggactcctccaacagggtgatggctgacgaggagtcgtccccgagctcgtgcctgtcgtcggagaacgagcatggcctgcagtggtccaacagccccgaagcgacgtccatggtgctcgccgcctgccctcgctgcttcatctacgtcatgctcccccaggacgaccctcggtgcccccagtgcaagagccccgtgctccttgacttcctgcaggacagtggcaacaataacaacaacaccaacagcaacagcaggaagagcaggagggggtgaaagaagaggaggagaggctccattcggctgcaccgacatcaagaaaagcgtttatatgaagtcctaggtccagtagttctctttcgtttgatcatttcttcagtgtaaccatgatatgtcagtattaaaattgtgagactggcatatatccatgtgctggtgtcacgattttgacacatcatggatacactggggactatatcccctctcatgtgttcttcttcggtggttctaaatggagtagtttgttaggcataggaccagacttcttctcttctgtttcttactttcaagacaagaaaagattacccctgaaaatctcaagttgggccggatgagtattattctgaaacatcc

SEQ ID NO: 27313 - protein, 115 aa, Triticum aestivum
MSRSNRKSSSKGLDLKLNLSLPARGDSSNRVMADEESSPSSCLSSENEHGLQWSNSPEATSMVLAACPRCFIYVMLPQDDPRCPQCKSPVLLDFLQDSGNNNNNTNSNSRKSRRG

SEQ ID NO: 27314 - protein, 89 aa, Triticum aestivum
MACSGPTAPKRRPWCSPPALAASSTSCSPRTTLGAPSARAPCSLTSCRTVATITTTPTATAGRAGGGERRGGEAPFGCTDIKKSVYMKS

SEQ ID NO: 27315 - protein, 84 aa, Triticum aestivum
MADEESSPSSCLSSENEHGLQWSNSPEATSMVLAACPRCFIYVMLPQDDPRCPQCKSPVLLDFLQDSGNNNNNTNSNSRKSRRG

SEQ ID NO: 27316 - DNA, 1328 bp, Triticum aestivum
cctaatcgaaaagtcgccgctaaccactgcttcctctgctccgcacccaaatctcagatcgagccccgcaagtcaaccgccgatggccgcctccaccggcagccgccgcttcaagatcttcgcggccgccgacggcttcggggagccgctcaaggacgccgtcgtcgcgcacctccgcgcccactcctccgtcgccgacgtcgtcgacctcggcgtcgacaagtactactccgcggccgccgccgtcgcccgcagcgtctcctcctcggtccccgaccccgcgctcgagccccgcggcgtcgtcgtctgcggcaccggcgccggcgtcaccatcttcgccaacaagtaccccggcgtgtacgccacccactgcagctccgccgccgacgccgtcaacacccgctccatcaacgcctgcaacgtcctcgccctctccggcatggccaccccgccggaggccgccgcggtcatcgccgacgcctggctcgccacccccttccgcgccccctgccccgcgtccggcgacgccccttggccggaggacattcagaagttctttgacgttgcccccggcgagatggcctccatccccgagggattggcggcccctcctgcgccggactccgcctgcgccatctgctgcctgaggaaggggatggagttcgagccggtggacatcatgcccggcggcgagatgcggattgtgcgggagagccccacttcggcctacgtgcggttcaaagctggaagcgtggagccggcccaccaccacaccttcggccacgacctggtggtgatcaagggcaagaagaaggtgtggaacttgaccaagaaggagagctatggcctcgtcgacggggacttcctgttcacgcctgctggggacgtgcaccgtgtcaagtacttggaggacacggagttcttcatccgctgggatgggcactgggacatattcctcgatgaagacctcgagaccgcacgcaatgccatcgatgcagagctcggtgtgatcgacagtgacaagtgaggagggcatggtgatgcgcctggatgagttatcttgaggagacatgtgaaggtgctatctcgttgttccaccttttctccatgttcacttctacaatgtttgttgcttgtgctgtgcctatactggtgctggtgacatgttttcaaatatgtatgttgctggacgatttgccatgcttgtcgaataaagtggtgataatggtagtaatgctaccttgttatggttgcacaaaaaaaaaaaaaaaaaagcttatcgataccgtcgactgtttaaacacaataaagttggaacgggagggggg

SEQ ID NO: 27317 - protein, 341 aa, Triticum aestivum
LIEKSPLTTASSAPHPNLRSSPASQPPMAASTGSRRFKIFAAADGFGEPLKDAVVAHLRAHSSVADVVDLGVDKYYSAAAAVARSVSSSVPDPALEPRGVVVCGTGAGVTIFANKYPGVYATHCSSAADAVNTRSINACNVLALSGMATPPEAAAVIADAWLATPFRAPCPASGDAPWPEDIQKFFDVAPGEMASIPEGLAAPPAPDSACAICCLRKGMEFEPVDIMPGGEMRIVRESPTSAYVRFKAGSVEPAHHHTFGHDLVVIKGKKKVWNLTKKESYGLVDGDFLFTPAGDVHRVKYLEDTEFFIRWDGHWDIFLDEDLETARNAIDAELGVIDSDK

SEQ ID NO: 27318 - protein, 314 aa, Triticum aestivum
MAASTGSRRFKIFAAADGFGEPLKDAVVAHLRAHSSVADVVDLGVDKYYSAAAAVARSVSSSVPDPALEPRGVVVCGTGAGVTIFANKYPGVYATHCSSAADAVNTRSINACNVLALSGMATPPEAAAVIADAWLATPFRAPCPASGDAPWPEDIQKFFDVAPGEMASIPEGLAAPPAPDSACAICCLRKGMEFEPVDIMPGGEMRIVRESPTSAYVRFKAGSVEPAHHHTFGHDLVVIKGKKKVWNLTKKESYGLVDGDFLFTPAGDVHRVKYLEDTEFFIRWDGHWDIFLDEDLETARNAIDAELGVIDSDK

SEQ ID NO: 27319 - protein, 195 aa, Triticum aestivum
MATPPEAAAVIADAWLATPFRAPCPASGDAPWPEDIQKFFDVAPGEMASIPEGLAAPPAPDSACAICCLRKGMEFEPVDIMPGGEMRIVRESPTSAYVRFKAGSVEPAHHHTFGHDLVVIKGKKKVWNLTKKESYGLVDGDFLFTPAGDVHRVKYLEDTEFFIRWDGHWDIFLDEDLETARNAIDAELGVIDSDK

SEQ ID NO: 27320 - DNA, 965 bp, Triticum aestivum
cgctcgcgctaggttaccacctcccgtccacccccctcctctcgccatggccgccgccgacgagcaccacgaggaggccagccccctcctggccccgcccgccaacgagaagctccccccggcgcaggatcccgtcaagggctgcgccgacggggtccccgtcgtcatgggcgagccggtcaccgcccctgccggcgccgagccgcgtgaaagctgggactctgggatcctctcctgcctcggccgcaacgacgaattctgcagcagcgacctcgaagtctgccttcttggaagtgtagcgccatgtgttctgtatggtagcaatgttgagaggcttgcagcagcaccaggaacttttgcaaacagctgcttgccttacactggcctctatatgctcgggaactctctctttgggtggaactgcctagccccatggttctctcatcccactcgtacagctattcgtcgaagatacaatcttgagggtagctttgaggctttcactaggcaatgtgggtgctgcggtggccttgctgaggatgaggagaggcgtgagcacctggaggtcgcctgcgaccttgctacccactacttctgccacccttgcgccctctgccaggaggggcgcgagctgcgccgcagggttccccaccctggcttctatgggcgctccgtcgtcgtcatgatgccacccacggagcagactatggggcgcaccatgtgaactggtccagctcgtcccctgccctagctgttcttgtgcgctttgatgttgtgttgccctggatcttttcacctctcggtccgtaaatacagaataatgtcatgtgaacaatttgtaatgtgattatgtgaatctcaactgattctattcgttaccgacgaaaaaaaaaaaaaaaaaagcttatcgataccgtcgacctcgagggggtgttaaacacaataaagttggaactggaggggtg

SEQ ID NO: 27321 - protein, 240 aa, Triticum aestivum
ARARLPPPVHPPPLAMAAADEHHEEASPLLAPPANEKLPPAQDPVKGCADGVPVVMGEPVTAPAGAEPRESWDSGILSCLGRNDEFCSSDLEVCLLGSVAPCVLYGSNVERLAAAPGTFANSCLPYTGLYMLGNSLFGWNCLAPWFSHPTRTAIRRRYNLEGSFEAFTRQCGCCGGLAEDEERREHLEVACDLATHYFCHPCALCQEGRELRRRVPHPGFYGRSVVVMMPPTEQTMGRTM

SEQ ID NO: 27322 - protein, 225 aa, Triticum aestivum
MAAADEHHEEASPLLAPPANEKLPPAQDPVKGCADGVPVVMGEPVTAPAGAEPRESWDSGILSCLGRNDEFCSSDLEVCLLGSVAPCVLYGSNVERLAAAPGTFANSCLPYTGLYMLGNSLFGWNCLAPWFSHPTRTAIRRRYNLEGSFEAFTRQCGCCGGLAEDEERREHLEVACDLATHYFCHPCALCQEGRELRRRVPHPGFYGRSVVVMMPPTEQTMGRTM

SEQ ID NO: 27323 - protein, 185 aa, Triticum aestivum
MGEPVTAPAGAEPRESWDSGILSCLGRNDEFCSSDLEVCLLGSVAPCVLYGSNVERLAAAPGTFANSCLPYTGLYMLGNSLFGWNCLAPWFSHPTRTAIRRRYNLEGSFEAFTRQCGCCGGLAEDEERREHLEVACDLATHYFCHPCALCQEGRELRRRVPHPGFYGRSVVVMMPPTEQTMGRTM

SEQ ID NO: 27324 - DNA, 845 bp, Triticum aestivum
atcttcctcctcgagccacccgagccggatcggcctagggttagggttccgccgccatggacgccgccgccgccgccgccgcgcagaagcggaagcgggcggagcaggaggaggagcaggcggctactgacgggctcgacgtgctcgacctgcgggcggcgaagcggctgctgctgggcttcgagcgccgcctccgcgacaacctcgaggcacgcatgaagcacccggacgacccggcccggttcgccgactccgagctcgccctccacgccgggacggaccggctccgcctcctcgccggcgcgccggagctcttccccgacctggtcccgctcggcctcgcctcctccctctcctcgctcctcacccacgaaaacgccgacctggccgccgcggccgcttccctcctcgccgacctcaccgactccgacgacccctcggacctcgccggggtgcaggccctcgccgacgcgctcgtcgacgccaacgcgctcgacctgctcgtgcacaacctctcgcggctctccgaggtggaccccgacgaggccgaggcggtgcaccattccctggccgtcctcgagaacctcatcgacctccgcccgcacctcgccgacctcgtctgtgaccgcaccaaggtgctccggtggctgctggcccgtgtcaaggcccgcgacttcgaggccaacaagcagtacgcctccgagatcctcgccatcctgctgcagaacagccccgccaaccagaagcggcttggccagatgaacggcgtcgacggcctgctgcaggccgtcgccatgtacaagtccagggaccccaggaccaccgacgagggggagatgctcgag

SEQ ID NO: 27325 - protein, 263 aa, Triticum aestivum
MDAAAAAAAQKRKRAEQEEEQAATDGLDVLDLRAAKRLLLGFERRLRDNLEARMKHPDDPARFADSELALHAGTDRLRLLAGAPELFPDLVPLGLASSLSSLLTHENADLAAAAASLLADLTDSDDPSDLAGVQALADALVDANALDLLVHNLSRLSEVDPDEAEAVHHSLAVLENLIDLRPHLADLVCDRTKVLRWLLARVKARDFEANKQYASEILAILLQNSPANQKRLGQMNGVDGLLQAVAMYKSRDPRTTDEGEMLE

SEQ ID NO: 27326 - protein, 210 aa, Triticum aestivum
MKHPDDPARFADSELALHAGTDRLRLLAGAPELFPDLVPLGLASSLSSLLTHENADLAAAAASLLADLTDSDDPSDLAGVQALADALVDANALDLLVHNLSRLSEVDPDEAEAVHHSLAVLENLIDLRPHLADLVCDRTKVLRWLLARVKARDFEANKQYASEILAILLQNSPANQKRLGQMNGVDGLLQAVAMYKSRDPRTTDEGEMLE

SEQ ID NO: 27327 - DNA, 1237 bp, Triticum aestivum
agacggctcggcgattggcctcacggcgagctatctaggtcacgaggaatccactcccgactgccgttaggctggccggctggcttgttgccgcggacagccttggcgaatcacggtcctgataggcgcccctcctcccggcgatggggggtcgcaatcggcgatggccgacgaagcgccaccacgacgcctcttcgaaccctcgccccccgcctccgtattccggatacagtcacgtggataatcaatgccaagtcccattatgggaaagggaattttgcagtcttgttggtggcatttcgtggcagaggttctgcgagaacaagcactttgcctatatgtacaaggagatagagcagtgggatgactcgggagcttttgagaatttccagaacgcaaaatcaaggttctggtctcattaccatggccaaccttctgatataccttaccccaaccctgatctgtacattgatgaggtcgaccatcgttgcgaggtcgaccccgagttggtagctgacctggacaaggtgcgggtaccctttgaggcggacaacgagcccgccgtagctgccaataacaggtgtgcccagaaccagtcagggaactgggacatctatctagaaaagccgacccctgaggtgaacaagtgggaggcggacaactcggcatccaacgcaggttggggagcgagtcaggagcctctgagcagctggaacaaaatcagcaccggctggggcgaggccctggcggagcccggttggggcagctcaggcaacaaccattgcccagggaataactggagcagctcccatggagtatccagcaacaataacacatactaccaggatccaggcggcgcatatggcaggaaaaggaacagtggaggcgggtactcccagcagaggaacagcaagcagaggaaccaggctgagagccaccaccagaggggcagatggcaggatcacagggacagggggaggcatggcgagcggttcctgtttgacaataggccaaatgggcagcgagcagagcgcggcttctgagttggtggcggtgagtgtgcgagaaaccgtggaaaggttttggttgtatgataaatgatgcgcattttctagtgtcttttgtgcggagctgcagcttgtaatggttggatgttgcaacaacgctttacctgtaaggagatgtgtcaggttttgttgctgctctttgtgatatgttctgttttctctcttcctgt

SEQ ID NO: 27328 - protein, 299 aa, Triticum aestivum
MGGRNRRWPTKRHHDASSNPRPPPPYSGYSHVDNQCQVPLWEREFCSLVGGISWQRFCENKHFAYMYKEIEQWDDSGAFENFQNAKSRFWSHYHGQPSDIPYPNPDLYIDEVDHRCEVDPELVADLDKVRVPFEADNEPAVAANNRCAQNQSGNWDIYLEKPTPEVNKWEADNSASNAGWGASQEPLSSWNKISTGWGEALAEPGWGSSGNNHCPGNNWSSSHGVSSNNNTYYQDPGGAYGRKRNSGGGYSQQRNSKQRNQAESHHQRGRWQDHRDRGRHGERFLFDNRPNGQRAERGF

SEQ ID NO: 27329 - protein, 234 aa, Triticum aestivum
MYKEIEQWDDSGAFENFQNAKSRFWSHYHGQPSDIPYPNPDLYIDEVDHRCEVDPELVADLDKVRVPFEADNEPAVAANNRCAQNQSGNWDIYLEKPTPEVNKWEADNSASNAGWGASQEPLSSWNKISTGWGEALAEPGWGSSGNNHCPGNNWSSSHGVSSNNNTYYQDPGGAYGRKRNSGGGYSQQRNSKQRNQAESHHQRGRWQDHRDRGRHGERFLFDNRPNGQRAERGF

SEQ ID NO: 27330 - DNA, 587 bp, Triticum aestivum
agaacatcctaatcgaaaaactcctccacactcttaagctaagctaagcaagccagcatctcgatctactcttcctccagcaatggcgtcgtccaggagagccctcatcctgctggccgtcgtgctggcggcggtgccggcggcgctgagccagaagacgacggccccggcgcccgaggcggcgcccgagacgccggaggcgcctgcggcggggacgacgcccaaggcggcggcggcgccgaacgtgacggcggtgctggagaaggccgggcagtacaccaagttcatccggctgatggcgtcgacgcagcaggacacgcagctgaacgcgcaggccaacgactcggacacgggcttcacggtgttcgcccccaccgacagcgccttcaacagcctcaagccgggcaccctcaactcgctctcgcagcaggaccaggtgacgctggtgcaggcccacatcgtccccaccttctactccatggagtccttcgagaccgccagcaaccccgtccgcacccaggcctccggcaccgacgggccctgcaccgtcaacgtcaccgccaccagcaacagcgccgtcaacgtct

SEQ ID NO: 27331 - protein, 168 aa, Triticum aestivum
MASSRRALILLAVVLAAVPAALSQKTTAPAPEAAPETPEAPAAGTTPKAAAAPNVTAVLEKAGQYTKFIRLMASTQQDTQLNAQANDSDTGFTVFAPTDSAFNSLKPGTLNSLSQQDQVTLVQAHIVPTFYSMESFETASNPVRTQASGTDGPCTVNVTATSNSAVNV

SEQ ID NO: 27332 - protein, 97 aa, Triticum aestivum
MASTQQDTQLNAQANDSDTGFTVFAPTDSAFNSLKPGTLNSLSQQDQVTLVQAHIVPTFYSMESFETASNPVRTQASGTDGPCTVNVTATSNSAVNV

SEQ ID NO: 27333 - DNA, 1711 bp, Triticum aestivum
ctgtaactcccgctttcagctcactccgatcaatctcgatttgccagccctccgcgacgccggcaggtcgctgttgagcctgactactccccgtagcggacatgggatcgacggcgctcggtggtgcggctccggcgcgcgccggattggcccccaagagtggagtccttggatctactttcaagccatgtggtggtttcaagctcaaaacaactactaaggttggacgctcttcagtttgtgtgagggtatccattgcttcttcaccacaaaaacagtactctcctaagacatcagcagttaaatcaggggaggaagtgcgcattgcggtgctaggagccagcggttataccggggctgagattgttcggcttctagcaaaccaccctcagttccgtatcacagtgatgaccgcagacagaaaagctggtgaacagtttggatctgtatttcctcacttgataacacaagacctgccaaatttagttgcgattaaagatgcagatttttcagatgttgatgctgttttttgttgcttgccacatggaacaacacaggaaattattaaaggcttaccccaacaactgaagattgttgatctctctgcggatttccgattgcgtaacatcaatgagtatgctgagtggtatggccatgctcatagggcaccagaacttcaggaagaggctgtttatggtttgacggaggttcttcgagatgaaataagaaatgcacggcttgttgccaacccgggatgttatcccacgtctattcagctccctcttgttcctctaataaaggcaaaactgatcaagctgagcaatataataattgatgcaaaatctggggttaccggggcaggacgtggagctaaggaagcaaatctgtacaccgagatagctgaaggcattcatgcttatggaataaaaggccaccgtcatgttcctgaggttgaacaaggattgtcagaggctgctgaatccaaagttactatcagcttcactccaaatcttatctgcatgaaacgtgggatgcaatctactatgtttgttgaaatggcacctggagtgactgtcagtgatttgtatcagcatctcaagtctacttatgagggtgaagaatttgtcaagctgttaaatggcagcaatgttcctcacacacgccatgttgttggatcaaattactgcttcatgaatgtcttcgaggacagaattcctggaagggcaatcatcatctctgtcatagacaatcttgtaaagggagcatctggccaggccgtgcagaacctcaatctgatgatgggactgcctgagaacatggggctgcaatatcagcccctatttccttgatatgttgtgcctttgttgtgctctttctcgatgatgctttggagttaagcacccatctctgttttccgttgagaagcaaagagctgaatgtcggagtgtaaccaaactcgctcaacagcaaaacttggtttgtgctggtgtagtatttagagaggagcaacaattagcagttgaataagagtatgaactgagtggcttggtgtaatgaaagtccaaaggctattatatcctacagtggattgttgtcatgagatcaataaagcagtgtaaaacccgattcagagacatcaaccattgctgtcagcattggataatagttagaagtgtgttacttttaaatattaaaggataaattagttttc

SEQ ID NO: 27334 - protein, 415 aa, Triticum aestivum
MGSTALGGAAPARAGLAPKSGVLGSTFKPCGGFKLKTTTKVGRSSVCVRVSIASSPQKQYSPKTSAVKSGEEVRIAVLGASGYTGAEIVRLLANHPQFRITVMTADRKAGEQFGSVFPHLITQDLPNLVAIKDADFSDVDAVFCCLPHGTTQEIIKGLPQQLKIVDLSADFRLRNINEYAEWYGHAHRAPELQEEAVYGLTEVLRDEIRNARLVANPGCYPTSIQLPLVPLIKAKLIKLSNIIIDAKSGVTGAGRGAKEANLYTEIAEGIHAYGIKGHRHVPEVEQGLSEAAESKVTISFTPNLICMKRGMQSTMFVEMAPGVTVSDLYQHLKSTYEGEEFVKLLNGSNVPHTRHVVGSNYCFMNVFEDRIPGRAIIISVIDNLVKGASGQAVQNLNLMMGLPENMGLQYQPLFP

SEQ ID NO: 27335 - protein, 313 aa, Triticum aestivum
MTADRKAGEQFGSVFPHLITQDLPNLVAIKDADFSDVDAVFCCLPHGTTQEIIKGLPQQLKIVDLSADFRLRNINEYAEWYGHAHRAPELQEEAVYGLTEVLRDEIRNARLVANPGCYPTSIQLPLVPLIKAKLIKLSNIIIDAKSGVTGAGRGAKEANLYTEIAEGIHAYGIKGHRHVPEVEQGLSEAAESKVTISFTPNLICMKRGMQSTMFVEMAPGVTVSDLYQHLKSTYEGEEFVKLLNGSNVPHTRHVVGSNYCFMNVFEDRIPGRAIIISVIDNLVKGASGQAVQNLNLMMGLPENMGLQYQPLFP

SEQ ID NO: 27336 - DNA, 1140 bp, Triticum aestivum
gagtcgcgccgccgagaagaacaggcaggcaggaggagtagccgagtggccaacgactccctcctcctccacctccccccttcgcaccaccggcctccaccgagaccaagcacacgccattcccctcctctcctccgagctccgagagatccccagaccctacgcgcgagttcccatggcagcggcccagctccgcggatcggcggtgccggggacggcggggaggtggccggctccctccggcgccatcctccgcttcgcgccgctcgccacgtccaggctcccggcagcgtcgcttcgtcagaggggagccttcagtggcctttccgctggtgtcgtcacggagtcattgactacaatgtgcatgaagtcaaaatgtactagcactcccattgatcatgccactgctcctgagcatacagaagatgaagttcccgagccaaccgctgtggtgactgctagtgaagagataaatatagaccaggaagttgctccgccacataagagtgccataatacatgatttctgcctagggatcccttttggtggattattattttccatgggccttgttggatttctattttggaggagtcctgtaagtcttacttttggcgttgcacctggtcttgctatattgggacttgccgtgcttagtcttaagggttggaggagtggaaagtccagcttgccatttatactggcacaagcagctgttgctgctgctgtagcatggaagcactgccaggcgtatgccacaacaaagaagctgcttccctggggcttttatactgcgctcagtgccttgatgatctgcttctactcgtacgtgttgcttgccggggggaatccaccaccaaagaagaagccagcagctgctatataagttgagcctttaagtcctattgttgttgaagttgtgctctggtaaatgttactgatgataggggttgcgttttattacttttaattgtagaacactgaaaaataataaagttgtgttcttgcgtacagtttatttgggtatctttgttacttaatggaagagtcagagcagatacgatttgctctggttctacatgaacttttgttcctgaacatcgcacttataccttaataaaatgtagctttgttgatccg

SEQ ID NO: 27337 - protein, 294 aa, Triticum aestivum
SRAAEKNRQAGGVAEWPTTPSSSTSPLRTTGLHRDQAHAIPLLSSELREIPRPYARVPMAAAQLRGSAVPGTAGRWPAPSGAILRFAPLATSRLPAASLRQRGAFSGLSAGVVTESLTTMCMKSKCTSTPIDHATAPEHTEDEVPEPTAVVTASEEINIDQEVAPPHKSAIIHDFCLGIPFGGLLFSMGLVGFLFWRSPVSLTFGVAPGLAILGLAVLSLKGWRSGKSSLPFILAQAAVAAAVAWKHCQAYATTKKLLPWGFYTALSALMICFYSYVLLAGGNPPPKKKPAAAI

SEQ ID NO: 27338 - protein, 236 aa, Triticum aestivum
MAAAQLRGSAVPGTAGRWPAPSGAILRFAPLATSRLPAASLRQRGAFSGLSAGVVTESLTTMCMKSKCTSTPIDHATAPEHTEDEVPEPTAVVTASEEINIDQEVAPPHKSAIIHDFCLGIPFGGLLFSMGLVGFLFWRSPVSLTFGVAPGLAILGLAVLSLKGWRSGKSSLPFILAQAAVAAAVAWKHCQAYATTKKLLPWGFYTALSALMICFYSYVLLAGGNPPPKKKPAAAI

SEQ ID NO: 27339 - protein, 175 aa, Triticum aestivum
MCMKSKCTSTPIDHATAPEHTEDEVPEPTAVVTASEEINIDQEVAPPHKSAIIHDFCLGIPFGGLLFSMGLVGFLFWRSPVSLTFGVAPGLAILGLAVLSLKGWRSGKSSLPFILAQAAVAAAVAWKHCQAYATTKKLLPWGFYTALSALMICFYSYVLLAGGNPPPKKKPAAAI

SEQ ID NO: 27340 - DNA, 869 bp, Triticum aestivum
cactagacgctcctccctatttagcaaatatgccatcctttgtggcgcgtcggaaaaaaccagagctcgtgctaccggcgcaagcaacaccgcacgagactctggctctctccgacgttgacgacgccatagacctgcgatttctgcagcctgccatcgagttctttcgtgctgtcgacatcgacattgatgaccacgggctggggcggcctgccacagctgccaaggtagtcaaggcggccctcgcgaaggctctggtgcactactacccgctggcaggccgtctccgggaggctgctgggggaaaactagccgtcgagtgcacaggggaaggcgtcgtgttcgtggaggcggaggcagacgtgtccatggatgagctcggcaagccgtcgcctctgccaccatacccgtgcgtggaagaactgttgtgcgaggtgggcgaccctagggttgttcttggagttcccttgttcttcatgcaggaggcactggacttccgatgggcgaagcgagttggcggcggcttacccatggtgggggacatctccttcgactctgtgagttgccacatgaggtgtaagaatggcaagggtcaggacgtgatcgtgataaacatgatattgccaggacctgcaatggacaagtttgagaaggagattgctgtttgggtgtgcaatggacaagacgaaaagtagtggtccggctcaattcgatcagcctcatacacccctactaaaataaaccccagcgagcaagtgcttaatcaccatgtcgttttgagtttgcgactatgtaggtgaggtcgtcgtaaatttgtaaacttctaaataaagtgccccctctcaataaattatgtttatgttaaacac

SEQ ID NO: 27341 - protein, 230 aa, Triticum aestivum
LDAPPYLANMPSFVARRKKPELVLPAQATPHETLALSDVDDAIDLRFLQPAIEFFRAVDIDIDDHGLGRPATAAKVVKAALAKALVHYYPLAGRLREAAGGKLAVECTGEGVVFVEAEADVSMDELGKPSPLPPYPCVEELLCEVGDPRVVLGVPLFFMQEALDFRWAKRVGGGLPMVGDISFDSVSCHMRCKNGKGQDVIVINMILPGPAMDKFEKEIAVWVCNGQDEK

SEQ ID NO: 27342 - protein, 221 aa, Triticum aestivum
MPSFVARRKKPELVLPAQATPHETLALSDVDDAIDLRFLQPAIEFFRAVDIDIDDHGLGRPATAAKVVKAALAKALVHYYPLAGRLREAAGGKLAVECTGEGVVFVEAEADVSMDELGKPSPLPPYPCVEELLCEVGDPRVVLGVPLFFMQEALDFRWAKRVGGGLPMVGDISFDSVSCHMRCKNGKGQDVIVINMILPGPAMDKFEKEIAVWVCNGQDEK

SEQ ID NO: 27343 - DNA, 1828 bp, Triticum aestivum
cattataccacaccaaaccagcaccagcacacggcataccacaagcagcagcagcagccgccgccgtggacttcgacgctcaagtactcgagctctagcgcttcgctctgtagcggctctcgcacggatcaaagccgatggcgacggcggtccaccagctctccttctccgcgccgagcgcgggcgccaggcggcggcagagccgggcgtccgcgtccgcgtccacgacggaccggcacgaggtgctatcgccgaatcgccggctgccgctgcggaaggtgccgggcgagcacggcccgccgctgctgggcgcgctcaaggaccggctcgagtacttctacgggcccggcgggcgcgacggcttcttcgcggcccgcgtccgcgcgcaccgctccacggtggtgcgcctcaacatgccccccggccccttcgtggccaaggacccccgcgtggtggcgctcctcgacgccgcctccttcccggtcctcttcgacacctcgctcgtcgacaagaccgacctcttcaccggcaccttcatgccctccaccgacctcaccggcggctaccgcgtgctctcctacgtcgaccccgccgagcccaaccacgcgccgctcaagtcgctcctcttccacctcctcacccaccgccgccagcacgtcatccccacgttccgcgaggtctacggcggcctcttcggccgcatggagaacgacctcgcccgcgtcggcaaggccgacttcggcaactacaacgacgacgccgccttcggcttcctctgccaggcgctcctcggccgtgaccccgtcgactcgccgctccgcgacgaagggcccaagctggtagccaagtggcttctgttccagatcagcccgctgctcagcctcggcctggcgggcctgcccaccctcgtggaggacggcctcctccacagcttccgcctcccgccggcgctcattaagaaggactacggccgcctcgccgacttcttccgcgacgccggcaaggcggtgatcgacgagggcgagcggctgggcatcgcgcgggaggaggcggtgcacaacatcctcttcgccatgtgcttcaactccttcggcggcatcaagatcctgttcccgtcgctggtgaagtggctgggccgcgccggcgggcgggtgcacggccggctcgcgacggaggtgcgcgccgtcgtgcgcgccaacggcggggaggtgacgatgcgggcgctggccgagatgccgctggtgaagtcagccgtgtacgaggcgctgcggatcgagccgccggtggcgatgcagtacgggcgcgcgaagcgggacatggtggtggagagccacgactacgggtacgaggtgcgggagggggagctgctgttcgggtaccagcccatggccaccaaggacccgcgcgtgttcccgcgcgccgaggactacgtgcccgacaggttcctgggcgaggacggcgagcggctgctccggtacgtggtgtggtccaacggtcccgagtcggcgacgcccacgctgcaggacaagcagtgcgccggcaaggacttcgtggtgctcatcgcgcgcctcctcgtcgccgagctcttcctccggtacgactccttcgacgtccaggtcgggtcctcgccgctcgggtcgtcggtcaccatcacatcgcttaagaaggccaccttctgaggcatcgccacgtgtactcatttttttccctctgcttttctcgatcgatgccagtattacaccatgcatgcgatacgctagcatggagtgatagaggatttgtgcaacaaaaatttcttttcctagcaaagatgagcccgatttttccc

SEQ ID NO: 27344 - protein, 513 aa, Triticum aestivum
MATAVHQLSFSAPSAGARRRQSRASASASTTDRHEVLSPNRRLPLRKVPGEHGPPLLGALKDRLEYFYGPGGRDGFFAARVRAHRSTVVRLNMPPGPFVAKDPRVVALLDAASFPVLFDTSLVDKTDLFTGTFMPSTDLTGGYRVLSYVDPAEPNHAPLKSLLFHLLTHRRQHVIPTFREVYGGLFGRMENDLARVGKADFGNYNDDAAFGFLCQALLGRDPVDSPLRDEGPKLVAKWLLFQISPLLSLGLAGLPTLVEDGLLHSFRLPPALIKKDYGRLADFFRDAGKAVIDEGERLGIAREEAVHNILFAMCFNSFGGIKILFPSLVKWLGRAGGRVHGRLATEVRAVVRANGGEVTMRALAEMPLVKSAVYEALRIEPPVAMQYGRAKRDMVVESHDYGYEVREGELLFGYQPMATKDPRVFPRAEDYVPDRFLGEDGERLLRYVVWSNGPESATPTLQDKQCAGKDFVVLIARLLVAELFLRYDSFDVQVGSSPLGSSVTITSLKKATF

SEQ ID NO: 27345 - protein, 421 aa, Triticum aestivum
MPPGPFVAKDPRVVALLDAASFPVLFDTSLVDKTDLFTGTFMPSTDLTGGYRVLSYVDPAEPNHAPLKSLLFHLLTHRRQHVIPTFREVYGGLFGRMENDLARVGKADFGNYNDDAAFGFLCQALLGRDPVDSPLRDEGPKLVAKWLLFQISPLLSLGLAGLPTLVEDGLLHSFRLPPALIKKDYGRLADFFRDAGKAVIDEGERLGIAREEAVHNILFAMCFNSFGGIKILFPSLVKWLGRAGGRVHGRLATEVRAVVRANGGEVTMRALAEMPLVKSAVYEALRIEPPVAMQYGRAKRDMVVESHDYGYEVREGELLFGYQPMATKDPRVFPRAEDYVPDRFLGEDGERLLRYVVWSNGPESATPTLQDKQCAGKDFVVLIARLLVAELFLRYDSFDVQVGSSPLGSSVTITSLKKATF

SEQ ID NO: 27346 - protein, 380 aa, Triticum aestivum
MPSTDLTGGYRVLSYVDPAEPNHAPLKSLLFHLLTHRRQHVIPTFREVYGGLFGRMENDLARVGKADFGNYNDDAAFGFLCQALLGRDPVDSPLRDEGPKLVAKWLLFQISPLLSLGLAGLPTLVEDGLLHSFRLPPALIKKDYGRLADFFRDAGKAVIDEGERLGIAREEAVHNILFAMCFNSFGGIKILFPSLVKWLGRAGGRVHGRLATEVRAVVRANGGEVTMRALAEMPLVKSAVYEALRIEPPVAMQYGRAKRDMVVESHDYGYEVREGELLFGYQPMATKDPRVFPRAEDYVPDRFLGEDGERLLRYVVWSNGPESATPTLQDKQCAGKDFVVLIARLLVAELFLRYDSFDVQVGSSPLGSSVTITSLKKATF

SEQ ID NO: 27347 - DNA, 813 bp, Triticum aestivum
acttctctatcgtatcgcagactcgtagtccagtacgcagtacatagcaagcaagagaagagagcagaccagctacgtgggagagatgggcagcaggcttgacgcgcgcacgctcaaggacgaggtggcgagcatggaccggcgcccgctcctcgacctcggccacccgctcctcaaccgcgtcgccgacagcttcatccgcgccgccggagtcggagcggcgagggcggtgtcgcgggaggcctacttcgtcgccgtcgaagggatgggaggagactcgacggggctggacagcaccgccaagaggagccatttctccagcgccagaggggatgacggccagaagtcgctcgacgcagtggttaaatcggcaagcaaggaggccattcagtggggattggcagccggagtgtactctgggataacgtacggtctgagagaggccagaggacaccatgactggaagaacagtgcgatagcaggggcgatcgccggagcggcagtcgcgctgaccggggacaacgggcactccgaccacgtcgtccatttcgccatcaccggagccgcactgtcgagcgcggcgaccatgctctcaggcatattctaagccacggggtgtggggctagggctaagaaatttggagcaactcttgaaatgtcgtactgtatttcccttaatttctccatgtacctgtgacagtttgtgcactctgtcccatctgctagctagtcctggcaccaagcaagcccgaatttcgttcgaatttcggctgtaatgtttgttccctttgctctatgtgttctatttatggc

SEQ ID NO: 27348 - protein, 173 aa, Triticum aestivum
MGSRLDARTLKDEVASMDRRPLLDLGHPLLNRVADSFIRAAGVGAARAVSREAYFVAVEGMGGDSTGLDSTAKRSHFSSARGDDGQKSLDAVVKSASKEAIQWGLAAGVYSGITYGLREARGHHDWKNSAIAGAIAGAAVALTGDNGHSDHVVHFAITGAALSSAATMLSGIF

SEQ ID NO: 27349 - protein, 157 aa, Triticum aestivum
MDRRPLLDLGHPLLNRVADSFIRAAGVGAARAVSREAYFVAVEGMGGDSTGLDSTAKRSHFSSARGDDGQKSLDAVVKSASKEAIQWGLAAGVYSGITYGLREARGHHDWKNSAIAGAIAGAAVALTGDNGHSDHVVHFAITGAALSSAATMLSGIF

SEQ ID NO: 27350 - protein, 113 aa, Triticum aestivum
MGGDSTGLDSTAKRSHFSSARGDDGQKSLDAVVKSASKEAIQWGLAAGVYSGITYGLREARGHHDWKNSAIAGAIAGAAVALTGDNGHSDHVVHFAITGAALSSAATMLSGIF

SEQ ID NO: 27351 - DNA, 1226 bp, Triticum aestivum
gtgcttctaagtttgctcctagctggcttgcttgctccttgtccatgccagccacggccatggagctctccagcctgccgctagtcctgctgctctgcttgatggcgggctcgtcgacggctgccctgccggcgctgcccgggatggacagggtgcggcagcaggtcgacagggcgaacaggcacggcccgtccattgggctcgtcatgtcgtacgtcgccgaggacaccgcgctccaggcctccggctacttcaggccttggcacgtccagcccttcattgacctctacggacggaggtttcacatcgggagtattcgaggtgtgaatgttatatacgcattgacagggcaacgcaggttgaatgcagctgtcactgtacaaactctcgtcgacgtctttaccgtgtctggtattgtccattatggcacagcaggaagctctaatgattcaatgtcatttggagatgtcagtgtccccaagttagttgcttatacaggcgcttggacatggaagaagtacaaatcacttaaagaagagtcaacagaactaaactttggacaatttaacgtcccgaatggaggagagaacctgctagggtctctgaaatacagaaatgaggagctatactcagttggcaagcccatggaagaagttttctggttacctgtagattcagcatggttcaaaatagcagaaggacttaaggtcaaccttgaaagatgtaatgacactttctgcttaccaaaaacgccacaagtggttcatgggctaaaaggagcatcagccgacatgtttctagacaatgcagaataccggaagttccttttcagagaatttgcagtgtcaacaatagatgaggagagcgcagcagtggtgatgacaacaacatctcctggcgtacctgtgattgtgttccggggagtatctgatctggctggagtggaaccaacatggtcatcaacaagcctgatgaacctggcatctattaatgcactcaaagtggcagtggagttcattgctacaattggcaggcagatgtcgacaccattagcacaaagttcaaaaaactgagacaaaagagagctgacatgtccatggagcaggactgtagaatagttttaaacagcaattgggaacaaaattcagagtgataagtgacccttagcttcaaagtacacaaaacattcaacagaagaattatgtattcaatatatactcaattgt

SEQ ID NO: 27352 - protein, 356 aa, Triticum aestivum
ASKFAPSWLACSLSMPATAMELSSLPLVLLLCLMAGSSTAALPALPGMDRVRQQVDRANRHGPSIGLVMSYVAEDTALQASGYFRPWHVQPFIDLYGRRFHIGSIRGVNVIYALTGQRRLNAAVTVQTLVDVFTVSGIVHYGTAGSSNDSMSFGDVSVPKLVAYTGAWTWKKYKSLKEESTELNFGQFNVPNGGENLLGSLKYRNEELYSVGKPMEEVFWLPVDSAWFKIAEGLKVNLERCNDTFCLPKTPQVVHGLKGASADMFLDNAEYRKFLFREFAVSTIDEESAAVVMTTTSPGVPVIVFRGVSDLAGVEPTWSSTSLMNLASINALKVAVEFIATIGRQMSTPLAQSSKN

SEQ ID NO: 27353 - protein, 342 aa, Triticum aestivum
MPATAMELSSLPLVLLLCLMAGSSTAALPALPGMDRVRQQVDRANRHGPSIGLVMSYVAEDTALQASGYFRPWHVQPFIDLYGRRFHIGSIRGVNVIYALTGQRRLNAAVTVQTLVDVFTVSGIVHYGTAGSSNDSMSFGDVSVPKLVAYTGAWTWKKYKSLKEESTELNFGQFNVPNGGENLLGSLKYRNEELYSVGKPMEEVFWLPVDSAWFKIAEGLKVNLERCNDTFCLPKTPQVVHGLKGASADMFLDNAEYRKFLFREFAVSTIDEESAAVVMTTTSPGVPVIVFRGVSDLAGVEPTWSSTSLMNLASINALKVAVEFIATIGRQMSTPLAQSSKN

SEQ ID NO: 27354 - protein, 337 aa, Triticum aestivum
MELSSLPLVLLLCLMAGSSTAALPALPGMDRVRQQVDRANRHGPSIGLVMSYVAEDTALQASGYFRPWHVQPFIDLYGRRFHIGSIRGVNVIYALTGQRRLNAAVTVQTLVDVFTVSGIVHYGTAGSSNDSMSFGDVSVPKLVAYTGAWTWKKYKSLKEESTELNFGQFNVPNGGENLLGSLKYRNEELYSVGKPMEEVFWLPVDSAWFKIAEGLKVNLERCNDTFCLPKTPQVVHGLKGASADMFLDNAEYRKFLFREFAVSTIDEESAAVVMTTTSPGVPVIVFRGVSDLAGVEPTWSSTSLMNLASINALKVAVEFIATIGRQMSTPLAQSSKN

SEQ ID NO: 27355 - DNA, 885 bp, Triticum aestivum
ctaaacctcgcaaaaccctccgccccccgctccccactccctcgccgtacaccaccgccgaagagagcgcggagagacccaccccacggcgatgtcgacggcggcggctacggtgttccgcgggtgccgggccctcatgtccccggcggcggcggcggcaaaggggggcaagaagaccgcatcggcggcggcggcggcggcgaaggggggcaagaagcccgcgccggcggccgcgaagcccaaggcggccaagaagccggtggatccgaacaatctccgcgggatcatgcggccggtgccggtctcggacgccctgcgcaagttcggcggcgccgctcacatctcccgctccggcgtactcaagatcgtctgggactacatcaaggccaatgacctccagaacccactgaacaagagggagatcatctgcgacgagaagctcaaaaccatctttccagggagggacacggttcatatgatggaggtcaccaagctcttgtcccctcatttcgtgaagagtatctaaggctgtcgagttgggggccaacgctggtgctttctgcccagggccagcgttggaatggaaggcttcttttgcgatccctgtccaagtcaaggttctactaggtagttaagttaatacggagttcagacttcagactttgtttgccatttaagggttgggggctcggtgatgcatgtaagaaggattcctcgtgttttgtggttctctcgtgccatcctgcgagggcacacccacatgcacatgcatgttgacgtggttcggtgtttttagtctgttaattccactttgcccttgtcatgtatatcatgcttctctcttggttgcagtggatggtgaatttgtgataagcaggttgtggc

SEQ ID NO: 27356 - protein, 144 aa, Triticum aestivum
MSTAAATVFRGCRALMSPAAAAAKGGKKTASAAAAAAKGGKKPAPAAAKPKAAKKPVDPNNLRGIMRPVPVSDALRKFGGAAHISRSGVLKIVWDYIKANDLQNPLNKREIICDEKLKTIFPGRDTVHMMEVTKLLSPHFVKSI

SEQ ID NO: 27357 - protein, 135 aa, Triticum aestivum
KPRKTLRPPLPTPSPYTTAEESAERPTPRRCRRRRLRCSAGAGPSCPRRRRRQRGARRPHRRRRRRRRGARSPRRRPRSPRRPRSRWIRTISAGSCGRCRSRTPCASSAAPLTSPAPAYSRSSGTTSRPMTSRTH

SEQ ID NO: 27358 - protein, 130 aa, Triticum aestivum
LNLAKPSAPRSPLPRRTPPPKRARRDPPHGDVDGGGYGVPRVPGPHVPGGGGGKGGQEDRIGGGGGGEGGQEARAGGREAQGGQEAGGSEQSPRDHAAGAGLGRPAQVRRRRSHLPLRRTQDRLGLHQGQ

SEQ ID NO: 27359 - DNA, 1386 bp, Triticum aestivum
gaacatcctaatcgaaaaataggcctcttcttagaaaaaaaaagaggacagactaagcggagaatcgagggtttcggcttccttgtcatctcgccgtctccgacgccggcgaccagggagcgagacctccaacccccgtcctctcgccggctgcgtgtttccccgttccgtagaccaggtatgaagagggccgcgccgtcggaggagccggtggagctctcttccggcgacgacctgagctcggattccgacgatgaggccgggaacgggaaaggcgagaactccttccggctgcccatgtcctccaaatctgcagctccagcaaaaggtgcattgatcaggagggctgaaatgtatcaagagtacatgaagcacatcccaattcctgatcactgcagctccttgatcccatccacatcatggctgggactcggaagatcggtgaagcagttgtacgagcagcccttgcattacctcaccaacatcctcttgagacagtgggatcaacagagggttgggagcgataatgagcaccagcctctggatgctatcattcaccctatgaaagctcaagccctcatttgggccactgaagaagtccataggctgaccacctctagtgaccacttagagaaggtctgggctaaagaccccatgtatcatgctaacatagatccagtgttcccttccctaaagttgcattagcaaacatcgcaagttggaccgtcttatcctgtctattttgtttctgcctgctgtgtaatctggcacattttggttgttagcgaagtgatatgaaccatatatcactgatgttaaacgtacgatatgtcatggtcagggtctcttttaacgctgattttagctctctgaacagcgtctttgttgaagaagaagaaacctggtggtgtggatttcagtgctttgagccggcacgggtatcgtggcggaccatctatactgacagttgctcctccaaaggttgaacctaactggacttggtccactgggaaagatcgcaacgagaaggaagttctaaccgagtcttttgaagagcgggaacgcacaagggctgcagtaactgaaggagagaagcttatcggtgtgatgaacccccaaccaaggcagaccgagaaagagaaggatgctgcttcattctcacagaaggagaagcggaagagagaccgtgggcaggccagcaggggtaagaactacgtcgaggaggagaagcggctcctgagggggagtggtgtctactctggcttcgatacttgacagtgtccagaacatatgttatttgtccgtgttagcttccgtcgttactgttggtgtgtctgctgtttagttttgtcgcgaagttcactctggtcaatcggggctatgctt

SEQ ID NO: 27360 - protein, 234 aa, Triticum aestivum
EHPNRKIGLFLEKKRGQTKRRIEGFGFLVISPSPTPATRERDLQPPSSRRLRVSPFRRPGMKRAAPSEEPVELSSGDDLSSDSDDEAGNGKGENSFRLPMSSKSAAPAKGALIRRAEMYQEYMKHIPIPDHCSSLIPSTSWLGLGRSVKQLYEQPLHYLTNILLRQWDQQRVGSDNEHQPLDAIIHPMKAQALIWATEEVHRLTTSSDHLEKVWAKDPMYHANIDPVFPSLKLH

SEQ ID NO: 27361 - protein, 174 aa, Triticum aestivum
MKRAAPSEEPVELSSGDDLSSDSDDEAGNGKGENSFRLPMSSKSAAPAKGALIRRAEMYQEYMKHIPIPDHCSSLIPSTSWLGLGRSVKQLYEQPLHYLTNILLRQWDQQRVGSDNEHQPLDAIIHPMKAQALIWATEEVHRLTTSSDHLEKVWAKDPMYHANIDPVFPSLKLH

SEQ ID NO: 27362 - protein, 135 aa, Triticum aestivum
MSSKSAAPAKGALIRRAEMYQEYMKHIPIPDHCSSLIPSTSWLGLGRSVKQLYEQPLHYLTNILLRQWDQQRVGSDNEHQPLDAIIHPMKAQALIWATEEVHRLTTSSDHLEKVWAKDPMYHANIDPVFPSLKLH

SEQ ID NO: 27363 - DNA, 1184 bp, Triticum aestivum
  misc_feature (631)..(631): n is a, c, g, or t
accaccaccacaccacacttgctcgtctccctctgcccctccccttcctcctatagcaatcaaaccaccagctccactcccccctccccttcctccgtcctcaccctccccctcctgctactccccagttcatgtcctgctgcttcccatgtcgccgcctctcgagctcgactacataggcctctcggccgccgccggcggccgcccggacgacgacctgaaaggcaccgagctccgcctcggacttcccggctgcgagtcgcccgaccgccgcccggtcgccgccaccaccacactggagctgctgcccgccaagggggccaagcgagggttttcggacgaggtcgtgccgcctgcgccgatttccgccgccgggaaaggcaaggaggcgtccggggatgagaaggacaagaaggtcgccgccccgccgcagcctgctgccaaggctcaggtggtgggatggccaccagtccgcagctaccgcaagaacacgatggcaaccaccaccaaccagctgaagagcagcaaggaggattctgacacgaagcaggggcaagagtttctgtatgtcaaggtcagcatggatgggtgcgccttacctgaggaaggttgacctcaagacatacaaganctataaggacatggttgtggcgctagggaaaatgttcattggcttcaggaccgggaaggatggtgcatctgagaacagaaaggatggtgaatatgtgatgacttacgaagacaaggatggagactggatgctggttggtgacgtcccatgggagatgttcaccgaggcttgccggaggatcagggtcatgaaaagttcagatgtagttgggcttggagttacaagggcaggggttaagtccaagaataagaactaaaacggtcgctgcccacggtttgaagacgaggtcgcacatgccgtctgtactactgcatggttttcctatcccacaagtaaaatcacccgttactctaccgtttaagatttgcgacatctcctagagacttatgctctatattttgttgtgcccacgttgttgtacgcgtgttatttccatccgtgtaaatggttggtaagcagtgcgagagctactgctgtgtttgatgactcctatgtattttgccactcttgtcctgaaccggtcgttcgtcgtaaatgtgaaggttgcaagcct

SEQ ID NO: 27364 - protein, 203 aa, Triticum aestivum
PPPHHTCSSPSAPPLPPIAIKPPAPLPPPLPPSSPSPSCYSPVHVLLLPMSPPLELDYIGLSAAAGGRPDDDLKGTELRLGLPGCESPDRRPVAATTTLELLPAKGAKRGFSDEVVPPAPISAAGKGKEASGDEKDKKVAAPPQPAAKAQVVGWPPVRSYRKNTMATTTNQLKSSKEDSDTKQGQEFLYVKVSMDGCALPEEG

SEQ ID NO: 27365 - protein, 154 aa, Triticum aestivum
MSPPLELDYIGLSAAAGGRPDDDLKGTELRLGLPGCESPDRRPVAATTTLELLPAKGAKRGFSDEVVPPAPISAAGKGKEASGDEKDKKVAAPPQPAAKAQVVGWPPVRSYRKNTMATTTNQLKSSKEDSDTKQGQEFLYVKVSMDGCALPEEG

SEQ ID NO: 27366 - protein, 133 aa, Triticum aestivum
TTTTPHLLVSLCPSPSSYSNQTTSSTPPSPSSVLTLPLLLLPSSCPAASHVAASRARLHRPLGRRRRPPGRRPERHRAPPRTSRLRVARPPPGRRHHHTGAAARQGGQARVFGRGRAACADFRRRERQGGVRG

SEQ ID NO: 27367 - DNA, 1603 bp, Triticum aestivum
gtcgtataactcggggtccaatttgcaaagagacagacgcccgttcttttactgcgagacctccgcgctcgtgggcaacggcggcggcgatggcggcatcggcgagcacgtccggcgagtggctgaagggcgccctgcaggaactgaggggccgcacggggagcgccctggagctcgacgacggcctcatctccggcctcgtctccttctgcgagctcgcgcctccgcccgacgcggccgactacctcgcgaatattgttggagcagaagctgcgcaggacctcattcaggagtacttgcagaggaggggctacattgacccctcaaaaggagctggaagctcgcagtcgtctaatcttcagccttatttgaagccatctgctgatgcagcaactgcccaaacaaagaaacagacacgtacacaaaaagatccagcatcttcttctagtcagagttccaagagtcaatcagatgctgctgacacccatgctgcctccaagagaggtccaaaaaagaagggaggaaaggccatctcccttgctgaggcagcaaagggctctattgtcttcaagcaggggaaaccttgttcatgccaagcacggctgcacaatcttgttagcaactgtttatcatgtggaaaaattgtgtgtgaacaagagggcgagggaccatgtagtttctgtggctcacttgtcttgatggaaggtagtacatatgcgggtttaagtgatgttggagttcctctttcggacacagaagttgcagctgaagcttatgcaaagaggcttgttgactatgacagaaactctgcggcaagaactaaagtttatgatgaccaaagtgactattttgaaatggaaggaaatagctggctctcatctaaggaaaagacaaacctaaagaaggtgcacgacgaagctcaggatgcagctgaaaaacaaaaggggaaagtgacggtcacatttgatttggtgggccgtaaggtaattttgaacaaggacgaagccgcagagtcggaatctgaccaagggatcatgagaccactagaacagaagcatcaggttcaacgcatacagcccagcccctcgatcagagagcaaccagtcttcgttgaaacaggacctgtgaagccgagaaccgacagggtaaaacagagcaagaaactcggaaagaatggcttgtgcctggaggtaaccggaagggtgcagcatgatgacaaggatccccagagctttcttggtggcaagatgaagaagggtgatcatctcgcgtacagttcctccggtgaagttcgtgaaggtgatgactacgagtgctcccttgattttgattgagcgttactgcaaattttgatgcgctcgagtgccttcacattgtacttgcttatcccatttcatacgggttggattgtggtctggtcaagtttccagctagaggtattttggaaaggtttgcttcgggatcatatcattcaactaaagttgtcaggccgggtaggctttgagggtcttgaacatattaagtaaaagattaagcacggagcttaaaaaattatgatcctgaaaaaaaaaaaaaaaaaagcttatcgataccgtcgacctcg

SEQ ID NO: 27368 - protein, 443 aa, Triticum aestivum
RITRGPICKETDARSFTARPPRSWATAAAMAASASTSGEWLKGALQELRGRTGSALELDDGLISGLVSFCELAPPPDAADYLANIVGAEAAQDLIQEYLQRRGYIDPSKGAGSSQSSNLQPYLKPSADAATAQTKKQTRTQKDPASSSSQSSKSQSDAADTHAASKRGPKKKGGKAISLAEAAKGSIVFKQGKPCSCQARLHNLVSNCLSCGKIVCEQEGEGPCSFCGSLVLMEGSTYAGLSDVGVPLSDTEVAAEAYAKRLVDYDRNSAARTKVYDDQSDYFEMEGNSWLSSKEKTNLKKVHDEAQDAAEKQKGKVTVTFDLVGRKVILNKDEAAESESDQGIMRPLEQKHQVQRIQPSPSIREQPVFVETGPVKPRTDRVKQSKKLGKNGLCLEVTGRVQHDDKDPQSFLGGKMKKGDHLAYSSSGEVREGDDYECSLDFD

SEQ ID NO: 27369 - protein, 414 aa, Triticum aestivum
MAASASTSGEWLKGALQELRGRTGSALELDDGLISGLVSFCELAPPPDAADYLANIVGAEAAQDLIQEYLQRRGYIDPSKGAGSSQSSNLQPYLKPSADAATAQTKKQTRTQKDPASSSSQSSKSQSDAADTHAASKRGPKKKGGKAISLAEAAKGSIVFKQGKPCSCQARLHNLVSNCLSCGKIVCEQEGEGPCSFCGSLVLMEGSTYAGLSDVGVPLSDTEVAAEAYAKRLVDYDRNSAARTKVYDDQSDYFEMEGNSWLSSKEKTNLKKVHDEAQDAAEKQKGKVTVTFDLVGRKVILNKDEAAESESDQGIMRPLEQKHQVQRIQPSPSIREQPVFVETGPVKPRTDRVKQSKKLGKNGLCLEVTGRVQHDDKDPQSFLGGKMKKGDHLAYSSSGEVREGDDYECSLDFD

SEQ ID NO: 27370 - DNA, 1241 bp, Triticum aestivum
cgaaaaacccacagccacatttgtcctacttagagacccagctagatcaccatggcttcctcggctgctcgtctcctgcttgtcttcgcgacagctctggtgctgagctctgtgtctgcagcagcggtgggggctggtggctcgccgccgctggccaagggcctgtcgttcgagttctaccgcgccaggtgcccgcaggcggaggccatcgtcttcgccttcctcaaggacgccatccgcaaggacgtcggcctcgccgccgcgctcctccgcatccacttccacgactgcttcgtgcagggctgcgacggctccgtgctcctcgacaagaccaacggcgtcgacagcgagaaggtgtctcccccgaacgtcacgctgcgtccgtcggcgttcaaggccatcaacgccatccgcgcgctcctccagaaggcgtgcggcgggcccgtcgtctcctgcgccgacatcgccgcgctcgccgcccgcgactccgtccagctggccggcgggccgcggtacgccgtcccgctcggccgccgcgacgggctcgcccccgcttccctggacaccatcctgggcgcgctcccgccgccgacctccaaggtgcccgtgctcctcagcttcctcgccaagatcggcctcaacgccgacgacctggtggcgctctccggcgcgcacacgctcgggatcgcgcactgcggctccttcgaggagcggctgtttcccaaggtcgaccccaccatggacaagtttttcgccggccacctcaagctcacctgcccgcggctcaaggtggacaacttcaccgccaacgacatccgcacgcctgacgtgttcgacaacaagttctacgtcgacctgctcaaccggcagggtctcttcacctccgaccaggacctgcacaccgacgccaagaccaagcccatggtcaccaggttcgccgtcgaccaggccgccttcttcgaccagttcgtcaagtccatggtgaaaatggggcagatcaacgtgctcactggcaaccagggtcagatccgcacggactgctccattcccaacgccgcccgcagtgccggcgacgagctgccgtggtccgtcgtcgagaccgccgtggagagcttggtgttgtaggtagtagtagggtttagtccatggatctcaagcttgttttatgttttggcaaggtttggactttggaagtcagagtgcatgcgtgtttagtttgttgagcaagaccgaaccagttg

SEQ ID NO: 27371 - protein, 357 aa, Triticum aestivum
MASSAARLLLVFATALVLSSVSAAAVGAGGSPPLAKGLSFEFYRARCPQAEAIVFAFLKDAIRKDVGLAAALLRIHFHDCFVQGCDGSVLLDKTNGVDSEKVSPPNVTLRPSAFKAINAIRALLQKACGGPVVSCADIAALAARDSVQLAGGPRYAVPLGRRDGLAPASLDTILGALPPPTSKVPVLLSFLAKIGLNADDLVALSGAHTLGIAHCGSFEERLFPKVDPTMDKFFAGHLKLTCPRLKVDNFTANDIRTPDVFDNKFYVDLLNRQGLFTSDQDLHTDAKTKPMVTRFAVDQAAFFDQFVKSMVKMGQINVLTGNQGQIRTDCSIPNAARSAGDELPWSVVETAVESLVL

SEQ ID NO: 27372 - protein, 274 aa, Triticum aestivum
KNPQPHLSYLETQLDHHGFLGCSSPACLRDSSGAELCVCSSGGGWWLAAAGQGPVVRVLPRQVPAGGGHRLRLPQGRHPQGRRPRRRAPPHPLPRLLRAGLRRLRAPRQDQRRRQREGVSPERHAASVGVQGHQRHPRAPPEGVRRARRLLRRHRRARRPRLRPAGRRAAVRRPARPPRRARPRFPGHHPGRAPAADLQGARAPQLPRQDRPQRRRPGGALRRAHARDRALRLLRGAAVSQGRPHHGQVFRRPPQAHLPAAQGGQLHRQRHPHA

SEQ ID NO: 27373 - DNA, 1382 bp, Triticum aestivum
aaagatccccaaacccatcaaacctttgcgtgccccccgctccactcccctctcccctcccctcactgcgtgcgcactgcggccacagcgcgctccggatcggcggatctcgtcgggcggcggccgccacgatgatgagcagcgtctcccctccggcgccgtcgctcccctccgggggtggaagcttcttcagagggtacacgaagctctgcaagggcctcgccgtcatattgcttctcgtgcacctcttggtccagctgttcccatcggccgtcaactatctcgcgcttatccctgcaaggacaatccctttcgcctggaacttgataactgctggctatgtcgagcaaaccattccaggggtgattatcagcatcattggtcttcttttatttgggaaattattagagcctttatggggcacaaaggagttatcaaagttcgtttttattgtcaacttctcaacttcaatgtgtgtcttcgtaactgctattgctgtgtactacgtaacacaacaagagagctacctctacactcctctttctggtttctatggggttctgtcaggattgctggtgggcatcaagcaacttatgccagagttggagcttaatcttttcgtgctgaagattaagggaaagtggatcccatcacttattgcactgatctccgttgttgtaagcttcttcatgaaggacttggtatcttacctcccagttatactgtttggcatttatatgagttggatttacctgcgttacttccaaaagaggctagagacaggcctgaaaggggatccaagcgaggagttctctttctcaagtttcttccctgcaattctgagaccagttctggatccaatagccacaatattccataggcttctttgtggaagatctgatagggcagaccggggtcagacattggaaacgtcatcattgccgggttcagattctactgaggcaaacaggaggagggaaaggggtcaaagggcactggagcaaagattggctgagaagctggccgcggtcaagagtacagagagcacgtctctcgacgcatccgacaaagtttgagccttctacaaagacgacctgccaaatgttgtgaattcccggtgctgcgttacccaagtgacgttgtctggaggacaagggagcatcgttggttcggccgcgagcttctaggggaggtggtgatgcgagaatgtgtgattttactgatttagggaaccatatgccgaactgtgcaatgatagcatcatgtttgttagcacaatttagccgcgcactgactgctgagagtttttcgcttttcatttttgaggcccagccagaggctttccttgagcatgaatgagttgccgcattggtttgtttgtc

SEQ ID NO: 27374 - protein, 357 aa, Triticum aestivum
RSPNPSNLCVPPAPLPSPLPSLRAHCGHSALRIGGSRRAAAATMMSSVSPPAPSLPSGGGSFFRGYTKLCKGLAVILLLVHLLVQLFPSAVNYLALIPARTIPFAWNLITAGYVEQTIPGVIISIIGLLLFGKLLEPLWGTKELSKFVFIVNFSTSMCVFVTAIAVYYVTQQESYLYTPLSGFYGVLSGLLVGIKQLMPELELNLFVLKIKGKWIPSLIALISVVVSFFMKDLVSYLPVILFGIYMSWIYLRYFQKRLETGLKGDPSEEFSFSSFFPAILRPVLDPIATIFHRLLCGRSDRADRGQTLETSSLPGSDSTEANRRRERGQRALEQRLAEKLAAVKSTESTSLDASDKV

SEQ ID NO: 27375 - protein, 314 aa, Triticum aestivum
MMSSVSPPAPSLPSGGGSFFRGYTKLCKGLAVILLLVHLLVQLFPSAVNYLALIPARTIPFAWNLITAGYVEQTIPGVIISIIGLLLFGKLLEPLWGTKELSKFVFIVNFSTSMCVFVTAIAVYYVTQQESYLYTPLSGFYGVLSGLLVGIKQLMPELELNLFVLKIKGKWIPSLIALISVVVSFFMKDLVSYLPVILFGIYMSWIYLRYFQKRLETGLKGDPSEEFSFSSFFPAILRPVLDPIATIFHRLLCGRSDRADRGQTLETSSLPGSDSTEANRRRERGQRALEQRLAEKLAAVKSTESTSLDASDKV

SEQ ID NO: 27376 - protein, 313 aa, Triticum aestivum
MSSVSPPAPSLPSGGGSFFRGYTKLCKGLAVILLLVHLLVQLFPSAVNYLALIPARTIPFAWNLITAGYVEQTIPGVIISIIGLLLFGKLLEPLWGTKELSKFVFIVNFSTSMCVFVTAIAVYYVTQQESYLYTPLSGFYGVLSGLLVGIKQLMPELELNLFVLKIKGKWIPSLIALISVVVSFFMKDLVSYLPVILFGIYMSWIYLRYFQKRLETGLKGDPSEEFSFSSFFPAILRPVLDPIATIFHRLLCGRSDRADRGQTLETSSLPGSDSTEANRRRERGQRALEQRLAEKLAAVKSTESTSLDASDKV

SEQ ID NO: 27377 - DNA, 1655 bp, Triticum aestivum
ctagaacatcctaatcaaaaattgttccttctcccttgcttccatcttcctttgtatgcagccttcatgcatgactgactgtctaactagctcgagcagtagagctagtgcatgacgtgatggctccaacctccctgcagaggccgaggaagccgaggtgcccctcccaccccatgctctctctctcccctgccctcctctccctcctcctcgtccccttcctctacctcctcatccaccgttccgcgtgctccccgcccttcagcaacctcacgaccgccaggcgctcatcctcgagcgtgagcggcttcgccggagaccttcgtgacatcgagttctcgtggaaccacctgccgttcatgtcgtcgaagccaccccccgccaagctcaagatcgccgtgttctcgcggaagtggcccgtggccacggcccctggcggcatggagcggcacgcgcacacgctgcacacggcgctcgccgcgcggggccaccgcgtccacgtgttcacctcacctccgccgcataccgaggccgcgccctcgcccaccgccgatgggcctcagctgcatttccttgacggcacccccggccagtggcggtgcgacgaggcatggaagctgtacgaggccgagggcgacaacgatccgttcgacgtcatccactccgagagcgtggcggtgttccaccggtacgcgcgcggcgtgcccaacctggtcgtgtcgtggcacggaatctccctggaggcgctgcactcgggcatctaccaggacctcgcccgcggcgaggacgagcccatgtcgccggcgttcaaccagagcctgtcgcagtcggtgcaccgggtgctgtccgaggtgcgcttcttccggagctacgcgcaccaggtggccatcagcgactccaccagggagatgctccgcgacgtgtaccagatccccggccgccgcgtgcacgtaatcctgaacggcgtggacgaggcgcagttcactccggacacggagctcggccgcgccttccgggaagagatcgggctccccaagagcgccgacctcgtgctcggcgtgtccgggaggctcgtcaaggacaagggccaccctctgctctacgaggccttctccaagctcgccctccgccacccgaacgtgtacctcctggtcgccggcaaggggccgtgggagtcgaggtacatggacctgggacgcaacgccaaggtgcttggcgcggtgccgcccgggaagctcagggcgttctacaacgcgctggacgtgttcgtggacccgacgctgcggccgcagggcctggacctgacgctcatggaggcgatgcaatgcggcaagccggtggtggccacgcggttcccgagcatcaagggaagcatcgtggtggacgaggagttcggccacatgttcgcgcccaacgtggagtcgctgctagagagtctggaggcggtggtgcaggatggcgcccggcgcgccgcggagcgcggccgcgcgtgcagggagtacgccaggtccatgttcgcggccaccaagatggcactagcgtacgagaggctcttcctttgtgtcaaaaacgagaccttctgcatgtacccctctgaatttgattagttttctcgggagcctgtgcacttgcttagtgatttatggcacactaat

SEQ ID NO: 27378 - protein, 495 aa, Triticum aestivum
MAPTSLQRPRKPRCPSHPMLSLSPALLSLLLVPFLYLLIHRSACSPPFSNLTTARRSSSSVSGFAGDLRDIEFSWNHLPFMSSKPPPAKLKIAVFSRKWPVATAPGGMERHAHTLHTALAARGHRVHVFTSPPPHTEAAPSPTADGPQLHFLDGTPGQWRCDEAWKLYEAEGDNDPFDVIHSESVAVFHRYARGVPNLVVSWHGISLEALHSGIYQDLARGEDEPMSPAFNQSLSQSVHRVLSEVRFFRSYAHQVAISDSTREMLRDVYQIPGRRVHVILNGVDEAQFTPDTELGRAFREEIGLPKSADLVLGVSGRLVKDKGHPLLYEAFSKLALRHPNVYLLVAGKGPWESRYMDLGRNAKVLGAVPPGKLRAFYNALDVFVDPTLRPQGLDLTLMEAMQCGKPVVATRFPSIKGSIVVDEEFGHMFAPNVESLLESLEAVVQDGARRAAERGRACREYARSMFAATKMALAYERLFLCVKNETFCMYPSEFD

SEQ ID NO: 27379 - protein, 477 aa, Triticum aestivum
MLSLSPALLSLLLVPFLYLLIHRSACSPPFSNLTTARRSSSSVSGFAGDLRDIEFSWNHLPFMSSKPPPAKLKIAVFSRKWPVATAPGGMERHAHTLHTALAARGHRVHVFTSPPPHTEAAPSPTADGPQLHFLDGTPGQWRCDEAWKLYEAEGDNDPFDVIHSESVAVFHRYARGVPNLVVSWHGISLEALHSGIYQDLARGEDEPMSPAFNQSLSQSVHRVLSEVRFFRSYAHQVAISDSTREMLRDVYQIPGRRVHVILNGVDEAQFTPDTELGRAFREEIGLPKSADLVLGVSGRLVKDKGHPLLYEAFSKLALRHPNVYLLVAGKGPWESRYMDLGRNAKVLGAVPPGKLRAFYNALDVFVDPTLRPQGLDLTLMEAMQCGKPVVATRFPSIKGSIVVDEEFGHMFAPNVESLLESLEAVVQDGARRAAERGRACREYARSMFAATKMALAYERLFLCVKNETFCMYPSEFD

SEQ ID NO: 27380 - protein, 415 aa, Triticum aestivum
MSSKPPPAKLKIAVFSRKWPVATAPGGMERHAHTLHTALAARGHRVHVFTSPPPHTEAAPSPTADGPQLHFLDGTPGQWRCDEAWKLYEAEGDNDPFDVIHSESVAVFHRYARGVPNLVVSWHGISLEALHSGIYQDLARGEDEPMSPAFNQSLSQSVHRVLSEVRFFRSYAHQVAISDSTREMLRDVYQIPGRRVHVILNGVDEAQFTPDTELGRAFREEIGLPKSADLVLGVSGRLVKDKGHPLLYEAFSKLALRHPNVYLLVAGKGPWESRYMDLGRNAKVLGAVPPGKLRAFYNALDVFVDPTLRPQGLDLTLMEAMQCGKPVVATRFPSIKGSIVVDEEFGHMFAPNVESLLESLEAVVQDGARRAAERGRACREYARSMFAATKMALAYERLFLCVKNETFCMYPSEFD

SEQ ID NO: 27381 - DNA, 900 bp, Triticum aestivum
atcgaactgttcttctgctggtcatttatatccgtcatccgactcgatccttatcgaaatttgtgggattgtaggacaatggcggaaggcaagaaggatgctccgaagctgaaccagcggatggtatcatctctctcgaagcgaactgctgcggcacattcttggcatgatctggagataggacctgaagcccctctaatcttcaatgccgttgttgagatcacaaaggggagcaaagtcaagtatgaacttgacaagaagactgggatgataaaggttgacaggattctgtactcgtccgtagtctacccacataactacggtttcgtaccacggacgctgtgtgaagatggagatccaattgacgtcttggtcctgatgcaggaaccagtcatacctggttgctttcttcgagctaaggctattgggcttatgcccatgattgatcagggtgagaaagatgataagctcattgctgtttgcgttgatgatcccgagtaccgtcatctcaacgaccttaaggagctctctccccaccgccttgctgaaatccgtcgcttcttcgaagattacaagaagaatgagaacaaggaggttgctgtgaacgacttcttgccaccggagactgcacaggccgccattaagcactccatggacctatatgcagaatatatactgcagagtctgaagaactaatcgtggtagcaaacttgcaaggctgcagaaaccacccacatggtctcgtaagaggacaataatcgactacatggcttttatttaagggcccatttttctatatatttaaataatgggaaatgctattcccatacgtatttttctgcagaacattgtaatcaaggactaatgttatacttgtgcatagtgtttcataatatttgg

SEQ ID NO: 27382 - protein, 231 aa, Triticum aestivum
IELFFCWSFISVIRLDPYRNLWDCRTMAEGKKDAPKLNQRMVSSLSKRTAAAHSWHDLEIGPEAPLIFNAVVEITKGSKVKYELDKKTGMIKVDRILYSSVVYPHNYGFVPRTLCEDGDPIDVLVLMQEPVIPGCFLRAKAIGLMPMIDQGEKDDKLIAVCVDDPEYRHLNDLKELSPHRLAEIRRFFEDYKKNENKEVAVNDFLPPETAQAAIKHSMDLYAEYILQSLKN

SEQ ID NO: 27383 - protein, 205 aa, Triticum aestivum
MAEGKKDAPKLNQRMVSSLSKRTAAAHSWHDLEIGPEAPLIFNAVVEITKGSKVKYELDKKTGMIKVDRILYSSVVYPHNYGFVPRTLCEDGDPIDVLVLMQEPVIPGCFLRAKAIGLMPMIDQGEKDDKLIAVCVDDPEYRHLNDLKELSPHRLAEIRRFFEDYKKNENKEVAVNDFLPPETAQAAIKHSMDLYAEYILQSLKN

SEQ ID NO: 27384 - protein, 191 aa, Triticum aestivum
MVSSLSKRTAAAHSWHDLEIGPEAPLIFNAVVEITKGSKVKYELDKKTGMIKVDRILYSSVVYPHNYGFVPRTLCEDGDPIDVLVLMQEPVIPGCFLRAKAIGLMPMIDQGEKDDKLIAVCVDDPEYRHLNDLKELSPHRLAEIRRFFEDYKKNENKEVAVNDFLPPETAQAAIKHSMDLYAEYILQSLKN

SEQ ID NO: 27385 - DNA, 1116 bp, Triticum aestivum
gagatctcgacttgggaactctcacaagaagacgccgagaggagaggagaggatgctgctgaggagctcctccacgccattcctgcgctccttcctcacctcctcctcctcccctacgcccccttcctccctccagctccggcgggccttctccgacggccacctcccttcgctcaacccctcctcctccggcgacaacgacagcaacagaaccaccggcctccacaccgagctctccttctctgtctacaacaccttcagcaaggccaagctggagccccaccaggagcaggagatggaggaggagcaggagcaggcgccgcagcctgagctgccggagctgccgctgttcctggcgaggggcatggggatcgaccgcctcgcctccggcctcttcaccgccggcatgggctccgaggctgccctggccaggatggccagcggggtggaccagaaggcggtgctggcgctggacgcccagtacaaggagatggtggacgagcagcccggcaacgccctgttcctacgcaactacgcgcagttcctgcacgaggtgaagtgtgactcgagaagggcggaggagtactactcgcgcgcgatgctcgccgacccaaccgacggcgagatcatgtcgcagtacgcgaagctggtgtgggcggtgcaccgcgaccacgaaaggtccctcacctacttccagaagtcggtgcaggcggccccgcgggacagccacgtcctcgcggcgtacgccagcttcctgtgggagcaggacgaggacgaggacgacgacggtggtcttgggggaggcgagcagggatcacccgggcgtgctacgcagccgaggcagctggcttccacggccgtttgactaccagggtggccgagatgggctaacgatgtgcttgctgaggatgatcatgcttgtagtattgtgtttccgtgtaacctgcaaaatgtttggacggtcgaggtgcgtgcacttgctacagaataaagaacgtaaacggttgagggaatggaaggctggacctgtaaacattggtgattccgtctgcagatgctaagttgtcactatgtttattggctaaattataggagtactaagggggtgtttgttcc

SEQ ID NO: 27386 - protein, 287 aa, Triticum aestivum
RSRLGNSHKKTPRGEERMLLRSSSTPFLRSFLTSSSSPTPPSSLQLRRAFSDGHLPSLNPSSSGDNDSNRTTGLHTELSFSVYNTFSKAKLEPHQEQEMEEEQEQAPQPELPELPLFLARGMGIDRLASGLFTAGMGSEAALARMASGVDQKAVLALDAQYKEMVDEQPGNALFLRNYAQFLHEVKCDSRRAEEYYSRAMLADPTDGEIMSQYAKLVWAVHRDHERSLTYFQKSVQAAPRDSHVLAAYASFLWEQDEDEDDDGGLGGGEQGSPGRATQPRQLASTAV

SEQ ID NO: 27387 - protein, 270 aa, Triticum aestivum
MLLRSSSTPFLRSFLTSSSSPTPPSSLQLRRAFSDGHLPSLNPSSSGDNDSNRTTGLHTELSFSVYNTFSKAKLEPHQEQEMEEEQEQAPQPELPELPLFLARGMGIDRLASGLFTAGMGSEAALARMASGVDQKAVLALDAQYKEMVDEQPGNALFLRNYAQFLHEVKCDSRRAEEYYSRAMLADPTDGEIMSQYAKLVWAVHRDHERSLTYFQKSVQAAPRDSHVLAAYASFLWEQDEDEDDDGGLGGGEQGSPGRATQPRQLASTAV

SEQ ID NO: 27388 - protein, 189 aa, Triticum aestivum
MEEEQEQAPQPELPELPLFLARGMGIDRLASGLFTAGMGSEAALARMASGVDQKAVLALDAQYKEMVDEQPGNALFLRNYAQFLHEVKCDSRRAEEYYSRAMLADPTDGEIMSQYAKLVWAVHRDHERSLTYFQKSVQAAPRDSHVLAAYASFLWEQDEDEDDDGGLGGGEQGSPGRATQPRQLASTAV

SEQ ID NO: 27389 - DNA, 749 bp, Triticum aestivum
tctttttgttctctccggcgagggaaatgagcagcgagacgagcaagcgagatcatgcactggagctcctggccgccgacaggaagctgatgaccgtggcccgttcggcgcgacggcgtcggctggagctccggcggctaggccgtacggcttctgcggccgcggaggacgagggtgcgaagcgggtgcggccggcgctggacaactcctcggactcgtctgactccgcgaaggtggcgccgaagccccccttggtggcgtctaggtgttcggcgtgcgtgtcgcacggggctgtgtccgtgatcgggcgccggcgagagatggaggacgcggtggccgtcgcggcgccgttcctggccgagacggcggcggtggaggggagcggcgacgtggagtacggggcaggggaagagggcttcttcgcggtgtacgacgggcacggcgggtcgcgcgtggcggaggcgtgccggctgcggatgcacctggtgctcgcggaggaggtgcggcttcgtcgtctgcagccctggggcggagggcagggtcggaccgaggacggcgaggacggcgcgcggtggaaggaggccatgacggcctgctttgcccgggtggacggcgaggtcggcgtcgacgacgggaccgacgccggcgagcagacggtgggctccacggccctcgtggccgtcgtgggcctgcgccgcatcgtcgtcgcgaactgcggcgactcccgcgccgtgctctcccgcggcggc

SEQ ID NO: 27390 - protein, 249 aa, Triticum aestivum
FLFSPAREMSSETSKRDHALELLAADRKLMTVARSARRRRLELRRLGRTASAAAEDEGAKRVRPALDNSSDSSDSAKVAPKPPLVASRCSACVSHGAVSVIGRRREMEDAVAVAAPFLAETAAVEGSGDVEYGAGEEGFFAVYDGHGGSRVAEACRLRMHLVLAEEVRLRRLQPWGGGQGRTEDGEDGARWKEAMTACFARVDGEVGVDDGTDAGEQTVGSTALVAVVGLRRIVVANCGDSRAVLSRGG

SEQ ID NO: 27391 - protein, 241 aa, Triticum aestivum
MSSETSKRDHALELLAADRKLMTVARSARRRRLELRRLGRTASAAAEDEGAKRVRPALDNSSDSSDSAKVAPKPPLVASRCSACVSHGAVSVIGRRREMEDAVAVAAPFLAETAAVEGSGDVEYGAGEEGFFAVYDGHGGSRVAEACRLRMHLVLAEEVRLRRLQPWGGGQGRTEDGEDGARWKEAMTACFARVDGEVGVDDGTDAGEQTVGSTALVAVVGLRRIVVANCGDSRAVLSRGG

SEQ ID NO: 27392 - protein, 220 aa, Triticum aestivum
MTVARSARRRRLELRRLGRTASAAAEDEGAKRVRPALDNSSDSSDSAKVAPKPPLVASRCSACVSHGAVSVIGRRREMEDAVAVAAPFLAETAAVEGSGDVEYGAGEEGFFAVYDGHGGSRVAEACRLRMHLVLAEEVRLRRLQPWGGGQGRTEDGEDGARWKEAMTACFARVDGEVGVDDGTDAGEQTVGSTALVAVVGLRRIVVANCGDSRAVLSRGG

SEQ ID NO: 27393 - DNA, 1568 bp, Triticum aestivum
ctccgtcgtcgccaaaagcatcgcgacacccagaaacggccacgaaccgagagcaagcgagcgagcgagggagcgagtcagccatccgtccgtccgtcggccatggcactagtggacgcgctgtgcgcctccagcgtcgacaatgcggcgctcgtctacagcaccttcaacgccgcgggcttcctcttcgacaatgccgcgggcttctacgacgacaccggcattgccggtggcccggcgcttgcgttgcaggcggccgacagagcgccggggctgtccgccgcgggtgacgtggcgccgtgcctggagaagcaggccacgttgtcgcccgcgccgccgaggaggaagcggcgtcggcgggcgaggagctgcaagtcgagggaggagaccgagtgccagcgcatgacccacatcgccgtggagcgcaaccgccggcgacagatgaacgagtacctcgtcgtgctccgctccctcatgccggagtcctacgtccagaggggtgaccaggcatcgatcgtcggaggggcgatagatttcgtcaaggagctggagcagcagctgcagtccctggaggcgcagaagcgggcgctggctcaccagcagcagcacaaggcaggacgcgacgcggcgccgctgccgacggccatgccggcgcgcgccagcaccagcggcggcattggcaacgcgtgcgtggagtcgacgagcaactgcagcagcagcgtgaccgaggcggacggcgctcccgacgcgccgccgttcgcggggttcttcacgtacccgcagtacgtgtggcgccagtcgccgcgcgacgccacgacgctgtcggcggacgagagccgcgccggggtggccgacatcgaggtgaccctggtggagacgcacgccagcctccgcgtcatggcgccgcggcggcccggccagctgctccgcatggtcgccggcctgcaggcgctccgtctcaccgtgctgcacctcaacgtcaccgcgctcgactccctggccctctactccctcagcctcaaggtggaggaggggtgtggcctgacgacggcggacgacatcgcggcggcagtgcaccatgtgctctgcttcatccacgcggaggcggaggcggcgccgcagcagctgctcgcgccggcgcagtaggcaacgatggccgcggcggccggagggttaagccgcagccctcgtatatgtatgtactcgggcagctaggtagtgtatgccattttaaggattattaaggacgagtcatgtaatttaacccgtcggatctactgggcttagatgttgtcgacggcgcacgtcgcgctgccgctttctggcaagtctatccagtgtgatgtggcggcctagtgtaccgtagtactagattcagatgcatgcgttttcgcaataggcgagtcgtttcagtttctcaaaaacaagtcttgctatgtgctactgattattttcagtctatgccactgatcaagtgctggccatttcggttaaccttctgtcaggagatctacgttcagcatgtaaattcatcgtttgtttctgcctatgcattccagttgtactgt

SEQ ID NO: 27394 - protein, 381 aa, Triticum aestivum
LRRRQKHRDTQKRPRTESKRASEGASQPSVRPSAMALVDALCASSVDNAALVYSTFNAAGFLFDNAAGFYDDTGIAGGPALALQAADRAPGLSAAGDVAPCLEKQATLSPAPPRRKRRRRARSCKSREETECQRMTHIAVERNRRRQMNEYLVVLRSLMPESYVQRGDQASIVGGAIDFVKELEQQLQSLEAQKRALAHQQQHKAGRDAAPLPTAMPARASTSGGIGNACVESTSNCSSSVTEADGAPDAPPFAGFFTYPQYVWRQSPRDATTLSADESRAGVADIEVTLVETHASLRVMAPRRPGQLLRMVAGLQALRLTVLHLNVTALDSLALYSLSLKVEEGCGLTTADDIAAAVHHVLCFIHAEAEAAPQQLLAPAQ

SEQ ID NO: 27395 - protein, 347 aa, Triticum aestivum
MALVDALCASSVDNAALVYSTFNAAGFLFDNAAGFYDDTGIAGGPALALQAADRAPGLSAAGDVAPCLEKQATLSPAPPRRKRRRRARSCKSREETECQRMTHIAVERNRRRQMNEYLVVLRSLMPESYVQRGDQASIVGGAIDFVKELEQQLQSLEAQKRALAHQQQHKAGRDAAPLPTAMPARASTSGGIGNACVESTSNCSSSVTEADGAPDAPPFAGFFTYPQYVWRQSPRDATTLSADESRAGVADIEVTLVETHASLRVMAPRRPGQLLRMVAGLQALRLTVLHLNVTALDSLALYSLSLKVEEGCGLTTADDIAAAVHHVLCFIHAEAEAAPQQLLAPAQ

SEQ ID NO: 27396 - protein, 247 aa, Triticum aestivum
MTHIAVERNRRRQMNEYLVVLRSLMPESYVQRGDQASIVGGAIDFVKELEQQLQSLEAQKRALAHQQQHKAGRDAAPLPTAMPARASTSGGIGNACVESTSNCSSSVTEADGAPDAPPFAGFFTYPQYVWRQSPRDATTLSADESRAGVADIEVTLVETHASLRVMAPRRPGQLLRMVAGLQALRLTVLHLNVTALDSLALYSLSLKVEEGCGLTTADDIAAAVHHVLCFIHAEAEAAPQQLLAPAQ

SEQ ID NO: 27397 - DNA, 700 bp, Triticum aestivum
ggaaaataaaggctaagtggatgccattctttgtcatgtgcttctcaactatcatggccttcattgtgccggattccatcaacttcctgccgactttgttgtctgggatgtacgtcagctggctttacctgagatacttccagaagaacccactgacaggacttaagggcgacccaagtgatgacttctccttccccagcttgttcccagatgccatgcggccagtcacagacccagttgctaatctgttcgaccggatgttgtgtgcgaggtctaagccttcagaaattgccctcccagttaccgatcctaccaaggcatcgagaagaagggagcgtggcgagagggttctcgaggaaaggatggccgcggatcatgcggctgacgccgaagccccagctcactctgcggaagattaagaattttcccctgtgctacgtcgtcatagtggccacggtcgccttgtaactcctcggatttgtgttctggggagcatattcatttttacagtggaccgatgatatgataatactttactgcccctcttttgtttccttgttttgagaatattggttggttaaattgtgttgtagttcctgattacagtgaggaaagaagaaaaagggtggcatccccttgcccccgatgttgtaatgtagaaaaagaatgacttgtcagtaacaatgtgaagtattttttc

SEQ ID NO: 27398 - protein, 138 aa, Triticum aestivum
KIKAKWMPFFVMCFSTIMAFIVPDSINFLPTLLSGMYVSWLYLRYFQKNPLTGLKGDPSDDFSFPSLFPDAMRPVTDPVANLFDRMLCARSKPSEIALPVTDPTKASRRRERGERVLEERMAADHAADAEAPAHSAED

SEQ ID NO: 27399 - protein, 132 aa, Triticum aestivum
MPFFVMCFSTIMAFIVPDSINFLPTLLSGMYVSWLYLRYFQKNPLTGLKGDPSDDFSFPSLFPDAMRPVTDPVANLFDRMLCARSKPSEIALPVTDPTKASRRRERGERVLEERMAADHAADAEAPAHSAED

SEQ ID NO: 27400 - protein, 127 aa, Triticum aestivum
MCFSTIMAFIVPDSINFLPTLLSGMYVSWLYLRYFQKNPLTGLKGDPSDDFSFPSLFPDAMRPVTDPVANLFDRMLCARSKPSEIALPVTDPTKASRRRERGERVLEERMAADHAADAEAPAHSAED

SEQ ID NO: 27401 - DNA, 1133 bp, Triticum aestivum
tgcttcgtccagcataacccccaaaaccacctcacccgacagaacaggcggcggcggcggcggaatcgggcgagatgatcaagaggcgctacttcaggcaagaccacggcgacaatagcgcctcctcgtcctcctcctcttcgggttctgattcggaccgcgaccccgcggaagaagaggtctcggaggaggaagtagaaggggagcaagaaaaagaagaagaagatgatgatgaagaagcggaggtggagtcgggggaagaacaggaaaaggaagtagatgagcaggccgaagatgagggttcaggataccaaagtgaggacagctctggacatcatgttgatagtccttgtgcaggtttactttcagatgagaacagcagtctggtgtatgaacaataccaagcaatcaggttgcctgctaagaaagcatcaagtggtgatgctgattctgccgaaggtgctgttaacaaggatgacactgttgaggtcgatttcaataactacattctgaagtgcaaatctgtgtataagtgcaagctttgtcccagaatcatgtgcttaagtgaggagatggtcagggtacatcttgaatcaaagagacatgctcgatcaaagaaactactgggagaaggtaggcttaagatggtgctcaacagtgatggtgagctggaggaagaggcagagacacatgctgaacgacatgcccgaactatagctcttgctcagcaagtacaaaagcccaagaaggattcaggcaggcagcgacaaaatcggagaagacagaagaggtcgcagaatcgtctcaaggacaaagatcagagacacagctctggaaaggaaggtgcaaggccgaacaatggaactgctgataagaaaatgccgaatgttgaaactgctgctaagaaaatgccgaatcttgaaactgctgctaagaaaaggcgcaagactgaaaaataagtcggtgctgcagaaatatttcttgcgtgtcatttcttcctatattgttgtaatttttaggagctttctgcggttttactgtttctggtttgcttctttaagtgtagttcatgaaagctgagagattaaattgaaaggaaagacgacaactagaaagtggacatttaatcgtgc

SEQ ID NO: 27402 - protein, 294 aa, Triticum aestivum
MIKRRYFRQDHGDNSASSSSSSSGSDSDRDPAEEEVSEEEVEGEQEKEEEDDDEEAEVESGEEQEKEVDEQAEDEGSGYQSEDSSGHHVDSPCAGLLSDENSSLVYEQYQAIRLPAKKASSGDADSAEGAVNKDDTVEVDFNNYILKCKSVYKCKLCPRIMCLSEEMVRVHLESKRHARSKKLLGEGRLKMVLNSDGELEEEAETHAERHARTIALAQQVQKPKKDSGRQRQNRRRQKRSQNRLKDKDQRHSSGKEGARPNNGTADKKMPNVETAAKKMPNLETAAKKRRKTEK

SEQ ID NO: 27403 - DNA, 1391 bp, Triticum aestivum
tacctatcttttctgttagaccattcgacgccacgtccgcgcgcgtcacggcgcagcgagcagcccggccggccggccgattataaaacctcagtgcgagcaggtgctccactcgcactgccactccacccgttacctctgctactcgaacttcattcgcggatcagatcagatcagatcaccatgggctcctacgttcagggtgaggatgaagttcccgtctatgaatcgggtgcacatgccctgcagaagctgcaagagaaatggaagtccacggcggcgccgtacccggccatgtactcgagcttcttgggcgggatcatcctggacccggccatgatggccctccccatcgacgaccacatggcccaccgcggccacggcgtcttcgacacggccatgctcctcgacggccacctctacgagctcgacgcgcacctcgaccgcttcctgcgctccgcggcgcaggccaaggtgggcaccccgttcccgcgcgacacgctgcgcagcatcctcgtgcagatgacggcggcgtccggctgccggaagggctccatccggtactggctgagctccggcccgggcgacttcctgctctcctccagcggctgtcccggcccggccttctacgccgtggcgatcccgtccgactacgcgcagtgccgcgacggcgtgcgcgccgtgaccacgtcggtgcccatgaagccgccgctgttcgccaccatgaagaacgtcaactacctcccctaatgtgctgtccatcatggacgccgaggagcgcggcgcgttcgcgtccgtgtgggtggacgagcaggggtacgtcgccgaggggcccatggtgaacgtcgccttcgtcacccagggcggcgagctcgtgctccctgtgttcgacaagatcctcagcgggtgcacagccaagcggatgctggcgctggcgccgaagctcgtggaggctggcctgctcaagggcgtcagcacccagcacatcaccgccgacgacgccaagcgctccgtggagatggcctttgtcggcagcggcctgcccgtgctgcccatcgtcgagtgggacggccagcccatcggcgacgggaaggtggggaagctgatgctggcgctgtccgatctgctctgggaggacatgaagtccgggccggacagggtcgccgttccatacaagtgatccaggggaagggaacgctagagagatggcgtgtgcatgcgcaagcacgggcacgttcgtgcgtgtacaagatagtgtgtgagccgagccgcaatttgttgcccgtactgtttgtcacttgacttgtcaagccctgtataactgtggtatgtgtgtgccggatggatgactcaccaaataaataatactacgatcttgggtctttcgcggt

SEQ ID NO: 27404 - protein, 249 aa, Triticum aestivum
YLSFLLDHSTPRPRASRRSEQPGRPADYKTSVRAGAPLALPLHPLPLLLELHSRIRSDQITMGSYVQGEDEVPVYESGAHALQKLQEKWKSTAAPYPAMYSSFLGGIILDPAMMALPIDDHMAHRGHGVFDTAMLLDGHLYELDAHLDRFLRSAAQAKVGTPFPRDTLRSILVQMTAASGCRKGSIRYWLSSGPGDFLLSSSGCPGPAFYAVAIPSDYAQCRDGVRAVTTSVPMKPPLFATMKNVNYLP

SEQ ID NO: 27405 - protein, 192 aa, Triticum aestivum
MEVHGGAVPGHVLELLGRDHPGPGHDGPPHRRPHGPPRPRRLRHGHAPRRPPLRARRAPRPLPALRGAGQGGHPVPARHAAQHPRADDGGVRLPEGLHPVLAELRPGRLPALLQRLSRPGLLRRGDPVRLRAVPRRRARRDHVGAHEAAAVRHHEERQLPPLMCCPSWTPRSAARSRPCGWTSRGTSPRGPW

SEQ ID NO: 27406 - protein, 188 aa, Triticum aestivum
MGSYVQGEDEVPVYESGAHALQKLQEKWKSTAAPYPAMYSSFLGGIILDPAMMALPIDDHMAHRGHGVFDTAMLLDGHLYELDAHLDRFLRSAAQAKVGTPFPRDTLRSILVQMTAASGCRKGSIRYWLSSGPGDFLLSSSGCPGPAFYAVAIPSDYAQCRDGVRAVTTSVPMKPPLFATMKNVNYLP

SEQ ID NO: 27407 - DNA, 1659 bp, Triticum aestivum
ctcccccctacgcacctcttgccaccgccgcagcacatccccgaaagctaggtttttatcactccacctatcatcatcgcctcggcggccgcacaacccaccctccccctcgaagccccgatctccttcacttctcctctccgtgccagatcgttgtttatgagctcgaaggagaagcccaccctcggaggccagcggattaagacccgcaagcggaatatcgcagctcctttggacccttcgtcgttctctgatgcaattgtccagatttatctggataatgctggagacctggaacttgttgccaaaagtatagagtcatcagatctcaacttctcacgttacggtgacactttctttgaggttgttttcattggtgtgcgtactcagcctggtacgattaaacccgaagaagagggagagcgccacccctattctctcattgactgtgcagcacaacgtgaagcaatattaccttatgtcctctttattcagaaaacactgcgcaggaggcctttcttaataaagagtcttgaaaatgttatgcgaaaatttctccagtctttggagttctttgaagaaaatgagagacaaaaacttgccattttcacggcacttgcattttctcagaaattatcaggtctgccacctgaaactgtctttcagccattgcttaaggacaatcttgttgccaaagggatagtgctttcattcattactgagttcttcaaggaatatctgaaggaaaatagtttggatgatctgattgcacttttaaagaaaggcaaaatggaggacaatttacttgaattttttccatcaggaaagagaacctctgaggctttgtctgagcatttcaccaaagaaggtttgactagccttgttgagtacaatagcaagaaaatgtttgaagttaagctcaaggagataaagtcaactctgaccactatgatcaatgaagaagctgaaatatctgaagtaactgaggttgtcaagcaacaggttaaagatgctaaatttcctgatatagaggttgttcgcatgctgtgggatgtgctgatggaggctgttcagtggtctggaaagaaccagcagcaaaattctaattcagcacttaggcaggtgaatgcttgggctggtcttatgaatgcattttgcacaagtggaaagctagaactggaactcatatacaaggtccagacacaatgttatgaggatgctaagttgatgaagctgttccctgaaattataagatcactgtatgatcaagatgtcctagctgaagataccatacttctttggttccgcaagggttcaaaccaaaaaggaaggcaatctttcgtgaaagctctggagcctttcgtcaaatggcttgaggaggcagaggaggaagaataaagaggcacggttgttgctttaaaatgagtatttccttataccccatgtttgcggagacggtggtcatccttttgctgcttattactgaacaaacattttatattcagatgtgagcattgctgtcatctgctatcattttcgacattattgtaccaggatttggaaggatcgttacctactttgtgttgtgtattagttgttacatggatatttatgcagagtgcacgtttaagaagaggcaaactcaagtttataactgcc

SEQ ID NO: 27408 - protein, 412 aa, Triticum aestivum
MSSKEKPTLGGQRIKTRKRNIAAPLDPSSFSDAIVQIYLDNAGDLELVAKSIESSDLNFSRYGDTFFEVVFIGVRTQPGTIKPEEEGERHPYSLIDCAAQREAILPYVLFIQKTLRRRPFLIKSLENVMRKFLQSLEFFEENERQKLAIFTALAFSQKLSGLPPETVFQPLLKDNLVAKGIVLSFITEFFKEYLKENSLDDLIALLKKGKMEDNLLEFFPSGKRTSEALSEHFTKEGLTSLVEYNSKKMFEVKLKEIKSTLTTMINEEAEISEVTEVVKQQVKDAKFPDIEVVRMLWDVLMEAVQWSGKNQQQNSNSALRQVNAWAGLMNAFCTSGKLELELIYKVQTQCYEDAKLMKLFPEIIRSLYDQDVLAEDTILLWFRKGSNQKGRQSFVKALEPFVKWLEEAEEEE

SEQ ID NO: 27409 - protein, 284 aa, Triticum aestivum
MRKFLQSLEFFEENERQKLAIFTALAFSQKLSGLPPETVFQPLLKDNLVAKGIVLSFITEFFKEYLKENSLDDLIALLKKGKMEDNLLEFFPSGKRTSEALSEHFTKEGLTSLVEYNSKKMFEVKLKEIKSTLTTMINEEAEISEVTEVVKQQVKDAKFPDIEVVRMLWDVLMEAVQWSGKNQQQNSNSALRQVNAWAGLMNAFCTSGKLELELIYKVQTQCYEDAKLMKLFPEIIRSLYDQDVLAEDTILLWFRKGSNQKGRQSFVKALEPFVKWLEEAEEEE

SEQ ID NO: 27410 - DNA, 1280 bp, Triticum aestivum
aattcccctcccctctccaggtctcctcccgaaacccccaattcgaaaatcgatttggggatttcggcgtcccagatccgctcctccggccggttcgctcggccgcacgtccgatccgcgttcgcggccgccgtcggagctgctgaccggcccgcggctcgattcgtccgggggatttgttgcgggggctctcgcttgctcccgatggcgtcgtccccggtctcctactggtgctaccactgcagccgcttcgtgcgggtctccccggccaccgtcgtctgccccgactgcgacggcggcttcctcgagcagttcccgcagcctccgccgccgcgcggcggcggcggcagcggccggcgcggggccatgaacccggtgatcgtgctgcggggcggctcgctctccggcttcgagctctactacgaggacggctccggcgacgggctgcggccgctgcccggcgacgtctcgcacctcctcatggggtcggggttccaccgcctgctcgaccagttctcgaggctggaggctgccgccccgcgcccgccggcgtccaaggccgcggtggagtcgatgccgtccgtgacggtcgccgggggaggcggggcccactgcgcggtgtgccaggaggccttcgagcccggcgccgcggctcgggagatgccgtgcaagcacgtctaccaccaggactgcatcctcccctggctctccctccgcaactcctgccccatctgccgcagcgagcttccggcggcagccgtgcctgaggcggaggcggatgccgggctcaccatctggcgactcccccgcggcggattcgccgttggaaggttcgccggcgggcccagagagcaactgccggttgtctacacggagctggatggtggtttcagcaacggcgtcgggccgaggcgggtgacatggccagaaggagaagggcaggtggacggcggcgaaggtcggattcgccgtgtatttaggaacctgtttgggtgctttggccggggcggccggcctgagagttcctcgcagtcccgtagtggctgagcaatgttcttcctggtaactcactttcaattgatgatagtggtgaataagtaggagttagtataaggaggaaaccccaggtggtgagttattggttagtttgatgtaaatgaagggcttgcattccccaccttttgtctcgtttttaaaaaaaaaaaaaaaaaaaaaaaaaaaaaaaaaaaaaaaagaaaaaaaaaaaaaaaaaagcttatcgataccgtcgacctcgaggg

SEQ ID NO: 27411 - protein, 348 aa, Triticum aestivum
NSPPLSRSPPETPNSKIDLGISASQIRSSGRFARPHVRSAFAAAVGAADRPAARFVRGICCGGSRLLPMASSPVSYWCYHCSRFVRVSPATVVCPDCDGGFLEQFPQPPPPRGGGGSGRRGAMNPVIVLRGGSLSGFELYYEDGSGDGLRPLPGDVSHLLMGSGFHRLLDQFSRLEAAAPRPPASKAAVESMPSVTVAGGGGAHCAVCQEAFEPGAAAREMPCKHVYHQDCILPWLSLRNSCPICRSELPAAAVPEAEADAGLTIWRLPRGGFAVGRFAGGPREQLPVVYTELDGGFSNGVGPRRVTWPEGEGQVDGGEGRIRRVFRNLFGCFGRGGRPESSSQSRSG

SEQ ID NO: 27412 - protein, 280 aa, Triticum aestivum
MASSPVSYWCYHCSRFVRVSPATVVCPDCDGGFLEQFPQPPPPRGGGGSGRRGAMNPVIVLRGGSLSGFELYYEDGSGDGLRPLPGDVSHLLMGSGFHRLLDQFSRLEAAAPRPPASKAAVESMPSVTVAGGGGAHCAVCQEAFEPGAAAREMPCKHVYHQDCILPWLSLRNSCPICRSELPAAAVPEAEADAGLTIWRLPRGGFAVGRFAGGPREQLPVVYTELDGGFSNGVGPRRVTWPEGEGQVDGGEGRIRRVFRNLFGCFGRGGRPESSSQSRSG

SEQ ID NO: 27413 - protein, 226 aa, Triticum aestivum
MNPVIVLRGGSLSGFELYYEDGSGDGLRPLPGDVSHLLMGSGFHRLLDQFSRLEAAAPRPPASKAAVESMPSVTVAGGGGAHCAVCQEAFEPGAAAREMPCKHVYHQDCILPWLSLRNSCPICRSELPAAAVPEAEADAGLTIWRLPRGGFAVGRFAGGPREQLPVVYTELDGGFSNGVGPRRVTWPEGEGQVDGGEGRIRRVFRNLFGCFGRGGRPESSSQSRSG

SEQ ID NO: 27414 - DNA, 1359 bp, Triticum aestivum
taatcgaaaaatttggtctgttgttagttcgatcgttctcattcaggtccttgaaacggcatggatgcttttctcgcatgcccggatcacagcccggcggccgggcggtcgctgacgccggcgcgcggcgctcccgcctcgtccccggcgctcatctcggccgtccaggacctgtacgagttcatctgcagcggcccactggtggaaaggattggctacacccgggagaggatcgccgagtccatcgaccggtggctgtggtgcggctcgcaggtgagccggttgttccgcatcgacgagctccggctgacggacgccgagaagtcgaggatataccacttctacatacccgtcttcctctggtgcgaggaccaggtcgccgaccacaggtccaagtacaacgacggcgacgagatcccgccattagtgattggagtcagcgctccccaaggcagcgggaagacaactcttgttttcgctcttgattatctttttcgggtttctggtaggaactctgccacattgtctatcgatgacttctatttgactgcagcagaacagggtaaactgagggaaacacatgctggaaatgctcttttagagtttcgtggaaatgccggaagccacgatctccaattctcaattgacacacttgagtcactgatcaaactaacaaaggaaggtacgaagatgaagcttccacggtatgacaagtccgcttttggtggaagaggtgaccgagctgacccttcgacatggccagaggttgaagggcctacagaggttgttctctttgaaggatggatgcttgggtttaaacctcttccaaatgaagttgtaacagcagtggatcctcagcttgaggtgattaataagaacctagaagcatactatgacgcgtgggacagattcattgagtcatggattgtcataaaaattaaggagcctaactgtgtatttcagtggagactacaggcagaggtagctatgagagctgatggtaaagcaggaatgtctgacgaggaggttatggattttgtatcgcgctacctaccagcataccatgcctatttgcccacgctatataaagaaggaccaaatggcgcgaagaaagaccatctgctggtcattgacatagacgaagagaggactcctatatctggtagttgagtgctgagtgtacattctgaaatggatatcttgacttggtggttgagcttgggatttctgatctttctgagaccacttctgccaagcaagcaccaccgtcctcttgtttcttacagcttaaatatatcctaaacgtgtaaattcgatgtatatcaatttttgctatctatttaaagaaactggcatccc

SEQ ID NO: 27415 - protein, 369 aa, Triticum aestivum
MDAFLACPDHSPAAGRSLTPARGAPASSPALISAVQDLYEFICSGPLVERIGYTRERIAESIDRWLWCGSQVSRLFRIDELRLTDAEKSRIYHFYIPVFLWCEDQVADHRSKYNDGDEIPPLVIGVSAPQGSGKTTLVFALDYLFRVSGRNSATLSIDDFYLTAAEQGKLRETHAGNALLEFRGNAGSHDLQFSIDTLESLIKLTKEGTKMKLPRYDKSAFGGRGDRADPSTWPEVEGPTEVVLFEGWMLGFKPLPNEVVTAVDPQLEVINKNLEAYYDAWDRFIESWIVIKIKEPNCVFQWRLQAEVAMRADGKAGMSDEEVMDFVSRYLPAYHAYLPTLYKEGPNGAKKDHLLVIDIDEERTPISGS

SEQ ID NO: 27416 - DNA, 1694 bp, Triticum aestivum
aaaacagaggcaccaaaatacaatctacgtacgtgcaaagttcagtgaaaccttgagttgacagacaccacaccaacaatggccggagcagcaaacgatctgaagctactgggcatgtgggcgagcccgtacgtcctgcgggtgcgccttgctctcagcatcaagagcatcagctacgagtacgcagaggaggacctccggcacaagagcgagctgctcctgcggtcaaaccccgtccacgatggtctgtttagttacaaggcaacctttgaagcatttgttggggtgcgggatgacgttgcaacttctcaagttaaactctttggtgatcaactcgaggatttggagaaaaatcttccattggacaatatttacaaatcagacaatgtatctgctgctccaattcgcgtgatgaatcttctttacaactctggggatgtgaaaggtcctcaaactatagctttcaatttgccaaatgatgagcggattgtgaatgagcgaggaacttcaatggttatgcttaagaacatttcagaagccaagttcaagaatatcttgaagcctatagccaatgcctgcatcagagaggagcagaaagaatatgttgattttgagccttattatacacatattgtttgccatgagtgctgccatggaattggacctcattccataacccttcctggtggtaaaaagtccacagttagaatggaacttcaagaatgtcattcagcattggaggaggcaaaagctgatatagttggtctgtgggcgctgaattttcttataaacaaggggttgcttcctaagagtctatcaaaatctatgtatgtttctttcctggctggatgctttcggtcaattcgcttcgggctggaagaagctcatgggaagggacaggcattgcagtttaattggttgtatgacaaaggagcttttatcttgcattctgacgggaaattctcaattgactttacaaaggttgaggaagctgttgaaagccttggcagagagatcatgacgatacaggcaaagggcgacaagcctgctgcgcagtctctccttcagtcgcgtgcaaccttgacgcagccattgcgtgtggcattggagaaaatcgaacacatgcaggtgcctgttgatatagccccgatatttggcacagccagtaagctgctcgcaaacaattaagcaccggaggacagcgattcagaaagttttgtgtctcccattgtacctgataaactacaaattgatttttttacgtgaaaaagtacaaattgttgaaacaagatgaagcaccatcctgagccgacacaaatggaaaataacacaaataaatgaatgatttcttaaaaggatggctgttaacatcactgcctaaatggatgaacttctaaaggatcactgttagcatcactgtctatttaccaaggtgtttttagaaagcgatgtctactgtaatctttgaacatattcactcaggaactaggagcggagactatcagaattctgctgaacttttgcggttttgccgcgctgaaggtcatcttgtgcttatatatatcagaatgttggtacacatggttcgttccttgtgagtgaatgctgcaaatatatgccccactctgatcggacccaattcaacgtttcaaacttgtaacgttacttcatacagaaacatgctctttcatctt

SEQ ID NO: 27417 - protein, 369 aa, Triticum aestivum
MAGAANDLKLLGMWASPYVLRVRLALSIKSISYEYAEEDLRHKSELLLRSNPVHDGLFSYKATFEAFVGVRDDVATSQVKLFGDQLEDLEKNLPLDNIYKSDNVSAAPIRVMNLLYNSGDVKGPQTIAFNLPNDERIVNERGTSMVMLKNISEAKFKNILKPIANACIREEQKEYVDFEPYYTHIVCHECCHGIGPHSITLPGGKKSTVRMELQECHSALEEAKADIVGLWALNFLINKGLLPKSLSKSMYVSFLAGCFRSIRFGLEEAHGKGQALQFNWLYDKGAFILHSDGKFSIDFTKVEEAVESLGREIMTIQAKGDKPAAQSLLQSRATLTQPLRVALEKIEHMQVPVDIAPIFGTASKLLANN

SEQ ID NO: 27418 - protein, 357 aa, Triticum aestivum
MWASPYVLRVRLALSIKSISYEYAEEDLRHKSELLLRSNPVHDGLFSYKATFEAFVGVRDDVATSQVKLFGDQLEDLEKNLPLDNIYKSDNVSAAPIRVMNLLYNSGDVKGPQTIAFNLPNDERIVNERGTSMVMLKNISEAKFKNILKPIANACIREEQKEYVDFEPYYTHIVCHECCHGIGPHSITLPGGKKSTVRMELQECHSALEEAKADIVGLWALNFLINKGLLPKSLSKSMYVSFLAGCFRSIRFGLEEAHGKGQALQFNWLYDKGAFILHSDGKFSIDFTKVEEAVESLGREIMTIQAKGDKPAAQSLLQSRATLTQPLRVALEKIEHMQVPVDIAPIFGTASKLLANN

SEQ ID NO: 27419 - protein, 258 aa, Triticum aestivum
MNLLYNSGDVKGPQTIAFNLPNDERIVNERGTSMVMLKNISEAKFKNILKPIANACIREEQKEYVDFEPYYTHIVCHECCHGIGPHSITLPGGKKSTVRMELQECHSALEEAKADIVGLWALNFLINKGLLPKSLSKSMYVSFLAGCFRSIRFGLEEAHGKGQALQFNWLYDKGAFILHSDGKFSIDFTKVEEAVESLGREIMTIQAKGDKPAAQSLLQSRATLTQPLRVALEKIEHMQVPVDIAPIFGTASKLLANN

SEQ ID NO: 27420 - DNA, 847 bp, Triticum aestivum
agtggaagatttgatcatcgcgttccaggagagcagagcgggctgagcgattcggatcgctctccaccttccgccgccgtcccccttcctccccccgatccccaatccaatggtgctggtcctagcgctgggggatctgcacatcccgcaccgtgcgcccgacctgcccgccaagttcaagtccatgctcgtcccgggcaagatccagcacatcatctgcaccgggaacctctgcatcaaggaagttcacgactaccttaaaagcctctgtcctgatctccacattaccagaggtgaatatgatgaggatgctcgctacccagagactaaaacagttactattggtcagttcaagctagggctatgccatggccatcaggttgttccatggggcgacctggactccctagcgatgctccagaggcagctggatgtggacatcctcgtcaccgggcacacccatcagttcaaggcctacaagcacgaggggggtgtcgtcatcaaccctggctcaggcacgggcgcccacagcagcatcacatatgacgtcaacccgagctttgtgctcatggacatcgatggcctccgtgttgttgtctacgtgtacgagctcattgacggcgaggtgaaggttgaccagatcgacttcaagaagaccgccacgatgcatggctgatggtgcttacgcatgacagaaatctgatcctgtttgttcttaccccccacccccactccacaccacaccaccaccaccacaatttccccgacctggagctctttttcctttgtacccttctgctcgatatgaaaaactagagctgtgtatacatattagtgaatgggatat

SEQ ID NO: 27421 - protein, 188 aa, Triticum aestivum
MVLVLALGDLHIPHRAPDLPAKFKSMLVPGKIQHIICTGNLCIKEVHDYLKSLCPDLHITRGEYDEDARYPETKTVTIGQFKLGLCHGHQVVPWGDLDSLAMLQRQLDVDILVTGHTHQFKAYKHEGGVVINPGSGTGAHSSITYDVNPSFVLMDIDGLRVVVYVYELIDGEVKVDQIDFKKTATMHG

SEQ ID NO: 27422 - protein, 163 aa, Triticum aestivum
MLVPGKIQHIICTGNLCIKEVHDYLKSLCPDLHITRGEYDEDARYPETKTVTIGQFKLGLCHGHQVVPWGDLDSLAMLQRQLDVDILVTGHTHQFKAYKHEGGVVINPGSGTGAHSSITYDVNPSFVLMDIDGLRVVVYVYELIDGEVKVDQIDFKKTATMHG

SEQ ID NO: 27423 - DNA, 1364 bp, Triticum aestivum
agcatattcgtacgcgaccctgccgggaaagcggcttcccatctgcgggaagcggaaagaggaccggcttcgaagacggcggaggcgactcttgggtcgcgtcgtctccaatcttccactctgaccgactcccgaccgatctccgccggagcccgcacgacgccgtcgccgatggggttcgccgcccggccgctccccctgctcctgctgctcctggtcgccggcgcggccgccaccgaccagatcttcaccacctcaggtgtgccgttcgggaagaactcgcgcgagccgaggtaccgcgtggagttccaccccgtcgattcgccataccacccggagaatggccaggagtctgaaccaatgactgaccacgaggggagacagtacacctgctacctaccagtggaagaaaccaagaccatgaagtcgattgtcccacagaatgcaaccaatgttataatagaaagcgaacggaaagttaagccaaaggagccagatgaactgctggaggttctcaaagaccagtgcttctacaggcatgaaggttggtggtcttatgagttctgctattatgggaaaatccgacaggttcatgtagagaatgagaaggttatccaagagtatgttctaggtgaatatgaccctgatgcaaccgatgcttaccatgacaatcacacctccgaatctgctgatgaggaccacgtgaaagatacttctaagaggtatcatgtccacgtgtacacaaacgggactgtgtgtgatctcacagatataccacggtacacagaggttaggtttgtttgttccgagcccactgtactgatcagttcgataaaggagatatcttcctgcaagtatgttttaactgtccaaagcccaatgctctgcaagaacccgttgtttcagcaggaaaagcgcaccttcttcatccactgcaacgagtcgcttgcggaagcagaagctgaggccgccgaggacgacgactctctcccaaaagaagctcagatgtccatcgttccaaaccccgacgaattgcataactacgcagcttacgctacctgattgcccgccaatcacggtgccctcagctgatgaaagatgccgttattttggaagtacaacagcaagttggcaacatagtataactatcccctggcttgttctgtctgacgccaactagtggttacagggtactctttgagcagatatccattactgaaacagcttgagattaccttagaggaagattaagggcaaagagtgtcctgctgtactgtagtggtatataatttagtaaagggggtatttgagattcagtgacaggctttagacacatcaccaacaattttcctcttgaaatgttc

SEQ ID NO: 27424 - protein, 353 aa, Triticum aestivum
SIFVRDPAGKAASHLREAERGPASKTAEATLGSRRLQSSTLTDSRPISAGARTTPSPMGFAARPLPLLLLLLVAGAAATDQIFTTSGVPFGKNSREPRYRVEFHPVDSPYHPENGQESEPMTDHEGRQYTCYLPVEETKTMKSIVPQNATNVIIESERKVKPKEPDELLEVLKDQCFYRHEGWWSYEFCYYGKIRQVHVENEKVIQEYVLGEYDPDATDAYHDNHTSESADEDHVKDTSKRYHVHVYTNGTVCDLTDIPRYTEVRFVCSEPTVLISSIKEISSCKYVLTVQSPMLCKNPLFQQEKRTFFIHCNESLAEAEAEAAEDDDSLPKEAQMSIVPNPDELHNYAAYAT

SEQ ID NO: 27425 - protein, 296 aa, Triticum aestivum
MGFAARPLPLLLLLLVAGAAATDQIFTTSGVPFGKNSREPRYRVEFHPVDSPYHPENGQESEPMTDHEGRQYTCYLPVEETKTMKSIVPQNATNVIIESERKVKPKEPDELLEVLKDQCFYRHEGWWSYEFCYYGKIRQVHVENEKVIQEYVLGEYDPDATDAYHDNHTSESADEDHVKDTSKRYHVHVYTNGTVCDLTDIPRYTEVRFVCSEPTVLISSIKEISSCKYVLTVQSPMLCKNPLFQQEKRTFFIHCNESLAEAEAEAAEDDDSLPKEAQMSIVPNPDELHNYAAYAT

SEQ ID NO: 27426 - protein, 233 aa, Triticum aestivum
MTDHEGRQYTCYLPVEETKTMKSIVPQNATNVIIESERKVKPKEPDELLEVLKDQCFYRHEGWWSYEFCYYGKIRQVHVENEKVIQEYVLGEYDPDATDAYHDNHTSESADEDHVKDTSKRYHVHVYTNGTVCDLTDIPRYTEVRFVCSEPTVLISSIKEISSCKYVLTVQSPMLCKNPLFQQEKRTFFIHCNESLAEAEAEAAEDDDSLPKEAQMSIVPNPDELHNYAAYAT

SEQ ID NO: 27427 - DNA, 827 bp, Triticum aestivum
cccaagtaagcaaagcagccaggtcggacccaatcaaacccaaagaaagcaagaactttccccggccgtccatggccacctaccccctcctcctcctcttcgccgccgtcgccgtagccgtagcggcggcgtcgtccgcgggggacaagccaacggcgtacgagatgctggagcggtacgacttcccgcggggcatcctgccggagggggtggaggggtacgagctcgatccggacggcggcttccaggtgtacttcccgcgggagtgcgagttcctgctagcgaagcagtggctggtcaagtacgacacgcgcatcgccggcgccgccagcgcgggcaagctcgcggcgctgcagggcatctacgtcaaggtactcttcctgtggatccccgtcgccgaggtcgaccgcgccggcgaccgcctcagcttctacatcggccccgtctccacgtccttcccgctaagcgacttcgccagcagcccgcactgtcgcggctaccacgaccgcgccgccgtcgctgcggccgtctcgtgaatcatatgctttttacatgtactcctacttagctactgctgctggggggaaatagtatatttcacatggaaaactctattgatacggcctgattatttgaacaagacgcacaagagtcattgtttcaattaaccttctgtgccgtggtggttcgtggatatcacaatgagctctatacgattccagtttagcttgagagccaatgttggcgtttcgcaggagccagcgtttatctagaattttcttgagatgtactggtatgtatttatagatcacagattagtttatggt

SEQ ID NO: 27428 - protein, 188 aa, Triticum aestivum
PSKQSSQVGPNQTQRKQELSPAVHGHLPPPPPLRRRRRSRSGGVVRGGQANGVRDAGAVRLPAGHPAGGGGGVRARSGRRLPGVLPAGVRVPASEAVAGQVRHAHRRRRQRGQARGAAGHLRQGTLPVDPRRRGRPRRRPPQLLHRPRLHVLPAKRLRQQPALSRLPRPRRRRCGRLVNHMLFTCTPT

SEQ ID NO: 27429 - protein, 177 aa, Triticum aestivum
QVSKAARSDPIKPKESKNFPRPSMATYPLLLLFAAVAVAVAAASSAGDKPTAYEMLERYDFPRGILPEGVEGYELDPDGGFQVYFPRECEFLLAKQWLVKYDTRIAGAASAGKLAALQGIYVKVLFLWIPVAEVDRAGDRLSFYIGPVSTSFPLSDFASSPHCRGYHDRAAVAAAVS

SEQ ID NO: 27430 - protein, 154 aa, Triticum aestivum
MATYPLLLLFAAVAVAVAAASSAGDKPTAYEMLERYDFPRGILPEGVEGYELDPDGGFQVYFPRECEFLLAKQWLVKYDTRIAGAASAGKLAALQGIYVKVLFLWIPVAEVDRAGDRLSFYIGPVSTSFPLSDFASSPHCRGYHDRAAVAAAVS

SEQ ID NO: 27431 - DNA, 1592 bp, Triticum aestivum
attctcgctcgcgccaccgttccccatatcccctcgccgccgccgccgccgccggcggcgtccgccgcgccaccacggcgccatgctccggctacgtggctgcgtcctcacccagctcctctcgtcttcctccgcctctcccgtgtcccatctccgccgcctcctctccgccgcagcgcccgccatctccccaagcatcgggttcgccgtggaggactacctcgtccgtacctgcggcctcacccgaccacaggccgccaaggcctcccccaagctctcccacctcaagtctcccgccaagcccgacgccgtgctcgccttcctcgccggcctcggcctctccgccgccgacgtcgccgccgtcgtcgccaaggacccgctgctactctgcgccaaagtggagaagatcctggcccccgtcgtcgacgggctcaccgggcctcggcctctcgcgtcctcagatcgcgcacctcgtctcggtcgccggcgagaagttccgctgcagagccatcatcgacaggctgcactactacctggccctcttcggctcctccgggaagctcctccgggttctcgaccgcagcccctacatcctctcctccaacctcgagagggtggtcaagcccaacgccgtgttcctgagggagtgcaggataggtgcttgtgatattgccaagctgtgtgtcgctcagccgaggatgctcacctccaatgtggagcgcgtccgggcgatggcggcaagcgccgaaggcctaggtgtgccccgtggctccaggatgttctggcgcatgctgaatgcccttgcgtttctccgcgagaaggatatcaccgccaaagtggagtacttgaaggacactttcagatggtccgatgctgaggtgggcattgctctttgtaaggccctgatggtgctggcgttgtccaaggacctgctgcagaggaagttggagttcctgatctctgaggtggggttggaaccggcatacattgctcatcggccgacagtgcccacttacagcctggagggccgactaaggccccggtactacactttgaagtttcttaaggaaaatggattgctagatcatgaccgagactactattgtgcagtcatgctgcgagaggaggtattcatggagaagttcatatgcccctacaaggaagctgcaccacaactcgctgaagactatgcagcagcttgcaaaggggaagtgccggctagattcagatttacatgaaccaaggcctgtacgaaaatttcataaccgggtatgacacaacagaagtttcactctccgcatcaagccgctcattcctgattcaatgttgttggcctaaacttaatggtggttggctgctatctacaatctatagcatgtatgttacgttctcatttggtggtgctaatccaggatgaaactgatattttgatttgtgagccttggtatgctcgttatgtcattcagtaggaagaaagcattgcgctgctattaacttgcccctcctcatgttattgacacatatattggaactaagagagtgtgagatcacggcatcctaccaatgctttgaagtgagtagtatttctgtgc

SEQ ID NO: 27432 - protein, 411 aa, Triticum aestivum
SRSRHRSPYPLAAAAAAGGVRRATTAPCSGYVAASSPSSSRLPPPLPCPISAASSPPQRPPSPQASGSPWRTTSSVPAASPDHRPPRPPPSSPTSSLPPSPTPCSPSSPASASPPPTSPPSSPRTRCYSAPKWRRSWPPSSTGSPGLGLSRPQIAHLVSVAGEKFRCRAIIDRLHYYLALFGSSGKLLRVLDRSPYILSSNLERVVKPNAVFLRECRIGACDIAKLCVAQPRMLTSNVERVRAMAASAEGLGVPRGSRMFWRMLNALAFLREKDITAKVEYLKDTFRWSDAEVGIALCKALMVLALSKDLLQRKLEFLISEVGLEPAYIAHRPTVPTYSLEGRLRPRYYTLKFLKENGLLDHDRDYYCAVMLREEVFMEKFICPYKEAAPQLAEDYAAACKGEVPARFRFT

SEQ ID NO: 27433 - protein, 221 aa, Triticum aestivum
FSLAPPFPISPRRRRRRRRRPPRHHGAMLRLRGCVLTQLLSSSSASPVSHLRRLLSAAAPAISPSIGFAVEDYLVRTCGLTRPQAAKASPKLSHLKSPAKPDAVLAFLAGLGLSAADVAAVVAKDPLLLCAKVEKILAPVVDGLTGPRPLASSDRAPRLGRRREVPLQSHHRQAALLPGPLRLLREAPPGSRPQPLHPLLQPREGGQAQRRVPEGVQDRCL

SEQ ID NO: 27434 - protein, 213 aa, Triticum aestivum
ILARATVPHIPSPPPPPPAASAAPPRRHAPATWLRPHPAPLVFLRLSRVPSPPPPLRRSARHLPKHRVRRGGLPRPYLRPHPTTGRQGLPQALPPQVSRQARRRARLPRRPRPLRRRRRRRRRQGPAATLRQSGEDPGPRRRRAHRASASRVLRSRTSSRSPARSSAAEPSSTGCTTTWPSSAPPGSSSGFSTAAPTSSPPTSRGWSSPTPCS

SEQ ID NO: 27435 - DNA, 1366 bp, Triticum aestivum
cgaaaacattatcgttgtgcagtcgacgctcactgtaccgtccttgcgagggtgagcaacagtaccagctaagctagctagctacagcgtacggtggccatggcgagcagcagcagcagcagcctggccggtctggcggtgctgctcaccgccgtgctgtgcctgcagctgccgatccacagccgcgcgcagctgcgcgtggggttctacaacaccacctgccccaacgccgaggccatcgtccggcaggccgtcacggccgccttcgctaccaactccggcgtcgccgccggcctcatccgcctccacttccacgactgcttcgtcgagggctgtcattcctcggtgctcctgtccgtcaaccccggcggaggcacgccggagcgtgacgcggcaccgaacaacccgagcctgcgtggcttcgcggtcgtcgacgccgccagggccgcattggagcagagctgcccgcgcacggtgtcatgcgccgacatcctggccttcgccgcccgggacagcgtgaacatcaccggcagcaacgccttctaccaggtcccttccggccgccgcgacgggaacctctcgacccaggccggcgcgttcaccctcccggggccgaacctgacggcggacggcctcgtcagcgggttccaggacagggggctcaccgccgaagacatggtggtcctgtccggctcccacaccctgggccgctcccactgcaactccttcatcgtgaggaaccgggagcggctggcgagcggcaccatcggcccggcgtaccaggcgctgctggaggcgctgtgcccggcgaacacgagccagttcaccaacgtgacgacggagatcgacctgagcacgccggtggtgctggacaacaactactacaagctggtgcagctcaacctgggcctgcacttctccgacgaccagctcatccgcaacgccaccctcaagggcttcgtcgacaccttcgccgccaacgagacgctgtggaaggagaagttcatcgccgccatgatcaagatgggcaacatcgcccccaagaccggcacgcaaggggagatccgcctcaactgcagcatcgtcaacccgtcctccacctcttcgtccggttacgatggggcgatccagatgctccgccgcccgggctccgacgataaggtcgcctcgggctgatgtacagtatgtgcgcagagtaacgtgtgtggtgttggcacgtccttgctgcgtatgcgtatgcacgggcgtgctggccggtcggtgtccgttcgcacctacacttgtgatgaatgatgaagaataaacgaaaaaaaaaaaaaaaaaagcttatcgataccgtcgacctgtttaaacacaataaagtggg

SEQ ID NO: 27436 - protein, 358 aa, Triticum aestivum
MASSSSSSLAGLAVLLTAVLCLQLPIHSRAQLRVGFYNTTCPNAEAIVRQAVTAAFATNSGVAAGLIRLHFHDCFVEGCHSSVLLSVNPGGGTPERDAAPNNPSLRGFAVVDAARAALEQSCPRTVSCADILAFAARDSVNITGSNAFYQVPSGRRDGNLSTQAGAFTLPGPNLTADGLVSGFQDRGLTAEDMVVLSGSHTLGRSHCNSFIVRNRERLASGTIGPAYQALLEALCPANTSQFTNVTTEIDLSTPVVLDNNYYKLVQLNLGLHFSDDQLIRNATLKGFVDTFAANETLWKEKFIAAMIKMGNIAPKTGTQGEIRLNCSIVNPSSTSSSGYDGAIQMLRRPGSDDKVASG

SEQ ID NO: 27437 - protein, 226 aa, Triticum aestivum
MRRHPGLRRPGQREHHRQQRLLPGPFRPPRREPLDPGRRVHPPGAEPDGGRPRQRVPGQGAHRRRHGGPVRLPHPGPLPLQLLHREEPGAAGERHHRPGVPGAAGGAVPGEHEPVHQRDDGDRPEHAGGAGQQLLQAGAAQPGPALLRRPAHPQRHPQGLRRHLRRQRDAVEGEVHRRHDQDGQHRPQDRHARGDPPQLQHRQPVLHLFVRLRWGDPDAPPPGLRR

SEQ ID NO: 27438 - DNA, 1330 bp, Triticum aestivum
attacctagaacatcctaatcgaaaagttttccctgcaaaactctcgccgctgcgagttcccaaaaagcgaagcgaccaccacacctctcgccggagatgccgccggggacccctctgccgtcgacgggggcgtggacctgggagaacgccgtcgccggagcgaccgccggcttcgccaccgtcgccaccttccacccgctcgacgtcgtccgcacccgcttccaagtgagcggcgggagagggttgtccgacttgccgccgtacaggaacacgggacacgctgtatacaccatcgcacgatctgagggcctgaggggactttatgccggcttttatcctgcagttctggggtcaaccgtttcttgggggctatatttctttttttataacagagctaaacaaagatacttgcaggagaaggatgttcagctccgtccattcgaccatcttgcctcagctgcagaagcaggtgctttggtttgcctgtttacaaatcccatatggctggtgaaaacacggatgcaactacaaacacctgggcatacttcatcttattctggattttctgatgctttgagaactattcggaaagaggagggatggcgagcactttatagagggatcgggcctggacttttgctggtcacccatggcgcgatacaattcactgcctatgaggaacttcgcaaggctatgatatctgcgaaaagtaaacaaacaaggggagatgacaaaggcagcgaggatttattgaactccgttgattatgcggcacttggcgctggttcaaaattatctgctattctgcttacttatccttatcaggttatccgagcccgcttacagcaacgacctggtagtgatggtatcccaaagtactcagatagttggcatgtagtgaaggaagctgcaaggtacgaaggtgtccgtgggttttacaggggcatcacttccaacctattgaagaaccttccagcagcttccgtgacgtttgtggtgtatgaaaacgttatcaaactattcagagcagccaaggagaagacgtaattccaacttgcaactggagccaggagaaacataggaggaactaggaaagacactaatgttccgcgcaaatacagaatctgttcattcaccacactatccgagctcaacgtgatgttccatcacatttcccagttcagctcttattgacttaacagaaacggaatttagtttggcgaacttgttttttgtagagaaaattcattttctaagaaacagctcattggttcatgttgtccagttgaatgcttgttgaagatagagctctggttctatgtgtggttc

SEQ ID NO: 27439 - protein, 316 aa, Triticum aestivum
MPPGTPLPSTGAWTWENAVAGATAGFATVATFHPLDVVRTRFQVSGGRGLSDLPPYRNTGHAVYTIARSEGLRGLYAGFYPAVLGSTVSWGLYFFFYNRAKQRYLQEKDVQLRPFDHLASAAEAGALVCLFTNPIWLVKTRMQLQTPGHTSSYSGFSDALRTIRKEEGWRALYRGIGPGLLLVTHGAIQFTAYEELRKAMISAKSKQTRGDDKGSEDLLNSVDYAALGAGSKLSAILLTYPYQVIRARLQQRPGSDGIPKYSDSWHVVKEAARYEGVRGFYRGITSNLLKNLPAASVTFVVYENVIKLFRAAKEKT

SEQ ID NO: 27440 - protein, 175 aa, Triticum aestivum
MQLQTPGHTSSYSGFSDALRTIRKEEGWRALYRGIGPGLLLVTHGAIQFTAYEELRKAMISAKSKQTRGDDKGSEDLLNSVDYAALGAGSKLSAILLTYPYQVIRARLQQRPGSDGIPKYSDSWHVVKEAARYEGVRGFYRGITSNLLKNLPAASVTFVVYENVIKLFRAAKEKT

SEQ ID NO: 27441 - DNA, 1657 bp, Triticum aestivum
aagcctccactcctcctagtcttcacttcctctgctcctgcacctcccttcccgagctgctcagtagctagccatggcgcagggaagcggcggtgcgaccgccgtgctcgcgctgctcctcctctgcgtgctcctccacggcgacttcgccgagtccaaggtgtacaccgtcggcgaccgcgccggctgggccctcagctccggcggctggcccaggggcaagcgcttccgcgccggcgacgtgctgctgttcaagtacgggcgcggggcgcacaacgtggtggcggtgaacgcggcggggtacaagtcgtgcagcgcggcgaggggcggccggacgtacaactccggcagcgaccgcgtcacgctcgcccgcggcaccaactacttcatctgcagcgtccccggccactgccaggccggcatgaagatggccgtcaccgccgcatgatccgtctctccgtcgtccatcgccccgccggccggccggtgcttattaattaactttagtttactttccatcctcgagtgaccgaagctactgcatggtgcgtagtacgtgttcaataaaatgcccgagttcgtgggggttgggccgtctggccggttggcactagctagagagagattaatatactctgttgttccggttgtacgtgctttaatgcttgtataccagaattttgagttgttgtgtcctttgtgacactccttccaaaaaaaaaaaaaaaaaagctttttttttttttttttttttttttttcttttttactggtcaaaagacaaagattccattaaccacaggtccagagaggcctcaggcgctgctccccactctcagctctcagtatttacatttcactacattatgtacagtcacccaactccaagctaggcagcacacaaccctctccacccccagcaatccacccctttcccctccccggcggattccctcccctcccgagctcggcaatggcaaacgcatcatccggagctgggatccatgatgactgcaagctgaggtttgtggagctcaagtccaagaggatgcaccgcttcataacctacaggctggagaaccagaaggaggtcattgtggaccaaactggggagcgcgaggccacctatgaggacttcaccaagaccctccctgagaatgactgccgattcgcggtgttcgacttcgacttcaccaccccggaggatgtgccaaagagcaggatcttctatatcttctggtccccggacaccgcaaaggtgaggagcaagatgacgtacgcgagcaccaacgagaagttcaagaggaccctggacggcatccagatcgagatgcaggccactgaccccagcgaaatcagcctggacgtgatcaaggagcgcgcgcactaaggcaaatcatcccaatgcctcgcaatatggatttatgtcaaatatagatttggcggtgtgactcttgaaactttcttgatgatttgtggctttgttaccgtgtcgaaaggccctcctcccgtggtccgtgtgaccacggagggcttgctctatcatgtaatctgttctttttcttctgcccatttatatgccgggccttatgctgctgcactgcactgttcctccaagttacggttataaataattaaatgttctgtttggattcgtc

SEQ ID NO: 27442 - protein, 166 aa, Triticum aestivum
KPPLLLVFTSSAPAPPFPSCSVASHGAGKRRCDRRARAAPPLRAPPRRLRRVQGVHRRRPRRLGPQLRRLAQGQALPRRRRAAVQVRARGAQRGGGERGGVQVVQRGEGRPDVQLRQRPRHARPRHQLLHLQRPRPLPGRHEDGRHRRMIRLSVVHRPAGRPVLIN

SEQ ID NO: 27443 - protein, 138 aa, Triticum aestivum
MANASSGAGIHDDCKLRFVELKSKRMHRFITYRLENQKEVIVDQTGEREATYEDFTKTLPENDCRFAVFDFDFTTPEDVPKSRIFYIFWSPDTAKVRSKMTYASTNEKFKRTLDGIQIEMQATDPSEISLDVIKERAH

SEQ ID NO: 27444 - protein, 124 aa, Triticum aestivum
MAQGSGGATAVLALLLLCVLLHGDFAESKVYTVGDRAGWALSSGGWPRGKRFRAGDVLLFKYGRGAHNVVAVNAAGYKSCSAARGGRTYNSGSDRVTLARGTNYFICSVPGHCQAGMKMAVTAA

SEQ ID NO: 27445 - DNA, 970 bp, Triticum aestivum
acatcctaatcgaaaaagcagtagaggccaacgagctgactcccgatccatcgatggcgtctagcgacgagaagcctgtcccgacgccggcatcaaccggaggcgacggcgggccgccagggaagccgacgacgacgtcgacgatgctgctggacaagggcgcggcggcgctgcagtcgctgcgcccggtgaagcagatgaagcagcacgtgtgcacgttcgccctgtacgcgcacgacccgcaccggcaggtggagacccaccactacgtctcccgcctcaaccaggacgtcctccagtgccccgtctacgactccgacgacaagcacgcccgcctcatcggcgtggagtacatcgtgtcgaggaagatcttcgagtcgctgccggcggaggagcagaagctgtggcactcgcacgcgcacgagatcaagacggggctgtgggcgaacccgtgggtgcccagcatgctggggaaggcggagctggaccacatggccggcacgtttggcaagttctggtgcacctggcaggtggaccgcggcgaccgcctgccgctcggcgcgcccgcgctcatggtgtcgccgcagggggagcgcgacggcgccgtgcgcccggacctggtgcggaagcgcgaccagaagtacagcttctccacggaggagctcaaggtcgccagggccgacgtggaggtgccgcccgagccgcgcccgggccaggccgactactgggtccgccaccacaagggcttcgccgtcgacgtcgtgccgcacgagatgaagcgccacgcgccgtttccgtgagcgaccccgttcctcggcgcgccggacgtgttggcacaagtgggttattacagcgctttcgtgttgtgtgtgtgtgtgaaactgtgcactttgtttcgtagttgctgtcgagctagcactgtataataggggtactggtctgaaaataaaagcatgtagtaattcagtcc

SEQ ID NO: 27446 - protein, 265 aa, Triticum aestivum
ILIEKAVEANELTPDPSMASSDEKPVPTPASTGGDGGPPGKPTTTSTMLLDKGAAALQSLRPVKQMKQHVCTFALYAHDPHRQVETHHYVSRLNQDVLQCPVYDSDDKHARLIGVEYIVSRKIFESLPAEEQKLWHSHAHEIKTGLWANPWVPSMLGKAELDHMAGTFGKFWCTWQVDRGDRLPLGAPALMVSPQGERDGAVRPDLVRKRDQKYSFSTEELKVARADVEVPPEPRPGQADYWVRHHKGFAVDVVPHEMKRHAPFP

SEQ ID NO: 27447 - protein, 248 aa, Triticum aestivum
MASSDEKPVPTPASTGGDGGPPGKPTTTSTMLLDKGAAALQSLRPVKQMKQHVCTFALYAHDPHRQVETHHYVSRLNQDVLQCPVYDSDDKHARLIGVEYIVSRKIFESLPAEEQKLWHSHAHEIKTGLWANPWVPSMLGKAELDHMAGTFGKFWCTWQVDRGDRLPLGAPALMVSPQGERDGAVRPDLVRKRDQKYSFSTEELKVARADVEVPPEPRPGQADYWVRHHKGFAVDVVPHEMKRHAPFP

SEQ ID NO: 27448 - protein, 218 aa, Triticum aestivum
MLLDKGAAALQSLRPVKQMKQHVCTFALYAHDPHRQVETHHYVSRLNQDVLQCPVYDSDDKHARLIGVEYIVSRKIFESLPAEEQKLWHSHAHEIKTGLWANPWVPSMLGKAELDHMAGTFGKFWCTWQVDRGDRLPLGAPALMVSPQGERDGAVRPDLVRKRDQKYSFSTEELKVARADVEVPPEPRPGQADYWVRHHKGFAVDVVPHEMKRHAPFP

SEQ ID NO: 27449 - DNA, 1113 bp, Triticum aestivum
aaaatccgccgcgccgcatccaaccccttccttccttccgttcctccgccgctccggtggcgcgatggccgcgcgggccctcctcctccgggcaaccgcccgctgctgctcccctctccactcccccaccgccgccccgcgcctccacccgcggctccgcagccacgccgccgccgccgctccccagctccgcttccccgcgctttccttctccgcctccgccgtgtccaccagctcgcacggccccagcggcggtgacgccggcgagggggaggatgacaagggagcgtacgagaactacctggggatgagcgacgacgagctcatggcgcagtgcgacatgggcaccttcaagtcctccgggcccggcggccagcaccgcaacaagcgcgagtccgccgtgcgcctccgccaccaccccaccggcatcgtcgcccaggctgtggaggataggtcacaacataagaatcgatcgtctgctttatctcggcttcggaccctgattgctcttaaagttaggaggccgataaaccttgataactacactcctccagttgaacttcttcagatattgccactgaagtctaccattcgatcaaaggatgttggcagccaaattgggccaaataacccaaaattttctccaggaatgcaagctttattagatcttctatttgctgttgaaggttctgtatcagaggcagcgaaaattctaggcctaagcactggtgccctgtcaaggttaattctatcagatgattctctccgagcggctgcaaatgaactgcgagcctccaagggactgaagccattaagatgatgcccctttacaatgttatcatcttctgctgcgccacaggtgccaaggtgtctcattgctcatgatttcatggcatgccattggagcttatgcccaattccttagcgcaagaaatgcaaaacgtacacagggtctgtcttatacagggccatcatcatgcctgcttgtttgtctcacaccattgtaaccttgttgttgtacagtgcaattgtactttcacatgtcgccatcgcttgatgatgccttcaacaaattggatctacttttaagccatatagtgtctttttattacc

SEQ ID NO: 27450 - protein, 272 aa, Triticum aestivum
KSAAPHPTPSFLPFLRRSGGAMAARALLLRATARCCSPLHSPTAAPRLHPRLRSHAAAAAPQLRFPALSFSASAVSTSSHGPSGGDAGEGEDDKGAYENYLGMSDDELMAQCDMGTFKSSGPGGQHRNKRESAVRLRHHPTGIVAQAVEDRSQHKNRSSALSRLRTLIALKVRRPINLDNYTPPVELLQILPLKSTIRSKDVGSQIGPNNPKFSPGMQALLDLLFAVEGSVSEAAKILGLSTGALSRLILSDDSLRAAANELRASKGLKPLR

SEQ ID NO: 27451 - protein, 251 aa, Triticum aestivum
MAARALLLRATARCCSPLHSPTAAPRLHPRLRSHAAAAAPQLRFPALSFSASAVSTSSHGPSGGDAGEGEDDKGAYENYLGMSDDELMAQCDMGTFKSSGPGGQHRNKRESAVRLRHHPTGIVAQAVEDRSQHKNRSSALSRLRTLIALKVRRPINLDNYTPPVELLQILPLKSTIRSKDVGSQIGPNNPKFSPGMQALLDLLFAVEGSVSEAAKILGLSTGALSRLILSDDSLRAAANELRASKGLKPLR

SEQ ID NO: 27452 - protein, 170 aa, Triticum aestivum
MSDDELMAQCDMGTFKSSGPGGQHRNKRESAVRLRHHPTGIVAQAVEDRSQHKNRSSALSRLRTLIALKVRRPINLDNYTPPVELLQILPLKSTIRSKDVGSQIGPNNPKFSPGMQALLDLLFAVEGSVSEAAKILGLSTGALSRLILSDDSLRAAANELRASKGLKPLR

SEQ ID NO: 27453 - DNA, 1245 bp, Triticum aestivum
acgacatcctccacactcgactcaaccaagcagcaacgagacgcagagcaagcagcaacaagtagcttcgaccttcagcttctagcgcatggcggagatgggggtgcgtgacaacttgccctgctcgacttcatggagagagctcacacacaccagctggagggatgacgattacaggaggatggtgatggcgagcctgatcgaggcggtgtacctgctggagctggagaggcaggagcggagggacgcggcggaggtggcgcagcagtggtggaagcccttcagctaccgcctcgcgcacgagctggtggacgaacgcgacggctccgtcttcggcgccatcttcgagtgggaggaccgccacctgctcgaccgccgcggcgccagcgccgaggaaaggccgaccggcgcgcccagcgcggtgatcgcgttccggggcacgctgctgcgcgcgcccaccatccggcgggacgtggaggacgagctgcgcctgctggcgtgcaacagcctccgcggctccgccaggctccacggcgcgctgcaggcgctcagggccaccatcgacaggttcggctccgagaacgtgtgcctctgcggccactccctcggcgccggcttcgcgcgccaggtcggcaggatgctcatggcgtcgcgccagcagcagcagccgcagccgcagcagcagcagcagcaacagaaccccgccgcggcgctcgagttccacctcttcaacgcgccctacctgtcgctgcccacgggcgtgcggagggtggtgaggacggccgactgcctgctcaagacggtccgcaccggcgtcgccgccgtcggcaggtggcacggcaaggcgctcaagaacgtggcctacgccaactgcgtgctcggctacacgcgcctcgacagcgacggcaggaagttgttcgagtgagaagagaacatgctacgccaactgcaactgatctgccacacccatgactgacgccatgactcgcctgaagagagggagggatccagcgctgaaaacgtgcgactgtactgaaaatcccaaacacgcggcacgtatctcgatcatggaggccatgatcccgaacgaacgatctatctattatcagcttgtactactagtaggattcaatttgaaggagacaataagcatcctgcccggcccagggatgcacggcttaggtagctagcttagtctgcatgcttgctctctagtctgtacatgttaatcgcgtttccattgtc

SEQ ID NO: 27454 - protein, 278 aa, Triticum aestivum
MAEMGVRDNLPCSTSWRELTHTSWRDDDYRRMVMASLIEAVYLLELERQERRDAAEVAQQWWKPFSYRLAHELVDERDGSVFGAIFEWEDRHLLDRRGASAEERPTGAPSAVIAFRGTLLRAPTIRRDVEDELRLLACNSLRGSARLHGALQALRATIDRFGSENVCLCGHSLGAGFARQVGRMLMASRQQQQPQPQQQQQQQNPAAALEFHLFNAPYLSLPTGVRRVVRTADCLLKTVRTGVAAVGRWHGKALKNVAYANCVLGYTRLDSDGRKLFE

SEQ ID NO: 27455 - protein, 275 aa, Triticum aestivum
MGVRDNLPCSTSWRELTHTSWRDDDYRRMVMASLIEAVYLLELERQERRDAAEVAQQWWKPFSYRLAHELVDERDGSVFGAIFEWEDRHLLDRRGASAEERPTGAPSAVIAFRGTLLRAPTIRRDVEDELRLLACNSLRGSARLHGALQALRATIDRFGSENVCLCGHSLGAGFARQVGRMLMASRQQQQPQPQQQQQQQNPAAALEFHLFNAPYLSLPTGVRRVVRTADCLLKTVRTGVAAVGRWHGKALKNVAYANCVLGYTRLDSDGRKLFE

SEQ ID NO: 27456 - protein, 247 aa, Triticum aestivum
MVMASLIEAVYLLELERQERRDAAEVAQQWWKPFSYRLAHELVDERDGSVFGAIFEWEDRHLLDRRGASAEERPTGAPSAVIAFRGTLLRAPTIRRDVEDELRLLACNSLRGSARLHGALQALRATIDRFGSENVCLCGHSLGAGFARQVGRMLMASRQQQQPQPQQQQQQQNPAAALEFHLFNAPYLSLPTGVRRVVRTADCLLKTVRTGVAAVGRWHGKALKNVAYANCVLGYTRLDSDGRKLFE

SEQ ID NO: 27457 - DNA, 936 bp, Triticum aestivum
ctgattgagaataatgcagcctaccaaagtcagggccaagaaagtttcctctctagactcagaaaaaaagtttcctctcgcgtgtaagggctctgtcagatagagtccggacggcccgaccctaccctgccgtcggcgaggagcaaggatgacggcgccgaggaggtggaggttcgcgatggtctgctcgtcgaacatgaaccggagcatggaggcgcacgcggtgctgggccgcgcggcgctcgacgtcgagtcctacggcaccggctcccaggtgaagctcccaggcccgtcgatgcacgagcccaacgtctacgacttcggcaccccttacggcggcatctacgacgacctccgccgcaaggatcccgacctgtacaagaggaacggcctactgccaatgctgaagaggaacatctcggtgaagctggcgccgcagaggtggcaggataacgccggcgatggggtgtttgatatgatactcacctttgaggagagggtcttcgacttagtcgttgaagatatgaataaccgtgagcagaggttattgaagagcgtgctgataatcaatatggacgtgaaagataaccatgaagaagctgctattggggcaaagcttgctttggatttatgccacaagcttgaagcagtggctggtgattgggaggaaataatcgatgacctgattgctgcattcgagaagcagcacaagcggaagctcacatactacatctcgttttactgacttgacaccgccttgccccttgtcacagaggctcgctagtttaacctgatgtttggatggtcaggaaacagtagaaaaccgagtagcattgtgctgctctgctgatggtgtagaaaagactacatgtaacaactcttctcctcaggtgtccatcctggttgagcagctttatcagattttgacgtgccccc

SEQ ID NO: 27458 - protein, 198 aa, Triticum aestivum
MTAPRRWRFAMVCSSNMNRSMEAHAVLGRAALDVESYGTGSQVKLPGPSMHEPNVYDFGTPYGGIYDDLRRKDPDLYKRNGLLPMLKRNISVKLAPQRWQDNAGDGVFDMILTFEERVFDLVVEDMNNREQRLLKSVLIINMDVKDNHEEAAIGAKLALDLCHKLEAVAGDWEEIIDDLIAAFEKQHKRKLTYYISFY

SEQ ID NO: 27459 - protein, 188 aa, Triticum aestivum
MVCSSNMNRSMEAHAVLGRAALDVESYGTGSQVKLPGPSMHEPNVYDFGTPYGGIYDDLRRKDPDLYKRNGLLPMLKRNISVKLAPQRWQDNAGDGVFDMILTFEERVFDLVVEDMNNREQRLLKSVLIINMDVKDNHEEAAIGAKLALDLCHKLEAVAGDWEEIIDDLIAAFEKQHKRKLTYYISFY

SEQ ID NO: 27460 - protein, 182 aa, Triticum aestivum
MNRSMEAHAVLGRAALDVESYGTGSQVKLPGPSMHEPNVYDFGTPYGGIYDDLRRKDPDLYKRNGLLPMLKRNISVKLAPQRWQDNAGDGVFDMILTFEERVFDLVVEDMNNREQRLLKSVLIINMDVKDNHEEAAIGAKLALDLCHKLEAVAGDWEEIIDDLIAAFEKQHKRKLTYYISFY

SEQ ID NO: 27461 - DNA, 1918 bp, Triticum aestivum
acagaagggagagacgagagatgggtcgggtgacggagagcgttttccgatccggaagtgggcagtggttcacctctcctcacgggctggcctaggctcacccccccacgatcgatctcccctatttcaccgccaaccgcacgaaccccatccctcctcgcctcttcctttcttcctctctgtggcggcggtggagcagcgggtcggcgctcccaccaagcagcagtggacaccggcggtttgcgcggcgcggcggcggggagcggcggcagaccggccgtgcggcggcaggccatcgggctccgtcaaggttgctaaaatggataagctcaagggctctgcgcgtcttatgattgtttcagatctcgatcacacaatggttgatcatcatgacgaagagaacttgtctttgcttaggtttggggccctttgggagtctgtttactgtcaggattctcttcttgtcttttcaacaggaagatcacctactctgtataaggaattgaggaaagagaagcctatgctaactccagatatcactattttgtctgtgggctctgagataacttatggtgaagccatggtccctgatcatggctgggaggaatatctgaacaataagtgggacaggaatattgttcttgaggagacagctaagttttctgagctgaagcttcaggtagagacagaacagcgtccacataaggtcagctttttggttgacaagaagaacgctcagggagtgatcaagtctctctccgagaagtttgagaaacgtggggtagatgcgaaaataatctacagtggtggccaggatcttgacatattagctcaaggggctggaaagggtcaagcacttgcatatttgctcaagaagttaggttcatgcggaaaaacacccaacaatactcttgcttgtggtgactctggtaatgatgcagaattattcagtatccctggtgtacatggtgtcatggttagcaatgcccaagaggaactactccagtggcatgcagaaaatgcgaaggataatcctaagataattcatgcaactgagaggtgtgctgctggtattattcaagctattgggcacttcaagctaggacctaatgtttctccaagagacgttgagttcccttacatcaaggaggaccctttcaagcctacagcggccattgtgaagttctatgttctgtacgaaaagtggcgtagagctgatgttccaaaggctgattctgttatagagtacttcaaaaacaccacagatgcaaatggagttattattcatccgtctggggtcgaactttcgatccattcgtccattgatgagctggcttcatgttatggtgacaaacaagggaaaaagtaccgatcatgggtggacagactagttatcttgcagactgcttctgacagttggcttgtgagattcgacttgtgggaggcagaaggtgctgcgtgggtgtgctgttttacaactcttgcgctgaatgtaaagcctgaatcccctgggggttttgtggtaacacacattcacaagacgtggcgtaaagaatatcccggggtcgagcagtcatccaaactctagactggaggcgcatgggaaggaggttttcttgttgaggatcaaataagaaatcgtgtaccgaaagcacgcgaatttcttttacttgttcataatgttgttaataagtgctcccagacgcatatactggactgatgatgatgtttacggaggcatcttgatgcctttgcctaatgcttactgtcatgtcatgagaggctaaactaaagtaaatgaccccagtcccagtatatacttagtttgatttgctacttgttagttattattcagtgttcttcaagatacattcatttttatccatttttgcgacaaccggacgccaggaacgacggg

SEQ ID NO: 27462 - protein, 528 aa, Triticum aestivum
QKGETRDGSGDGERFPIRKWAVVHLSSRAGLGSPPHDRSPLFHRQPHEPHPSSPLPFFLSVAAVEQRVGAPTKQQWTPAVCAARRRGAAADRPCGGRPSGSVKVAKMDKLKGSARLMIVSDLDHTMVDHHDEENLSLLRFGALWESVYCQDSLLVFSTGRSPTLYKELRKEKPMLTPDITILSVGSEITYGEAMVPDHGWEEYLNNKWDRNIVLEETAKFSELKLQVETEQRPHKVSFLVDKKNAQGVIKSLSEKFEKRGVDAKIIYSGGQDLDILAQGAGKGQALAYLLKKLGSCGKTPNNTLACGDSGNDAELFSIPGVHGVMVSNAQEELLQWHAENAKDNPKIIHATERCAAGIIQAIGHFKLGPNVSPRDVEFPYIKEDPFKPTAAIVKFYVLYEKWRRADVPKADSVIEYFKNTTDANGVIIHPSGVELSIHSSIDELASCYGDKQGKKYRSWVDRLVILQTASDSWLVRFDLWEAEGAAWVCCFTTLALNVKPESPGGFVVTHIHKTWRKEYPGVEQSSKL

SEQ ID NO: 27463 - protein, 422 aa, Triticum aestivum
MDKLKGSARLMIVSDLDHTMVDHHDEENLSLLRFGALWESVYCQDSLLVFSTGRSPTLYKELRKEKPMLTPDITILSVGSEITYGEAMVPDHGWEEYLNNKWDRNIVLEETAKFSELKLQVETEQRPHKVSFLVDKKNAQGVIKSLSEKFEKRGVDAKIIYSGGQDLDILAQGAGKGQALAYLLKKLGSCGKTPNNTLACGDSGNDAELFSIPGVHGVMVSNAQEELLQWHAENAKDNPKIIHATERCAAGIIQAIGHFKLGPNVSPRDVEFPYIKEDPFKPTAAIVKFYVLYEKWRRADVPKADSVIEYFKNTTDANGVIIHPSGVELSIHSSIDELASCYGDKQGKKYRSWVDRLVILQTASDSWLVRFDLWEAEGAAWVCCFTTLALNVKPESPGGFVVTHIHKTWRKEYPGVEQSSKL

SEQ ID NO: 27464 - protein, 412 aa, Triticum aestivum
MIVSDLDHTMVDHHDEENLSLLRFGALWESVYCQDSLLVFSTGRSPTLYKELRKEKPMLTPDITILSVGSEITYGEAMVPDHGWEEYLNNKWDRNIVLEETAKFSELKLQVETEQRPHKVSFLVDKKNAQGVIKSLSEKFEKRGVDAKIIYSGGQDLDILAQGAGKGQALAYLLKKLGSCGKTPNNTLACGDSGNDAELFSIPGVHGVMVSNAQEELLQWHAENAKDNPKIIHATERCAAGIIQAIGHFKLGPNVSPRDVEFPYIKEDPFKPTAAIVKFYVLYEKWRRADVPKADSVIEYFKNTTDANGVIIHPSGVELSIHSSIDELASCYGDKQGKKYRSWVDRLVILQTASDSWLVRFDLWEAEGAAWVCCFTTLALNVKPESPGGFVVTHIHKTWRKEYPGVEQSSKL

SEQ ID NO: 27465 - DNA, 886 bp, Triticum aestivum
ttttaagaccttggccaggccggccaccgtcccatcccaccaccttcctcctctgcccccgcccagctcgttccattttgaagaagcaagaaacagccgcgcacatctcgtcgcccctggttcctcgtcggacgaggaagaggcgatggagcggcggagggctgcgtgggccgcggtgctggtggcggtggccgcgtgcgcggcgctgccggcgacgacgacggcgaacaagatcaaggtcaactggttgcccaacaccaactactccggctgggagcaggagcacggccccttctacaagggcgactggctcgtgttctactacacggcggggcaggcggacgtggtggaggtgaacgagtccgggtacaaccggtgcgacgccagcaacgccatctacaactacagcaagggccgcagcttcgccttcgagctcaacgagaccaagacctactacttcatctgcagcttcggctactgccccggcgggatgcgcctggccatcaagtcccagaagctgccgccgccgtcgccgccgccctccgcgcagcaccaccgctccgccgcgctcgccgggccgcgcgccggggtcgcgctctacgccgccgtcgccgtcctcgccgcgctcctcagggcggtctagtctagccgatctggtctgccgctagttccgagctcgtttgttgtttggagtttccttccccatttcttcatttctttggtgtgtgttcctaggataggagagaatggcagtgccacggacgttcttgggtgagattagcggtgtggatttgcggaaccaaatggttaccggcggattgatttgtcaagtgtgaagagtgcactggactggagaaatagcgtactatttttttggttttttttc

SEQ ID NO: 27466 - protein, 213 aa, Triticum aestivum
FKTLARPATVPSHHLPPLPPPSSFHFEEARNSRAHLVAPGSSSDEEEAMERRRAAWAAVLVAVAACAALPATTTANKIKVNWLPNTNYSGWEQEHGPFYKGDWLVFYYTAGQADVVEVNESGYNRCDASNAIYNYSKGRSFAFELNETKTYYFICSFGYCPGGMRLAIKSQKLPPPSPPPSAQHHRSAALAGPRAGVALYAAVAVLAALLRAV

SEQ ID NO: 27467 - protein, 165 aa, Triticum aestivum
MERRRAAWAAVLVAVAACAALPATTTANKIKVNWLPNTNYSGWEQEHGPFYKGDWLVFYYTAGQADVVEVNESGYNRCDASNAIYNYSKGRSFAFELNETKTYYFICSFGYCPGGMRLAIKSQKLPPPSPPPSAQHHRSAALAGPRAGVALYAAVAVLAALLRAV

SEQ ID NO: 27468 - protein, 117 aa, Triticum aestivum
LRPWPGRPPSHPTTFLLCPRPARSILKKQETAAHISSPLVPRRTRKRRWSGGGLRGPRCWWRWPRARRCRRRRRRTRSRSTGCPTPTTPAGSRSTAPSTRATGSCSTTRRGRRTWWR

SEQ ID NO: 27469 - DNA, 912 bp, Triticum aestivum
agtaccactccgtccactgcaaacaaactctcgccttgacccctgcgcgctccctccctccctccgtccccagccaggatcccagcttttctcctcctccccgccgccgcctccggcgccatgaagcgcctcttcagacgcctctcccgcgtcgccgcggccgactcctcctccgcggccgccgcggccgactcctcctccgcggccgccgccacggcgtaccggcagctccgcgcgccgaagcaggcgtccacgaccggcggcgccaaggtgccgcagggacacgtgccggtgtgcgtcggcgaggagggcgggcccgtggagcggttcgccgtgcgcgcggacctgctgggccggccggccttcgcggcgctgctcctgcgcgccgcccaggagtacgggtacgaccaccccggcgcgctccgcatcccctgccccgtcgccgacttccgccgcctcctcgtccgcctctccgacgacccctacgccgacgagtgctaggcgccggcgcaccttctcggcctgccgctggagaactctgccccccattcgccccccttctgacagatttacccccgggcactgggcagacttgcaatgtacatacagtggcaggccgaagaagagtcgccggagcgagggttaggatagggattacctagcttcgtagtaacttttttttattactgctgagcatgagctgaatgggaagaactgtgggtgttcctttttcaccccctctagttctaggaatttcagtgtgtgtgtgtgcgtgcgtgtgtgagggagagagagagagggaggtggtagtatgcgtttgtgctagggattttgaggtttcagtgttaaccatatgaaatcctgaggctatcatgccatatttttactgagctagtaatatcttttagcact

SEQ ID NO: 27470 - protein, 219 aa, Triticum aestivum
YHSVHCKQTLALTPARSLPPSVPSQDPSFSPPPRRRLRRHEAPLQTPLPRRRGRLLLRGRRGRLLLRGRRHGVPAAPRAEAGVHDRRRQGAAGTRAGVRRRGGRARGAVRRARGPAGPAGLRGAAPARRPGVRVRPPRRAPHPLPRRRLPPPPRPPLRRPLRRRVLGAGAPSRPAAGELCPPFAPLLTDLPPGTGQTCNVHTVAGRRRVAGARVRIGIT

SEQ ID NO: 27471 - protein, 126 aa, Triticum aestivum
MKRLFRRLSRVAAADSSSAAAAADSSSAAAATAYRQLRAPKQASTTGGAKVPQGHVPVCVGEEGGPVERFAVRADLLGRPAFAALLLRAAQEYGYDHPGALRIPCPVADFRRLLVRLSDDPYADEC

SEQ ID NO: 27472 - DNA, 1215 bp, Triticum aestivum
caaaacattttgtctgaatttctttggcttcccagtcgaagcggatggcgatggcaggcaggaggcgccccgatctcctcctgcgccgccgcgccaatctctcagcccgtagcccgctgagatccaacctttccaccgtgtccggccggagaccgcccgaacccgccgacccggcccgcgcggcgtcgatcctggccgagaaggactggttcgcgcggctcaactcggagttcgccgccgcgctgccgcgcctgggcccgcgcttcgtggtccgcgtgctgcacgccgccgtgcccctcgagccacgcctctgcgtccgcctctacgtctgggcgtcgcggttcgggacccacttcgcgcgggacgcctcggtgcggcgggccctggaggacgcgctgtggcggcgcgggccgctcgtgctgtccgcggcgctggtggcggaggtcaggggctgcgggtgcgaggtctccgaggagctgctctgctccatgatcgccagctggggcaggctgggcctcgcgcagtacgcgcacgaggtgttcgtgcaaatgccgcgtctcgggctgaggcccagcacggcggtgtacaacgccctgatcgccgcgtctgtgagggctggcgccgtcgacacggcatacctcaggttccagcagatgcctgcggatgggtgccagccggactgcttcacctacaacacactcgttcacggggtctgtcgtagtgggatcgtcgatgaggcgctccggctggtgaggcagatggagggcgtcgggatcaagccgaatgtgttcacttacacgatgctggttgatgggttctgcaatgctggcaggccagaggacgcacttcatgtgttcaatacgatgaaggataagggtgtatcgccgaatgaggcctcgtacaggactttggttcatggtgcgttccggtgcttggggagccacaaggcgtatgagatgcttagtgagtggataggacgtcagcctccactgcacccaagtgcgtggcatactatgctgtattgcttattaaagaacgagatggccaaagaggtagttgaggtcgtgaagaagatgaaaactaggggtcttctcctcgacaatgctatgtttggcattgtggtctcttgtgctgtgaagtgcctggagttgagtgatttgtgtgagttggttgatgatttcgtaaagaaaggcgggaatcctggatttcatgtcc

SEQ ID NO: 27473 - protein, 390 aa, Triticum aestivum
MAMAGRRRPDLLLRRRANLSARSPLRSNLSTVSGRRPPEPADPARAASILAEKDWFARLNSEFAAALPRLGPRFVVRVLHAAVPLEPRLCVRLYVWASRFGTHFARDASVRRALEDALWRRGPLVLSAALVAEVRGCGCEVSEELLCSMIASWGRLGLAQYAHEVFVQMPRLGLRPSTAVYNALIAASVRAGAVDTAYLRFQQMPADGCQPDCFTYNTLVHGVCRSGIVDEALRLVRQMEGVGIKPNVFTYTMLVDGFCNAGRPEDALHVFNTMKDKGVSPNEASYRTLVHGAFRCLGSHKAYEMLSEWIGRQPPLHPSAWHTMLYCLLKNEMAKEVVEVVKKMKTRGLLLDNAMFGIVVSCAVKCLELSDLCELVDDFVKKGGNPGFHV

SEQ ID NO: 27474 - protein, 388 aa, Triticum aestivum
MAGRRRPDLLLRRRANLSARSPLRSNLSTVSGRRPPEPADPARAASILAEKDWFARLNSEFAAALPRLGPRFVVRVLHAAVPLEPRLCVRLYVWASRFGTHFARDASVRRALEDALWRRGPLVLSAALVAEVRGCGCEVSEELLCSMIASWGRLGLAQYAHEVFVQMPRLGLRPSTAVYNALIAASVRAGAVDTAYLRFQQMPADGCQPDCFTYNTLVHGVCRSGIVDEALRLVRQMEGVGIKPNVFTYTMLVDGFCNAGRPEDALHVFNTMKDKGVSPNEASYRTLVHGAFRCLGSHKAYEMLSEWIGRQPPLHPSAWHTMLYCLLKNEMAKEVVEVVKKMKTRGLLLDNAMFGIVVSCAVKCLELSDLCELVDDFVKKGGNPGFHV

SEQ ID NO: 27475 - protein, 242 aa, Triticum aestivum
MIASWGRLGLAQYAHEVFVQMPRLGLRPSTAVYNALIAASVRAGAVDTAYLRFQQMPADGCQPDCFTYNTLVHGVCRSGIVDEALRLVRQMEGVGIKPNVFTYTMLVDGFCNAGRPEDALHVFNTMKDKGVSPNEASYRTLVHGAFRCLGSHKAYEMLSEWIGRQPPLHPSAWHTMLYCLLKNEMAKEVVEVVKKMKTRGLLLDNAMFGIVVSCAVKCLELSDLCELVDDFVKKGGNPGFHV

SEQ ID NO: 27476 - DNA, 1239 bp, Triticum aestivum
cattacctagaacatcctaatcgaaaaaaaatttacagttttcaccaagatgaaattgcacaaggcatctatatcccctcctcactctcctccgctggccgccaacgccgccgcataaccaagtcaatcttcccccacccaaccccccgcgcagcctcgccgtcggcatgggcgaggagaggacggaggcgtggtggggccggcgcgcgtgggcgctgctgtcggccgtccgcgcgcgggcgccgctggtgcagtgcatcaccaaccccgcctcccaattccggatggaggcctgcctcgagctcctcgcgctcccccccgccgtcgtcagggggaacgcgtccgagatcctcgccctcgccgcccgctcagacagctcccccaccttcaagggtgtggacagttcacatgactcaggggaggtcctgcaagccgcgaaagcattggcacggtccagcggcacagttgtcgcagtatctggagctgttgatttcatcacggatggcgagcaggtcatcagtgctagcaatggtgtggcaatgatgcagaagatcacagcgacagggtgtgctgtgactgctcttatagcggcatttgtcggggcggatccttccgatgctctggctgcagcagcatgtgcgctcgccatctttggactcgctggagagatagggatggagtcagcaaaaggacctgcctctctcaggatgcatctcattgatgctctctacggtctcgacgagcagaccgtcacatctggagtaaaaattgcgctgctgccgtaatgcatgtgtgccgtggctatcagtgctgtaggagatacagagtctggagtaatctgcaggatcattttgcctccttggtgcttggaaaaccgtgaagcagatcgtgtcagattggctgtcagatcactcatcaataatccggtgaccatcccggctgtagtaagtacgtacatagttgtgaattgtgatgtcacacagagaatgatgttcataaaataagccagtcgaaataaggtgtttgtgcttcaatggccttgagatgatcgaacggctattctgttcaaacactttgatccccctatgcctattatcacgggcggcgctaggggtattcttgggtcttcatgtgaatacccatgatttttacaaaacagtgttgattttggcaaaacagtgacaattttcaaaaaacaacaataattttggcaaaatgaatacacatgaatacccggtt

SEQ ID NO: 27477 - protein, 205 aa, Triticum aestivum
MGEERTEAWWGRRAWALLSAVRARAPLVQCITNPASQFRMEACLELLALPPAVVRGNASEILALAARSDSSPTFKGVDSSHDSGEVLQAAKALARSSGTVVAVSGAVDFITDGEQVISASNGVAMMQKITATGCAVTALIAAFVGADPSDALAAAACALAIFGLAGEIGMESAKGPASLRMHLIDALYGLDEQTVTSGVKIALLP

SEQ ID NO: 27478 - protein, 180 aa, Triticum aestivum
HYLEHPNRKKIYSFHQDEIAQGIYIPSSLSSAGRQRRRITKSIFPHPTPRAASPSAWARRGRRRGGAGARGRCCRPSARGRRWCSASPTPPPNSGWRPASSSSRSPPPSSGGTRPRSSPSPPAQTAPPPSRVWTVHMTQGRSCKPRKHWHGPAAQLSQYLELLISSRMASRSSVLAMVWQ

SEQ ID NO: 27479 - protein, 166 aa, Triticum aestivum
MEACLELLALPPAVVRGNASEILALAARSDSSPTFKGVDSSHDSGEVLQAAKALARSSGTVVAVSGAVDFITDGEQVISASNGVAMMQKITATGCAVTALIAAFVGADPSDALAAAACALAIFGLAGEIGMESAKGPASLRMHLIDALYGLDEQTVTSGVKIALLP

SEQ ID NO: 27480 - DNA, 1344 bp, Triticum aestivum
aacccaacccaacccgacccggcgcggatctaaaatctctctctgccagccaccacgcgcctgccctacagccgccaccgacgccccgtccccgccccctcccacggtcgccgccgccgtcgccgtcgccgttcatctccgccccgtccgcggtctttccccccattggggttcgaggacctgaggtgcttctagctgggaaggatgagcaaaggcccggttccgttccctagctttgggaagaaagcaaaagatctcttgtacaaggactacaattttgaccaaaagttttcatggtcaacaactagcgaatctggtttgggtatcacagcctctggtgtgaagttcgatgaactcttcattggtgacatacgggtacaacataaaagtggtagaaatactgttgatgtcacaatcgattgcgattccaaagtgtcaaccgcggtcacttttgatgaagtagtccctggtttgaagacttctttcggcttcaaggttcctgatcaaaagtcagggaagctcgatttgcaataccttcatgatcgcttcacactgaattcaaccattggcttgacttcggcacctgtgatcgagctggcaacaactattggcacaaacgaacttgctgtcggtgccgaggttggatttgacagcacttcagcttctgttaccaagtacaactcaggggtcagctataccaaggatgatttttctgccgccttacaaatggctgacaaaggcgagacactgaaagcttcctacatccacctgttcagcccgaccagcgcagtggcggccgaggtaacgcacaggttgaaaacaaaggagaactacttcaccatcgggagctcccacgcgctcgacccgtccacgacgctcaagacgaggttcagcaacagcgggaaggccgggctcctctgccggcacgagtggaggcccaagtcgtacgtgacgctctcggccgagtacgaccccaaggtggtgagctcgccgtcaaggttcggcgtggccgtggccctcagcccctgatcacccgcctgcccgcccgcatctcctccctgtacaacagcgccagcgttaagcacgccgctccgctcgtatatgtccgagccatactcgccgatgattctttttggtctctctctctttttgggttacaacagtattggtattggcccacggaaaccttgtctaggagttgggctcatttttgcgggattcctccgattagcctgcctgccggccggcgaagtaaggggccgggaactggaaatatacagaggttttgtactattaggcatacgctttggccactccaggcgatgaaattgctgacttgctgtc

SEQ ID NO: 27481 - protein, 274 aa, Triticum aestivum
MSKGPVPFPSFGKKAKDLLYKDYNFDQKFSWSTTSESGLGITASGVKFDELFIGDIRVQHKSGRNTVDVTIDCDSKVSTAVTFDEVVPGLKTSFGFKVPDQKSGKLDLQYLHDRFTLNSTIGLTSAPVIELATTIGTNELAVGAEVGFDSTSASVTKYNSGVSYTKDDFSAALQMADKGETLKASYIHLFSPTSAVAAEVTHRLKTKENYFTIGSSHALDPSTTLKTRFSNSGKAGLLCRHEWRPKSYVTLSAEYDPKVVSSPSRFGVAVALSP

SEQ ID NO: 27482 - DNA, 520 bp, Triticum aestivum
  misc_feature (260)..(260): n is a, c, g, or t
  misc_feature (263)..(263): n is a, c, g, or t
  misc_feature (415)..(415): n is a, c, g, or t
  misc_feature (426)..(426): n is a, c, g, or t
  misc_feature (450)..(450): n is a, c, g, or t
atagatctcatctgacggcctcgacggcatcgatcgatcacttcacggccacacaccatgcccggcgacacggaaccgcgcgtcgtggaggacttcctcggcgtcgtccagctcctcagcgacggctccgtcgtccgcggcgacgaagccgtcctacgttcaaacgagccgttaccggacgtccccggcgtgcagtggaaggacgtcctgtaccacgcggcgcacggccttagtgtccgcgtgtacaggccggcgtggtnggnggccggcggcagcaagctcccggtgctggtgtacttccacggcggcggctactgcctcggctcgttcgcggagcccaacttccactcgttctgcctccgcgccgcagccgagatctcggccgtcgtgctgtccgtgcagtaccggctcgccnccgagcaccgnctccccgcggccatcgacgacggngcgtctttcctgtcctggctgcgcggccaggccgagcttggcgccggcgccgacccgtggctcgcggagt

SEQ ID NO: 27483 - protein, 154 aa, Triticum aestivum
  misc_feature (68)..(69): Xaa can be any naturally occurring amino acid
  misc_feature (120)..(120): Xaa can be any naturally occurring amino acid
  misc_feature (123)..(123): Xaa can be any naturally occurring amino acid
  misc_feature (131)..(131): Xaa can be any naturally occurring amino acid
MPGDTEPRVVEDFLGVVQLLSDGSVVRGDEAVLRSNEPLPDVPGVQWKDVLYHAAHGLSVRVYRPAWXXAGGSKLPVLVYFHGGGYCLGSFAEPNFHSFCLRAAAEISAVVLSVQYRLAXEHXLPAAIDDXASFLSWLRGQAELGAGADPWLAE

SEQ ID NO: 27484 - protein, 76 aa, Triticum aestivum
RSHLTASTASIDHFTATHHARRHGTARRGGLPRRRPAPQRRLRRPRRRSRPTFKRAVTGRPRRAVEGRPVPRGARP

SEQ ID NO: 27485 - DNA, 1248 bp, Triticum aestivum
acgagaccattacctagaacgtcctaatcgaaaaccatttctcgcatatatttttcttcccgtttcccgattcaagtcagcggttagggttcggagatctcggcgtcgcatcgcggccatggcgacaagcacgcttagcacagtcatggtgagcaatttgtcgctgaaagcagcactaagagatgtaaaggaattcttttccttttctggtgaccttgtgcatgttgaaatgcaaagtggtgacgagctgtctcaagttgcctacattgcttttaaagataagcaaggagctgagacagccatgcttctgacgggtgccacgatagtcgatatggctgtcatcgtaacaccagccactgattatgagctaccagctgatgttttagctgctctagagcccaaagatgcaaagtcctctgctcttgagaaggcagaggacatcgttgggaccatgctggccaaggggttcattcttggtagggatgcgctcgacaaagcaaaagctttagacgagaagcatcagctcacatcaactgcgactgctcgagtatcttcctttgacaagagaatcggtctgagtgagaagatcagcgttggtacttcagttgtaaatgataaagtaaaggaaatggatcagaaatatctagtttccgagaagactaggtcagcacttgcagctgctgaacagggcgtctctactgctggatctgccatcatgaagaacaggtatgtccttactggagcagcatgggtaactggtgccttcagtaaggttgcaaataccgcgaatgatgtcggggcaaaggcgaaggagaaaatagcggctgagcaggagggcaagaccgtagcggccgggcatgcacaagctgacatgtcggacgctcgtgaaaagcccagggatttggatggtgaagtcacaaagatacatgtctctgaaaaccctgaagatatccccatatctaccgctgcagttttccccattacagtagatgattccagcgatgcgtctccaccaccgcctgctactgctcttcccaagaaaccggaacctgcgcagggattgatactatgatgatctggctgatacatgaatgtaaatagacatatgaggtgggttgtttaattcaggctgtagcgttgtggctgctgtattgtgattcacctgtttgaaggttgaaatttatcaggaccgaaagagtttgggatttgtagcagccattttaattgatcaaacaatattatcatgct

SEQ ID NO: 27486 - protein, 356 aa, Triticum aestivum
RDHYLERPNRKPFLAYIFLPVSRFKSAVRVRRSRRRIAAMATSTLSTVMVSNLSLKAALRDVKEFFSFSGDLVHVEMQSGDELSQVAYIAFKDKQGAETAMLLTGATIVDMAVIVTPATDYELPADVLAALEPKDAKSSALEKAEDIVGTMLAKGFILGRDALDKAKALDEKHQLTSTATARVSSFDKRIGLSEKISVGTSVVNDKVKEMDQKYLVSEKTRSALAAAEQGVSTAGSAIMKNRYVLTGAAWVTGAFSKVANTANDVGAKAKEKIAAEQEGKTVAAGHAQADMSDAREKPRDLDGEVTKIHVSENPEDIPISTAAVFPITVDDSSDASPPPPATALPKKPEPAQGLIL

SEQ ID NO: 27487 - protein, 317 aa, Triticum aestivum
MATSTLSTVMVSNLSLKAALRDVKEFFSFSGDLVHVEMQSGDELSQVAYIAFKDKQGAETAMLLTGATIVDMAVIVTPATDYELPADVLAALEPKDAKSSALEKAEDIVGTMLAKGFILGRDALDKAKALDEKHQLTSTATARVSSFDKRIGLSEKISVGTSVVNDKVKEMDQKYLVSEKTRSALAAAEQGVSTAGSAIMKNRYVLTGAAWVTGAFSKVANTANDVGAKAKEKIAAEQEGKTVAAGHAQADMSDAREKPRDLDGEVTKIHVSENPEDIPISTAAVFPITVDDSSDASPPPPATALPKKPEPAQGLIL

SEQ ID NO: 27488 - protein, 308 aa, Triticum aestivum
MVSNLSLKAALRDVKEFFSFSGDLVHVEMQSGDELSQVAYIAFKDKQGAETAMLLTGATIVDMAVIVTPATDYELPADVLAALEPKDAKSSALEKAEDIVGTMLAKGFILGRDALDKAKALDEKHQLTSTATARVSSFDKRIGLSEKISVGTSVVNDKVKEMDQKYLVSEKTRSALAAAEQGVSTAGSAIMKNRYVLTGAAWVTGAFSKVANTANDVGAKAKEKIAAEQEGKTVAAGHAQADMSDAREKPRDLDGEVTKIHVSENPEDIPISTAAVFPITVDDSSDASPPPPATALPKKPEPAQGLIL

SEQ ID NO: 27489 - DNA, 883 bp, Triticum aestivum
gcaaaatcgtcggcgaacgatacaaacttgcaaagacgcccccaccaaaaggccaaaaccaaaacacaaagctcgagccctagaaccgcgatggactcagggggcggaggaggggggtcgcacaaggccgcgtcgggctccgcgccgtcggcggccgcggcggcggcggcgccgaaccccacggcgatgctctcggccctgatgggcaagcgcgccaagctccaggaggaggtccgctccatcgagcggcaggtttatgatatggagaccacctacctacaagaatctaatcagttcggaagcgtgctgaagggttttgaatcattcttgtcatcgtcaaaaaacactgctaacctcaagcggtccaggaagtttcaggttgatgagagactattctctctgtcatcagttacttctccagcggttgaagagcagctggctgcacgagatgaggcaagagaatatgcaggtcgttcaaagggtgcaagcactccagctaatggccaagggaaaccaaagaagggagggcgtcctggagggagagatggcaagagaatacgtccatcgaacgatccagacttggacgacgaagatgactactaaccctctcatgtttcaggcatcttttaactttgtggctgcatctagttctgtctttatgtgttgttgcctttaggctttagccatgttctcttgcaaatccaaaccagcgccgaggaatctcctgtattttaggctcccagctcatctgcttgcttgggcgtgcgtcttcgcctttttttttcttcgttttgccctttgtaacatataaggtagcagcaagttaattagacatgaaaagttgtgtggacatcattctgtttcttgtaaactaataacttgt

SEQ ID NO: 27490 - protein, 200 aa, Triticum aestivum
AKSSANDTNLQRRPHQKAKTKTQSSSPRTAMDSGGGGGGSHKAASGSAPSAAAAAAAPNPTAMLSALMGKRAKLQEEVRSIERQVYDMETTYLQESNQFGSVLKGFESFLSSSKNTANLKRSRKFQVDERLFSLSSVTSPAVEEQLAARDEAREYAGRSKGASTPANGQGKPKKGGRPGGRDGKRIRPSNDPDLDDEDDY

SEQ ID NO: 27491 - protein, 170 aa, Triticum aestivum
MDSGGGGGGSHKAASGSAPSAAAAAAAPNPTAMLSALMGKRAKLQEEVRSIERQVYDMETTYLQESNQFGSVLKGFESFLSSSKNTANLKRSRKFQVDERLFSLSSVTSPAVEEQLAARDEAREYAGRSKGASTPANGQGKPKKGGRPGGRDGKRIRPSNDPDLDDEDDY

SEQ ID NO: 27492 - protein, 138 aa, Triticum aestivum
MLSALMGKRAKLQEEVRSIERQVYDMETTYLQESNQFGSVLKGFESFLSSSKNTANLKRSRKFQVDERLFSLSSVTSPAVEEQLAARDEAREYAGRSKGASTPANGQGKPKKGGRPGGRDGKRIRPSNDPDLDDEDDY

SEQ ID NO: 27493 - DNA, 1087 bp, Triticum aestivum
gtccacctcctccctcctgttccttcagccaccgtgagcaatggcgcccaagcggaagggtggcaacggccggaagaagaccgtcctcctctcgatcgtcaaggaggacgcccgccatgtatgcttctcaaagcgcaagcggggcctgttcagcaagaccagcgcgctgtccctgctcacgggcgcccaggtggccgccgtcatcttctcgcccggcggcaaggtcttctccttcggccacccctccgtcgacgccgtcgtcaaccgcttcatggcgggggacgccgcggtggtccaggccgccgccgacgacaacgggttgcagacgctgcagctgcagcacggcgacatgcgcaccgagctggcggaccagaagaagcggaagaagcgcgctgaggaggccctggacaaggagcgcgctgggggggaccagattgcctcgtggctccaccccgacgtgcgcgacatggggcatgacgacatggcggccttcgccgccgcgctcttgcaggtccaggccgccgtctccggacgcgccaaccaggttctcgtcgaggcctttcgcgtcgacatcagccgtatgctccaggtgcccccgccgccgccgcctccgctccagctcttcggtgccagcaccattgagttcggtagtagcagcagcagcgccaacgccgggatggagatgcaacagatgcagatggttatggagatgccaccgccgcctgacttccccgcagtgatggggatgcagcagttggttatggagatgccaccacagccaaggttcgaggcagcgatggagatgacgccgctgcaggagttcgtcgccgggatgcagaaggtgcagcggcaggggctcgggccgaacgccgacttcccctactgaggagaagaaagacaccagacagagtccgaccgagtccgagtctcagttactatattctaaataaatcgttcagatccatgtaagatccatctacgtaggtccaagatctatgcattagttggttcaattatcttagtagcaattaaatttatggcattgtaatcttttttgtatcggtagtacaatggctggaaattcgtg

SEQ ID NO: 27494 - protein, 281 aa, Triticum aestivum
MAPKRKGGNGRKKTVLLSIVKEDARHVCFSKRKRGLFSKTSALSLLTGAQVAAVIFSPGGKVFSFGHPSVDAVVNRFMAGDAAVVQAAADDNGLQTLQLQHGDMRTELADQKKRKKRAEEALDKERAGGDQIASWLHPDVRDMGHDDMAAFAAALLQVQAAVSGRANQVLVEAFRVDISRMLQVPPPPPPPLQLFGASTIEFGSSSSSANAGMEMQQMQMVMEMPPPPDFPAVMGMQQLVMEMPPQPRFEAAMEMTPLQEFVAGMQKVQRQGLGPNADFPY

SEQ ID NO: 27495 - protein, 245 aa, Triticum aestivum
PPPPSCSFSHREQWRPSGRVATAGRRPSSSRSSRRTPAMYASQSASGACSARPARCPCSRAPRWPPSSSRPAARSSPSATPPSTPSSTASWRGTPRWSRPPPTTTGCRRCSCSTATCAPSWRTRRSGRSALRRPWTRSALGGTRLPRGSTPTCATWGMTTWRPSPPRSCRSRPPSPDAPTRFSSRPFASTSAVCSRCPRRRRLRSSSSVPAPLSSVVAAAAPTPGWRCNRCRWLWRCHRRLTSPQ

SEQ ID NO: 27496 - protein, 207 aa, Triticum aestivum
MYASQSASGACSARPARCPCSRAPRWPPSSSRPAARSSPSATPPSTPSSTASWRGTPRWSRPPPTTTGCRRCSCSTATCAPSWRTRRSGRSALRRPWTRSALGGTRLPRGSTPTCATWGMTTWRPSPPRSCRSRPPSPDAPTRFSSRPFASTSAVCSRCPRRRRLRSSSSVPAPLSSVVAAAAPTPGWRCNRCRWLWRCHRRLTSPQ

SEQ ID NO: 27497 - DNA, 1695 bp, Triticum aestivum
accattaaccagtccacaggcaggcaccggtcgtgaggcagagagagaaccagagccagacatgcagcgcctcgcctcctcccggaggctcctccgggccgccctcgcccccggccgggcgcattccagcctctccgcggccgcggtcgccgccgcgccggagaatggcgccggcgcccccaagatgccgccgttcgcgtacacgccgccgccgtacgacgggccgcgggtggcggagatcgcccagaagcgcgcccagttcctcagcccctcgctcttccacttctacgaccgccctttgaacatagtcgatggaaagatgcagtacctgttcgatgaggatggccgccgctacctggacgctttcggtggcattgcgaccgtttgttgcgggcactgccatcctgatgtgattgaagccatagtcaaccaggcaaagaagatacagcactccacagttctgtatctgaaccatgcaattgccgactttgctgaggctctggcgtccaaaatgcctggtgatctgaaggttgttttcttcacaaattctggcacagaggcaaatgagcttgcactgatgatcgctcggctttacacgggttcccatgacattatttcacttaggaatggataccatgggaatgcagctgcaacaatgggtgccactgctcaatccaactggaaatttaatgttgtccagaccggagtgcaccatgctcttaatccagacccatacagaggcgctttcgggtcagacggagagaaatatgccagagatattcaggaaaccattgactatgggactacaggaagagttgcaggtttcatttcagaggccatacagggagttggtggaatagtggaattagcaccaggatacctgcctgcggcctatgatatggtaaggaaagctggtggcctgtgcatcgccgacgaagttcaggcgggggttgcgcgcactggaagccacttctggggattcgaagggcagggtgtcatccctgatatagtcactatggcaaagggcatagggaacggaataccgataggagcggtcgttaccacacctgagattgctaaggtgttaacccgcagaagctacttcaacaccttcggtggtaaccctgtcagcacagctgccggccacgctgttctcaaggtactggagaaggagaagctgcaggagaatgcgttcgttgttggctcctacctgaaggagaaacttaacgctctgaaagagaagcatgacattatcggcgacgttagggggaaaggcctccttctcggggttgagctggtgaccgatcgccagaagaaaactccggcgaaagctgagatcgcgcaggtcatgaaccacatgaaagatatgggcgtgctggtggggaagggcggtttcttcggcaatgtgttcagggtgacgcctccgttgtgcttctccaaggaggactccgactacatgatcgaggtgatggacattgcgctgtcgaagctgtgaagaggcactgctctcatcgataaataagagacgatctgcgaaacagcacctcgttgtctcgtgttctgtcttgcaaacccatgatgcgcacatgcgatctgcgcctcctgaacattagtatgatgtgctgagtaggagctctatgtgaccaataagttcttcgtaataagatattcagatgtgctatggcagcttttatg

SEQ ID NO: 27498 - protein, 497 aa, Triticum aestivum
PLTSPQAGTGREAEREPEPDMQRLASSRRLLRAALAPGRAHSSLSAAAVAAAPENGAGAPKMPPFAYTPPPYDGPRVAEIAQKRAQFLSPSLFHFYDRPLNIVDGKMQYLFDEDGRRYLDAFGGIATVCCGHCHPDVIEAIVNQAKKIQHSTVLYLNHAIADFAEALASKMPGDLKVVFFTNSGTEANELALMIARLYTGSHDIISLRNGYHGNAAATMGATAQSNWKFNVVQTGVHHALNPDPYRGAFGSDGEKYARDIQETIDYGTTGRVAGFISEAIQGVGGIVELAPGYLPAAYDMVRKAGGLCIADEVQAGVARTGSHFWGFEGQGVIPDIVTMAKGIGNGIPIGAVVTTPEIAKVLTRRSYFNTFGGNPVSTAAGHAVLKVLEKEKLQENAFVVGSYLKEKLNALKEKHDIIGDVRGKGLLLGVELVTDRQKKTPAKAEIAQVMNHMKDMGVLVGKGGFFGNVFRVTPPLCFSKEDSDYMIEVMDIALSKL

SEQ ID NO: 27499 - protein, 477 aa, Triticum aestivum
MQRLASSRRLLRAALAPGRAHSSLSAAAVAAAPENGAGAPKMPPFAYTPPPYDGPRVAEIAQKRAQFLSPSLFHFYDRPLNIVDGKMQYLFDEDGRRYLDAFGGIATVCCGHCHPDVIEAIVNQAKKIQHSTVLYLNHAIADFAEALASKMPGDLKVVFFTNSGTEANELALMIARLYTGSHDIISLRNGYHGNAAATMGATAQSNWKFNVVQTGVHHALNPDPYRGAFGSDGEKYARDIQETIDYGTTGRVAGFISEAIQGVGGIVELAPGYLPAAYDMVRKAGGLCIADEVQAGVARTGSHFWGFEGQGVIPDIVTMAKGIGNGIPIGAVVTTPEIAKVLTRRSYFNTFGGNPVSTAAGHAVLKVLEKEKLQENAFVVGSYLKEKLNALKEKHDIIGDVRGKGLLLGVELVTDRQKKTPAKAEIAQVMNHMKDMGVLVGKGGFFGNVFRVTPPLCFSKEDSDYMIEVMDIALSKL

SEQ ID NO: 27500 - protein, 436 aa, Triticum aestivum
MPPFAYTPPPYDGPRVAEIAQKRAQFLSPSLFHFYDRPLNIVDGKMQYLFDEDGRRYLDAFGGIATVCCGHCHPDVIEAIVNQAKKIQHSTVLYLNHAIADFAEALASKMPGDLKVVFFTNSGTEANELALMIARLYTGSHDIISLRNGYHGNAAATMGATAQSNWKFNVVQTGVHHALNPDPYRGAFGSDGEKYARDIQETIDYGTTGRVAGFISEAIQGVGGIVELAPGYLPAAYDMVRKAGGLCIADEVQAGVARTGSHFWGFEGQGVIPDIVTMAKGIGNGIPIGAVVTTPEIAKVLTRRSYFNTFGGNPVSTAAGHAVLKVLEKEKLQENAFVVGSYLKEKLNALKEKHDIIGDVRGKGLLLGVELVTDRQKKTPAKAEIAQVMNHMKDMGVLVGKGGFFGNVFRVTPPLCFSKEDSDYMIEVMDIALSKL

SEQ ID NO: 27501 - DNA, 670 bp, Triticum aestivum
ccatcttttagattgttccccaccaaaaccctagaatccctaatccaatccccaccagttccccacgtctgccgatggggctcttctcgtggtggaggggctcccgccgcggctcgccggagcaggccccgagccagcagccggcgaagggagcgggaggcgcgcaggcccaggtggccgtccccggcacccatggggcggtggaggtgctgcggcagcggcagccggacgcgacggtcttcgagttcgggtcggcggcggagtccggcaccgccgtcacgctcgcagggtactgccccgtctccgacgagctcgagccgtgccgctgggagctggtgcccgccaccggcgagggcgcaccgcagttccgcatcgtgttctgagcacgaggagataaccacccctatgctgcctcgcggtatctatcttgggtgttgccaggtttcgtaggtgcaagggtgtgatcattgggtgtatactgctgcttgtgaatttcttgaaataaaacttgagatgtggatgagtccttgtggagggtaacatgtgctggttggaatgctgggctttctgtcagtttgtgatgaacaaattagccaatttcggcagctctttataagatttatcaaattagccaaaaaaaaaaaaaaaaaagcttatcgataccgtcgac

SEQ ID NO: 27502 - protein, 149 aa, Triticum aestivum
PSFRLFPTKTLESLIQSPPVPHVCRWGSSRGGGAPAAARRSRPRASSRRREREARRPRWPSPAPMGRWRCCGSGSRTRRSSSSGRRRSPAPPSRSQGTAPSPTSSSRAAGSWCPPPARAHRSSASCSEHEEITTPMLPRGIYLGCCQVS

SEQ ID NO: 27503 - protein, 102 aa, Triticum aestivum
MGLFSWWRGSRRGSPEQAPSQQPAKGAGGAQAQVAVPGTHGAVEVLRQRQPDATVFEFGSAAESGTAVTLAGYCPVSDELEPCRWELVPATGEGAPQFRIVF

SEQ ID NO: 27504 - protein, 85 aa, Triticum aestivum
MGRWRCCGSGSRTRRSSSSGRRRSPAPPSRSQGTAPSPTSSSRAAGSWCPPPARAHRSSASCSEHEEITTPMLPRGIYLGCCQVS

SEQ ID NO: 27505 - DNA, 617 bp, Triticum aestivum
acacacagccagagtgagctagctctaataaaccctgtacgtagtagactcgcagtagctcggataggaagctatggcgacgaaagcggcggtgctcgtcacgctgctggcactgaacctgctcttcttcgccttggccgacgactgcgggtgccacctgcctagcccgccgccgccggcagggggaggaggagggggcggcggcggcggtggaggcaagggtggcagcgggcagtgcccgatcgacgcgctgaagcttggggcgtgcgcgaacgtgctgggcgggctgatcaacctgcggccggtgacgacgccgaagcagacgtgctgctcgctgctccaggggctggcggacctggatgcggccgtgtgcctgtgcacggcgctcaaggccaacaacctgggcatccacctcaacgtgcccgtcgacctcagcctcctcatcaactactgcggcaagaacgtcccctccggcttccagtgcccctcctagaagacccatccacggcaacatctccggcatatatgtcattgactagtgtactacgaatgtagcttttttttctgacgggtaaaacactttacttctcaaataatagacatgtcgtttacaagag

SEQ ID NO: 27506 - protein, 139 aa, Triticum aestivum
MATKAAVLVTLLALNLLFFALADDCGCHLPSPPPPAGGGGGGGGGGGGKGGSGQCPIDALKLGACANVLGGLINLRPVTTPKQTCCSLLQGLADLDAAVCLCTALKANNLGIHLNVPVDLSLLINYCGKNVPSGFQCPS

SEQ ID NO: 27507 - DNA, 735 bp, Triticum aestivum
gaccggaccgagcaaagctccgtcttttctctctcccacgcccaccagcgatcccatctcaccgccgccgcccgcgtggaggaccgccgctgcggaggagccggaggcatgaggaagtccaaggcggcggctgcggcggccgcgaagcagccgcaccacgcggcgcagaacggccacgccctcccgtcccggctcgcccggtacctcgaccccgacgcgtccttggacaaggaccagctgctggacgcggtgcactggatccggcaggcggtggggctcgcctgcggcctgctctggggcgccgtccccctcgtcggcgccttctggatcgccctattctttactatttccaccgtgatagttcatttgtactatgcacacttgctgaagattgatgaggaagactttggaggccatgccgccctacttcaggaggggctctttgcttcgttcactcttttcctgctttcgtggactctggtatacagcctggctcacttctgagaggcccgtctgcagaaacatggcgtcggattttcgttgttaattttcattcactatcttgtaaaattagttatcaaggatgtaatggcatggtcatgtagaacaacgtcgtcgtcgagctataactgtaatgtggatagaatccccttaaactttagtgagaaaatagagtgcctggtctacccagtcatgccaaaaaaaaaaaaaaaaaagcttatcgataccgtcgac

SEQ ID NO: 27508 - protein, 167 aa, Triticum aestivum
DRTEQSSVFSLSHAHQRSHLTAAARVEDRRCGGAGGMRKSKAAAAAAAKQPHHAAQNGHALPSRLARYLDPDASLDKDQLLDAVHWIRQAVGLACGLLWGAVPLVGAFWIALFFTISTVIVHLYYAHLLKIDEEDFGGHAALLQEGLFASFTLFLLSWTLVYSLAHF

SEQ ID NO: 27509 - protein, 131 aa, Triticum aestivum
MRKSKAAAAAAAKQPHHAAQNGHALPSRLARYLDPDASLDKDQLLDAVHWIRQAVGLACGLLWGAVPLVGAFWIALFFTISTVIVHLYYAHLLKIDEEDFGGHAALLQEGLFASFTLFLLSWTLVYSLAHF

SEQ ID NO: 27510 - protein, 130 aa, Triticum aestivum
PDRAKLRLFSLPRPPAIPSHRRRPRGGPPLRRSRRHEEVQGGGCGGREAAAPRGAERPRPPVPARPVPRPRRVLGQGPAAGRGALDPAGGGARLRPALGRRPPRRRLLDRPILYYFHRDSSFVLCTLAED

SEQ ID NO: 27511 - DNA, 1022 bp, Triticum aestivum
aaccccagacaccacagccagcaatcagaccatggacggcggcggcggcgtgcggccatcgctccagcccgcggcggccggaggaggggcgtcgggcagcccggacgagccccgcgacgcgcgcgtggtgcgggagctcctccgctccatggggctcggcgagggcgagtacgagccgcgcgtcgtgcaccagttcctcgacctcgcctaccgctacgccggggacgtgctcggcgacgcccaggtctacgccgaccacgccggcaagccccagctcgacgccgacgacgtccgcctcgccatccaggccaaggtcaacttctccttctcccagccgccgccccgcgaggttctactcgagctggcacgcagcaggaacaaaatcccgctgcccaagtctattgctccacctggctcgattcctctgccacctgagcaggacaccttgctgagccagaactaccagctcctacccgcattgaagccgccaactcagaccgaggaagcagaagatgacgaggagggtgccaacgcggacgctgccaatcctaacccgaactccttgcaggatcagacgggcaacgagcagcagcagcagcctcagagccagagccagggccagagggtttctttccagctgaacgccgtggccgccgcagctgcaaagcgtctccgaatgacgattgatcagctgaacatgggctgactggatgttgtagatcgttggctggtccctggtactttgtgtcattggtgttgtagattgttggctggtccctgggatcgctatcgccctcctatttcaccatgtgattagtttaaaaaagtaataattcaccatgagaaacgctgatgcttcaggaaacggagcagccttgcaaataagtgtatgttgttgccgtgcaccccgggttgattagtttctgtccatcgttgtcaacttggtttgttttgtagatggtgttgacttgtcaaacttgaactgttccattgttgtttctgaataccaaatcagtgttccc

SEQ ID NO: 27512 - protein, 234 aa, Triticum aestivum
TPDTTASNQTMDGGGGVRPSLQPAAAGGGASGSPDEPRDARVVRELLRSMGLGEGEYEPRVVHQFLDLAYRYAGDVLGDAQVYADHAGKPQLDADDVRLAIQAKVNFSFSQPPPREVLLELARSRNKIPLPKSIAPPGSIPLPPEQDTLLSQNYQLLPALKPPTQTEEAEDDEEGANADAANPNPNSLQDQTGNEQQQQPQSQSQGQRVSFQLNAVAAAAAKRLRMTIDQLNMG

SEQ ID NO: 27513 - protein, 224 aa, Triticum aestivum
MDGGGGVRPSLQPAAAGGGASGSPDEPRDARVVRELLRSMGLGEGEYEPRVVHQFLDLAYRYAGDVLGDAQVYADHAGKPQLDADDVRLAIQAKVNFSFSQPPPREVLLELARSRNKIPLPKSIAPPGSIPLPPEQDTLLSQNYQLLPALKPPTQTEEAEDDEEGANADAANPNPNSLQDQTGNEQQQQPQSQSQGQRVSFQLNAVAAAAAKRLRMTIDQLNMG

SEQ ID NO: 27514 - protein, 185 aa, Triticum aestivum
MGLGEGEYEPRVVHQFLDLAYRYAGDVLGDAQVYADHAGKPQLDADDVRLAIQAKVNFSFSQPPPREVLLELARSRNKIPLPKSIAPPGSIPLPPEQDTLLSQNYQLLPALKPPTQTEEAEDDEEGANADAANPNPNSLQDQTGNEQQQQPQSQSQGQRVSFQLNAVAAAAAKRLRMTIDQLNMG

SEQ ID NO: 27515 - DNA, 1393 bp, Triticum aestivum
aaaacacaccccaaccccactcccccctctattggcggagagagagaggccaaggagggagatccactccgtccgatggcgatggcgccgccgcgtctgctgcggggcctcatcgcgccgatgtcgccggcggactggctgccctgccacctccagctgctggcctcgtccgcctcgctcctgcaccgctggtggctcccctcgctcgcgcgcctccgctgcccctcctgctccgacggattcaagctcttcctcgtcctgctcctcttctccgccgccctcgccgaggtccgcttcgtcgcctccgcctccatggcgcccaccctccgcccgggcgaccgcgccgtcgcagaaaaagtcacctacatgttccggaagccatctgccggggatgtagtcttcttccgggtgcccgccgccctgcagaattgcggcataaataaagatgttgtatttattaagagggttgttgccacccctggagatttcatcgaggtccgacaaggccagcttattgttaatggtgttgcacaaaatgaacattacaccgcaccccatggtgggtcggacacgatggaagccatggtccagagatacttgtatacccaaattcctatgggtcactaccacacaaacaaatgactttaccactgcaagaggaggaccaaaagtggcatggctgctccgtgttgttgacttcttgactgccttgttattctttcgagatgacgggcctcagatgcgcctccctgaagaccatgtattcgtcatgggtgataaccgcaataacagctgcgattctcgtgcctggggacctcttcctatcagcaacattgttgggagacacatcatgtcctttacaagatcctccctccaatagccaaggcgaagatcttcgacggccaccagagttgccaaacccctcctcgatgccactcgatatgatgtaatcgagctatgttgggcctcgagcccctagtatgtaaatctgtgagaccttcctttcctgtcttagcacgggaccgttgtatgtgtagtgacttaatcccggggagcactgaatagtgacttgtagctgttgtcactcaccccccacggccccacccctggactgtcagctgttaagcttacctgttggtagaacctgcaagatgtacctaaaggttacaccttctagtaaccttagctgtcgaatctaatcggtaatgttattattaccatgcaccgtgtgcttggctgtcaatcaaaaaaggaaaaatctgcatgcctgaagataagtctgtttgtctgatgctgtgtgtggtgcagattatctcttggtatcatttttctaaaaaaaaaaaaaaaaaagcttatcgataccgtcgacctcgagggggggcccggtacccaa

SEQ ID NO: 27516 - protein, 213 aa, Triticum aestivum
KTHPNPTPPSIGGEREAKEGDPLRPMAMAPPRLLRGLIAPMSPADWLPCHLQLLASSASLLHRWWLPSLARLRCPSCSDGFKLFLVLLLFSAALAEVRFVASASMAPTLRPGDRAVAEKVTYMFRKPSAGDVVFFRVPAALQNCGINKDVVFIKRVVATPGDFIEVRQGQLIVNGVAQNEHYTAPHGGSDTMEAMVQRYLYTQIPMGHYHTNK

SEQ ID NO: 27517 - protein, 188 aa, Triticum aestivum
MAMAPPRLLRGLIAPMSPADWLPCHLQLLASSASLLHRWWLPSLARLRCPSCSDGFKLFLVLLLFSAALAEVRFVASASMAPTLRPGDRAVAEKVTYMFRKPSAGDVVFFRVPAALQNCGINKDVVFIKRVVATPGDFIEVRQGQLIVNGVAQNEHYTAPHGGSDTMEAMVQRYLYTQIPMGHYHTNK

SEQ ID NO: 27518 - protein, 186 aa, Triticum aestivum
MAPPRLLRGLIAPMSPADWLPCHLQLLASSASLLHRWWLPSLARLRCPSCSDGFKLFLVLLLFSAALAEVRFVASASMAPTLRPGDRAVAEKVTYMFRKPSAGDVVFFRVPAALQNCGINKDVVFIKRVVATPGDFIEVRQGQLIVNGVAQNEHYTAPHGGSDTMEAMVQRYLYTQIPMGHYHTNK

SEQ ID NO: 27519 - DNA, 1135 bp, Triticum aestivum
atttacctcgtcaggtcctcccaacaccataacttagcaggtaggttcgcttagacttcagccgaggtttcttcatcagccaagcccaagcccaatcggattagggaagcgtacttcgactccggccggagtgagggataggaaggaggagggggcttcagccgagacccaagggagaaagatctcacatcagataggcaactgcagcagtagagttcaacaagccgaaggggaaatggcaattggacagactatgccgaaggggtctctcgccaccagcttgagcttcccaagcagcggcagcacaaggatcctggggaggaagagggtcgctgtttctccggctccaagcccctcaggcccgcactccccggtgcggactctgcgcaagcagcgcagcattaggttccacatggatgacaccatctgccttcttgaatcgctgcctcaagatgtcttggttaaagtcctgtgcaaggtgaaccacagcgacctgaggcagctcctcctggtgtcgaagccagtcagcgaagcaacagtggttgctaaggagctgcatttcgccttcgcgacgccgtcgaaggcctccacggacggcgaggaggaagatgatggccccggggcgcccaagcaacacagggttgcacggtcgcgctgccggggcatgaatttggcaagtgtcgccgtcaatctgtcggagtcgttcagcagcttgatgtcagaggtgtaggtgtacataccacggcacgaattttcccgcttgtacttgtccatcggagcgctcttttttcttcataggccacgtcgaacagaaacactttagttagtgatatatgtagtgatcatcatatgtgttagtagtaagttatatatggtcattcttcaatgctgcgattgaagaggacacgctgctttatttctgtgtatgtaatagtataagttatatgtaagcgtcatgagtgttggagctcattagaagagtatttagtgtaagttatatgtaagcgtcatagtgttggaactcagaagagacgtctcttctcactttgtgtatgctgtagtgtacgatctctgtatactcgtgtgcatgggaagtttctcttattaataaaagtaaaatcagtttgtcttgggc

SEQ ID NO: 27520 - protein, 164 aa, Triticum aestivum
MAIGQTMPKGSLATSLSFPSSGSTRILGRKRVAVSPAPSPSGPHSPVRTLRKQRSIRFHMDDTICLLESLPQDVLVKVLCKVNHSDLRQLLLVSKPVSEATVVAKELHFAFATPSKASTDGEEEDDGPGAPKQHRVARSRCRGMNLASVAVNLSESFSSLMSEV

SEQ ID NO: 27521 - protein, 158 aa, Triticum aestivum
MPKGSLATSLSFPSSGSTRILGRKRVAVSPAPSPSGPHSPVRTLRKQRSIRFHMDDTICLLESLPQDVLVKVLCKVNHSDLRQLLLVSKPVSEATVVAKELHFAFATPSKASTDGEEEDDGPGAPKQHRVARSRCRGMNLASVAVNLSESFSSLMSEV

SEQ ID NO: 27522 - protein, 105 aa, Triticum aestivum
MDDTICLLESLPQDVLVKVLCKVNHSDLRQLLLVSKPVSEATVVAKELHFAFATPSKASTDGEEEDDGPGAPKQHRVARSRCRGMNLASVAVNLSESFSSLMSEV

SEQ ID NO: 27523 - DNA, 947 bp, Triticum aestivum
attttctttaaaaacgcggaagcccggtgacaggagtaggcgaagcagggagcaatgtcgccaccgacgaagaaagagagggcggcagaggccagggcgagctcgtcaaaaccgatcgtcgcgggggcttcccaggttcagcggcggagggtgagcggaggcgggtggacgagccgccggatatccttctacgcctcccgcgtgtacttcctgctcatcatcctccagatcccgctcttcagggtcccttgtagagcaggcacatgcactacacctattcaaattacatcttcacagttggtctcaaatgagatattcccaccatctgttgtgaaggccatgctctaccctggagctatagtgcgcaacctcactacaagcatgagcatgacatttccaaggtggagtgacctgtttgacatatacaatctgacagaagctaagaatgcttcagcagtaattgatctacagcgtctagagatgcttgctggaagctacttctgtgttgctggagcactcgttggcatcattaatcctgggaggatgatcttgtttggtacgcttttggttatctggggtctcgtgaaagatgcgctcttccggaagcctgtgatcagtgatctaacagaaccagtatatgtctatcctaccattttgattgcactgatttgttcattcatgtcaataacttacaatgtgaagaagaaggcgatgagcagccagtctgtttctatctctaagccactgcaaagttctgccaagtcaaaactgaagtaggtactttattgtcagattgtcagcctttatcgatgtagctcatctccatcatctgattgctgaactactcaagactgattatggttctcatgtaccactcttaatactgtaaccattaatttttctcatttatatcgaagtctcacactatctataattttgattcatcc

SEQ ID NO: 27524 - protein, 240 aa, Triticum aestivum
MSPPTKKERAAEARASSSKPIVAGASQVQRRRVSGGGWTSRRISFYASRVYFLLIILQIPLFRVPCRAGTCTTPIQITSSQLVSNEIFPPSVVKAMLYPGAIVRNLTTSMSMTFPRWSDLFDIYNLTEAKNASAVIDLQRLEMLAGSYFCVAGALVGIINPGRMILFGTLLVIWGLVKDALFRKPVISDLTEPVYVYPTILIALICSFMSITYNVKKKAMSSQSVSISKPLQSSAKSKLK

SEQ ID NO: 27525 - protein, 145 aa, Triticum aestivum
MLYPGAIVRNLTTSMSMTFPRWSDLFDIYNLTEAKNASAVIDLQRLEMLAGSYFCVAGALVGIINPGRMILFGTLLVIWGLVKDALFRKPVISDLTEPVYVYPTILIALICSFMSITYNVKKKAMSSQSVSISKPLQSSAKSKLK

SEQ ID NO: 27526 - protein, 131 aa, Triticum aestivum
MSMTFPRWSDLFDIYNLTEAKNASAVIDLQRLEMLAGSYFCVAGALVGIINPGRMILFGTLLVIWGLVKDALFRKPVISDLTEPVYVYPTILIALICSFMSITYNVKKKAMSSQSVSISKPLQSSAKSKLK

SEQ ID NO: 27527 - DNA, 537 bp, Triticum aestivum
ctatgacgaagttctaggaaagtccatattcgagggcttgtcaaacccttttaccgccgcaagatatcatagcttggtcattgaggaggaaagcttcccacacgatgaactggaagtcacggcatggactgaagatggactagtcatggctgctcgccacaagaagtacacgcatatccagggggtccagttccacccagagagtatcatcacccctgaaggcaagagaatcatcctcaactttgcgagatacgtcgaggagtttgagaagcagacctccgaggggaagtagagcattcaggaagcagagcagttagaggaagtagagactattgttgagagatcagatcaggcaggcaggcaggatggggcctaaaaggcaaacagattcagaggaagggaataagggaaaaagagctttccgttgccattagtttggttcattgtaatatatcatcgtggatcgagatcccgtatgaacttcatttggtcaattatgtgcgtcgtggtgctctttctcaaataataaatcggtgg

SEQ ID NO: 27528 - protein, 96 aa, Triticum aestivum
YDEVLGKSIFEGLSNPFTAARYHSLVIEEESFPHDELEVTAWTEDGLVMAARHKKYTHIQGVQFHPESIITPEGKRIILNFARYVEEFEKQTSEGK

SEQ ID NO: 27529 - protein, 48 aa, Triticum aestivum
MAARHKKYTHIQGVQFHPESIITPEGKRIILNFARYVEEFEKQTSEGK

SEQ ID NO: 27530 - DNA, 1227 bp, Triticum aestivum
agaacatcctaatcgaaaagcctacaccaaaacttcccttgtcatcgcagatcacgagctagctatctgagcgcaggaaatagctaaacacaccagctcgctcgtaagcacactcccacgccgaccggcaagatggtgaagcctgtgcaggacgaggagaaccagaggctgctcctcgacgaccacaaggagaagcacttcacctccggcgaggtggtccgggacatcatcatcggcgtctctgacggcctcaccgtgcccttcgccctagccgccggcctgtcgggcgccaacgcgtcctcctcgctcgtgctcaccgccgggctcgccgaggtcgccgccggcgccatctccatggggctcggagggtacctcgccgctaagagcgacgccgaccactactaccgggagctgcagcgcgagcaggacgagatcgacaccgtcccggacacagaggccgcggagatcgcggacatactctctgagtacgggctgggccccgaggagtacgggccggtcgtcacctccctccgcaacaacccaaaggcctggctcgagttcatgatgaagttcgagctggggctggagaagccggacccgcggcgcgcgctgacgagcgcggcgacgatcgcgctggcctacgtcgtcggcggcatggtgccgctctccccctacatgttcctggcgtcggtcgacagcgccatgatgacctccgtcgtggtcaccctcgccgcgctgctcttcttcggctacgtcaagggccgcttcaccgggaaccgcccgttcctcagcgccatccagactgccatcatcggcgcgcttgcctcctccgccgcctacggcatggccaaggccgtgcaggccatctgatcgagctcgagccacgccgcgcccgggggacggctaagtaccaagaaaaataagtacagcaagctacctacctgtgtatgtatgatcaagtgttgccatagtggagtggtagctgtacgtgcagactctagcgtccgatctggtaagtgtactggtggcccaagtgtgctgatgtgcaccgttcgttttgttttctgtttcgttttcgagctcgatgatgatgtacactatgttagtagtgtatatgtttgggtgtatttggtttttcttctgtcgcgttaggtaagtatactatttgtaagggaagttgcgttatttaggtgatgtggtaatctgatgggctttgagtcagctgcc

SEQ ID NO: 27531 - protein, 245 aa, Triticum aestivum
MVKPVQDEENQRLLLDDHKEKHFTSGEVVRDIIIGVSDGLTVPFALAAGLSGANASSSLVLTAGLAEVAAGAISMGLGGYLAAKSDADHYYRELQREQDEIDTVPDTEAAEIADILSEYGLGPEEYGPVVTSLRNNPKAWLEFMMKFELGLEKPDPRRALTSAATIALAYVVGGMVPLSPYMFLASVDSAMMTSVVVTLAALLFFGYVKGRFTGNRPFLSAIQTAIIGALASSAAYGMAKAVQAI

SEQ ID NO: 27532 - protein, 171 aa, Triticum aestivum
MGLGGYLAAKSDADHYYRELQREQDEIDTVPDTEAAEIADILSEYGLGPEEYGPVVTSLRNNPKAWLEFMMKFELGLEKPDPRRALTSAATIALAYVVGGMVPLSPYMFLASVDSAMMTSVVVTLAALLFFGYVKGRFTGNRPFLSAIQTAIIGALASSAAYGMAKAVQAI

SEQ ID NO: 27533 - DNA, 501 bp, Triticum aestivum
ccatccccttccccccctctcttcttctccatcaatccccgacgaaaccaaccaaccaacaatggaagttgctgcgcccaagcaactcctccccatggcgccgcgggaccccaactccccgtcctcctccacctcctcctcctcgccgtcttccgccgcgtcgccctccagccaccggcccagcccgctgccgccgtccccgaggcccgtgccccgcaccatcgacaccacccccttccccaccaccttcgtccaggccgacaccgcctccttcaagcaggtcgtccagatgctcaccggcgccgacatgcctccgccgtcctcgcagccgcaggcccagagccagaggccccccgcggccgccaacagcaaggccggcgcgccgtgccggcccaagaagccggcgttcaagctctacgagcgccggagcagcatgaagaacctcaagatgatcgcgccgctcgccatggcggccgccgcgggggcgtcgccgaggaaggc

SEQ ID NO: 27534 - protein, 167 aa, Triticum aestivum
PSPSPPLFFSINPRRNQPTNNGSCCAQATPPHGAAGPQLPVLLHLLLLAVFRRVALQPPAQPAAAVPEARAPHHRHHPLPHHLRPGRHRLLQAGRPDAHRRRHASAVLAAAGPEPEAPRGRQQQGRRAVPAQEAGVQALRAPEQHEEPQDDRAARHGGRRGGVAEEG

SEQ ID NO: 27535 - protein, 166 aa, Triticum aestivum
HPLPPLSSSPSIPDETNQPTMEVAAPKQLLPMAPRDPNSPSSSTSSSSPSSAASPSSHRPSPLPPSPRPVPRTIDTTPFPTTFVQADTASFKQVVQMLTGADMPPPSSQPQAQSQRPPAAANSKAGAPCRPKKPAFKLYERRSSMKNLKMIAPLAMAAAAGASPRK

SEQ ID NO: 27536 - protein, 146 aa, Triticum aestivum
MEVAAPKQLLPMAPRDPNSPSSSTSSSSPSSAASPSSHRPSPLPPSPRPVPRTIDTTPFPTTFVQADTASFKQVVQMLTGADMPPPSSQPQAQSQRPPAAANSKAGAPCRPKKPAFKLYERRSSMKNLKMIAPLAMAAAAGASPRK

SEQ ID NO: 27537 - DNA, 988 bp, Triticum aestivum
cagtcaaacacacagccgatcgaaaccaagttgagcaacagccaaagtgctacttaaagattatcttgttttccgactgctgatccgctgttgtcagtttgtttgagccagtttagcactactccttcctacgtgggagatggcatccaaccagaaccaggcgagctacggcgccggcgaggccaagggccactcccaggagaaggccgggcaggcgatgggcgcggccaaggacaaggcgtacgaggccaaagaccaggcagcgggcctggcggggcacgcgtccgggcaggggcaaggcgccacggaggcctccaagcacaaggccggcgaggccaccgacaaggcgtcccagacggcgcaggccgccaaggacaaggcctccgagaccgcgcaggccgccaaggaccgcaccgtcgagagcaaggaccagaccggcagcttcctcggcgagaagacggagatggccaagcagaaggctgccgagaccgccgaggcggccaggcagaaggcggcggagacggcgcagtacacgcaggacaggacatacgacgcggcgcagtatgccaaggagtccgccgtggccggcaaggacaagaccggcagcgtgctccagcaggccggcgagacggtggtgggcgccaaggacgccgtggccaacacgctggggatgtgcggagatggcacaggcaacaacgccgccaccaaggacaccaccgagaggatcaccagggatcactagatgcatgccactcgcgcttaatttgctttcgtttccttctcctgatacacattttacgttccagtttcatggtttccggacgcggacgcacatcttgttgtaaactctccttatgctgctcagtgtcctgggtcagtacggatgtctgacgggagatgtatctttgtgttcgtcagacttctcttttgtaataataaactttattttgttccgatgaactgggtgagcagacacgtctcatccaag

SEQ ID NO: 27538 - protein, 200 aa, Triticum aestivum
MASNQNQASYGAGEAKGHSQEKAGQAMGAAKDKAYEAKDQAAGLAGHASGQGQGATEASKHKAGEATDKASQTAQAAKDKASETAQAAKDRTVESKDQTGSFLGEKTEMAKQKAAETAEAARQKAAETAQYTQDRTYDAAQYAKESAVAGKDKTGSVLQQAGETVVGAKDAVANTLGMCGDGTGNNAATKDTTERITRDH

SEQ ID NO: 27539 - protein, 174 aa, Triticum aestivum
MGAAKDKAYEAKDQAAGLAGHASGQGQGATEASKHKAGEATDKASQTAQAAKDKASETAQAAKDRTVESKDQTGSFLGEKTEMAKQKAAETAEAARQKAAETAQYTQDRTYDAAQYAKESAVAGKDKTGSVLQQAGETVVGAKDAVANTLGMCGDGTGNNAATKDTTERITRDH

SEQ ID NO: 27540 - DNA, 1424 bp, Triticum aestivum
ttttggatcccatccaccccttctccgctcctctttaaagccgccgcccgtccccctctgcgttccaccgcactaccgccagcgcagcgacaccagagctcgttcgatagcttagagcggaggcgaggaggaggagatgaggatgtcgctgctgagatccgcgtcgcagcacctgcgccgccgccgcggctactcgtcgacgcccgcgcagccggagcggaaggtggccatcctcggcgcggcgggcggcatcggccagccgctggcgctgctcatgaagctcaacccgctcgtctcctccctctccctctacgacatcgccgccacgcccggcgtcgccgccgacgtatcccacatcaacacccgcgccctggtgaaggggttcgtcggggacgaccagctcggggaggcgctggagggcgccgacctcgtcatcatccccgccggggtgccccgcaagcccggcatgaccagggacgacctcttcaagatcaacgcagggatcgtcaagggcctctgcaccgccatcgccacgcactgccccaacgctctcgtcaatatgatcagcaaccctgtcaactcgactgtcccaattgcagctgaggtgttcaagaaggctggtacctatgatgagaagaagctgtttggtgtgaccactcttgatgttgttcgtgctaaaacattctatgctggaaaggcgaacgtgccagttactggggtgaatgttcctgttgttggtggccatgctggaatcactatcctgccactgttctcacaggctactcctgcaagtaatgcattgtcccatgaggaccttgtcgccctcacgaagaggacacaagatggtggcacggaagttgttgaagcgaaggctggaaagggctcagcaacattgtcgatggcatatgctggtgcagtttttggagatgcatgcttgaaggggctcaacggtgttcctgacatcgtagagtgctcttttgtccaatcaactgtaacagagctgccattctttgcctccaaggtgaggctgggcaagagcggcgtggaggaagtgatggggctgggcgagctgtcggcgttggagaaggaggggctggagagcctcaagggcgagctgctgtcttccatcgagaagggcgtcaagttcgcgcaggaaagctaggctgcaacctgctcagcctataacaatcggttcacacttgaactcatgcaaatttttgttcgaccgctttcgttgcccccaaacccgggtgtgccgctgggcatcgaggcgtcgccgtgctccacaataaaatgtactactggctttgatgtcccgccagactgaactgaacctgtcgtaccagaaacagcagacaccggtgcctatgtgttcatggcattcgtacccgagatcacgaagcgcgaaaccgaagattctgcgg

SEQ ID NO: 27541 - protein, 341 aa, Triticum aestivum
MRMSLLRSASQHLRRRRGYSSTPAQPERKVAILGAAGGIGQPLALLMKLNPLVSSLSLYDIAATPGVAADVSHINTRALVKGFVGDDQLGEALEGADLVIIPAGVPRKPGMTRDDLFKINAGIVKGLCTAIATHCPNALVNMISNPVNSTVPIAAEVFKKAGTYDEKKLFGVTTLDVVRAKTFYAGKANVPVTGVNVPVVGGHAGITILPLFSQATPASNALSHEDLVALTKRTQDGGTEVVEAKAGKGSATLSMAYAGAVFGDACLKGLNGVPDIVECSFVQSTVTELPFFASKVRLGKSGVEEVMGLGELSALEKEGLESLKGELLSSIEKGVKFAQES

SEQ ID NO: 27542 - protein, 339 aa, Triticum aestivum
MSLLRSASQHLRRRRGYSSTPAQPERKVAILGAAGGIGQPLALLMKLNPLVSSLSLYDIAATPGVAADVSHINTRALVKGFVGDDQLGEALEGADLVIIPAGVPRKPGMTRDDLFKINAGIVKGLCTAIATHCPNALVNMISNPVNSTVPIAAEVFKKAGTYDEKKLFGVTTLDVVRAKTFYAGKANVPVTGVNVPVVGGHAGITILPLFSQATPASNALSHEDLVALTKRTQDGGTEVVEAKAGKGSATLSMAYAGAVFGDACLKGLNGVPDIVECSFVQSTVTELPFFASKVRLGKSGVEEVMGLGELSALEKEGLESLKGELLSSIEKGVKFAQES

SEQ ID NO: 27543 - protein, 295 aa, Triticum aestivum
MKLNPLVSSLSLYDIAATPGVAADVSHINTRALVKGFVGDDQLGEALEGADLVIIPAGVPRKPGMTRDDLFKINAGIVKGLCTAIATHCPNALVNMISNPVNSTVPIAAEVFKKAGTYDEKKLFGVTTLDVVRAKTFYAGKANVPVTGVNVPVVGGHAGITILPLFSQATPASNALSHEDLVALTKRTQDGGTEVVEAKAGKGSATLSMAYAGAVFGDACLKGLNGVPDIVECSFVQSTVTELPFFASKVRLGKSGVEEVMGLGELSALEKEGLESLKGELLSSIEKGVKFAQES

SEQ ID NO: 27544 - DNA, 703 bp, Triticum aestivum
ctccatccatccactctcccagccaaatcgagccgagccaagccgccgcctgagctgagaggcaggaatggggtggaaggccgcggagaagctcatcaggcactggaagatcctccgcggcgacaacgtgatgatcataaggggcaaggacaagggggagagcgggctgatcaagcgggtcatccggtcgcagaatcgcgtcatcgtcgagggcaagaatctggttaagaaacatattaagcaaggggaaggacaaacaggtgggatcttctcaatggaagctccacttcatgtttcaaatgtacaagtaattgatccagtcaccgggaaaccatgcaagactacatacaagtatttgccagatgggactaaagtaagggtctctagaggaatgaatgcgtctggtgctgtcatacctcggccagaaattttgaaggagagaaaaaagccaagacccacatctcatggcccaaaggacacaccaattgagcatgtgctggagaagacctatgatgccaaagctggaattggtatgcctgatctatgagagaagacgtccattgctgagaatgaaagagaaagagtcgggaatatttgtgatctatccatcctagttaagatagtaggaactctgcggttattatgtcaggaagcactcaacatttgttcacgaataaaactagccagcatctcgtgtgtttcc

SEQ ID NO: 27545 - protein, 159 aa, Triticum aestivum
MGWKAAEKLIRHWKILRGDNVMIIRGKDKGESGLIKRVIRSQNRVIVEGKNLVKKHIKQGEGQTGGIFSMEAPLHVSNVQVIDPVTGKPCKTTYKYLPDGTKVRVSRGMNASGAVIPRPEILKERKKPRPTSHGPKDTPIEHVLEKTYDAKAGIGMPDL

SEQ ID NO: 27546 - protein, 138 aa, Triticum aestivum
MIIRGKDKGESGLIKRVIRSQNRVIVEGKNLVKKHIKQGEGQTGGIFSMEAPLHVSNVQVIDPVTGKPCKTTYKYLPDGTKVRVSRGMNASGAVIPRPEILKERKKPRPTSHGPKDTPIEHVLEKTYDAKAGIGMPDL

SEQ ID NO: 27547 - protein, 90 aa, Triticum aestivum
MEAPLHVSNVQVIDPVTGKPCKTTYKYLPDGTKVRVSRGMNASGAVIPRPEILKERKKPRPTSHGPKDTPIEHVLEKTYDAKAGIGMPDL

SEQ ID NO: 27548 - DNA, 942 bp, Triticum aestivum
atatagagcaagggaggggggttgcagttgaggcccagccacatacagccgaaggaagaagagaacgtctgtcatctgcttaattccttgtgccgaggtagctgccaattccaaagactgtgagtaagaggagaacgtggttagctaggaaatgtgcggcggagctgttacagccgactttgtcccggccggagcccgccgcccggatggctcctccgccgacgtccccggctccagcctcaccgtcaccggtgaggaggtgacggagaaatcgccggcgccggggcggaagacggcgtaccgtgggatcaggcgccggccatggggccgctgggctgcggagatccgggaccccaggaagggcgcgcgcgtctggctgggcacctacgccagcgcggaggaggccgcgcgcgcctacgacgtcgcggcgcgcgatatccgcgggccgaaggccaagctcaacttcccacccgcggtgggcgcgccgcaggaggccgcggccgttgcaggggcgggggcgcccaagaagcgtcgcatcgtcgcggcagaggagagctccgcgtcttggtctccacttccggccccggctagcggcggcggcggcggcacagacagcctgcgggagcgcatgtccggcctggaggcgttcctggggctggaggacggcaacgtggagccctgggaggccgtcaatctcatcatggagtaggcgtgtgccgtcgccacgtgcggcagctctgcggcgtgcatgggttacatttgccgataaataagcagattggtcgaagtcttttgattagttagagtatcattcggctttcctgggctttcgccgggcatatccaggtcctttgtagtggaatgctatgtaattcaagcatgacgatcagaagaaatgtggagaacttgcacccacttttctgacataaaatggaactttcc

SEQ ID NO: 27549 - protein, 185 aa, Triticum aestivum
MCGGAVTADFVPAGARRPDGSSADVPGSSLTVTGEEVTEKSPAPGRKTAYRGIRRRPWGRWAAEIRDPRKGARVWLGTYASAEEAARAYDVAARDIRGPKAKLNFPPAVGAPQEAAAVAGAGAPKKRRIVAAEESSASWSPLPAPASGGGGGTDSLRERMSGLEAFLGLEDGNVEPWEAVNLIME

SEQ ID NO: 27550 - DNA, 1368 bp, Triticum aestivum
actcctcccctaaaagaactccggtggcgtactactagaaaacagcagagacggctgtgccctgctcctccttctcgccggtgccttctgctggaggcaaacgaaactcctcctcctcctcctgcccctctctcccacgcttcccccttcgtctccgtcgacaggaagcaaccaggagaggcgaggcggcgacgatgcagatgaagcagaaggtctacgagctctacaaggggacggtggagcgggtcacgggcccgcgcaccgtctcggcgttcctcgagaagggcgtcctctccgtccccgagttcatcctcgccggcgacaacctcgtatccaagtgcccaacctggtcctgggaggcgggcgatccgagcaagaggaagccatacctcccctccgataagcagttcctcgtcaccaggaacgtgccctgcctaagacgagctgtggcggtcgaggaagagtatgatgcagcgggagctgaggttgttctcgatgatgatgaggatggcgaaggctggctcgcaacacatgggctgcaagcatcagagtcaaaagaggaggaagacataccgtctatggatacattggacatagggaaagtcgaagagatcaaatctatcccctcctactttggtgctagtgaaaagccagatgaggaggaggatatacctgacatggacacctatgaagacacaggagatcattctacagctacccctcagccttcatattttgtcgcagaagagcctgatgatgacaacattcttctcaccagaacatatgatgttagcatcacatatgacaagtactaccaaactccacgtgtctggcttacaggctatgatgaggcaagaatgccattaaagcctgaacttgtgtttcaagatatcagtcaagaccatgcacacaaaacggtgactatcgaagaccatcctcacttgttagtgggacagcacgcttccgtgcatccttgcaagcacgctgctgtgatgaaaaagatcattgatgttatagtgtctcaaggaggtgcaccagaagttgacaagtaccttttcatatttctcaaattcatggcttctgtcatacccaccattgagtatgattacactatggatttcgatctgggcagtacaagcacataagccgcccattgaagaaaagctgaaactcccgagaaggtgagctgttcatggtcgccgaataattgctgctcttcggaaggatctgtacattgtgtccgtgtgtgttggttcgtttggaaatgaactttcaattgtaaactctgatgctctgcaggaagattgtcctgattggtcctcttacggtgtggtgccgcactgatatgacatttgtgattcttcgccg

SEQ ID NO: 27551 - protein, 316 aa, Triticum aestivum
MQMKQKVYELYKGTVERVTGPRTVSAFLEKGVLSVPEFILAGDNLVSKCPTWSWEAGDPSKRKPYLPSDKQFLVTRNVPCLRRAVAVEEEYDAAGAEVVLDDDEDGEGWLATHGLQASESKEEEDIPSMDTLDIGKVEEIKSIPSYFGASEKPDEEEDIPDMDTYEDTGDHSTATPQPSYFVAEEPDDDNILLTRTYDVSITYDKYYQTPRVWLTGYDEARMPLKPELVFQDISQDHAHKTVTIEDHPHLLVGQHASVHPCKHAAVMKKIIDVIVSQGGAPEVDKYLFIFLKFMASVIPTIEYDYTMDFDLGSTST

SEQ ID NO: 27552 - protein, 314 aa, Triticum aestivum
MKQKVYELYKGTVERVTGPRTVSAFLEKGVLSVPEFILAGDNLVSKCPTWSWEAGDPSKRKPYLPSDKQFLVTRNVPCLRRAVAVEEEYDAAGAEVVLDDDEDGEGWLATHGLQASESKEEEDIPSMDTLDIGKVEEIKSIPSYFGASEKPDEEEDIPDMDTYEDTGDHSTATPQPSYFVAEEPDDDNILLTRTYDVSITYDKYYQTPRVWLTGYDEARMPLKPELVFQDISQDHAHKTVTIEDHPHLLVGQHASVHPCKHAAVMKKIIDVIVSQGGAPEVDKYLFIFLKFMASVIPTIEYDYTMDFDLGSTST

SEQ ID NO: 27553 - protein, 188 aa, Triticum aestivum
MDTLDIGKVEEIKSIPSYFGASEKPDEEEDIPDMDTYEDTGDHSTATPQPSYFVAEEPDDDNILLTRTYDVSITYDKYYQTPRVWLTGYDEARMPLKPELVFQDISQDHAHKTVTIEDHPHLLVGQHASVHPCKHAAVMKKIIDVIVSQGGAPEVDKYLFIFLKFMASVIPTIEYDYTMDFDLGSTST

SEQ ID NO: 27554 - DNA, 700 bp, Triticum aestivum
taatcaaaaaatccttccagccctcttcgatctgggcagaggtgttcctccaccagctcgggaatccccttcaactcgccaccgccaccgccgccgccgccggcgagccacggaccttctccgcgcccccataccctcgccaacacaggaagattcgcgcccaggaggttctcctctgacagcggtcgcgcccgccccctccaggtaatattctactgtatcgagcacattgaaagatggttaatgcaatcaaggggctgttcatctcctgtgatataccaatggctcagttcattgttaatatgaatgcgtcaatgcccgcatcagagaagttcatcgtgcacattcttgaccccacacacatgtttatccagcctaatatgggagattacatcaaaagtaagatggcggagttcagagatcagaacaactacgagaagccaacatgaagggccactatccattaccgcggtgctagcttcaaactccatccagagatacctatgttgattatcgctatgtagaatggttatatgccgagactgaatgttatgtctctctcgtgatgttctggaatgacaattctgtagtatcgcagagttttgcgtcttatgtatctttggagtgagcctttagctgataatatttccggtgatgttgatcttgataccttgcactgaataaagtaccacttcttgtg

SEQ ID NO: 27555 - protein, 70 aa, Triticum aestivum
MVNAIKGLFISCDIPMAQFIVNMNASMPASEKFIVHILDPTHMFIQPNMGDYIKSKMAEFRDQNNYEKPT

SEQ ID NO: 27556 - protein, 68 aa, Triticum aestivum
NQKILPALFDLGRGVPPPARESPSTRHRHRRRRRRATDLLRAPIPSPTQEDSRPGGSPLTAVAPAPSR

SEQ ID NO: 27557 - protein, 67 aa, Triticum aestivum
MRQCPHQRSSSCTFLTPHTCLSSLIWEITSKVRWRSSEIRTTTRSQHEGPLSITAVLASNSIQRYLC

SEQ ID NO: 27558 - DNA, 1031 bp, Triticum aestivum
acaagtcctcccgagtccacctccttccccttcccccgatcttatcctcggcgaagctgctctaatggcggatccgccggcgtcgtccccggccgacgaggcgcgggatccaggtagctcagaagctgctcctcatgggagtagtacgtcgcaagacacgaaagagcaggaagacatgaaaggagaagcggctgttgcgacctctgaacccgtgagggaggaactggtccagagtgccgttagttttctgagtcaccccaaagtcgtggcatcttccgatgtccagaggcgttccttcctggaaaataaagggctcaccatggacgaaattgaagaagcatttcgacgtttacttagcccaccttcaaactctacaaactcaaatatgtgtgaatctcaaggaagtcctgatcctgaaactttaacccctgtggtgccccggcacccaaaatcatatatggaggtcatggaaatgatacagaggggagagcggccagatgatatccaggatattaatgatgagccaccaaaccctgatcagccaatctcgaaacccagtatggcacccaagcccaagccgtgggagaagcaaggccaacaaagttccggcctggacctgaaagctcacacaagcaaccccagcgaatcgtcgtcaggagttcaaaccgatggcaccagccaggccacgggatcaaacaacagctccggtcacgggaacttgatgctgacggcagagccggctacaggctctgaagcccccgtggatggcgttgccacctcgccaaagcagtaactctggaaatgcatagacgaacggcggtgggatcaggacatgatgtgaatcagcgtcgacctgatgctgcttcagattccagcaccacattgttgcatcttccgttattatcagaaactagtttagtttagggggtcagcgacatttttgggaagctgggattggattcttgctggaaatgagcacctacaatatgtacttatcattggcattgggcaaaaaaaaaaaaaaaaaagct

SEQ ID NO: 27559 - protein, 263 aa, Triticum aestivum
QVLPSPPPSPSPDLILGEAALMADPPASSPADEARDPGSSEAAPHGSSTSQDTKEQEDMKGEAAVATSEPVREELVQSAVSFLSHPKVVASSDVQRRSFLENKGLTMDEIEEAFRRLLSPPSNSTNSNMCESQGSPDPETLTPVVPRHPKSYMEVMEMIQRGERPDDIQDINDEPPNPDQPISKPSMAPKPKPWEKQGQQSSGLDLKAHTSNPSESSSGVQTDGTSQATGSNNSSGHGNLMLTAEPATGSEAPVDGVATSPKQ

SEQ ID NO: 27560 - protein, 242 aa, Triticum aestivum
MADPPASSPADEARDPGSSEAAPHGSSTSQDTKEQEDMKGEAAVATSEPVREELVQSAVSFLSHPKVVASSDVQRRSFLENKGLTMDEIEEAFRRLLSPPSNSTNSNMCESQGSPDPETLTPVVPRHPKSYMEVMEMIQRGERPDDIQDINDEPPNPDQPISKPSMAPKPKPWEKQGQQSSGLDLKAHTSNPSESSSGVQTDGTSQATGSNNSSGHGNLMLTAEPATGSEAPVDGVATSPKQ

SEQ ID NO: 27561 - protein, 205 aa, Triticum aestivum
MKGEAAVATSEPVREELVQSAVSFLSHPKVVASSDVQRRSFLENKGLTMDEIEEAFRRLLSPPSNSTNSNMCESQGSPDPETLTPVVPRHPKSYMEVMEMIQRGERPDDIQDINDEPPNPDQPISKPSMAPKPKPWEKQGQQSSGLDLKAHTSNPSESSSGVQTDGTSQATGSNNSSGHGNLMLTAEPATGSEAPVDGVATSPKQ

SEQ ID NO: 27562 - DNA, 1208 bp, Triticum aestivum
gccgaaaacacaccgtcaaaacgttttgtattcgatttcgtgcccctttcgcgtgcgtacgagcgagaccttctcccccttccccttccctgccggtggcagcgaccgaggcagccgtcggagcggacggggcgcgcgtcagcgagtttgcccggatcccccgaagcgcgcgtggttccggcgggccatgggcacgccggagttccctgacctggggcggcactgcagcgtcggcgactgccaccagatcgatttcctccccttcacctgcgaccgatgcgacttcgtcttttgccttcagcaccgaagttatacatcacataaatgtccaaaggctaataacaaggatgtcactgtcgtcatctgcccattatgtgctaaaggagttcgcctgaatccaaatgaagatgcaaacatcacctgggagtctcatgttaatactgattgcgatccatcaaattaccagagagcaacaaagaaaaagaaatgcccagttcctgggtgcagagaacagctgacattttcaaacacaatcatgtgcaaagattgtagcaaagagcactgcctcaagcacagatttggtcctgatcacaagtgcccgggcccaagaaaaccagagcctaccttcccctttgccaacatgctaagaagaagtcagaaagttgagccacgcgcaaacagcagtggcagtggttcttcctggtggagctccagccttttgaatgcagcatcaagtttcagatcatcggcagaagcaggaatgcagaaactgagcattgccaccagcgaagccgtccagaaggctaaggatggggtcaccccgagcagcagtggtggtggcctcgtggagcaatgtgttcagtgtccagcaaggttttccactgtgggggccctaatcgagcacgccgagaaatcccatgggaacaactcgcgaccgagccgtggcaaagtgacgattgatgcttgccccaaatgtagcaagggatttcaagatccggtgttactagtggagcatgttgagagggaacatggaggaacttcaaaagcataaacctgcccgtgagtcatttctcatgagtatgtctatgttatatgcctgattgctgtgtaatttattcctcatttactcgatttgattgtactctagtgagctctgggctcgaattgtgcacatgaaagaaagtcttatctcaagcctgtttaaacac

SEQ ID NO: 27563 - protein, 349 aa, Triticum aestivum
PKTHRQNVLYSISCPFRVRTSETFSPFPFPAGGSDRGSRRSGRGARQRVCPDPPKRAWFRRAMGTPEFPDLGRHCSVGDCHQIDFLPFTCDRCDFVFCLQHRSYTSHKCPKANNKDVTVVICPLCAKGVRLNPNEDANITWESHVNTDCDPSNYQRATKKKKCPVPGCREQLTFSNTIMCKDCSKEHCLKHRFGPDHKCPGPRKPEPTFPFANMLRRSQKVEPRANSSGSGSSWWSSSLLNAASSFRSSAEAGMQKLSIATSEAVQKAKDGVTPSSSGGGLVEQCVQCPARFSTVGALIEHAEKSHGNNSRPSRGKVTIDACPKCSKGFQDPVLLVEHVEREHGGTSKA

SEQ ID NO: 27564 - protein, 287 aa, Triticum aestivum
MGTPEFPDLGRHCSVGDCHQIDFLPFTCDRCDFVFCLQHRSYTSHKCPKANNKDVTVVICPLCAKGVRLNPNEDANITWESHVNTDCDPSNYQRATKKKKCPVPGCREQLTFSNTIMCKDCSKEHCLKHRFGPDHKCPGPRKPEPTFPFANMLRRSQKVEPRANSSGSGSSWWSSSLLNAASSFRSSAEAGMQKLSIATSEAVQKAKDGVTPSSSGGGLVEQCVQCPARFSTVGALIEHAEKSHGNNSRPSRGKVTIDACPKCSKGFQDPVLLVEHVEREHGGTSKA

SEQ ID NO: 27565 - DNA, 1286 bp, Triticum aestivum
acacaaactcctctcctcatcgcctctcctcgccccctctgcccttcctcatcttcctcccgttcggttgtggctccgtcttccctcacgattggtgcccgggcgccgccgccatcgccatggacggcctgcacggcgccgacgcctgcttctcccccgggagggccatgtcgccgcaggtccggccccccgccggcccgccggacgtaggcagccactacttggcggagctgttgcaggagcaccagaagctcgtcccgttcacgcaggtgctaccaatctgcagcaagctgttgagcaacgagataatgcgggtgacctgcctgcttaagcaccagcatggcggggactttgagaggctgccgccgatggcgagtccaaaccagatgcatcatcatccgtcgcccccaatgcctaatttctgcggaaatggttttggcccgtggaaccacggggcgcatccagagagggtaggttttcctcaaggacctgtgggttggcaaggagcaccacaaagcccctcttcatacattgtcaagaagattttgcggttggagataccaacagatacttaccctaatttcaattttattggccgtcttcttgggccaagaggaaactcgttgaagaggattgaagcctctacgggttgtcgtgtttttatcagagggaagggctcaattaaagatcctgggaaggaggaactgctgaagggaagacctggttacgaacacttggatgatcccctgcatatcttgattgaagcagagttacctgccaatgtcattgatgcaagactctcaaaagcacaagagatcctagaagagttgttgaaaccagtggatgaatcacaagactactacaagaggcagcaactccgtgagcttgccatgctgaactcaccgctccgagaggagagccctcgtctaagcccgcatccaagtccgcacccaagcccgcatcaaggcggcgcttcacccttcagtaacggtgggatgaaacgaagcaaacaatgactgcagaggcctgctcctcccaactttgacccttccagaaacctgctctcaatcggtgccctcacaacctaatttttcatgagcaagctttcatgatggtgttggcatccgtgcgaaacctgtgttactagtagaattttgatgagtctcccttgtgacattagcctgtgatgactgactgagaatgatctatgatagcgaatcctccgcctttataattagaacatttgatttatttgttgttggtaatcatcagatatggcactgtgc

SEQ ID NO: 27566 - protein, 337 aa, Triticum aestivum
TNSSPHRLSSPPLPFLIFLPFGCGSVFPHDWCPGAAAIAMDGLHGADACFSPGRAMSPQVRPPAGPPDVGSHYLAELLQEHQKLVPFTQVLPICSKLLSNEIMRVTCLLKHQHGGDFERLPPMASPNQMHHHPSPPMPNFCGNGFGPWNHGAHPERVGFPQGPVGWQGAPQSPSSYIVKKILRLEIPTDTYPNFNFIGRLLGPRGNSLKRIEASTGCRVFIRGKGSIKDPGKEELLKGRPGYEHLDDPLHILIEAELPANVIDARLSKAQEILEELLKPVDESQDYYKRQQLRELAMLNSPLREESPRLSPHPSPHPSPHQGGASPFSNGGMKRSKQ

SEQ ID NO: 27567 - protein, 298 aa, Triticum aestivum
MDGLHGADACFSPGRAMSPQVRPPAGPPDVGSHYLAELLQEHQKLVPFTQVLPICSKLLSNEIMRVTCLLKHQHGGDFERLPPMASPNQMHHHPSPPMPNFCGNGFGPWNHGAHPERVGFPQGPVGWQGAPQSPSSYIVKKILRLEIPTDTYPNFNFIGRLLGPRGNSLKRIEASTGCRVFIRGKGSIKDPGKEELLKGRPGYEHLDDPLHILIEAELPANVIDARLSKAQEILEELLKPVDESQDYYKRQQLRELAMLNSPLREESPRLSPHPSPHPSPHQGGASPFSNGGMKRSKQ

SEQ ID NO: 27568 - protein, 282 aa, Triticum aestivum
MSPQVRPPAGPPDVGSHYLAELLQEHQKLVPFTQVLPICSKLLSNEIMRVTCLLKHQHGGDFERLPPMASPNQMHHHPSPPMPNFCGNGFGPWNHGAHPERVGFPQGPVGWQGAPQSPSSYIVKKILRLEIPTDTYPNFNFIGRLLGPRGNSLKRIEASTGCRVFIRGKGSIKDPGKEELLKGRPGYEHLDDPLHILIEAELPANVIDARLSKAQEILEELLKPVDESQDYYKRQQLRELAMLNSPLREESPRLSPHPSPHPSPHQGGASPFSNGGMKRSKQ

SEQ ID NO: 27569 - DNA, 1208 bp, Triticum aestivum
tcgcatccctagctacaaacaactcccttgcatttggagaccgacctattgctatctgtcacagtagtagtacaacaagcgccaccggtaagatggaattccaggggcagcagggcaaccgcgtggaccagcacggcaacccggtcgccgccgcacctggagccaccgccgtgacgggggcgcccgccggcgggcagctgcagcccggcagggaggagcacaagacccgcggcatactccaccggtccagcagctccagctccagctcgtccgaggacgatggcatgggtggacggaggaagaagggcatcaaggagaagatcaaggataagcttcccggggctcgcaagcagacttacggccagcccgccgcgcccgcgggcatgaccggcaccggggcgaccggcggcccttactacgtgcagcccgctccggctggcaccggagcgcacgggaccacggcgacgaccggcacctacgggcagcccgctccggctggcatgaccggcaccggggcgcacgggaccacggcgactggtgagaagaagggcatgaaggacaagatcatggagaaactcccgggaggtcacaagaacgagcagcacaccatgcccaccgccggcgcctacggacagcccgggatgactggcaccggagtgcatgggaacaccgctcccggtgggggctatggtggtcagccagggcacgctggtatgatcggcactggaacgcatgggagcgggacaacgggcggtccttacgatcatcaagggcaccccggagtgaccggcaccggagcacacgggaccacggcgaccggcggtgcttacaaccagcaaggtcacgctggggtgacaggcaccggcgagaagaaaggtattatgggcaagatcaaggaaaagctgcctggccagcactaggcgccagtcagcgtgtttgtgaacaataggtacgagcggaggtggagcaataagcctataagtggctcacgtttgtgtgtagcgttggagtagttggtatgctgcagtactgtactgtgacgtagtgcggatgacacgtggagtcaggtgctagagtccacacgacagcgatcgtatcgtactgcagaagatctcaaccctatgtcgatgtatgagcatgttgtaagttgtaaccgttgtgtgaagtttcactatgttaaatattactttgtgtgcgcacaataatgg

SEQ ID NO: 27570 - protein, 305 aa, Triticum aestivum
ASLATNNSLAFGDRPIAICHSSSTTSATGKMEFQGQQGNRVDQHGNPVAAAPGATAVTGAPAGGQLQPGREEHKTRGILHRSSSSSSSSSEDDGMGGRRKKGIKEKIKDKLPGARKQTYGQPAAPAGMTGTGATGGPYYVQPAPAGTGAHGTTATTGTYGQPAPAGMTGTGAHGTTATGEKKGMKDKIMEKLPGGHKNEQHTMPTAGAYGQPGMTGTGVHGNTAPGGGYGGQPGHAGMIGTGTHGSGTTGGPYDHQGHPGVTGTGAHGTTATGGAYNQQGHAGVTGTGEKKGIMGKIKEKLPGQH

SEQ ID NO: 27571 - protein, 275 aa, Triticum aestivum
MEFQGQQGNRVDQHGNPVAAAPGATAVTGAPAGGQLQPGREEHKTRGILHRSSSSSSSSSEDDGMGGRRKKGIKEKIKDKLPGARKQTYGQPAAPAGMTGTGATGGPYYVQPAPAGTGAHGTTATTGTYGQPAPAGMTGTGAHGTTATGEKKGMKDKIMEKLPGGHKNEQHTMPTAGAYGQPGMTGTGVHGNTAPGGGYGGQPGHAGMIGTGTHGSGTTGGPYDHQGHPGVTGTGAHGTTATGGAYNQQGHAGVTGTGEKKGIMGKIKEKLPGQH

SEQ ID NO: 27572 - protein, 211 aa, Triticum aestivum
MGGRRKKGIKEKIKDKLPGARKQTYGQPAAPAGMTGTGATGGPYYVQPAPAGTGAHGTTATTGTYGQPAPAGMTGTGAHGTTATGEKKGMKDKIMEKLPGGHKNEQHTMPTAGAYGQPGMTGTGVHGNTAPGGGYGGQPGHAGMIGTGTHGSGTTGGPYDHQGHPGVTGTGAHGTTATGGAYNQQGHAGVTGTGEKKGIMGKIKEKLPGQH

SEQ ID NO: 27573 - DNA, 1204 bp, Triticum aestivum
aaagagcagcagcgaccgcgcccatcaccaccaccacccgcctgacggagcccttccctcccatcggcggcggagatggtggggtggctcaaggcgctggtgtactgcgcagggggcatggcggtggtgggcctggcggcgctggtggcgctgcaggagcgcctcgtctacgtgcccgtgctccctggcctcccgcgcgcttaccccatcaagccctcgcgcctccgcctcatctacgaggacgtctggctccgcgccgccgacggcgtgcgcctccactcctggttcctccgccactctcccacctgccgaggtccgaccattctgttctttcaggaaaatgccggcaatattgcacatcgtttggaatgcgttcgactaatgatgcagcggctacagtgcaatgtgtttatgctttcttatagagggtatggtgagagcgagggttatccttctcagagtggcatcacaaaagatgcacaggccgcacttgatcatctagttcagaggaaggacattgacacatccaggatagttatctttgggagatctttaggaggtgctgttggagcagttcttgcaaaaaacaatcctgacaaggtgtctgctctaatattggaaaatacttttacatctatattggatatggctggtatcatgctgcccttcttaagatggttcataggcggtagttctgccaaaggcccaaaacttcttaactgcgttgttcgctctccatggagtacacttgatgttgttgcagaggtcaaacaacccattctcttcctttctggattgcaagatgaactggttcccccgtcacacatgaggatgctgtatgacaaagctgttgaacataacaggaattgtaggtttgttgattttcccagtggtatgcatatggatacctggatttctggaggggaccgctactggaggacaatcgaattgtttctggaccaatataccccagaagtacagagttctgatgccagctgcacaagtgaaattgctgatgatggtaattactaattagtatttaccaattcattataacattttcctgcgaatattgttctatcatgttttttcttgtacgtgtagggatacattatgttgtcatatttgtgtatttaactacatagtgtagttttactaatgttaatggcaatactgaatagtgaatacaaccatttgtatcttc

SEQ ID NO: 27574 - protein, 318 aa, Triticum aestivum
MVGWLKALVYCAGGMAVVGLAALVALQERLVYVPVLPGLPRAYPIKPSRLRLIYEDVWLRAADGVRLHSWFLRHSPTCRGPTILFFQENAGNIAHRLECVRLMMQRLQCNVFMLSYRGYGESEGYPSQSGITKDAQAALDHLVQRKDIDTSRIVIFGRSLGGAVGAVLAKNNPDKVSALILENTFTSILDMAGIMLPFLRWFIGGSSAKGPKLLNCVVRSPWSTLDVVAEVKQPILFLSGLQDELVPPSHMRMLYDKAVEHNRNCRFVDFPSGMHMDTWISGGDRYWRTIELFLDQYTPEVQSSDASCTSEIADDGNY

SEQ ID NO: 27575 - protein, 304 aa, Triticum aestivum
MAVVGLAALVALQERLVYVPVLPGLPRAYPIKPSRLRLIYEDVWLRAADGVRLHSWFLRHSPTCRGPTILFFQENAGNIAHRLECVRLMMQRLQCNVFMLSYRGYGESEGYPSQSGITKDAQAALDHLVQRKDIDTSRIVIFGRSLGGAVGAVLAKNNPDKVSALILENTFTSILDMAGIMLPFLRWFIGGSSAKGPKLLNCVVRSPWSTLDVVAEVKQPILFLSGLQDELVPPSHMRMLYDKAVEHNRNCRFVDFPSGMHMDTWISGGDRYWRTIELFLDQYTPEVQSSDASCTSEIADDGNY

SEQ ID NO: 27576 - protein, 216 aa, Triticum aestivum
MMQRLQCNVFMLSYRGYGESEGYPSQSGITKDAQAALDHLVQRKDIDTSRIVIFGRSLGGAVGAVLAKNNPDKVSALILENTFTSILDMAGIMLPFLRWFIGGSSAKGPKLLNCVVRSPWSTLDVVAEVKQPILFLSGLQDELVPPSHMRMLYDKAVEHNRNCRFVDFPSGMHMDTWISGGDRYWRTIELFLDQYTPEVQSSDASCTSEIADDGNY

SEQ ID NO: 27577 - DNA, 1244 bp, Triticum aestivum
gggaagagaggagcggacagaaaagcctggaaagccaaaaaagaaatcaccaacgcaaaggggaaaggagagagaggcgaggcgaggctagggtttcgtccaattccgccatggattccggcgacgcgtggggccgctcctcctccacctcctccgccgccgccgccgccgcgaggcgcctgcagtcccgctacgatctgtacatggggttcgacgacgcggacgccggcggggacgaggtggaggcgcgcggggcggaggcatacaactgccccttttgcggcgaggactttgacttcgtcgggctctgctgccacatcgacgacgagcacgccgtcgaggccaagagcggggtatgccccatctgtgctacaagggttggggcggacttgataggccacctgacaatgcagcatggaagttacttcaagatgcaacgcaggcgcagagtccgaaaagtatcttctgggtcccattctttgctgtctttgttgagaaaggatttaagagacggcagtttgcagtcctttcttggtggatcatcctatgtatctaatcctcctgctgccgcccctgatccatttttgcaatctttaatttgtagtttgcctgtggctgaaccatcgaaagattttcgttcagagtcatctgacaaaacatttttgctaaataaattcccagatgaaaagatcgtagagagagctgaaacatctctgtctgataaggatcagaaggagcgggctcaaaggagtgcatttgcccgtgggcttgtgctttccacaatatttgatgatgataccatgtaagggaaatcgactttgagagtggttgcatgacatagtcaagggcactcaacacaagagaatttatctagagcaatgcaaccttgtcatgcagccactgccgctcacaggcgttaacgaccaaccggaggtccatccagttatgaatgtatatgtatttatgtatgccttgccgagagcgcatcatgagaatagtggaggaaggccttgtgttgcagctttccacatggaataaggggatactatccttagtggcattgtgcatatacaaaagaggggcgagctactcgtcatgtattagattatattctgttcatcaatgtaataagtgtgttgtaaactcatctcatccttagtatgtgagattgctttgatgttttctgtatatattcgattgtggtacatttgacatttgaggaaagggaatggagtgaatttaac

SEQ ID NO: 27578 - protein, 267 aa, Triticum aestivum
EERSGQKSLESQKRNHQRKGERRERRGEARVSSNSAMDSGDAWGRSSSTSSAAAAAARRLQSRYDLYMGFDDADAGGDEVEARGAEAYNCPFCGEDFDFVGLCCHIDDEHAVEAKSGVCPICATRVGADLIGHLTMQHGSYFKMQRRRRVRKVSSGSHSLLSLLRKDLRDGSLQSFLGGSSYVSNPPAAAPDPFLQSLICSLPVAEPSKDFRSESSDKTFLLNKFPDEKIVERAETSLSDKDQKERAQRSAFARGLVLSTIFDDDTM

SEQ ID NO: 27579 - protein, 231 aa, Triticum aestivum
MDSGDAWGRSSSTSSAAAAAARRLQSRYDLYMGFDDADAGGDEVEARGAEAYNCPFCGEDFDFVGLCCHIDDEHAVEAKSGVCPICATRVGADLIGHLTMQHGSYFKMQRRRRVRKVSSGSHSLLSLLRKDLRDGSLQSFLGGSSYVSNPPAAAPDPFLQSLICSLPVAEPSKDFRSESSDKTFLLNKFPDEKIVERAETSLSDKDQKERAQRSAFARGLVLSTIFDDDTM

SEQ ID NO: 27580 - protein, 200 aa, Triticum aestivum
MGFDDADAGGDEVEARGAEAYNCPFCGEDFDFVGLCCHIDDEHAVEAKSGVCPICATRVGADLIGHLTMQHGSYFKMQRRRRVRKVSSGSHSLLSLLRKDLRDGSLQSFLGGSSYVSNPPAAAPDPFLQSLICSLPVAEPSKDFRSESSDKTFLLNKFPDEKIVERAETSLSDKDQKERAQRSAFARGLVLSTIFDDDTM

SEQ ID NO: 27581 - DNA, 1458 bp, Triticum aestivum
agcgaatcgggcggaaacacaacgacgcagtcacgcaccggctctttcctccacccctcgtagggctagctagggtttctccgcccaaatcgtgtaataataacccacttgaagattcgcgcgaaagctgcggcgatggccaccaccgtccaaccccactccccggacccaacagccatcaccaccacccctgcccctccccctcctccttctccacctcgccaggagaacccgaccgccgcgggggaaggcgtagagatcgcggcgctcgatgagcagcctgccgccgtcgccgtcgccgacaaggggaatacggcccccggcggcgggaagctggtggcggaggccatgcgcaagtgcgcggcgccccggtcgtcgcgctaccacggcgtgacgaggctcaagtggagcggcaagtacgaggcacacctctgggacaacaccagccaggttgaggggcgcaagcgcaagggcaagcatgtgtacttgggaagctatgttactgaagagaatgctgcaagggcacatgaccttgcagccctgaaatattggggcataactcaacccaccaaactaaacttcaatatttctgattatgcaaaagaaattgagatcatgaagagcatgaatcaagatgaatttgtggcctacataaggaggcagagtagttgtttctcaagaggaacatcgtcatacaggggtgtaacaagacgaaaggatggtaaatggcaagcacgtattggtaggattggtgagagtagagacactaaagacatctatcttgggacctttgaaactgaagtggaggcagctgaagcgtatgacctagcagcaattcagctccgtggtgttcatgctgtgaccaactttgatatcagcaactactccgaagaaggtttgaagaaactagaaggctcatctgaggtagtgaacctggaggaccaatcagaagtcactaagttagctgtgaccaacttggatattagcaaacactgcgaagatggtttgaagaaactagatggcgcatcccaggtagtgaacctggagggccaatcagaagtcaccaagttatctgtgactaactttgatattagcaactgctgtgaagatggtttgaagaaactagaaggctcatccgaggtagcgaacctggaggaccaatcagaagtcacaaagttagctggacaatagatattagaatagcaacatgtaaattatttatttcttcctttttatcttttctctgatcgtcaatctctccacctttctcttttcttgattgatgatgagagtgtcttttcttcgtctgcctttcctgaaacttttttttcccaaggaatttcccttcgctggttgccaactctattatttaccagctccagagtaggatcgtgtgatgctgtactctgtattctcatgtacactgattacaaaccattgatagtatttgtagacatt

SEQ ID NO: 27582 - protein, 351 aa, Triticum aestivum
MATTVQPHSPDPTAITTTPAPPPPPSPPRQENPTAAGEGVEIAALDEQPAAVAVADKGNTAPGGGKLVAEAMRKCAAPRSSRYHGVTRLKWSGKYEAHLWDNTSQVEGRKRKGKHVYLGSYVTEENAARAHDLAALKYWGITQPTKLNFNISDYAKEIEIMKSMNQDEFVAYIRRQSSCFSRGTSSYRGVTRRKDGKWQARIGRIGESRDTKDIYLGTFETEVEAAEAYDLAAIQLRGVHAVTNFDISNYSEEGLKKLEGSSEVVNLEDQSEVTKLAVTNLDISKHCEDGLKKLDGASQVVNLEGQSEVTKLSVTNFDISNCCEDGLKKLEGSSEVANLEDQSEVTKLAGQ

SEQ ID NO: 27583 - protein, 280 aa, Triticum aestivum
MRKCAAPRSSRYHGVTRLKWSGKYEAHLWDNTSQVEGRKRKGKHVYLGSYVTEENAARAHDLAALKYWGITQPTKLNFNISDYAKEIEIMKSMNQDEFVAYIRRQSSCFSRGTSSYRGVTRRKDGKWQARIGRIGESRDTKDIYLGTFETEVEAAEAYDLAAIQLRGVHAVTNFDISNYSEEGLKKLEGSSEVVNLEDQSEVTKLAVTNLDISKHCEDGLKKLDGASQVVNLEGQSEVTKLSVTNFDISNCCEDGLKKLEGSSEVANLEDQSEVTKLAGQ

SEQ ID NO: 27584 - protein, 191 aa, Triticum aestivum
MKSMNQDEFVAYIRRQSSCFSRGTSSYRGVTRRKDGKWQARIGRIGESRDTKDIYLGTFETEVEAAEAYDLAAIQLRGVHAVTNFDISNYSEEGLKKLEGSSEVVNLEDQSEVTKLAVTNLDISKHCEDGLKKLDGASQVVNLEGQSEVTKLSVTNFDISNCCEDGLKKLEGSSEVANLEDQSEVTKLAGQ

SEQ ID NO: 27585 - DNA, 1032 bp, Triticum aestivum
atcgatcaaggatcagacgacacgagctagtagccacaaagccaacgatctcgaccgctcgggtcatcagcaacgaaccatggcgcgggtgctggctctcggcgccgccgcggctttcctcctcctggcagtggcatcgaccatggcggctgcgcagaactgcgggtgcgcggcgagtcagtgctgcagccgctgggggttctgcggcgccaccagcgagtactgcggcacgggctgccgctcgggtccctgcaccgtgcccgtcaccaacaacgtgtccgtgcccgccatcgtcacgccggccttcttcggcgcgctcgtcgcccaggccgccgacgactgcgccgccaagggcttctacacccgcgacgccttcctcacggcgctcggcgggtaccccgccttcggccgcaccggctccgacgacgactccaagcgcgagatcgccgccttcttcgcccacgtcaaccacgagaccataaagttctgctacatcgacgagatcaacgggccgagcaagaactactgcgacccgacgaacgcggagtggccgtgcgccgccgggaagggctactacggccgcgggccgctgcagatctcgtggaactacaactacggggcggcagggcagagcctcggcttcgacgggctcaacgacccggacgcggtggcgcggagccccgtcttggcgttccaagcggcgctctggtactggatgaacagcgtgcacgacgtcatcgtctccggccaggggttcggcgccaccatcagggccatcaatggcgcgctcgagtgcaacggcaagaaccccagcgccgtcaacgaccgcgtcgccttctacaagcagttctgccagcagttcggcgtcgacccggggaccagcctcacctgctaagctcactatctaggacatcgcgtggacttggttgtggcatatgtgcgtgcatctgattcggacagacatattcaggataaaattgctttctgatttgatactatacctgttaatttaatactaccttcgtctcgatg

SEQ ID NO: 27586 - protein, 297 aa, Triticum aestivum
SIKDQTTRASSHKANDLDRSGHQQRTMARVLALGAAAAFLLLAVASTMAAAQNCGCAASQCCSRWGFCGATSEYCGTGCRSGPCTVPVTNNVSVPAIVTPAFFGALVAQAADDCAAKGFYTRDAFLTALGGYPAFGRTGSDDDSKREIAAFFAHVNHETIKFCYIDEINGPSKNYCDPTNAEWPCAAGKGYYGRGPLQISWNYNYGAAGQSLGFDGLNDPDAVARSPVLAFQAALWYWMNSVHDVIVSGQGFGATIRAINGALECNGKNPSAVNDRVAFYKQFCQQFGVDPGTSLTC

SEQ ID NO: 27587 - protein, 271 aa, Triticum aestivum
MARVLALGAAAAFLLLAVASTMAAAQNCGCAASQCCSRWGFCGATSEYCGTGCRSGPCTVPVTNNVSVPAIVTPAFFGALVAQAADDCAAKGFYTRDAFLTALGGYPAFGRTGSDDDSKREIAAFFAHVNHETIKFCYIDEINGPSKNYCDPTNAEWPCAAGKGYYGRGPLQISWNYNYGAAGQSLGFDGLNDPDAVARSPVLAFQAALWYWMNSVHDVIVSGQGFGATIRAINGALECNGKNPSAVNDRVAFYKQFCQQFGVDPGTSLTC

SEQ ID NO: 27588 - protein, 250 aa, Triticum aestivum
MAAAQNCGCAASQCCSRWGFCGATSEYCGTGCRSGPCTVPVTNNVSVPAIVTPAFFGALVAQAADDCAAKGFYTRDAFLTALGGYPAFGRTGSDDDSKREIAAFFAHVNHETIKFCYIDEINGPSKNYCDPTNAEWPCAAGKGYYGRGPLQISWNYNYGAAGQSLGFDGLNDPDAVARSPVLAFQAALWYWMNSVHDVIVSGQGFGATIRAINGALECNGKNPSAVNDRVAFYKQFCQQFGVDPGTSLTC

SEQ ID NO: 27589 - DNA, 1354 bp, Triticum aestivum
aacctatcaccagtcaccaccattataaaccaacggccagctaggtagctaaagtgacctcctgtgagcaagaaaagctcgccaagatcagtagtgctaagcgacaggtagtgagccaagccagagcaacgaaggatggcgtccgagacgagcgtcgccgacgagaaggcgcccgctgggctgagccgctacgaggcggacgcggaggacgggcaggagggcggcggcgacgaaaagtcccggctgtccggcctgctgtggcacggcgggtcggcgtacgacgcgtggttcagctgcgcgtcgaaccaggtcgcgcaggtcctgctgacgctgccctactcgttcgcgcagctgggcatggtgagcggcatcctgttccagctcttctacggcctcctcggcagctggaccgcctacctcatcagcatcctctacctcgagtaccgcacccgcaaggagaaggacaaggtcgacttccgcaaccacgtcatccagtggttcgaggtgctggacgggctgctggggcggcactggcggaacgtggggctggccttcaactgcacgttcctgctgttcgggtcggtgatccagctcatcggctgcgctagcaacatctactacgtgaacgaccacctggacaagcggacgtggacctacatcttcggcgcctgctgcgccaccaccgtcttcatcccctccttccacaactaccgcgtctggtccttcctcggcctcctcatgaccacctacaccgcctggtacatcgccgtcgcctccctcatgcacggccaggccgacgccgtcaagcactccggccccaccaccatcatgctctacttcaccggcgccaccaacatcctctacaccttcggggggcacgctgtcaccgtgtaagccgacacgccccaccccgccccatcgtcccacctgctcacttttcacttgcatgccctaatctttttccaaagctgatcatctagtttatccgtcgtatatatacaatgttgtaacggtcactggtcacggagcgtgcacgctactactgcccagctcggggtcacgtgcaacgggaatgtcgtctgacatgcggggccgtcctgtgtataagcaacgggcgtcacctggggaccacctagacctagacatgcacgcacggtgcccatatgcgtacatgcagtatatcccaagagcacacacgtgctacccacacatcaaccgagcacaatgctcgtggatgctggagcggaacatatacgtttctgaattttcaacataaacaaagttgaaacctgagctagcaggataatatatctatctacgattttcgttaccctcaaaaaagaatttagggtcc

SEQ ID NO: 27590 - protein, 252 aa, Triticum aestivum
MASETSVADEKAPAGLSRYEADAEDGQEGGGDEKSRLSGLLWHGGSAYDAWFSCASNQVAQVLLTLPYSFAQLGMVSGILFQLFYGLLGSWTAYLISILYLEYRTRKEKDKVDFRNHVIQWFEVLDGLLGRHWRNVGLAFNCTFLLFGSVIQLIGCASNIYYVNDHLDKRTWTYIFGACCATTVFIPSFHNYRVWSFLGLLMTTYTAWYIAVASLMHGQADAVKHSGPTTIMLYFTGATNILYTFGGHAVTV

SEQ ID NO: 27591 - protein, 178 aa, Triticum aestivum
MVSGILFQLFYGLLGSWTAYLISILYLEYRTRKEKDKVDFRNHVIQWFEVLDGLLGRHWRNVGLAFNCTFLLFGSVIQLIGCASNIYYVNDHLDKRTWTYIFGACCATTVFIPSFHNYRVWSFLGLLMTTYTAWYIAVASLMHGQADAVKHSGPTTIMLYFTGATNILYTFGGHAVTV

SEQ ID NO: 27592 - DNA, 684 bp, Triticum aestivum
cccaatccccctggaggcgcggcgcatatcagcggcgacattgggcggcgatggcctcggttaggccccctctccgccgcctcgcgctgctgcttaacagccgcatccgcgccaacaaccgcttcctcgcctccgcctccacctccacctcctcctaccccaccgccgccgcagccggcaccgccaccaccgagacgccggcgccggaggagccggaggtcgtcagcatgacggataactgcgtccgtagactcaaagagttgcatactaaagaaccatctgctaagggcaacatgttgcgcttgagcgttgaagctggtggctgttctggattccagtacaccttctcactggatagcaaggaaaatgctgatgatagggtcttcgagaagaatggtgttaagttggttgtcgacaatgtctcatacgacttcgtgaaaggttcaacaatcgattatgtagaggaattgataagctcagcatttgtggtttcaaccaatccaagtgctgttggaggctgcagctgcaagagttccttcatggttaaataattcgaacattagtaactttaagaggtagcctgacagaactttaagtggtcggacccttccccagaccctgcgcaagcgggagctacatgcactggggctgccccttttttactacaatacttcgatacttccg

SEQ ID NO: 27593 - protein, 182 aa, Triticum aestivum
QSPWRRGAYQRRHWAAMASVRPPLRRLALLLNSRIRANNRFLASASTSTSSYPTAAAAGTATTETPAPEEPEVVSMTDNCVRRLKELHTKEPSAKGNMLRLSVEAGGCSGFQYTFSLDSKENADDRVFEKNGVKLVVDNVSYDFVKGSTIDYVEELISSAFVVSTNPSAVGGCSCKSSFMVK

SEQ ID NO: 27594 - protein, 166 aa, Triticum aestivum
MASVRPPLRRLALLLNSRIRANNRFLASASTSTSSYPTAAAAGTATTETPAPEEPEVVSMTDNCVRRLKELHTKEPSAKGNMLRLSVEAGGCSGFQYTFSLDSKENADDRVFEKNGVKLVVDNVSYDFVKGSTIDYVEELISSAFVVSTNPSAVGGCSCKSSFMVK

SEQ ID NO: 27595 - protein, 107 aa, Triticum aestivum
MTDNCVRRLKELHTKEPSAKGNMLRLSVEAGGCSGFQYTFSLDSKENADDRVFEKNGVKLVVDNVSYDFVKGSTIDYVEELISSAFVVSTNPSAVGGCSCKSSFMVK

SEQ ID NO: 27596 - DNA, 750 bp, Triticum aestivum
cgaaaaacttccccccatccgccgccgccgcgcctcctcctcgcccaaggtaggagcttgtgaaagttctctaaggctgagaagatggttctgaagaccgagctctgccgttttagcggccagaagatttaccctgggaagggtatcaggttcattcgttcggattcgcaggttttcctctttgccaactcaaaatgcaagcgctacttccacaaccgcctgaagcctgcaaagctttgctggacagcaatgtacaggaagcagcacaagaaggacatccatgctgaggctgccaagaagaggcgccgcaccaccaagaagccgtactcacggtcgattgttggtgccactctggaagttatccagaagaagagggctgagaagcctgaagtccgtgatgctgcccgagaagctgctctccgtgagatcaaggagcgcatcaagaagaccaaggatgagaagaaggccaagaaggcagaggtgaccaagtcccagaagtcacaggggggcaagggcgccgtgcagaagggttccaagggcccaaagattggcggtggcggcgggaagcgttgaaagtcgattacgccatagacatagaattgtgctgcctagccttgtttcctatcctactatcatagacctttgtcaagttattaccccgccatcttgaatttgcaccttatctgtgaggctgaatggtgttaacgttttggattgtctcgatgagtttatttataatgaatggtactc

SEQ ID NO: 27597 - protein, 162 aa, Triticum aestivum
MVLKTELCRFSGQKIYPGKGIRFIRSDSQVFLFANSKCKRYFHNRLKPAKLCWTAMYRKQHKKDIHAEAAKKRRRTTKKPYSRSIVGATLEVIQKKRAEKPEVRDAAREAALREIKERIKKTKDEKKAKKAEVTKSQKSQGGKGAVQKGSKGPKIGGGGGKR

SEQ ID NO: 27598 - protein, 107 aa, Triticum aestivum
MYRKQHKKDIHAEAAKKRRRTTKKPYSRSIVGATLEVIQKKRAEKPEVRDAAREAALREIKERIKKTKDEKKAKKAEVTKSQKSQGGKGAVQKGSKGPKIGGGGGKR

SEQ ID NO: 27599 - DNA, 791 bp, Triticum aestivum
agtacttgttctccatcgtgccgccagtcccctcgccgccgccgtccccctctcgctccctctccctttgtcgcgccgccgccaccgtctcttgtctcgcctgtcgccacctcaagatgtggggcggcgacgacggagggactccggaggtcaccctggagacctccatgggatccttcaccgtcgagatgtaccacaagcacgcgcccaagacctgcaggaacttcgtcgagctcgcgcgccgcaaatactacgacaacgtcgtcttccaccgcatcatcaaggatttcatcgtgcaaggtggggatcctagtggaacaggcaggggcggcgaatccatctacggagcaaaatttgaggacgagataaggccagagctgaagcacaccggggctgggattctatcaatggcaaatgctggtccgaatacaaacggaagccagttcttcatcactcttgcaccttgtcaatcactggatggtaagcacacaatttttgggagagtatgcagaggaatggaaattgttaagcgccttggaagtattcagaccgacaaaaatgataggcccattcatgaagtgaaaattctgcggactgttgttaaagattgaagcacggctgttgtcatgaaactcttaatctttggttgtagctgtttcacatgagcatgtattcccagtttgactgggaggtcttgtaatgtcaacttgtactttggtgttcctttttttaacgatgaatcttgcttgcatatgatcatttgacgagtaccaaaaaaaagatgattagtt

SEQ ID NO: 27600 - protein, 202 aa, Triticum aestivum
YLFSIVPPVPSPPPSPSRSLSLCRAAATVSCLACRHLKMWGGDDGGTPEVTLETSMGSFTVEMYHKHAPKTCRNFVELARRKYYDNVVFHRIIKDFIVQGGDPSGTGRGGESIYGAKFEDEIRPELKHTGAGILSMANAGPNTNGSQFFITLAPCQSLDGKHTIFGRVCRGMEIVKRLGSIQTDKNDRPIHEVKILRTVVKD

SEQ ID NO: 27601 - protein, 164 aa, Triticum aestivum
MWGGDDGGTPEVTLETSMGSFTVEMYHKHAPKTCRNFVELARRKYYDNVVFHRIIKDFIVQGGDPSGTGRGGESIYGAKFEDEIRPELKHTGAGILSMANAGPNTNGSQFFITLAPCQSLDGKHTIFGRVCRGMEIVKRLGSIQTDKNDRPIHEVKILRTVVKD

SEQ ID NO: 27602 - protein, 147 aa, Triticum aestivum
MGSFTVEMYHKHAPKTCRNFVELARRKYYDNVVFHRIIKDFIVQGGDPSGTGRGGESIYGAKFEDEIRPELKHTGAGILSMANAGPNTNGSQFFITLAPCQSLDGKHTIFGRVCRGMEIVKRLGSIQTDKNDRPIHEVKILRTVVKD

SEQ ID NO: 27603 - DNA, 943 bp, Triticum aestivum
ctcttcctcctaccgtcgccccagtttctcttcgctcctctcctctccgtctccccaaatccatcctagggttttactttcccctccgacaaggttttacccccgcgccccgccaccatgaccgccgccgagctgcaggcggagctgctccgcgcccagctcgaggaccacgacatcgagggagatgagcctatcgttgaggatgatgatgacgacgatgaagacgatgatgaggatgaggatgaaaaagatgacgatgacgttgcgggaggtgatgctagtggaagatctaggcagagtaagagtgagaagaagagcaggaaagccatggagaagcttggcatgaaggtcattactggtgtgagccgtgtagctatcaagaagaacaagagcgttatgtttgtcctctccaagccagatgtcttcaagagctcaaactcagatacctacgtcatgttcggggaggccaagattgaggacctgagcactcagctgcattcacaagcggcggagcagttcaaggcgccgagcccaagcagcgtcatcttgaagggcgagccgtccatggcagcagcccatgacgacgaggaggttgatgagactggtgttgacaagaaggacgttgagctcgtgatgatgcaggcctccgtgccgagatccagggccgtgaaggcgctcaaggctgcgggcggtgacatcgtcagcgccatcatggagttgactaactaggtaggtgcccaaaggtggaattgtgtcctgataatagggtcttggatagcaaagcagtcttttggtatgccatcttgaatgttgcagttgcgggattggaggttctgtctctctgttgaaactagcactgggatgtaggtttcgttggcgttttaaacatctgatgatcacaaactgcttgctctttatgggaaatatctgattcgactgtgcc

SEQ ID NO: 27604 - protein, 203 aa, Triticum aestivum
MTAAELQAELLRAQLEDHDIEGDEPIVEDDDDDDEDDDEDEDEKDDDDVAGGDASGRSRQSKSEKKSRKAMEKLGMKVITGVSRVAIKKNKSVMFVLSKPDVFKSSNSDTYVMFGEAKIEDLSTQLHSQAAEQFKAPSPSSVILKGEPSMAAAHDDEEVDETGVDKKDVELVMMQASVPRSRAVKALKAAGGDIVSAIMELTN

SEQ ID NO: 27605 - protein, 133 aa, Triticum aestivum
MEKLGMKVITGVSRVAIKKNKSVMFVLSKPDVFKSSNSDTYVMFGEAKIEDLSTQLHSQAAEQFKAPSPSSVILKGEPSMAAAHDDEEVDETGVDKKDVELVMMQASVPRSRAVKALKAAGGDIVSAIMELTN

SEQ ID NO: 27606 - protein, 128 aa, Triticum aestivum
MKVITGVSRVAIKKNKSVMFVLSKPDVFKSSNSDTYVMFGEAKIEDLSTQLHSQAAEQFKAPSPSSVILKGEPSMAAAHDDEEVDETGVDKKDVELVMMQASVPRSRAVKALKAAGGDIVSAIMELTN

SEQ ID NO: 27607 - DNA, 664 bp, Triticum aestivum
gagtcaaaaattcaaaatcagagctaatggttccttatgccagccatattttccagttcgcggaactggtcctgcgagagacatcaagggacgagggtctgacgaaagctggagttgccttggtcggggacctggcggatgcgctaggaccttccatcaaactgctgctcaagaattccaacttccactcggagctccttgggcgctgttcccagtctgatgacgaacagctgagggagactgcatcctgggtccagggtgtgatctcacgtgtgctggtttcatgagggaaagcttctccagcaaagctgccagcgttgttgatggttctctgggcaaactatttctcttgccagatgaaatatttttgagaaatatgctgcatatatgtcctgatatcatgttgcaaaagtggaacaaggttgcatgagatcatttacggtcgtcaagttcgtagtagtggcagcggcttgccattgtctaaagtgggttgggttcctgttgcattttgttcaggtgtccatgtgagtcgattgtaattgcagcaattgtgtcttgttggcaccattgctcatcagtaaagttgtcgccgatggcgtggaactgttacactccgcgtatcttcattccagtggtgattagtggatatacccatgtttttttt

SEQ ID NO: 27608 - protein, 94 aa, Triticum aestivum
VKNSKSELMVPYASHIFQFAELVLRETSRDEGLTKAGVALVGDLADALGPSIKLLLKNSNFHSELLGRCSQSDDEQLRETASWVQGVISRVLVS

SEQ ID NO: 27609 - protein, 86 aa, Triticum aestivum
MVPYASHIFQFAELVLRETSRDEGLTKAGVALVGDLADALGPSIKLLLKNSNFHSELLGRCSQSDDEQLRETASWVQGVISRVLVS

SEQ ID NO: 27610 - protein, 72 aa, Triticum aestivum
SQKFKIRANGSLCQPYFPVRGTGPARDIKGRGSDESWSCLGRGPGGCARTFHQTAAQEFQLPLGAPWALFPV

SEQ ID NO: 27611 - DNA, 865 bp, Triticum aestivum
cctagaacatcctaatcgaaaaaaaccaagcgaaaaatatccactgaatctctctcgctgctcgcggccgcggcgaccggactaaggaaggaatcgaaggcgacgatggcgtgccgagccctcgcgctccgcaccctgctgctccccgaccccctccaccacctcagcctccgcgccgccgcgtcggccccggcggcgccgtttccttgtcgccgccgccgccgcaacctccgctgctgctccagctccagtgggggcgggcccggggagcagggacagccgccgcaggaggccgtgctcgaggccatctcaagtggcactgttacagatgattcaagtgatgaatggcttgttctggatcagaaggtgaatacatatcccacagacagaggatttacagcaattggtactggaggtgaagattttgtccattctatggttgatgctgttgaatcggttcttcaagaatcgattccaaagggccaagtaagtcagaaaatatcttctaggggaaaatatgtttctgtaaaaattgggccaatacgcgtggcttcaagtgagcaggtccaggctgtatatcgcgccatgagaagagataacaggatgaaatacttcttatgaactgcaattactcattcctgtttagttccttccatcttgtaacacccgcgtcctgttatacgttttgctgtacttgtaagtattgtctcaaatggaaatattgtgttggtcttccagttcattggttccatgcgacacaaagataccccctgcaggctggagcatctatgaactttctgtgaactgatgagaggaaggacatttttgtgttacttcggcccaaatagaaattgctccattattg

SEQ ID NO: 27612 - protein, 171 aa, Triticum aestivum
MACRALALRTLLLPDPLHHLSLRAAASAPAAPFPCRRRRRNLRCCSSSSGGGPGEQGQPPQEAVLEAISSGTVTDDSSDEWLVLDQKVNTYPTDRGFTAIGTGGEDFVHSMVDAVESVLQESIPKGQVSQKISSRGKYVSVKIGPIRVASSEQVQAVYRAMRRDNRMKYFL

SEQ ID NO: 27613 - DNA, 1220 bp, Triticum aestivum
atacataccggcccctccatcttcaacttcaagatggctgcgtctcacccaagcacagaaatggctgcgtcgccgatggtgcggccgacggtgcaggagctggcggcggccggcgccgaggagccgccgcggcagtacgtgctgccggagcaagaccgtcacggcgacctgctggccgccgacgagtttccggagcccatccccctcgtcgaccttagccggctcacggacgccgacgaggccgagaggctccgggcggctctgcagacctggggcttcttcctggccaccaaccatgggatcgaggactctctcatggacgccatgacgagcgtgtcgagggagttcttccggcagccggcggaggagaggcagaaatgcagcaacctggtggacggcaacggcaaggactaccaggtggaagggtatggcagtgacaaggtggtgtccgacgatcaggtcctcaactggagcgaccggttgcatctgagagtggagccggaggatgagaggaatttcgccaagtggcccagtcaccccgaatctttcagggatgtgctacaagagtatgcatcaagaatcaagaaaataagagacctcgtcttacggtcgatagccaagctcctggagattgacgaggactacttcgtcaaccagatatcaaacaaggcccccgggtttgctagattcaactactaccctccatgtccgaggcctgacctagttttgggcctcagggctcactccgacggtggtctccttaccatccttttcaacgatgacaccgtcggtggcttgcaagttcagagagatgggagatggtacaatgttccagcaaagcctcacacattgctgattaacctagcagactgcctagaaataatgaacaatggaatctttacgagcccggttcacagagtggtgacgaacgtcgagaaggataggctttccttggctgtgttttacgccgtggatgcagaaacgatgttggagccagcgcccggtttgctggatgacaagcgaccgccaagatataagaaaatggtggccaaggattttgtggctgggctctttgaacatttccgtcaagggaagagattcattgacaccctgaaaatataggttcgctgtttattatggagccgtagaagtgattgctataaagaataaagagatggttttatctattgtgccagtgggggtctaccttcgcctttctt

SEQ ID NO: 27614 - protein, 373 aa, Triticum aestivum
IHTGPSIFNFKMAASHPSTEMAASPMVRPTVQELAAAGAEEPPRQYVLPEQDRHGDLLAADEFPEPIPLVDLSRLTDADEAERLRAALQTWGFFLATNHGIEDSLMDAMTSVSREFFRQPAEERQKCSNLVDGNGKDYQVEGYGSDKVVSDDQVLNWSDRLHLRVEPEDERNFAKWPSHPESFRDVLQEYASRIKKIRDLVLRSIAKLLEIDEDYFVNQISNKAPGFARFNYYPPCPRPDLVLGLRAHSDGGLLTILFNDDTVGGLQVQRDGRWYNVPAKPHTLLINLADCLEIMNNGIFTSPVHRVVTNVEKDRLSLAVFYAVDAETMLEPAPGLLDDKRPPRYKKMVAKDFVAGLFEHFRQGKRFIDTLKI

SEQ ID NO: 27615 - protein, 362 aa, Triticum aestivum
MAASHPSTEMAASPMVRPTVQELAAAGAEEPPRQYVLPEQDRHGDLLAADEFPEPIPLVDLSRLTDADEAERLRAALQTWGFFLATNHGIEDSLMDAMTSVSREFFRQPAEERQKCSNLVDGNGKDYQVEGYGSDKVVSDDQVLNWSDRLHLRVEPEDERNFAKWPSHPESFRDVLQEYASRIKKIRDLVLRSIAKLLEIDEDYFVNQISNKAPGFARFNYYPPCPRPDLVLGLRAHSDGGLLTILFNDDTVGGLQVQRDGRWYNVPAKPHTLLINLADCLEIMNNGIFTSPVHRVVTNVEKDRLSLAVFYAVDAETMLEPAPGLLDDKRPPRYKKMVAKDFVAGLFEHFRQGKRFIDTLKI

SEQ ID NO: 27616 - protein, 353 aa, Triticum aestivum
MAASPMVRPTVQELAAAGAEEPPRQYVLPEQDRHGDLLAADEFPEPIPLVDLSRLTDADEAERLRAALQTWGFFLATNHGIEDSLMDAMTSVSREFFRQPAEERQKCSNLVDGNGKDYQVEGYGSDKVVSDDQVLNWSDRLHLRVEPEDERNFAKWPSHPESFRDVLQEYASRIKKIRDLVLRSIAKLLEIDEDYFVNQISNKAPGFARFNYYPPCPRPDLVLGLRAHSDGGLLTILFNDDTVGGLQVQRDGRWYNVPAKPHTLLINLADCLEIMNNGIFTSPVHRVVTNVEKDRLSLAVFYAVDAETMLEPAPGLLDDKRPPRYKKMVAKDFVAGLFEHFRQGKRFIDTLKI

SEQ ID NO: 27617 - DNA, 1006 bp, Triticum aestivum
atactttcccctaccatcagcagagccacatcagggggcccgggtggaggtttgggtcgctcctactcagaaaccccagattcccaaattcctcctcgacctccatcccgtggaatccaaccaacgcggggaggcacccagcacgccggcggcgatgatccagctcctgttcgtggtgctcgtcgccgaggcggccgtggcgacggtgctgctattcaagacgccgctgcggaagctcgccatgctgggcctcgaccgcctcaagcgcggccgccgggcgcccgtcgccgtcaagaccgttgccggcgtcgtcatcacgctcctcgcctccacgctctacagcatggccgagatcagcggccgcgccggggaccccgaggccggaggcggcgccgccctctctcccaccgaccaggtcctcttctcgcgccacctcctcgaggcgtccctcatgggttacactttgtttcttgctctagttattgaccgactccaccaatatatcagagaactacgtgggctaaagaagaatgtcgaggctgtatcgaagcagaacaaaacgttagaggaaggaaaacatggaagatctcaggagatagcgaaataccaggaagaggttgccactctgaacgaggagatgaagaaactgaagctgcaagtacaagagaagaccgaggaggtccatgttgctgaggacaaggcacttgctattcaaaagcaatctgaaagcttgctgcttgaatatgaccggctcctggaggataaccaacatcttcgggagcagctgcagtcaattgatctcaggctctccaatccttcctgagagaagaatgtattgaagtagaacattatcctatcgtcaacctacttcgtgcttgaaattgtctgtttcacttttggtgcgaagtcgagtttactctttccgtaggatgttattacccagatgacatgctaatttagtaatgcctctcttatcggttttattgtcttacctaacaatatgttg

SEQ ID NO: 27618 - protein, 273 aa, Triticum aestivum
YFPLPSAEPHQGARVEVWVAPTQKPQIPKFLLDLHPVESNQRGEAPSTPAAMIQLLFVVLVAEAAVATVLLFKTPLRKLAMLGLDRLKRGRRAPVAVKTVAGVVITLLASTLYSMAEISGRAGDPEAGGGAALSPTDQVLFSRHLLEASLMGYTLFLALVIDRLHQYIRELRGLKKNVEAVSKQNKTLEEGKHGRSQEIAKYQEEVATLNEEMKKLKLQVQEKTEEVHVAEDKALAIQKQSESLLLEYDRLLEDNQHLREQLQSIDLRLSNPS

SEQ ID NO: 27619 - protein, 222 aa, Triticum aestivum
MIQLLFVVLVAEAAVATVLLFKTPLRKLAMLGLDRLKRGRRAPVAVKTVAGVVITLLASTLYSMAEISGRAGDPEAGGGAALSPTDQVLFSRHLLEASLMGYTLFLALVIDRLHQYIRELRGLKKNVEAVSKQNKTLEEGKHGRSQEIAKYQEEVATLNEEMKKLKLQVQEKTEEVHVAEDKALAIQKQSESLLLEYDRLLEDNQHLREQLQSIDLRLSNPS

SEQ ID NO: 27620 - protein, 193 aa, Triticum aestivum
MLGLDRLKRGRRAPVAVKTVAGVVITLLASTLYSMAEISGRAGDPEAGGGAALSPTDQVLFSRHLLEASLMGYTLFLALVIDRLHQYIRELRGLKKNVEAVSKQNKTLEEGKHGRSQEIAKYQEEVATLNEEMKKLKLQVQEKTEEVHVAEDKALAIQKQSESLLLEYDRLLEDNQHLREQLQSIDLRLSNPS

SEQ ID NO: 27621 - DNA, 830 bp, Triticum aestivum
ccaaattagttagagctttctctcttctcttctcttctcttctcttctcttctcttctctgctctccactgtccaggaacagcaggagcaggaaaaagaaaaagaggaggaagaagatgtcgatcaagcactgcgacaagcacgactgcgagcggcggcggctgtaccgccagttctgcgccgccctggtggccgtcatcctgctcatcctgctcatcgtcctcatcgtctggctcgtgctccgccccaccaggccgcgcttctacctcaacggcctcaccgtggcgtgcctcaacgccacctcctccccggcgtcctacctcaccgtgacgctgcaagcgacgatcgccgcccgcaaccccaactcccgcgtcggcatctacttcgaccggatggacgcctacgccgagtacaaggggcagcaggtgaccgtccccaccgcgcttcccgtggtgtaccagggccacctcgacgtgtccgtgtggtcgccgttcctggtggggtcgaacgtgccgctggccccctacctggcggtggcgctggcgcaggacgagacggccggctacgtgctgctcacggtgcgggtggacggctggatcaggtggaaggccggggccttcatcaccgggcactaccacctccgggtcaggtgccccgccctgctcaccgtcaacggagggcagggcagctacggctccatcgccggcggcggcgggaacggctacttcaacttccagcgcgccgcgccatgcgttgtcgacgtctgaacccaaccgttctctgaaatccagagcccttttggttctgctgggccgtccctgaaactaatt

SEQ ID NO: 27622 - protein, 254 aa, Triticum aestivum
KLVRAFSLLFSSLLFSSLLCSPLSRNSRSRKKKKRRKKMSIKHCDKHDCERRRLYRQFCAALVAVILLILLIVLIVWLVLRPTRPRFYLNGLTVACLNATSSPASYLTVTLQATIAARNPNSRVGIYFDRMDAYAEYKGQQVTVPTALPVVYQGHLDVSVWSPFLVGSNVPLAPYLAVALAQDETAGYVLLTVRVDGWIRWKAGAFITGHYHLRVRCPALLTVNGGQGSYGSIAGGGGNGYFNFQRAAPCVVDV

SEQ ID NO: 27623 - protein, 216 aa, Triticum aestivum
MSIKHCDKHDCERRRLYRQFCAALVAVILLILLIVLIVWLVLRPTRPRFYLNGLTVACLNATSSPASYLTVTLQATIAARNPNSRVGIYFDRMDAYAEYKGQQVTVPTALPVVYQGHLDVSVWSPFLVGSNVPLAPYLAVALAQDETAGYVLLTVRVDGWIRWKAGAFITGHYHLRVRCPALLTVNGGQGSYGSIAGGGGNGYFNFQRAAPCVVDV

SEQ ID NO: 27624 - DNA, 547 bp, Triticum aestivum
tcgttcgtttcagatcagatccagcgagagagagagacagagaaatccccaatccaccaaaccctaacccacacccactaggagagatcggcgagagagatcaggcgatggccgttgagaagatgcagtttgccatgccgatggccaccggcttcgagggatttccctacatcccgttccaggcggagaaggagcaggcgcaggcgttcgtcagggccagggcggagccggaggaggaggcggcgctcgtcatggtcaggacgaagccagaggcggcgatccgcaatgccaagtccaaggcgtccctgaaggccaaggccaaggcagagaaggaggcggaggtcctcaaggccaaggcggagaaggaagcggcgatcctcaaggccaaggcggaggcagagaaggaggaagcgatcaaggccaaggccaaggcggcgaaggaggagacgatcatcaaggccaactgctgctgcggctcggacgaggacgatgtgccgtacgacaagctgtgccacgactccgactcggaggaagacccggatataat

SEQ ID NO: 27625 - protein, 181 aa, Triticum aestivum
VRFRSDPARERDREIPNPPNPNPHPLGEIGERDQAMAVEKMQFAMPMATGFEGFPYIPFQAEKEQAQAFVRARAEPEEEAALVMVRTKPEAAIRNAKSKASLKAKAKAEKEAEVLKAKAEKEAAILKAKAEAEKEEAIKAKAKAAKEETIIKANCCCGSDEDDVPYDKLCHDSDSEEDPDI

SEQ ID NO: 27626 - protein, 146 aa, Triticum aestivum
MAVEKMQFAMPMATGFEGFPYIPFQAEKEQAQAFVRARAEPEEEAALVMVRTKPEAAIRNAKSKASLKAKAKAEKEAEVLKAKAEKEAAILKAKAEAEKEEAIKAKAKAAKEETIIKANCCCGSDEDDVPYDKLCHDSDSEEDPDI

SEQ ID NO: 27627 - protein, 141 aa, Triticum aestivum
MQFAMPMATGFEGFPYIPFQAEKEQAQAFVRARAEPEEEAALVMVRTKPEAAIRNAKSKASLKAKAKAEKEAEVLKAKAEKEAAILKAKAEAEKEEAIKAKAKAAKEETIIKANCCCGSDEDDVPYDKLCHDSDSEEDPDI

SEQ ID NO: 27628 - DNA, 1311 bp, Triticum aestivum
gatttcccccagaaattaataaaccaccaaagccatagcttgaggcggcgagaagcagagccggagaaggaggggagtcggagaagatggttgttctcgtggtagcgacggcgtccgacccggcgtccatcggccccgccgccgcgttcctggctatgcctggctggtcccccggcccgcccatccccgaggggatggagagctttacaaatgggaatgttaggttattgaagcatgaacgcagcattgttgcagaggatgatcttgaccgtcggtggcaggaagccactggagaggctgtttctgaggtcatattcctcagcaaacacactgcagtctccaaccgccctgcactcactgtccatccaatcggtgtgccacatctgagggaggatgagaccccccctcaaggagggaggcctggatgggcaggggtgccaaaccctcgaattggcccatggttccggttgatgcaaaaggttgctgccgaccaaggtcttgttccagagtttgagattacacttgaagctactcaccatggaccacttaccagtacacccacgatgtttgttgagataggaagtacacaagaatactggggtagacaagatgctgcacaggccattgctctagttctatggaaaggtcttggccttgaggaaggaaatgctgttggaacttggctggggagtggtgaaaaggttctactaggtatcggtggtggtcactatgcccctcgccatatggatattgtcatcaaagacggtgtctgggtgggtcatctcctgtctggttactctttgccgatggaggctccacctcaagtaaatggaaagagttctggtgaggttggtgggatgtggaagcattccatcaaagtttcgtatgaagccacaaaggcaggatttcccggtggtgaagttatagcacatcttgatcagaagagcttcaagggctggcaaaagaacgccatcacgagctatttgcaggagcaaaatatcaagataggaaaacccaatgatttcctctgcaaaaaaatttaaccgcgtccgcaaggcaagtcgtcgaagtgacttcaccctccctagggcctggcacatacaaatggagtaaatatagagcactgtattttcgtaacccgatttcaagatgtagagtactccctccccgttcgtcttagaaggcctgacttgtgccaaaaaaaaaaacaggaatatactacgagagagacatatcttaaggacacgactatgcgtgcttgtggttcccagagttggcaggcaaatgggggctatcattatccatattttt

SEQ ID NO: 27629 - protein, 318 aa, Triticum aestivum
MVVLVVATASDPASIGPAAAFLAMPGWSPGPPIPEGMESFTNGNVRLLKHERSIVAEDDLDRRWQEATGEAVSEVIFLSKHTAVSNRPALTVHPIGVPHLREDETPPQGGRPGWAGVPNPRIGPWFRLMQKVAADQGLVPEFEITLEATHHGPLTSTPTMFVEIGSTQEYWGRQDAAQAIALVLWKGLGLEEGNAVGTWLGSGEKVLLGIGGGHYAPRHMDIVIKDGVWVGHLLSGYSLPMEAPPQVNGKSSGEVGGMWKHSIKVSYEATKAGFPGGEVIAHLDQKSFKGWQKNAITSYLQEQNIKIGKPNDFLCKKI

SEQ ID NO: 27630 - protein, 295 aa, Triticum aestivum
MPGWSPGPPIPEGMESFTNGNVRLLKHERSIVAEDDLDRRWQEATGEAVSEVIFLSKHTAVSNRPALTVHPIGVPHLREDETPPQGGRPGWAGVPNPRIGPWFRLMQKVAADQGLVPEFEITLEATHHGPLTSTPTMFVEIGSTQEYWGRQDAAQAIALVLWKGLGLEEGNAVGTWLGSGEKVLLGIGGGHYAPRHMDIVIKDGVWVGHLLSGYSLPMEAPPQVNGKSSGEVGGMWKHSIKVSYEATKAGFPGGEVIAHLDQKSFKGWQKNAITSYLQEQNIKIGKPNDFLCKKI

SEQ ID NO: 27631 - protein, 282 aa, Triticum aestivum
MESFTNGNVRLLKHERSIVAEDDLDRRWQEATGEAVSEVIFLSKHTAVSNRPALTVHPIGVPHLREDETPPQGGRPGWAGVPNPRIGPWFRLMQKVAADQGLVPEFEITLEATHHGPLTSTPTMFVEIGSTQEYWGRQDAAQAIALVLWKGLGLEEGNAVGTWLGSGEKVLLGIGGGHYAPRHMDIVIKDGVWVGHLLSGYSLPMEAPPQVNGKSSGEVGGMWKHSIKVSYEATKAGFPGGEVIAHLDQKSFKGWQKNAITSYLQEQNIKIGKPNDFLCKKI

SEQ ID NO: 27632 - DNA, 1725 bp, Triticum aestivum
ttttttttcgagcggcgacgaaatgcagtccacctccgtttgctacccacgcacgcggccgcgggcccacggccggaggagctagaaagacctatcgccaccaggcccggtcccgagggaaaggaatccagcaaggcagccaggagcgcgcccccacccgccggcgacggccacatgccgaccgcctcctgcctccgcccgcctctccgcagcggccgctccgccgcggcgggcctcaggttccctcccccggcggggctggcgattgggagctggcggaggaggctcgccggggtcggggtggcggccgcctccgcctcgcccttcgacgagctctacgcgcggggaaggcccatccacggcccctccaagaaatctaccttgtggaatttgatccaagacatagagcctttggatcttagtgtcattcagaaagatgttcctcttgaaacggttgatgcaatgaagaggaccatctctggcatgttgggtctgcttccatctgatcagttccgtgttgttgtagaagccctttggagtccatttttcaagttattggtatcttcaatcatgactgggtatactctacgtaatgctgaatgcaggctctcttttgaaaggaacctagaactttctgaagaagatgctgaatgtgagaaaagagacacgactgaagataatcttcatgatatcaatttgggtaggcctgttacaattttcagattatcggaagacgacatgccccaggactctggaaaaagtgacgaagaatcatctggtgagagtatgggggaaatgttaagtaacttaacaccccaagtggaagagcagattattcggttgcaatctcgtttggatgcgatgaaaaaggagttgcatgacctgaagaggaaaaattctgcccttcaaatgcaacagtttgttggagaagagaaaaatgatctgctagactatctaagatccctaacaccagagaaggttgctgaactctcggaatccacctgtcccggtgtgcaagaggctatccagtctgttgtgcatggtttgcttgctactctttcccccaaggtacactcaaagtctcctccgccactagagaatgctgggggagccctaaatcgtgggggtgaggacgatgactgtgcagagcttgtcgagaatacttccctcccgtttcagcccctaatatctgtcccacgtgattatcttgcacgtttgctattctggtgcatgttgctgggtcactacatccggggtctggaataccggttagagctggcacaccttctcagaatatctagcgacgtggggtctttccccattgatgacaatcattttatttgagaaagcttcgctggcttattgagatccatcagcgaagaggatggaaatgcactggccaagaggccgcagaagttgctgtttggggcatttcctgacaatgaaacagggagttctgggccatagctcctgttgtagttcttgtaaagtcggaacgaaggcgttcgggtgtaaagttagtgttacatatcaatgtgaacaatatattttatttccttctatttattgtgtcgtatacaaaataaacatgttgttcttgctgctaatctcgtggtagcatggtggatactgggtattaggcatcccttgtactcataggttgtatgtatttgtctaatgtttatcacgtgaatgatattatattgtcgagtcgtatcaaggttc

SEQ ID NO: 27633 - protein, 447 aa, Triticum aestivum
FFFERRRNAVHLRLLPTHAAAGPRPEELERPIATRPGPEGKESSKAARSAPPPAGDGHMPTASCLRPPLRSGRSAAAGLRFPPPAGLAIGSWRRRLAGVGVAAASASPFDELYARGRPIHGPSKKSTLWNLIQDIEPLDLSVIQKDVPLETVDAMKRTISGMLGLLPSDQFRVVVEALWSPFFKLLVSSIMTGYTLRNAECRLSFERNLELSEEDAECEKRDTTEDNLHDINLGRPVTIFRLSEDDMPQDSGKSDEESSGESMGEMLSNLTPQVEEQIIRLQSRLDAMKKELHDLKRKNSALQMQQFVGEEKNDLLDYLRSLTPEKVAELSESTCPGVQEAIQSVVHGLLATLSPKVHSKSPPPLENAGGALNRGGEDDDCAELVENTSLPFQPLISVPRDYLARLLFWCMLLGHYIRGLEYRLELAHLLRISSDVGSFPIDDNHFI

SEQ ID NO: 27634 - protein, 389 aa, Triticum aestivum
MPTASCLRPPLRSGRSAAAGLRFPPPAGLAIGSWRRRLAGVGVAAASASPFDELYARGRPIHGPSKKSTLWNLIQDIEPLDLSVIQKDVPLETVDAMKRTISGMLGLLPSDQFRVVVEALWSPFFKLLVSSIMTGYTLRNAECRLSFERNLELSEEDAECEKRDTTEDNLHDINLGRPVTIFRLSEDDMPQDSGKSDEESSGESMGEMLSNLTPQVEEQIIRLQSRLDAMKKELHDLKRKNSALQMQQFVGEEKNDLLDYLRSLTPEKVAELSESTCPGVQEAIQSVVHGLLATLSPKVHSKSPPPLENAGGALNRGGEDDDCAELVENTSLPFQPLISVPRDYLARLLFWCMLLGHYIRGLEYRLELAHLLRISSDVGSFPIDDNHFI

SEQ ID NO: 27635 - protein, 293 aa, Triticum aestivum
MKRTISGMLGLLPSDQFRVVVEALWSPFFKLLVSSIMTGYTLRNAECRLSFERNLELSEEDAECEKRDTTEDNLHDINLGRPVTIFRLSEDDMPQDSGKSDEESSGESMGEMLSNLTPQVEEQIIRLQSRLDAMKKELHDLKRKNSALQMQQFVGEEKNDLLDYLRSLTPEKVAELSESTCPGVQEAIQSVVHGLLATLSPKVHSKSPPPLENAGGALNRGGEDDDCAELVENTSLPFQPLISVPRDYLARLLFWCMLLGHYIRGLEYRLELAHLLRISSDVGSFPIDDNHFI

SEQ ID NO: 27636 - DNA, 1429 bp, Triticum aestivum
ttacctagaacatcctaatcgaaaaagctctcagctgcatgcactgcagagatggaggtcgaaatcccgaccgagcaccgcgcgcccaaggttgaagctagcgcgtggcgatggcgtgatctcccgggcgccgccgccaagccgctccgggacccactcctcgccgtcaacttcctgctcctggccgtcggcgcggcctgcggcccgctcctcctccgcctctacttcctgcgcggcggctcccgcaagtggctctccagcctgctccagaccgccggctggccgctcctcctcgtgccgctctgcttctccttctcctcccgccgccgccgcagccgcaggagccgccagggcgaggacgccacggccagcggcggcgtcttcctcatgacgccccgcctcctggccgcgtccgccgtcgtcggcctcatgaccggcgccgacaacttcctctacgcctacggccaggcctacctccccgtgtccacctcctccatcctcatctccacgcagctcgccttcacggccgccttcgcgctgctgctcgtgcgccagcgcttcaccggctccacggtcaacgccatcgtgctgctcagcgtcggcgccgccatgctcgggatgggctccggcggggaccggccggcgggggtgtcgggcgcgcagtacgccgccgggttcggcatggcgctgggcgccgcggcgctctacggcctcgtgctgcccgtcatggagctcagccaggcgtggcacgcggcgcgcgccggcgccgcggccctcacctacacgctcgtcgttgagattcaggtcatcatcggcgtcaccgccacggcgttctgcgccgtcggcatgctggcgaacaacgatttccaggtgactccgacgagaaaactaaaacagaggttaaaatgaggcaatcccaggagaagcccggcagtccgaactcggccaggcgggctactacctgctgctggtcggcacagccgccgtgtaccagtgcttctgcctcggcataatcggcgccatctactatggctcggcgctgctcgccggagtcatcatcaccgtgctcctcccggtgaccgaggtcctggccgtcgtcttcttccatgaacccttcagcggcaccaagggcgtcgccctcgggctgtcgctctggggcctcgcctcctatttctacggcgaggtgcggaacaaggccccggaggcagagcaccggacaagtctgtgtgtggatcgtgactgcgaaaattagtgggaacagcacgtgcttcttttgagaaagaagggagaatgtatgaaccgaaggccatggatggcagtggcatggcacacataatattcgcttgaaaacttgtgctcccgtctagcagtaaagatgttctttgtccatggctaaaaaaaaaaaaaaaaaagcttatcgataccgttg

SEQ ID NO: 27637 - protein, 285 aa, Triticum aestivum
MEVEIPTEHRAPKVEASAWRWRDLPGAAAKPLRDPLLAVNFLLLAVGAACGPLLLRLYFLRGGSRKWLSSLLQTAGWPLLLVPLCFSFSSRRRRSRRSRQGEDATASGGVFLMTPRLLAASAVVGLMTGADNFLYAYGQAYLPVSTSSILISTQLAFTAAFALLLVRQRFTGSTVNAIVLLSVGAAMLGMGSGGDRPAGVSGAQYAAGFGMALGAAALYGLVLPVMELSQAWHAARAGAAALTYTLVVEIQVIIGVTATAFCAVGMLANNDFQVTPTRKLKQRLK

SEQ ID NO: 27638 - protein, 173 aa, Triticum aestivum
MTPRLLAASAVVGLMTGADNFLYAYGQAYLPVSTSSILISTQLAFTAAFALLLVRQRFTGSTVNAIVLLSVGAAMLGMGSGGDRPAGVSGAQYAAGFGMALGAAALYGLVLPVMELSQAWHAARAGAAALTYTLVVEIQVIIGVTATAFCAVGMLANNDFQVTPTRKLKQRLK

SEQ ID NO: 27639 - protein, 159 aa, Triticum aestivum
MTGADNFLYAYGQAYLPVSTSSILISTQLAFTAAFALLLVRQRFTGSTVNAIVLLSVGAAMLGMGSGGDRPAGVSGAQYAAGFGMALGAAALYGLVLPVMELSQAWHAARAGAAALTYTLVVEIQVIIGVTATAFCAVGMLANNDFQVTPTRKLKQRLK

SEQ ID NO: 27640 - DNA, 2213 bp, Triticum aestivum
tcatcatcaccatggctcggatccaaggagaggtacgtgagtgagtgatatgctcccactcccacatcttcttctagtccacaccttcctcccccatcccctgcctggccctgctccccatttacgcgcccggtgcgtacattcatgcatgacgcacacggccatgaagaggaggaggcggcggcatggccagcctcatcatcttcacctccttgtctccctcctcctcctcctactcctcgaccgcgcttgtgcagctctaccgtcgtcgcccaagatggcaaggatccagcagcatctcgaccgcgccaacaagccagcactgcgcaccatacagagcatggacggggacaccatcgactgcgtgccccggcacaagcagcacgcgctggaccacccgctcctcaggaaccacaggatccagagcgcgccgccgagcatgcccgcctccgccaccgccaccttcagtgctagcgcggcggcgtcgggcaactccaccagcagggccagagcggcgtggcagacgtggcaccacgcgggccactgcccgaaaggcacggtgcccgtgcggcggaccaccgccgaggacgtgctgcgcggcgggcagtcgctcttccgcttcggccgcaagcggcaccgccgcgaccgtgcggcccgcgccgccaacgcccccgacgtcgtcaccggcaacggccacgagcacgcgatcgcgtacacggcggtggggcagcaggaggtgtacggcgccaaggcgaccatcaacgtctgggatccggccatccacgagaacaacggcttcagcctctcgcagctctggctgctctccggctccttcaacggctccgacctcaacagcatcgaggccgggtggcaggtcactcccactcttccatcccatttccatcccatattcttagtgatgatccatctcacttggcttgttcattaaccgttgtaccagtaacttattgcatctgcattgcacggtaaaaaatcattgagatctgcagcgcgggcacatggcgccataaatgcgtgcacatctcgactcgatagatcgattccgtttgtgtacgacggctaccatagtttaacctcttctcttcatttgaggtcaacccatccatatggagaagtactccaacttgatatagtactaccatagaagaatccatgcatgtgagaaatatatatggaatccccgcagaaaaaggaggaatatatataatgggactgtacacttggctgtagtaggagacaaaattgctccaaaaagtgctaatgagttgtggtaatggacacgctcagctcagcgctaactttggatctactccagcaacatgcatgataagcactgcatgcatgcacatgtgctgcttaatcgatctgcatgcatgaaagcttacagtttacgtttctttctagtcaggtcagccctgagctgtacggtgacagcaggcctaggctcttcacatattggacaagcgacgcgtacgaggcgacgggctgctacaacgcgctgtgcccggacttcgtgcagaccagctcccgcgtggccatcggcgccgccatctccccggtctcctccctcgctggcgagcagtacgacatgacgctcctcatctggaaggaccccaagctcggcaactggtggcttagctacggcgacgccggagcctcgcagctcgtcggctactggcccgccgagctcttcacgcacctctccggccacgccagcatggtcgagtggggcggcgaggtcgttaacaccagcccggggggcgcgcacaccgccacgcagatgggctccggcaggttcgccgccgaggggttcggccgcgccagctacttccgcaacctcgagacggtggacgccgggaacagcctcgcccccgtgtcgctcgacgccttgcagacgctggccgaggacgccggctgctacgacatcaggaaggcctacgacgagcgggacggatggggcacgcacttctactacgggggaccgggacacaacccggcctgcccctagcatagccttggggaccaaacacgtcttgctggtgtacattttgtcttgtttttcggggacttgatcgctctcacctctcagccgatcgtgatcagcaacgtcttgactaaatctagtgttagagcatctacggccggactcgaaaaatccgacctttcaaacgcccgtgcacacggggtgtctg

SEQ ID NO: 27641 - protein, 299 aa, Triticum aestivum
MLPLPHLLLVHTFLPHPLPGPAPHLRARCVHSCMTHTAMKRRRRRHGQPHHLHLLVSLLLLLLLDRACAALPSSPKMARIQQHLDRANKPALRTIQSMDGDTIDCVPRHKQHALDHPLLRNHRIQSAPPSMPASATATFSASAAASGNSTSRARAAWQTWHHAGHCPKGTVPVRRTTAEDVLRGGQSLFRFGRKRHRRDRAARAANAPDVVTGNGHEHAIAYTAVGQQEVYGAKATINVWDPAIHENNGFSLSQLWLLSGSFNGSDLNSIEAGWQVTPTLPSHFHPIFLVMIHLTWLVH

SEQ ID NO: 27642 - protein, 266 aa, Triticum aestivum
MTHTAMKRRRRRHGQPHHLHLLVSLLLLLLLDRACAALPSSPKMARIQQHLDRANKPALRTIQSMDGDTIDCVPRHKQHALDHPLLRNHRIQSAPPSMPASATATFSASAAASGNSTSRARAAWQTWHHAGHCPKGTVPVRRTTAEDVLRGGQSLFRFGRKRHRRDRAARAANAPDVVTGNGHEHAIAYTAVGQQEVYGAKATINVWDPAIHENNGFSLSQLWLLSGSFNGSDLNSIEAGWQVTPTLPSHFHPIFLVMIHLTWLVH

SEQ ID NO: 27643 - protein, 261 aa, Triticum aestivum
MKRRRRRHGQPHHLHLLVSLLLLLLLDRACAALPSSPKMARIQQHLDRANKPALRTIQSMDGDTIDCVPRHKQHALDHPLLRNHRIQSAPPSMPASATATFSASAAASGNSTSRARAAWQTWHHAGHCPKGTVPVRRTTAEDVLRGGQSLFRFGRKRHRRDRAARAANAPDVVTGNGHEHAIAYTAVGQQEVYGAKATINVWDPAIHENNGFSLSQLWLLSGSFNGSDLNSIEAGWQVTPTLPSHFHPIFLVMIHLTWLVH

SEQ ID NO: 27644 - DNA, 1188 bp, Triticum aestivum
aaaaacagatcagtccggggtcgtggcctccactcggcatcttcttcctcccccacatcgcacttcctcccctgctagattcgtccctccaccgaccggcaaggcctctctcctgcacttccctcgcccaaggttgcaccagagaaggcggaaaacatcacagtttgcgaaatcgtggagcggtagagagagatggccgagacggtgttcgctccgtgtttggaagggatgaagcatgtcaggtcggacagcggggtcatgctcgccaagcccttccttgatgtctgcaagcaaatcttgcctgtcctggataaatttggtgctgctatggcaattgtgaagagtgatattggaggtaatatcacgaggttggagaacaagtattcttcagacccgtcaaaatatgagcacttgtacaccatggtccaagaagaagttgaaaagaagaccgcaaagggttcatcaagctgcacaaatggacttctatggctcacgagggctatggacttccttgttgaactgttccgtaatctacttgaccatccagactggactatgagtcaagcatgtactgattcatacacaaaaactctgaagaaatggcatgggtggctcgccagttccagttttacggtggctatgaagcttgctcctaacaaagataaatttatggaggtaattagcggaacgggtgatatcaaagcagacattgagaaattctgcaccaccttttatccctttctcaaggagaatcatgacttcctggccagtgttgggctcgatgatatgaaggcttcttaatgcaatacacaccgacaatcatcacaaatatgaagtgctgctattttctcgaattttattgtggccaaggatacactgttttgcatactgatcttcaggaaattatagacgaataataagtcaaaatgtttgggtgttcatgacccatagctacttacatacaagatgaattgaatgtatgcatgggatcaaaattaacttttgaaagtcaccttgtcagccaagccggccattttaccaattgatgtaactgaagagaacgcagaggatgcagatatgtggtgatcttgtcgttcagtttataaactgctgtgtaagtgattctgtttataaactgctgtataagtgatgaggcgaagatgcaaattaagagtctgttattgatgc

SEQ ID NO: 27645 - protein, 202 aa, Triticum aestivum
MAETVFAPCLEGMKHVRSDSGVMLAKPFLDVCKQILPVLDKFGAAMAIVKSDIGGNITRLENKYSSDPSKYEHLYTMVQEEVEKKTAKGSSSCTNGLLWLTRAMDFLVELFRNLLDHPDWTMSQACTDSYTKTLKKWHGWLASSSFTVAMKLAPNKDKFMEVISGTGDIKADIEKFCTTFYPFLKENHDFLASVGLDDMKAS

SEQ ID NO: 27646 - protein, 190 aa, Triticum aestivum
MKHVRSDSGVMLAKPFLDVCKQILPVLDKFGAAMAIVKSDIGGNITRLENKYSSDPSKYEHLYTMVQEEVEKKTAKGSSSCTNGLLWLTRAMDFLVELFRNLLDHPDWTMSQACTDSYTKTLKKWHGWLASSSFTVAMKLAPNKDKFMEVISGTGDIKADIEKFCTTFYPFLKENHDFLASVGLDDMKAS

SEQ ID NO: 27647 - protein, 180 aa, Triticum aestivum
MLAKPFLDVCKQILPVLDKFGAAMAIVKSDIGGNITRLENKYSSDPSKYEHLYTMVQEEVEKKTAKGSSSCTNGLLWLTRAMDFLVELFRNLLDHPDWTMSQACTDSYTKTLKKWHGWLASSSFTVAMKLAPNKDKFMEVISGTGDIKADIEKFCTTFYPFLKENHDFLASVGLDDMKAS

SEQ ID NO: 27648 - DNA, 928 bp, Triticum aestivum
aaaaaatagccccaaactactaggtctccgctaaccttcccccatggctcgcaagcgccgccgcgcggagcagcgcacgccggcgccacttccgcctccgccccttcggactaaaccgtctcagcggcaaccggtggtcgtcttcgcccacggcgccggcgccccctcctcctctgattggatgacccgctggaaggagatggtgaaagatgccctggatgccgttgaagtggtgacattcgactatccatatatgtcaggtgctaaacggaggcctcccccaaaggcggacaagctcgtcgaccaccatctcagtgtggtgaaggatgctgtagcagagcatcctggtcacccgcttgttcttatggggaagtctatgggttcgagggtcagctgcatggtagccagctccgatgatatcagtgtttctgcagtcatttgcttgggttatccactcaagggagtgaaaggggcaccgagagacgagatactactgaagctgatggttccaacaatgtttgtgcagggcaacaaagatggcctatgccccttggacaagcttgagttaactcggaagaagatgacctgcaagaatgaactgcatgttgttgatggtggtgaccactctttcaaagtcagccaaaaataccaaaaatcggctggaataagtcaacatgatgctgaattagaagctgttaaagcaattgcacagttcgtccagaactccatcgcagaaagcttaacctagctgttccttcgaaattttcttataacatctaatggtaggttcctgatcctaagattctggccttttctaggggaaagattctggcttttcaatggtctaatatgtgatcatgtacttggtttggtgactggttacatgtaaaacaatgctattgtcccccctgaaatgtaatatgcttgt

SEQ ID NO: 27649 - protein, 234 aa, Triticum aestivum
MARKRRRAEQRTPAPLPPPPLRTKPSQRQPVVVFAHGAGAPSSSDWMTRWKEMVKDALDAVEVVTFDYPYMSGAKRRPPPKADKLVDHHLSVVKDAVAEHPGHPLVLMGKSMGSRVSCMVASSDDISVSAVICLGYPLKGVKGAPRDEILLKLMVPTMFVQGNKDGLCPLDKLELTRKKMTCKNELHVVDGGDHSFKVSQKYQKSAGISQHDAELEAVKAIAQFVQNSIAESLT

SEQ ID NO: 27650 - protein, 188 aa, Triticum aestivum
MTRWKEMVKDALDAVEVVTFDYPYMSGAKRRPPPKADKLVDHHLSVVKDAVAEHPGHPLVLMGKSMGSRVSCMVASSDDISVSAVICLGYPLKGVKGAPRDEILLKLMVPTMFVQGNKDGLCPLDKLELTRKKMTCKNELHVVDGGDHSFKVSQKYQKSAGISQHDAELEAVKAIAQFVQNSIAESLT

SEQ ID NO: 27651 - protein, 182 aa, Triticum aestivum
MVKDALDAVEVVTFDYPYMSGAKRRPPPKADKLVDHHLSVVKDAVAEHPGHPLVLMGKSMGSRVSCMVASSDDISVSAVICLGYPLKGVKGAPRDEILLKLMVPTMFVQGNKDGLCPLDKLELTRKKMTCKNELHVVDGGDHSFKVSQKYQKSAGISQHDAELEAVKAIAQFVQNSIAESLT

SEQ ID NO: 27652 - DNA, 890 bp, Triticum aestivum
cctaatcgaaaactcgatcgcaggctgagactcgcgcaaccttcccatcccatattaaactcgcccccaccccatctagggtttggccctgccaagagacccgcgacccccttaatccttctcccaacccttatctgtatccctctccatggccacggcggcggcggcgaagcggaagccggtgttcgtcaaggtggatcagctcaagcccgtcaccagcggccacacgctcgtcgccaaggtgctcagctccaagaccgtcctccagaaggcccgcgccgctggcggccccggcccagccgccaagcccaccaggatcgccgagtgcctcatcggcgacgagaccggctgcgtcctcttcaccgcccgcaacgaccaggttgatgttttgaagcctggcaacactgtcattatccgcaatgcaaagattgatatgttcaaaggttcaatgaggcttgctgttgacaaatggggccgtgttgaagtaactgaaccagcaagcttcggtgtaaaggaggacaacaatctttcacttgtggagtatgaacttgtcaatgttgaagagtgaaaatcacatcgatcttaatcagaagaagtgctttcccaagcctgttggtcaaatctacttgttgagttgtctagaatgtgaaagatggatcttctgagttcatattggaattgttcactcgaactaccgcaagttccttcttatcaagcatttctatctatgagtgattgttagttgctgcagcagttgtgtttctgagaacaaatgtgatgtgctgagcagtaatatacaatttgatctcctaaatggattatgcacctttcagcttgcaaaaaaaaaaaaaaaaaaaaatcaaaaaaaaaaaaaaaaaagcttatcgatg

SEQ ID NO: 27653 - protein, 139 aa, Triticum aestivum
MATAAAAKRKPVFVKVDQLKPVTSGHTLVAKVLSSKTVLQKARAAGGPGPAAKPTRIAECLIGDETGCVLFTARNDQVDVLKPGNTVIIRNAKIDMFKGSMRLAVDKWGRVEVTEPASFGVKEDNNLSLVEYELVNVEE

SEQ ID NO: 27654 - protein, 127 aa, Triticum aestivum
PNRKLDRRLRLAQPSHPILNSPPPHLGFGPAKRPATPLILLPTLICIPLHGHGGGGEAEAGVRQGGSAQARHQRPHARRQGAQLQDRPPEGPRRWRPRPSRQAHQDRRVPHRRRDRLRPLHRPQRPG

SEQ ID NO: 27655 - DNA, 801 bp, Triticum aestivum
atttatttataaaccccgctattccgccccgtccccgtccccgtccccgtccgtctcgccccccacctccgacgattcgaggcccggggctcccgtgcggcggcggcatgaggacggcggcgacggcggcggaggcgcaccagtcgcggctcctgtacgaactgggcgcgctgctgctgacgatcatccggtcgccgctcgggccgggggaggagccgcggcaggtgacggcggccggggtggcgtccatgatgctgggcgcctccatggcgctcatgctctgcggctccgtcaccttcatgctcggcttcttcctcatgccctgggtcgtcggcctcgcctgcgtcttcctcttcgtcggcttcctcaccaacctctccgggatctggagggccatcctctgctggcccgccgcatgctcctcctcctcgccccataaggacgcctccacatggcatatatttccaaagcctccattcatgtagacgtgaagtcgaatacggagcagcgatgtacagaagaagcacatgagtttgggcagcagtattttccttcctgggcaacatttaccatgtaacaaatgcaacaggtctaaatggttgtatacttataactaggaggatacatcttgacagcaaactttgtacatatgggaagaatgctctggtgtaattgtgaagtgaggcttattattgtttgagaaatgaagagcctctgtttcttcccagaatgacaggaaattccgtgtttccggataagtttgtatctgtttgtgaggaatggccgcaagttggatagtcc

SEQ ID NO: 27656 - protein, 160 aa, Triticum aestivum
LFINPAIPPRPRPRPRPSRPPPPTIRGPGLPCGGGMRTAATAAEAHQSRLLYELGALLLTIIRSPLGPGEEPRQVTAAGVASMMLGASMALMLCGSVTFMLGFFLMPWVVGLACVFLFVGFLTNLSGIWRAILCWPAACSSSSPHKDASTWHIFPKPPFM

SEQ ID NO: 27657 - protein, 145 aa, Triticum aestivum
FIYKPRYSAPSPSPSPSVSPPTSDDSRPGAPVRRRHEDGGDGGGGAPVAAPVRTGRAAADDHPVAARAGGGAAAGDGGRGGVHDAGRLHGAHALRLRHLHARLLPHALGRRPRLRLPLRRLPHQPLRDLEGHPLLARRMLLLLAP

SEQ ID NO: 27658 - protein, 125 aa, Triticum aestivum
MRTAATAAEAHQSRLLYELGALLLTIIRSPLGPGEEPRQVTAAGVASMMLGASMALMLCGSVTFMLGFFLMPWVVGLACVFLFVGFLTNLSGIWRAILCWPAACSSSSPHKDASTWHIFPKPPFM

SEQ ID NO: 27659 - DNA, 1056 bp, Triticum aestivum
gaccaatatatgtgcttctagttcctttggcggccgttgagtagagacgactcaccggcgccggctggctggctccttgaggttattcttcattgcatgcatgcagttggtgcaaatctgaatcggccggcttacgactccctccatcgacgaccaagaagatgagtttcggagtcgatgcttcgcaggacctgcaactgcctgctagggctagcggaaccgacacgaccaccctgagcgcgcaaggcgacggccacgacaccagagtggtcgtcaagcagagcgtggcggccgtgccggtccggcaggggtggcagaccggcctgttcgactgcgaagacgacggctgcgacgcattttgctgcagcgtgtggttcccctgcgcggcgttcgcctgcgtcgccgacatcgtcgaccagggctcggaaggccggtgcgtgcacttcacctgctaccttgtggcggcctacttcgggctgtggtgggtgtacacggggtggtaccggcgcaagctgcgggagcggtacggcctgccggagacgccgctgccggactgcctcacccacctgctctgccactggtgcgccctcgcccaggagtacagggagctcgccaggcggggattcgacgtcgacgagggctgggagggtcggccgcggccggcgactgcaccggcggcgaccgccgtgccacgggtccaggtgccgatgaccaggctatgagcgatcgatctagcgcagcgtgggaccgtcgaacgagctaaccagcacggttaactccggtctcccagcttagtcaagtaccccactgccttaataataacacccatcctggccgtgcgcgtgtgtgcatagcttttggtttgctctgtctggtatgtactgtgtgctgtggcgatttgtacttggcctgcccggtcgtaatgccagtcacttaattatgctatgcgtggttagtgtacccgtaatgagaacgcagtttccctgttccgcccgtgtcgcggacagtatgtttttttctatgggaaccggagtttacggtgggcggccattctcg

SEQ ID NO: 27660 - protein, 186 aa, Triticum aestivum
MSFGVDASQDLQLPARASGTDTTTLSAQGDGHDTRVVVKQSVAAVPVRQGWQTGLFDCEDDGCDAFCCSVWFPCAAFACVADIVDQGSEGRCVHFTCYLVAAYFGLWWVYTGWYRRKLRERYGLPETPLPDCLTHLLCHWCALAQEYRELARRGFDVDEGWEGRPRPATAPAATAVPRVQVPMTRL

SEQ ID NO: 27661 - DNA, 1152 bp, Triticum aestivum
acatcctaatcgaaaagccgagagatcacaccgcagcacgcagacaaagcagacggggacagcacacggaaagagaggagagaggggagagagatcggagaggtgaccaccaccgccgcgccgagatgctggccgtgttcgaccagacggtggccaagtgcccggagggcctccgcagcccgccggcggccgggggagggggtacggcggcaggagggggcggaggcgcggccgcgctcatgaagggcttcgccgacgccaacgacgccgcggtcaccgtcagcctcggcgccgccggcgccctcgcctactcctcggccaacaagaaccccctcgtccccaggatgtttggttctgtgaacgacatattttgcctgttccaagggcatgttgagaacattggcaacctgaagcaacactatggtctgagcaagacagcaaatgaggttaccatcctgattgaggcctacagaaccctccgggacaggggcccgctcccagccagccaggtcgtgagagatctcagtggaaggttcgcttttatcctgtacgacaccgtgtcgaaatccaccttcgtcgctgctgatgctgatggcagtatccccttcttctggggcgtcgactctgaagaccaccttgtgttctctgacgacaatgagcttctcaaggcaggctgtggaaactcatttgcgccattccccaaaggctgcttctacaccacatctggagggctgcagagcttcgagcacccgctgaacgagctgaaggccgtgccacgtgtggacagccagggccagatgtgcggctccaccttcaaggtcgacagcgaggccaagaaggactcggggatccctcgcgtcggtagtgctgctgattggtctaaccactactagcttgatgacccttgttgtaaactgccaatcttgacactgaatcgctgagacaccgcactgcatctgcattttatttttgagcagtttacgacgctctagacaatgctgtttcaataaatgtactgtctgatgggtaatgatactgctgtaagtttaccgatactcgaacaaactctgatgccaccacctggtggtagaggtttatcagccaccctatatatgtctcgataaatagagttcagtgaaggcttagtttgtt

SEQ ID NO: 27662 - protein, 296 aa, Triticum aestivum
ILIEKPRDHTAARRQSRRGQHTEREERGERDRRGDHHRRAEMLAVFDQTVAKCPEGLRSPPAAGGGGTAAGGGGGAAALMKGFADANDAAVTVSLGAAGALAYSSANKNPLVPRMFGSVNDIFCLFQGHVENIGNLKQHYGLSKTANEVTILIEAYRTLRDRGPLPASQVVRDLSGRFAFILYDTVSKSTFVAADADGSIPFFWGVDSEDHLVFSDDNELLKAGCGNSFAPFPKGCFYTTSGGLQSFEHPLNELKAVPRVDSQGQMCGSTFKVDSEAKKDSGIPRVGSAADWSNHY

SEQ ID NO: 27663 - protein, 255 aa, Triticum aestivum
MLAVFDQTVAKCPEGLRSPPAAGGGGTAAGGGGGAAALMKGFADANDAAVTVSLGAAGALAYSSANKNPLVPRMFGSVNDIFCLFQGHVENIGNLKQHYGLSKTANEVTILIEAYRTLRDRGPLPASQVVRDLSGRFAFILYDTVSKSTFVAADADGSIPFFWGVDSEDHLVFSDDNELLKAGCGNSFAPFPKGCFYTTSGGLQSFEHPLNELKAVPRVDSQGQMCGSTFKVDSEAKKDSGIPRVGSAADWSNHY

SEQ ID NO: 27664 - protein, 217 aa, Triticum aestivum
MKGFADANDAAVTVSLGAAGALAYSSANKNPLVPRMFGSVNDIFCLFQGHVENIGNLKQHYGLSKTANEVTILIEAYRTLRDRGPLPASQVVRDLSGRFAFILYDTVSKSTFVAADADGSIPFFWGVDSEDHLVFSDDNELLKAGCGNSFAPFPKGCFYTTSGGLQSFEHPLNELKAVPRVDSQGQMCGSTFKVDSEAKKDSGIPRVGSAADWSNHY

SEQ ID NO: 27665 - DNA, 1378 bp, Triticum aestivum
aacacaataccatcatcgtccttcctctcatcccctctctctcccacagagacacatcactctctctctctcccatctccatctctgtcagaaggggaggccagagggggacggagaggggcaatggagctggacgagcaggccttcttggaggagctcttctcgctgaggagggacgccacggccgcgtgggagtgcaatgccatgggggacttcttctccccggcctgtgctggcgccgccgccatggactgcttccaggagcggcaccagcccaccgtcagcgtgctgcccaccttcaccgcctccttcgaccacccacagcagcaggcgggggtgaccgcggctggggggttcgactgcctcagcgaggtctacggcggcggccccttccccaatgccgtcggcggcgggtacggcgagatggggtttctcgccgcgatggaccccaaggcggcggcggcggcggctctggtggaggggggcggcctcggcgcctgcaaggtggagcccgggctggcggcggtggacggcggcgcgttcgggtcgggtcagatggcggccgtcccggcgccggcgtcgaggaagaagcgggtggagggcatgccgtccaagaacctgatggcggagcggcgccgccgcaagcgcctcaacgaccgcctctccatgctccgctccgtcgtgcccaagatcagcaagatggacaggacgtcgatcctgggggacaccatcgactacatgaaggagctgctggagaggatccggcggctgcaggaggagatggaggagccgcatgccggtccggcggcggcgccgctgctgagcgtgttccgggagctcaaccccaacgagatgctcgccaggaacacccccaagttcgaggtggagcgcaaggaggaggacacccgggtggagatctactgcgcggccaagccggggctgctgctgtcgacggtgagcacgctcgacacgctgggcctcgacatccagcagtgcgtcgtcagctgcttcaacgacttcgccatgcacgcctcctgctccgagatgcagagggagatgatcagcgcggacgccatcaagcaggagctgttcaagaacgccggctacggagggggctgcttgtgagcaagaagcaccaccaccagcaccaccatgagtccatgaccaccaccaccagcaggaggaggaaggataataaagtagaagtagctgtagcaggcagtagaattagcagttagcactagcaccagcagccagcagtagcgagaaggggccggaagatctgggcggaggccctttatcgcaaatcataaccatgtcgccgtgatcaaaattctctcctgttagcaacaaagatcggcgggcgcctttccgatgc

SEQ ID NO: 27666 - protein, 411 aa, Triticum aestivum
HNTIIVLPLIPSLSHRDTSLSLSPISISVRRGGQRGTERGNGAGRAGLLGGALLAEEGRHGRVGVQCHGGLLLPGLCWRRRHGLLPGAAPAHRQRAAHLHRLLRPPTAAGGGDRGWGVRLPQRGLRRRPLPQCRRRRVRRDGVSRRDGPQGGGGGGSGGGGRPRRLQGGARAGGGGRRRVRVGSDGGRPGAGVEEEAGGGHAVQEPDGGAAPPQAPQRPPLHAPLRRAQDQQDGQDVDPGGHHRLHEGAAGEDPAAAGGDGGAACRSGGGAAAERVPGAQPQRDARQEHPQVRGGAQGGGHPGGDLLRGQAGAAAVDGEHARHAGPRHPAVRRQLLQRLRHARLLLRDAEGDDQRGRHQAGAVQERRLRRGLLVSKKHHHQHHHESMTTTTSRRRKDNKVEVAVAGSRISS

SEQ ID NO: 27667 - protein, 374 aa, Triticum aestivum
NTIPSSSFLSSPLSPTETHHSLSLPSPSLSEGEARGGRRGAMELDEQAFLEELFSLRRDATAAWECNAMGDFFSPACAGAAAMDCFQERHQPTVSVLPTFTASFDHPQQQAGVTAAGGFDCLSEVYGGGPFPNAVGGGYGEMGFLAAMDPKAAAAAALVEGGGLGACKVEPGLAAVDGGAFGSGQMAAVPAPASRKKRVEGMPSKNLMAERRRRKRLNDRLSMLRSVVPKISKMDRTSILGDTIDYMKELLERIRRLQEEMEEPHAGPAAAPLLSVFRELNPNEMLARNTPKFEVERKEEDTRVEIYCAAKPGLLLSTVSTLDTLGLDIQQCVVSCFNDFAMHASCSEMQREMISADAIKQELFKNAGYGGGCL

SEQ ID NO: 27668 - protein, 333 aa, Triticum aestivum
MELDEQAFLEELFSLRRDATAAWECNAMGDFFSPACAGAAAMDCFQERHQPTVSVLPTFTASFDHPQQQAGVTAAGGFDCLSEVYGGGPFPNAVGGGYGEMGFLAAMDPKAAAAAALVEGGGLGACKVEPGLAAVDGGAFGSGQMAAVPAPASRKKRVEGMPSKNLMAERRRRKRLNDRLSMLRSVVPKISKMDRTSILGDTIDYMKELLERIRRLQEEMEEPHAGPAAAPLLSVFRELNPNEMLARNTPKFEVERKEEDTRVEIYCAAKPGLLLSTVSTLDTLGLDIQQCVVSCFNDFAMHASCSEMQREMISADAIKQELFKNAGYGGGCL

SEQ ID NO: 27669 - DNA, 1390 bp, Triticum aestivum
tcatcccctgcttctcgagctgcacacctcatctcatctcatctcagtcttcccccacattgccattccctccttgcgagtagcagcagcaatggccagcctcgccgacctcgtcaacctcgacctcagcgactgcaccgacaagatcatcgtcgagtacctctgggttggaggatccggtatcgacatcaggagcaaagcaaggacggtgaacggccccatcaccgacgcgagccagctgcccaagtggaactacgacggctccagcaccggccaggctcccggagaggacagcgaagtcatcctctacccccaggccattttcaaggacccgttcaggaggggtgacaacctccttgttatgtgcgactgctacacaccccaaggtgtgccaatccccacgaacaagaggcacaacgctgccaagatcttcaacaccccgaaggttgcagctgaggagacatggtatggaattgagcaggagtacactctcctccagaaggacgtgaactggcctcttggctggcccattggtggctaccctggtccgcagggaccatactactgcgccgccggcgcggacaaggcgttcgggcgtgacatcgtggacgcccactacaaggcctgcctctacgccgggatcaacatcagcggcatcaacggggaggtcatgcccggccagtgggagttccaagttgggccgtccgtcgggatcgcggcgtccgaccagctgtgggtggcgcgctacatcctcgagaggatcactgaggttgccggggtggtgctgtccctggacccgaagccgatcccgggcgactggaacggcgcgggcgcgcacaccaactacagcaccaagtcgatgcgggaggccggcgggtacgaggtgatcaagacggccatcgagaagctgggcaagcggcacgcgcagcacatcgccgcctacggcgagggcaacgagcgccgcctcacgggccaccacgagaccgccgacatcaacaccttcaagtggggcgtggcggaccgcggcgcgtccgtccgcgtgggccgcgacaccgagaaggacggcaagggctacttcgaggaccgcaggccggcctccaacatggacccctacgtcgtcacctccatgatcgccgagaccacgctcctcctctgagccacccacccacggccatgcctaccgccgccagatcatgacacccaggctctcgactctctcgatcgagggtggcgattgattaatttctgcaaaacgtttcgtgtttccatttcttttgcaaggtctagtctgtttttggggcgtgcctttggtgtctttcactttactcgttcagataagagtaagagtcttcagtctactctgaaaataatgttgttttcgcattccgat

SEQ ID NO: 27670 - protein, 384 aa, Triticum aestivum
HPLLLELHTSSHLISVFPHIAIPSLRVAAAMASLADLVNLDLSDCTDKIIVEYLWVGGSGIDIRSKARTVNGPITDASQLPKWNYDGSSTGQAPGEDSEVILYPQAIFKDPFRRGDNLLVMCDCYTPQGVPIPTNKRHNAAKIFNTPKVAAEETWYGIEQEYTLLQKDVNWPLGWPIGGYPGPQGPYYCAAGADKAFGRDIVDAHYKACLYAGINISGINGEVMPGQWEFQVGPSVGIAASDQLWVARYILERITEVAGVVLSLDPKPIPGDWNGAGAHTNYSTKSMREAGGYEVIKTAIEKLGKRHAQHIAAYGEGNERRLTGHHETADINTFKWGVADRGASVRVGRDTEKDGKGYFEDRRPASNMDPYVVTSMIAETTLLL

SEQ ID NO: 27671 - protein, 354 aa, Triticum aestivum
MASLADLVNLDLSDCTDKIIVEYLWVGGSGIDIRSKARTVNGPITDASQLPKWNYDGSSTGQAPGEDSEVILYPQAIFKDPFRRGDNLLVMCDCYTPQGVPIPTNKRHNAAKIFNTPKVAAEETWYGIEQEYTLLQKDVNWPLGWPIGGYPGPQGPYYCAAGADKAFGRDIVDAHYKACLYAGINISGINGEVMPGQWEFQVGPSVGIAASDQLWVARYILERITEVAGVVLSLDPKPIPGDWNGAGAHTNYSTKSMREAGGYEVIKTAIEKLGKRHAQHIAAYGEGNERRLTGHHETADINTFKWGVADRGASVRVGRDTEKDGKGYFEDRRPASNMDPYVVTSMIAETTLLL

SEQ ID NO: 27672 - protein, 264 aa, Triticum aestivum
MCDCYTPQGVPIPTNKRHNAAKIFNTPKVAAEETWYGIEQEYTLLQKDVNWPLGWPIGGYPGPQGPYYCAAGADKAFGRDIVDAHYKACLYAGINISGINGEVMPGQWEFQVGPSVGIAASDQLWVARYILERITEVAGVVLSLDPKPIPGDWNGAGAHTNYSTKSMREAGGYEVIKTAIEKLGKRHAQHIAAYGEGNERRLTGHHETADINTFKWGVADRGASVRVGRDTEKDGKGYFEDRRPASNMDPYVVTSMIAETTLLL

SEQ ID NO: 27673 - DNA, 764 bp, Triticum aestivum
cttctgcagagcatcatccattcatcatcccatcccccaagtcataaacccaagtcggactcgccttcctcctccccaactactcctcctcgcctccgcgcatcgcaccgcaccgggggtcacctgagatcacatacacaatggtgaaggctgtggctgtgcttaccggcagtgagggtgtcaagggcaccatcttcttcacccaggagggagatggcccgaccaccgtgacgagaagtgtcactggactcaaggaagggctccacggcttccatgtgcacgctcttggtgacaccaccaatggctgcatgtcaactggaccacacttcaaccccgctggtcatgtgcatggggcacccgaagatgaaatccgccatgctggtgatcttggaaatgtgacagctggagcggatggtgttgctaacatcaatgttactgactgccatatcccccttactggaccaaattcaattgttggccgtgctgttgtcgtccatggtgacgctgatgatcttggcaagggtggacatgagctgagcaagagcactggaaacgctggtgcccgtgttgcttgcggaatcatcgggctccagggctagatgtcatcttcgccgaccaacgacgtacagatctgggaaccttttcagaatgcagatttgcaatctctattctaaataagcacatgatctttgatcacttgttagtgtgcaccattcatgtcaattcctatgtgctactctgaactttatcactgtcatttggtt

SEQ ID NO: 27674 - protein, 152 aa, Triticum aestivum
MVKAVAVLTGSEGVKGTIFFTQEGDGPTTVTRSVTGLKEGLHGFHVHALGDTTNGCMSTGPHFNPAGHVHGAPEDEIRHAGDLGNVTAGADGVANINVTDCHIPLTGPNSIVGRAVVVHGDADDLGKGGHELSKSTGNAGARVACGIIGLQG

SEQ ID NO: 27675 - protein, 96 aa, Triticum aestivum
MSTGPHFNPAGHVHGAPEDEIRHAGDLGNVTAGADGVANINVTDCHIPLTGPNSIVGRAVVVHGDADDLGKGGHELSKSTGNAGARVACGIIGLQG

SEQ ID NO: 27676 - DNA, 1548 bp, Triticum aestivum
aaaacaagaagaagagacgcacaagtccccctctctctccctctctcacaaacaaacaaacaaaccgctcttgtctcccattccaatctcgccccgtcggtcgaattacaagttagaagaagaagaagaggaatcagaggaagaagaagatggtgtctgcggtgcttcggacgatcctggtgacgggcggcgcggggtacatcggcagccacacggtgctgcagctgctgctccagggcttccgcgtcctcgtcgtcgacagcctcgacaacgcctccgaggaggccatccgccgcgtccggcaactcgccaacgccccgcaaaacagcctcgacttccgcaaggtggaccttcgtgacaaggaggcgctggacgaaatcttctcgacccaaaggttcgaggctgtgatccactttgccgggctgaaagccgtgggggagagcgtgcagaagcccctgctttactacgacaacaacctcatcggcaccatcaccctcctccaagtcatggcagcacatggatgcaacaagcttgtgttctcatcatcagccactgtgtacgggtggcccaaggaggtgccctgcaccgaggagttcccgctctccgcgaccaacccttacggccgaactaagcttgtcattgaagacatctgccgcgacctccagcgctcggaccccgactggaagatcatcctgctgaggtacttcaacccggtcggcgcgcacccgagtggctacatcggggaagaccccctcggagtccccaacaacctgatgccctatgtccagcaagtcgctgtcgggaggcggcccgcgctgacggtttatgggaccgactacaacaccaaggatggaacaggggtacgtgactacatccatgttgttgacctggctgacggccacatcgccgccctgaggaagctctacgaagattctgacagaatagggtgcgaggtgtacaatctgggcactggaaaggggacgtccgtgctggaaatggttgctgcattcgagaaggcttgcggaaagaaaatccctctggtttatgctggaagaagagctggagatgccgagactgtgtacgctgccaccgccaaagctgagaaggagctcaagtggaaggccaagtatggggtggaggagatgtgcagagacctgtggaactgggccagcaagaacccctacggctacggatccagcgacaacggccactgattaatagtcaccagagcaagtagtaatagcagcatatatacgccaccatccatctatatatttatccaccaccaccaccacagagagcagagagaagaagaggaagactactactgatgtgtatagggaaggagtgagtgagtcggatccatcagtagcttataattaattatattgttcgcgttagaaagctaatcatatccatctcccttatggagtaagtagaagaaataaggttggttcccttgccttgtagaaatatatatatagatatcttgtcggtcatggaataacttactttacctactgatataaatatatatatgcttggttc

SEQ ID NO: 27677 - protein, 354 aa, Triticum aestivum
MVSAVLRTILVTGGAGYIGSHTVLQLLLQGFRVLVVDSLDNASEEAIRRVRQLANAPQNSLDFRKVDLRDKEALDEIFSTQRFEAVIHFAGLKAVGESVQKPLLYYDNNLIGTITLLQVMAAHGCNKLVFSSSATVYGWPKEVPCTEEFPLSATNPYGRTKLVIEDICRDLQRSDPDWKIILLRYFNPVGAHPSGYIGEDPLGVPNNLMPYVQQVAVGRRPALTVYGTDYNTKDGTGVRDYIHVVDLADGHIAALRKLYEDSDRIGCEVYNLGTGKGTSVLEMVAAFEKACGKKIPLVYAGRRAGDAETVYAATAKAEKELKWKAKYGVEEMCRDLWNWASKNPYGYGSSDNGH

SEQ ID NO: 27678 - protein, 235 aa, Triticum aestivum
MAAHGCNKLVFSSSATVYGWPKEVPCTEEFPLSATNPYGRTKLVIEDICRDLQRSDPDWKIILLRYFNPVGAHPSGYIGEDPLGVPNNLMPYVQQVAVGRRPALTVYGTDYNTKDGTGVRDYIHVVDLADGHIAALRKLYEDSDRIGCEVYNLGTGKGTSVLEMVAAFEKACGKKIPLVYAGRRAGDAETVYAATAKAEKELKWKAKYGVEEMCRDLWNWASKNPYGYGSSDNGH

SEQ ID NO: 27679 - DNA, 1430 bp, Triticum aestivum
agatcgtgcgcttctcctcacaagataatcacagactcgatcaagagcttgtcttggttctgcaatgggggtgaggtgcctgctgctcctggctgtgctcctcttggctggggatcatggcggggaggcgcagccgctcgtgcccggggtcttcacgttcggcgactcgtcggtggatataggtaacaacgactacctccacaccctcatcaaggcggacttccctccctacggcagggacttccccaaccgcgtggccaccgggaggttttgcaacggcaagctggccaccgacatcactgctgatacactggggttcacgagctacccgcccgcgtatctcagcccgcaggcgtcagggaagaaccttctgatcggcgtcaacttcgcatctgctggatcaggctactacgatcacaccgcgcttatgtatcatgccgtccctttctcccaacaactggagtacttcagggagtaccaatccaagctgacggcgttcgctgggagcagccaggccaagtccatcatcagtggctcattgtacatcgtcagcttcggtgcaagtgactttgtgcagaactactacatcaaccctctgctcttcaagacccagaccgtcgaccagttctcggaccggctcgtcagcatcttcgtcaacagcgcgacgcaactttacggcatgggagcgcggcgcatcgcggtgaccacgctgccgcccctgggctgcctccccgcggcgatcacgctgttcgggcacgggagtaccggttgcgtgtcgaggctcaacagcgactcccagcggttcaacgggaagatgagcgcggccgtcagctcgctgtcgaagcggtaccacgacctcaagatcgccgtctttgacatctacacgccgctcttcagcctcgtcacctctcctggagatcaagggttcacggaggcgaagcggggatgctgcgggacgggaaaggtggagttcacggtgttcctctgcaaccccaagtcggtggggacgtgctcgaacgcgtcaacctacgtgttctgggacgccgtccacccgtcggaggcggccaaccaagtgatcgccgacgccctcctcgtcactggcatcgacctcgtcacataatgaaccacgcactggtcggctaacgtcgtcggtcggaggacgacgatggcacacgcttttcaggcgtcctgaagggaaaataatgtgtgcccagagctcccgtgccaagcgtgtcgttgtggcgggaggggttactttctcgggctgtgccactcaccatatcgccagcgtttgtagctagggactgggacacatggaaacatggtttatacgtacgaaaagctcgaagttatgggtgcaagcactggatcttttcttcttttttctttcattcatgtccttcaaatttgatgataactgtgtttttttc

SEQ ID NO: 27680 - protein, 351 aa, Triticum aestivum
MGVRCLLLLAVLLLAGDHGGEAQPLVPGVFTFGDSSVDIGNNDYLHTLIKADFPPYGRDFPNRVATGRFCNGKLATDITADTLGFTSYPPAYLSPQASGKNLLIGVNFASAGSGYYDHTALMYHAVPFSQQLEYFREYQSKLTAFAGSSQAKSIISGSLYIVSFGASDFVQNYYINPLLFKTQTVDQFSDRLVSIFVNSATQLYGMGARRIAVTTLPPLGCLPAAITLFGHGSTGCVSRLNSDSQRFNGKMSAAVSSLSKRYHDLKIAVFDIYTPLFSLVTSPGDQGFTEAKRGCCGTGKVEFTVFLCNPKSVGTCSNASTYVFWDAVHPSEAANQVIADALLVTGIDLVT

SEQ ID NO: 27681 - protein, 230 aa, Triticum aestivum
MYHAVPFSQQLEYFREYQSKLTAFAGSSQAKSIISGSLYIVSFGASDFVQNYYINPLLFKTQTVDQFSDRLVSIFVNSATQLYGMGARRIAVTTLPPLGCLPAAITLFGHGSTGCVSRLNSDSQRFNGKMSAAVSSLSKRYHDLKIAVFDIYTPLFSLVTSPGDQGFTEAKRGCCGTGKVEFTVFLCNPKSVGTCSNASTYVFWDAVHPSEAANQVIADALLVTGIDLVT

SEQ ID NO: 27682 - DNA, 856 bp, Triticum aestivum
agaacatcctaatcgaaaactttcccttcaccttcctctccacggaccggaacgcgccatgacgagctcctccacgccgtcccgcaaggcgctgagcaagatcgcctgcaaccggctgcagaaggagctcgccgagtggcaggtcggcccgcccgccggcttcaagtacaaggtctccgacaacctccagagatgggtgatcgaggtgggcggggcggagggcacgctctacgccggcgagacgtaccagctgcaggtcgacttccccgagcattaccccatggaggcacctcaggtcattttcctcaacccggcgccgatgcacccgcacatttacagcaacgggcacatctgcttagatatactgtatgactcgtggtcgcctgcgatgactgtaagttcagtctgtatcagcatcttgtcgatgctgtctagctcgccagcaaagcaacgcccggcggacaatgaccgctacgttaggaactgccgcaacgggaggtcgccgaaggagacccgatggtggtttcacgacgacaaagtatgagggggcatcgaatcgattggctcttctggccaccccatactcgccagccagccttccttactgtgaaagaaatctcttccaaggggagatgagatgagatgatttaggcttaaaaatttaagctaagcaacccctctatcgtactgcggatcttaacatgctgtggtggtttgtacatgagctcaacacatgttgtcgaaacgtgaatacatcatcgctaccgacgatgagagatatatagaataggcaagtgtaacctgtcgatgcgctggtacaggcacaaaaggaatgcagatttatctatgatttgcg

SEQ ID NO: 27683 - protein, 180 aa, Triticum aestivum
EHPNRKLSLHLPLHGPERAMTSSSTPSRKALSKIACNRLQKELAEWQVGPPAGFKYKVSDNLQRWVIEVGGAEGTLYAGETYQLQVDFPEHYPMEAPQVIFLNPAPMHPHIYSNGHICLDILYDSWSPAMTVSSVCISILSMLSSSPAKQRPADNDRYVRNCRNGRSPKETRWWFHDDKV

SEQ ID NO: 27684 - protein, 161 aa, Triticum aestivum
MTSSSTPSRKALSKIACNRLQKELAEWQVGPPAGFKYKVSDNLQRWVIEVGGAEGTLYAGETYQLQVDFPEHYPMEAPQVIFLNPAPMHPHIYSNGHICLDILYDSWSPAMTVSSVCISILSMLSSSPAKQRPADNDRYVRNCRNGRSPKETRWWFHDDKV

SEQ ID NO: 27685 - DNA, 1542 bp, Triticum aestivum
acattttgccacttgatcattaatggtctcccccttcgtcacccctaaacagaaatcaaatctgcctccctaaaccgcaaagcttcaagcaccagcgacctccctccatctccgtcccttctactcttctcacccatctcccctccctcccatggctggagtaaacacgaaccacaaggatagtacaaagtagtgcagcggagtggcgtggggagctggtcaagcgcagcagcctagctcagctccatcctcacagcatccaacctccaaccaccgccgcgaccatgcgtgccgccgtggcgctcctcctcgccgccgtcctctgcctcggcggcggcggtgcggcgtccgcgtcgccggactttgactacccggcggcgttcaacttcggcgactccaactccgacacgggcggccgcatcgccgcgggcttcgagcccatgcccccgccctacggctccaccttcttcggcgccccctccggccgcttctccgacggccgcctcatcctcgacttcctcatggatgcgatggatatgccattcctcaatgcatacttggattctcttggtgcgcctaacttccgggcaggtgttaattttgctcaagctggctgttcgattactccagcaagtgcaacatctgtcagcccgttttcatttggtcttcagattaagcaattctttgccttcaaggaaaaagtcactagcctgctctccaaaggagataggtaccgtcggtatattcctcagttggattacttttcgaagggactctacatgtttgatataggtcaaaatgaccttgctggtcaattctactccagaacagaggaccaagtcattgcatccattccgactattttgttggaatttgaaactgggctcaagactctatacgatcagggtgccaggaagttctggattcacaacacaggtcctcttggctgcttacctcaaaacatagatctttttggcaaagacccaacacaactggatgaacttcattgtgtagcaaagcacaatcgtgctgcaaagattttcaacttacagctgcatgcactttgcacaaagttgagaggccagtttgctggagctaatatcacttacatcgacatctactccatcaaatatgccctgattggcaattactctcgatatggatttgaaagtcccaccgaagcatgctgtggatacggaggaccacccctgaattatgatggccgagtgccgtgtggacagacgaaatctgttaacggtaatctcgtaaccgcgaaaggatgcagtgacagcactgagtatgtcaactgggatggaatacattacacggaagctgcaaatttccacgttacatcgcagattctgaccgggaagtactcagatcctccgttcgtcgacaagatgccattccttataaaaccgaggttctaatgagcgggtatttattcccacaactgaattagtaaaccaatgtaatgttgtattgaccacaacagatgtattatttatcacatgtcaataatcacatatagcttcttttttc

SEQ ID NO: 27686 - protein, 381 aa, Triticum aestivum
MRAAVALLLAAVLCLGGGGAASASPDFDYPAAFNFGDSNSDTGGRIAAGFEPMPPPYGSTFFGAPSGRFSDGRLILDFLMDAMDMPFLNAYLDSLGAPNFRAGVNFAQAGCSITPASATSVSPFSFGLQIKQFFAFKEKVTSLLSKGDRYRRYIPQLDYFSKGLYMFDIGQNDLAGQFYSRTEDQVIASIPTILLEFETGLKTLYDQGARKFWIHNTGPLGCLPQNIDLFGKDPTQLDELHCVAKHNRAAKIFNLQLHALCTKLRGQFAGANITYIDIYSIKYALIGNYSRYGFESPTEACCGYGGPPLNYDGRVPCGQTKSVNGNLVTAKGCSDSTEYVNWDGIHYTEAANFHVTSQILTGKYSDPPFVDKMPFLIKPRF

SEQ ID NO: 27687 - protein, 329 aa, Triticum aestivum
MPPPYGSTFFGAPSGRFSDGRLILDFLMDAMDMPFLNAYLDSLGAPNFRAGVNFAQAGCSITPASATSVSPFSFGLQIKQFFAFKEKVTSLLSKGDRYRRYIPQLDYFSKGLYMFDIGQNDLAGQFYSRTEDQVIASIPTILLEFETGLKTLYDQGARKFWIHNTGPLGCLPQNIDLFGKDPTQLDELHCVAKHNRAAKIFNLQLHALCTKLRGQFAGANITYIDIYSIKYALIGNYSRYGFESPTEACCGYGGPPLNYDGRVPCGQTKSVNGNLVTAKGCSDSTEYVNWDGIHYTEAANFHVTSQILTGKYSDPPFVDKMPFLIKPRF

SEQ ID NO: 27688 - protein, 302 aa, Triticum aestivum
MDAMDMPFLNAYLDSLGAPNFRAGVNFAQAGCSITPASATSVSPFSFGLQIKQFFAFKEKVTSLLSKGDRYRRYIPQLDYFSKGLYMFDIGQNDLAGQFYSRTEDQVIASIPTILLEFETGLKTLYDQGARKFWIHNTGPLGCLPQNIDLFGKDPTQLDELHCVAKHNRAAKIFNLQLHALCTKLRGQFAGANITYIDIYSIKYALIGNYSRYGFESPTEACCGYGGPPLNYDGRVPCGQTKSVNGNLVTAKGCSDSTEYVNWDGIHYTEAANFHVTSQILTGKYSDPPFVDKMPFLIKPRF

SEQ ID NO: 27689 - DNA, 547 bp, Triticum aestivum
ggtgctctcttcttcctcctctcctcttccctcggcggcggcgcaggcggcgcggaggcgacaggcgaaggcgaaatgacgaagggaacgggcagcttcggcaagcgccggaacaagacccacacgctgtgcatccgctgcggccgccgcagcttccacctgcagaagagcacctgctcctcgtgcggctaccccgccgcccgcatccgcaagtacaactggagtgtgaaggccatcaggaggaagaccaccggcaccgggaggatgaggtacatgcgccatgtgcccaggaggttcaagagcaacttcagagagggaactgaggccgcaccaaggagcaagggagcctcttccagcggcaactaggcgcggcggccttaacttgttacgctaggcggagccctgatcaccaaacttagcttttttgttgctttctactggaactctatgtttctatgtcgagaggcggacgatatgatgcctggttatgttatttgcacaattatcgtggacgttaatccttcagttttgaatgttgaattgtgtc

SEQ ID NO: 27690 - protein, 121 aa, Triticum aestivum
GALFFLLSSSLGGGAGGAEATGEGEMTKGTGSFGKRRNKTHTLCIRCGRRSFHLQKSTCSSCGYPAARIRKYNWSVKAIRRKTTGTGRMRYMRHVPRRFKSNFREGTEAAPRSKGASSSGN

SEQ ID NO: 27691 - protein, 106 aa, Triticum aestivum
CSLLPPLLFPRRRRRRRGGDRRRRNDEGNGQLRQAPEQDPHAVHPLRPPQLPPAEEHLLLVRLPRRPHPQVQLECEGHQEEDHRHREDEVHAPCAQEVQEQLQRGN

SEQ ID NO: 27692 - protein, 96 aa, Triticum aestivum
MTKGTGSFGKRRNKTHTLCIRCGRRSFHLQKSTCSSCGYPAARIRKYNWSVKAIRRKTTGTGRMRYMRHVPRRFKSNFREGTEAAPRSKGASSSGN

SEQ ID NO: 27693 - DNA, 860 bp, Triticum aestivum
atcgcattgccgcgccttcccttcattcccacccgcctacttcacgcgcaccaaccaccccctccgctgcttcagttcgtccgctccatccatcccgtttctattccgagtggacgccaggcgcataggtatatttggctgtagagagcctgatttagaagataggaggagcacatctttgagagggaggagcatgccgacgggaaccatgaggaggatgttcgtcgagtcgtcctcgtcctcctccgggagcggcagggaggcggagccggcggtggtgctgtgcgcgccccggccccgcagggtccacgcccagccctgcagcgccgacctcatcctcggccccccgcccttcctgctcaacgcctcctccggcagcataaagcagagacaagggaagagcaaaacgcgggaggaggagggggaggggggctgggcgctgttcggcggctcgccgccggcgcgcgcggacaacccgctcgtccacgacccccacttcctgctcaaccagcgccaccacgccgccgcggaattcaacctcgcggcggtttttgaccaccacctccaccaccacagccgcaaccaccaccacgccccaaccacatatagcaatagcggcaatagccacagttttgccccgtcgtacacgcacgccgcgccggcggtgaggatccaggggttcgacgtcgccgcctgccggggctcccacgccagcaacggcggaggccgcgtgctctccgcccgcgcatgagcctgagccctgcggaattgcatcatgttggttatgcagctgtaccatgtaatggaattgcatcaagttgattcaataatttctcctgagtttcgaaaaaaaaaaaaaa

SEQ ID NO: 27694 - protein, 249 aa, Triticum aestivum
SHCRAFPSFPPAYFTRTNHPLRCFSSSAPSIPFLFRVDARRIGIFGCREPDLEDRRSTSLRGRSMPTGTMRRMFVESSSSSSGSGREAEPAVVLCAPRPRRVHAQPCSADLILGPPPFLLNASSGSIKQRQGKSKTREEEGEGGWALFGGSPPARADNPLVHDPHFLLNQRHHAAAEFNLAAVFDHHLHHHSRNHHHAPTTYSNSGNSHSFAPSYTHAAPAVRIQGFDVAACRGSHASNGGGRVLSARA

SEQ ID NO: 27695 - protein, 185 aa, Triticum aestivum
MPTGTMRRMFVESSSSSSGSGREAEPAVVLCAPRPRRVHAQPCSADLILGPPPFLLNASSGSIKQRQGKSKTREEEGEGGWALFGGSPPARADNPLVHDPHFLLNQRHHAAAEFNLAAVFDHHLHHHSRNHHHAPTTYSNSGNSHSFAPSYTHAAPAVRIQGFDVAACRGSHASNGGGRVLSARA

SEQ ID NO: 27696 - protein, 180 aa, Triticum aestivum
MRRMFVESSSSSSGSGREAEPAVVLCAPRPRRVHAQPCSADLILGPPPFLLNASSGSIKQRQGKSKTREEEGEGGWALFGGSPPARADNPLVHDPHFLLNQRHHAAAEFNLAAVFDHHLHHHSRNHHHAPTTYSNSGNSHSFAPSYTHAAPAVRIQGFDVAACRGSHASNGGGRVLSARA

SEQ ID NO: 27697 - DNA, 645 bp, Triticum aestivum
tcattcatcccggacaaacacttcccaaccccgaccaaccgcatccaccacgcacgcaagctagccggcccactgtgctacgtacgtacgccaccatgagcgccgccgcccaagaaaccacggccggcggcggcggcgatggcaagcgtcagggaccttgccgcccgggacacctcaagcttggctaccacatcgtggtgtccaacgcggtctacgtactgctggccccgttcgccgcggcgttggcgctccgtgcgtcccgtctcaccccgtccgacctggcggcagcgcgcgcctacctcctcgccaacctccacctcgctgtctccctcgtgtccgtcgccacggccctcgcgacggtctacctcgcgcggcggccgcgcgcggtgtacctgctagacttcgcgtgctacaagcccgggcccgaccacgtggtcacccgggagaccttcatgaagcagtccagcaaggccggggtgttcaccgacgacaacctggcgttccagcggaagatcctggagcggtcggggctcgggcaggggacctacttcccggcggcggtgctcaactcgccccctaacccgtgcatggcggaggcgcggcgggaggcggaggctgttatgttcggcgccatcgacagcctgc

SEQ ID NO: 27698 - protein, 214 aa, Triticum aestivum
IHPGQTLPNPDQPHPPRTQASRPTVLRTYATMSAAAQETTAGGGGDGKRQGPCRPGHLKLGYHIVVSNAVYVLLAPFAAALALRASRLTPSDLAAARAYLLANLHLAVSLVSVATALATVYLARRPRAVYLLDFACYKPGPDHVVTRETFMKQSSKAGVFTDDNLAFQRKILERSGLGQGTYFPAAVLNSPPNPCMAEARREAEAVMFGAIDSL

SEQ ID NO: 27699 - protein, 183 aa, Triticum aestivum
MSAAAQETTAGGGGDGKRQGPCRPGHLKLGYHIVVSNAVYVLLAPFAAALALRASRLTPSDLAAARAYLLANLHLAVSLVSVATALATVYLARRPRAVYLLDFACYKPGPDHVVTRETFMKQSSKAGVFTDDNLAFQRKILERSGLGQGTYFPAAVLNSPPNPCMAEARREAEAVMFGAIDSL

SEQ ID NO: 27700 - DNA, 1594 bp, Triticum aestivum
accaagacgacgcgagcgccatggcgcacgatggagcttcccatggagcgaccaccgccccgctgctcgcgtcgacggagaagccaccgcggaacatgtacgccttcggctgcgccacgctggcctccatgaccacgatcctcatgggttacaatctcgcgctgatgagcggcgcgcagctcttcatccgggaggacctggggcttaccgacgagcaggtggaggtactggctgggtccatgaacgtgtacatgctcgtgtccatcctcgccgccggctgggcggccgacctcctgggccgccgcggcacgctcgtgctcgccaacggcttcctcatggccggcgcgctcgccatgtcgcttggcggcagctacgcggcgctcatggccgcgcgcttcatcaccagcatcggcgttggcttctccctcgtcgtcgcgccggtctacaacgccgagatctcgccggcctccgcgcgtggcgtgctttcctcgttactcgatatatttgtcaacgtcggcatcctgctcagttacgtgtcgaactacgccttggctggcctgccggtgcacctcagttggcgcgtcatgtacgccatcggcgtgctcccaccggtgctcctcgccgccggggtgctcgccatgccggagtccccgcggtggctcgccatgcgcgggcgcgaggacgacgcgcgcgcagtgctcgtgcgcacctccgataccgccgccgaggccgagctccggtttgaggagatcaagcgggtcgtcgaggcgccgcgagaagccgatagcggcgtgtggcgggagctgatctttcgaccgtcagcgatggtccggcggatccttgtcttcgtggtcgggctcaacttcctccagcaagcgttgggcgtcgacgccatcctgctgtacagcccgctcatgttcaagaaggcaggcatgtcgtcgaatagcgccatcttgggcgccaccgtggccatcggtgtcgtcaagacgtgcttcatactcgtggtctcgctcttttccgaccgcttcggccggcggccgctcctgctggccagcgccggcggcgtggccgcctcgctgaccggcctggctctcacactctgcatcggcgagacgtcgccagcgagcacggctgcctgcgtggcgttcacgctggccacggtcgcggcgttttcggtcgggtgggggtcgctcccgtccacgtacacggcagagatcacgccgctgcggctgcgtgcgcagggctcgagcctgggcatggcggtgaaccggctgacttgcggggtggtaagcatgtcgttcatatcgctagcgggctggatcaccatgcccgggtgcttctttctgtacgccagtatggcggccacggcgtacgtgttcgtcttcctgcgcctgccagagacgaagggccggaccctagaggagatggacgtgctcttttccaaatgattatgtcatctgtaggttttcggccacagttcaatgcacgctgttgcggcccgcagcacgtttggtagaaacctttgaaaaaaaaatgtgtgaactcttttgtgattgcatcatcgatagggatcaataaaaggcttctactcctc

SEQ ID NO: 27701 - protein, 481 aa, Triticum aestivum
QDDASAMAHDGASHGATTAPLLASTEKPPRNMYAFGCATLASMTTILMGYNLALMSGAQLFIREDLGLTDEQVEVLAGSMNVYMLVSILAAGWAADLLGRRGTLVLANGFLMAGALAMSLGGSYAALMAARFITSIGVGFSLVVAPVYNAEISPASARGVLSSLLDIFVNVGILLSYVSNYALAGLPVHLSWRVMYAIGVLPPVLLAAGVLAMPESPRWLAMRGREDDARAVLVRTSDTAAEAELRFEEIKRVVEAPREADSGVWRELIFRPSAMVRRILVFVVGLNFLQQALGVDAILLYSPLMFKKAGMSSNSAILGATVAIGVVKTCFILVVSLFSDRFGRRPLLLASAGGVAASLTGLALTLCIGETSPASTAACVAFTLATVAAFSVGWGSLPSTYTAEITPLRLRAQGSSLGMAVNRLTCGVVSMSFISLAGWITMPGCFFLYASMAATAYVFVFLRLPETKGRTLEEMDVLFSK

SEQ ID NO: 27702 - protein, 475 aa, Triticum aestivum
MAHDGASHGATTAPLLASTEKPPRNMYAFGCATLASMTTILMGYNLALMSGAQLFIREDLGLTDEQVEVLAGSMNVYMLVSILAAGWAADLLGRRGTLVLANGFLMAGALAMSLGGSYAALMAARFITSIGVGFSLVVAPVYNAEISPASARGVLSSLLDIFVNVGILLSYVSNYALAGLPVHLSWRVMYAIGVLPPVLLAAGVLAMPESPRWLAMRGREDDARAVLVRTSDTAAEAELRFEEIKRVVEAPREADSGVWRELIFRPSAMVRRILVFVVGLNFLQQALGVDAILLYSPLMFKKAGMSSNSAILGATVAIGVVKTCFILVVSLFSDRFGRRPLLLASAGGVAASLTGLALTLCIGETSPASTAACVAFTLATVAAFSVGWGSLPSTYTAEITPLRLRAQGSSLGMAVNRLTCGVVSMSFISLAGWITMPGCFFLYASMAATAYVFVFLRLPETKGRTLEEMDVLFSK

SEQ ID NO: 27703 - protein, 450 aa, Triticum aestivum
MYAFGCATLASMTTILMGYNLALMSGAQLFIREDLGLTDEQVEVLAGSMNVYMLVSILAAGWAADLLGRRGTLVLANGFLMAGALAMSLGGSYAALMAARFITSIGVGFSLVVAPVYNAEISPASARGVLSSLLDIFVNVGILLSYVSNYALAGLPVHLSWRVMYAIGVLPPVLLAAGVLAMPESPRWLAMRGREDDARAVLVRTSDTAAEAELRFEEIKRVVEAPREADSGVWRELIFRPSAMVRRILVFVVGLNFLQQALGVDAILLYSPLMFKKAGMSSNSAILGATVAIGVVKTCFILVVSLFSDRFGRRPLLLASAGGVAASLTGLALTLCIGETSPASTAACVAFTLATVAAFSVGWGSLPSTYTAEITPLRLRAQGSSLGMAVNRLTCGVVSMSFISLAGWITMPGCFFLYASMAATAYVFVFLRLPETKGRTLEEMDVLFSK

SEQ ID NO: 27704 - DNA, 1696 bp, Triticum aestivum
aaaagacaattcttttcttcctcttctgttccggcaggggcggcggggatggcgatggcgtcgcgcgcgcggacgcggtggtcggcgctggcggcgagcacgctgatccagtgcttcgcgggcggcagctactgcttcggcgtctactcgccggcgctcaaggcgtcgcagggctacgaccagtccgcgctcgacgccgtcgccttcttcaaggacgtcggcgctaacgtcggggtcctctccggcctcctcgccgcgtgggctccctctgggggccggaggcgaccctggctcgtcctcctcaccggcgccgcgctctgcgccgccgggtacctccccatgtggctcgccgtcgccggggtcgtccccgccccgctcccgctcgtctgcctctacatgctgctcgccgcgcaggcgcagaccttcatgaacacggccgatgtcgtcaccgccgtagagaacttccccgaccgccgcggcaccgtcatcggcatcatgaaggggtttctaggcttgagtggggcgatactggtccaagtacagcggactctccgtattgatcccggcagtttcatacttatgctggcaatactacccacagccatcgcgttgctgctcatgtactttgtcgacgtccacagcgctcatgagcggtacaacaagaagttcctcgatgctttctctctcatggccgttactgttgctgggttcctgatggttgtcataatctgcgaccaagtattcgtgataagttcagccgggcagagcgtttgctttgggatactccttctattgatcctgtctcccgcagctattgttgtaagggttcagaggacggaaccgaagcagcaagaagaaccaacgccggaagaacaaactggtttacttcttcatgaggagactgcgcagcaggattcggagaacgccagctctagcatggcgctcgtgggatctaacagtcaggacatgtcgtcggacaaagcagagaacctgaacgtggtgcaggccatgtgcaaacttgacttctggctgctcttcgttgcgatggcctgcgggatggggtcggggctggccaccgtgaacaacatcagccagatcgggggctcccttggctacacgagcagggagaccagcactctggtgtcgctatggagcatctggaacttctcagggaggttcggcgcaggctacgtctctgatcacttcctccggtcgcgaggagtcggcaggcctttcttcatagccgcgacgcttctggtcatgggcgtaggccatgccatcatctcctccggtttccacgcgtcgctctacgtcggctccgtccttgtaggactgtgctacgggtctcagtgggctttgatgccgagcataacttcagagatcttcgggctaaaccatttcggcaccatattcaacacggtggccgtcgcgagccctgttggctcttacatcctctcggtgtgcgtggtcgggttcatctatgacaaggagtcaccgcaaggtgagcttgcctgcgccggtaagcactgctttgcgctctccttcatgatcatggcatgtgtctgcgtcttcgggtctgctgttgcttttgtattgtttgtcagaacaaggaagttttataggcgggttatatacgcccgactgctctcttttgtagataaatgaagaaatgcatatatgcaaacgattctcagtc

SEQ ID NO: 27705 - protein, 554 aa, Triticum aestivum
KRQFFSSSSVPAGAAGMAMASRARTRWSALAASTLIQCFAGGSYCFGVYSPALKASQGYDQSALDAVAFFKDVGANVGVLSGLLAAWAPSGGRRRPWLVLLTGAALCAAGYLPMWLAVAGVVPAPLPLVCLYMLLAAQAQTFMNTADVVTAVENFPDRRGTVIGIMKGFLGLSGAILVQVQRTLRIDPGSFILMLAILPTAIALLLMYFVDVHSAHERYNKKFLDAFSLMAVTVAGFLMVVIICDQVFVISSAGQSVCFGILLLLILSPAAIVVRVQRTEPKQQEEPTPEEQTGLLLHEETAQQDSENASSSMALVGSNSQDMSSDKAENLNVVQAMCKLDFWLLFVAMACGMGSGLATVNNISQIGGSLGYTSRETSTLVSLWSIWNFSGRFGAGYVSDHFLRSRGVGRPFFIAATLLVMGVGHAIISSGFHASLYVGSVLVGLCYGSQWALMPSITSEIFGLNHFGTIFNTVAVASPVGSYILSVCVVGFIYDKESPQGELACAGKHCFALSFMIMACVCVFGSAVAFVLFVRTRKFYRRVIYARLLSFVDK

SEQ ID NO: 27706 - protein, 538 aa, Triticum aestivum
MAMASRARTRWSALAASTLIQCFAGGSYCFGVYSPALKASQGYDQSALDAVAFFKDVGANVGVLSGLLAAWAPSGGRRRPWLVLLTGAALCAAGYLPMWLAVAGVVPAPLPLVCLYMLLAAQAQTFMNTADVVTAVENFPDRRGTVIGIMKGFLGLSGAILVQVQRTLRIDPGSFILMLAILPTAIALLLMYFVDVHSAHERYNKKFLDAFSLMAVTVAGFLMVVIICDQVFVISSAGQSVCFGILLLLILSPAAIVVRVQRTEPKQQEEPTPEEQTGLLLHEETAQQDSENASSSMALVGSNSQDMSSDKAENLNVVQAMCKLDFWLLFVAMACGMGSGLATVNNISQIGGSLGYTSRETSTLVSLWSIWNFSGRFGAGYVSDHFLRSRGVGRPFFIAATLLVMGVGHAIISSGFHASLYVGSVLVGLCYGSQWALMPSITSEIFGLNHFGTIFNTVAVASPVGSYILSVCVVGFIYDKESPQGELACAGKHCFALSFMIMACVCVFGSAVAFVLFVRTRKFYRRVIYARLLSFVDK

SEQ ID NO: 27707 - protein, 536 aa, Triticum aestivum
MASRARTRWSALAASTLIQCFAGGSYCFGVYSPALKASQGYDQSALDAVAFFKDVGANVGVLSGLLAAWAPSGGRRRPWLVLLTGAALCAAGYLPMWLAVAGVVPAPLPLVCLYMLLAAQAQTFMNTADVVTAVENFPDRRGTVIGIMKGFLGLSGAILVQVQRTLRIDPGSFILMLAILPTAIALLLMYFVDVHSAHERYNKKFLDAFSLMAVTVAGFLMVVIICDQVFVISSAGQSVCFGILLLLILSPAAIVVRVQRTEPKQQEEPTPEEQTGLLLHEETAQQDSENASSSMALVGSNSQDMSSDKAENLNVVQAMCKLDFWLLFVAMACGMGSGLATVNNISQIGGSLGYTSRETSTLVSLWSIWNFSGRFGAGYVSDHFLRSRGVGRPFFIAATLLVMGVGHAIISSGFHASLYVGSVLVGLCYGSQWALMPSITSEIFGLNHFGTIFNTVAVASPVGSYILSVCVVGFIYDKESPQGELACAGKHCFALSFMIMACVCVFGSAVAFVLFVRTRKFYRRVIYARLLSFVDK

SEQ ID NO: 27708 - DNA, 1056 bp, Triticum aestivum
actttattgtgtttaaacacgccaaaggccaaaagcggggaagaaagaggacgaaagaaagcgtcgccgccgcggagcaaatcgagcaagcagccggcgacgcgacgcggccgaatcggagcaggcagtctcgccggccggccgtcccatcgaccgaccccccgctcggccccccgaggaaccgatagggtccatctccctgccggcgatggcgtcgtccgcggatccgtgggtgcgggagtacggcgaggcggcgcgcctggcggacgacgtcgccgccatggtcgccgaccgggcggcgctcccgcagtccggcccggaggtcatgcgccacacctccgccattcgccggaagatcaccatcctcgggaccaggctggacagcctcgaggggatgctcgccaggcttccccccaaatccatcacggacaaggagctgaataagcaccgagacacgctttcaaatttgaaatctagagcaaaacagatggcagaaagtttcaacatgtcgacctttgccaacagggaggatttgcttggtcagagcaagaaagctgctgatgacatgaacagagtagccgggttggataaccaagggattgttggccttcagaggcaaatcatgaaagaacaagatgagggtcttgagaagctggaacagaccgtgctgagcacaaaacatattgcgttagcagtcaatgaggaacttgacctgcacgcaagactgattgatgacctagatgatcatgtggatggtacaaactcgcgccttcaacgtgtgcaaaagaggcttgcggttctgaacaagcgcgccaagggcggctgctcctgcatgtccctgctgctgtccaccgtcggtatagtgatgcttgtggttattgtctggctcctcatcaagtatctgtaacctctgcccaactcaaatcagtttcaagtgtgcagttctttcaaagacagtatggttacttccgcttcgccatcattttggcgagaaatggaaaatatgtatgccacatgtccccttatcgggttgaaatgtgaagttcagacttttgc

SEQ ID NO: 27709 - protein, 232 aa, Triticum aestivum
MASSADPWVREYGEAARLADDVAAMVADRAALPQSGPEVMRHTSAIRRKITILGTRLDSLEGMLARLPPKSITDKELNKHRDTLSNLKSRAKQMAESFNMSTFANREDLLGQSKKAADDMNRVAGLDNQGIVGLQRQIMKEQDEGLEKLEQTVLSTKHIALAVNEELDLHARLIDDLDDHVDGTNSRLQRVQKRLAVLNKRAKGGCSCMSLLLSTVGIVMLVVIVWLLIKYL

SEQ ID NO: 27710 - protein, 208 aa, Triticum aestivum
MVADRAALPQSGPEVMRHTSAIRRKITILGTRLDSLEGMLARLPPKSITDKELNKHRDTLSNLKSRAKQMAESFNMSTFANREDLLGQSKKAADDMNRVAGLDNQGIVGLQRQIMKEQDEGLEKLEQTVLSTKHIALAVNEELDLHARLIDDLDDHVDGTNSRLQRVQKRLAVLNKRAKGGCSCMSLLLSTVGIVMLVVIVWLLIKYL

SEQ ID NO: 27711 - protein, 193 aa, Triticum aestivum
MRHTSAIRRKITILGTRLDSLEGMLARLPPKSITDKELNKHRDTLSNLKSRAKQMAESFNMSTFANREDLLGQSKKAADDMNRVAGLDNQGIVGLQRQIMKEQDEGLEKLEQTVLSTKHIALAVNEELDLHARLIDDLDDHVDGTNSRLQRVQKRLAVLNKRAKGGCSCMSLLLSTVGIVMLVVIVWLLIKYL

SEQ ID NO: 27712 - DNA, 886 bp, Triticum aestivum
ctgattggtgattgcctcctcgtccggcgttaaaaagcagcctcggctcctccgcgcatccgaaccgagcctcgccaccatgatctccccgcgccccactctctcctccggcttcttctcccgctccgcctccttctcccgccccggctcattctccccctcgccgcctgcctcgccggccgcgcaggcgccgccgcggctgctctcggccccgttcgcgcgccacgccaccttctcccgctccgcctccgccgtcgccgcgccgggccgcggcgcctcctcctgcttgtacgacgtgctcggcctcgacgccggcgcgagcgacggggagatcaaggccgcgtaccgccgcctggcgcgcgccgtccacccggacgtgtccccgcaccccgccgcgtccgccgacgacttcatacgggtgcacgccgcctacagcacgctctccgaccccagcaagcgcgccgactacgaccgccgcatgatcatgatcccctccgccgtcggccgccgcagcgcccccaacctcgcccgctcgccgtcgttccccgggtgctgccgccgcacctgggagaccgaccagtgctggtgatcgacgttttcggccggagtggcctccggctggttccccgggcggttagaaatgcaaaggttaccgcggccactaggctcacttgcagtggtggccgggtcactgcgcttctagaataaacagtagtagtacgtactctgttattagcgcaacgtacaattagtctcacacttcgctgtggcttgtatagaaaacaaaagatcgatgtatggcgtcgtgtgtgacgtccgtctattttgaagtttatcatgcatgttcggcttgatgtggtgatctgacagtaggatttgttaaatc

SEQ ID NO: 27713 - protein, 169 aa, Triticum aestivum
MISPRPTLSSGFFSRSASFSRPGSFSPSPPASPAAQAPPRLLSAPFARHATFSRSASAVAAPGRGASSCLYDVLGLDAGASDGEIKAAYRRLARAVHPDVSPHPAASADDFIRVHAAYSTLSDPSKRADYDRRMIMIPSAVGRRSAPNLARSPSFPGCCRRTWETDQCW

SEQ ID NO: 27714 - DNA, 1540 bp, Triticum aestivum
cctggaacatcctaatcgaaaacattccagtccaggacggcagcaggaaagggaagaaccaatcaaccgattccccctccccactccaccccgcgccgcagcgagagcgaactggtgcctgccttccactgccggccgcgtcgtcgtcgtcccttccttccctcaatccctccctcccgctgcgctcccgtccgagactgtgaacatgtcagatagtgcattgcaagatctcaacgctgcccaatcagttgtgctcgagaaaagcaaagacagttctgtggaaccctgcagttctaagcccgtgttaaacgggaacaaatgtgtcaagaaggaaggaaatgctgtacctgatgtgaccaatggatgtgatgctgtagttgtagatatcgagtatattgattctgagaatctcacagatcttccagatgttgacacaagcctgagtactttgcttgcaaggttggattcaaaggattggatcaagacatgtgaagctcttaataatgttcgtcagttggcgatatatcacaagcaaaggttgcaggagctgctggagcctctagttcctcttattgtgaaatctgttaagaatccaaggagtgctctatgcaaaaccgcacttatgacctgcgctgacatctttaaggcatacggtgaacaaatggtcgacttgattgatcagctgctaatgccgctatttctgaaatcttcacaagacaagcgctttgtttgtgaagcagctgaggcagcccttatgtcaatgacaagctggatctccccctctatattgttaccaaaaatgcagccctacctcaaaaacaggaatccacgaattcgagcaaaagcatctgtttgtttcagtaagagtgtaccacgccttggtctggagggaatcaaagaatacggaatggacaagctcattcaggtcgcagcaacccagctcagcgaccagcttcctgaatcaagggaggctgctcgtaacctttcattggagcttcaagcattctatgagaagtctcaagcctctggtttaggcgaagatgacagcgcacctgctatttcaccagaagctgaaacctgggaggctttctgcctatctaagctttctgctttaagcgcccaagcaatcctccgtgtcactgtgggtgtccctgttgccccaaaagaaggcggcatctctgctgctctgaaagaaggcggcatccctgctgccctgaaagaaggtggcatctctgttgtcgttgctccaaaagaaggtggcgcccctgttgctacgaaagaaggtgctgcggccgtgggctgctagcgttgggagttggccgacacaagcgatgttgcgatttttccacatccaattcacgtttttgctgtacatgatttatgggttgctcggtcggtaaatcgaatctccttttgctggagttcttcaggcttgagggcctggggtgggtgttaatattggtgcgagatatagtcccttatagttgactgtataatcctttggttccgtcactacttatcagtttggcattgattggcc

SEQ ID NO: 27715 - protein, 434 aa, Triticum aestivum
LEHPNRKHSSPGRQQEREEPINRFPLPTPPRAAARANWCLPSTAGRVVVVPSFPQSLPPAALPSETVNMSDSALQDLNAAQSVVLEKSKDSSVEPCSSKPVLNGNKCVKKEGNAVPDVTNGCDAVVVDIEYIDSENLTDLPDVDTSLSTLLARLDSKDWIKTCEALNNVRQLAIYHKQRLQELLEPLVPLIVKSVKNPRSALCKTALMTCADIFKAYGEQMVDLIDQLLMPLFLKSSQDKRFVCEAAEAALMSMTSWISPSILLPKMQPYLKNRNPRIRAKASVCFSKSVPRLGLEGIKEYGMDKLIQVAATQLSDQLPESREAARNLSLELQAFYEKSQASGLGEDDSAPAISPEAETWEAFCLSKLSALSAQAILRVTVGVPVAPKEGGISAALKEGGIPAALKEGGISVVVAPKEGGAPVATKEGAAAVGC

SEQ ID NO: 27716 - protein, 366 aa, Triticum aestivum
MSDSALQDLNAAQSVVLEKSKDSSVEPCSSKPVLNGNKCVKKEGNAVPDVTNGCDAVVVDIEYIDSENLTDLPDVDTSLSTLLARLDSKDWIKTCEALNNVRQLAIYHKQRLQELLEPLVPLIVKSVKNPRSALCKTALMTCADIFKAYGEQMVDLIDQLLMPLFLKSSQDKRFVCEAAEAALMSMTSWISPSILLPKMQPYLKNRNPRIRAKASVCFSKSVPRLGLEGIKEYGMDKLIQVAATQLSDQLPESREAARNLSLELQAFYEKSQASGLGEDDSAPAISPEAETWEAFCLSKLSALSAQAILRVTVGVPVAPKEGGISAALKEGGIPAALKEGGISVVVAPKEGGAPVATKEGAAAVGC

SEQ ID NO: 27717 - protein, 227 aa, Triticum aestivum
MTCADIFKAYGEQMVDLIDQLLMPLFLKSSQDKRFVCEAAEAALMSMTSWISPSILLPKMQPYLKNRNPRIRAKASVCFSKSVPRLGLEGIKEYGMDKLIQVAATQLSDQLPESREAARNLSLELQAFYEKSQASGLGEDDSAPAISPEAETWEAFCLSKLSALSAQAILRVTVGVPVAPKEGGISAALKEGGIPAALKEGGISVVVAPKEGGAPVATKEGAAAVGC

SEQ ID NO: 27718 - DNA, 1352 bp, Triticum aestivum
ccatttacgtcagagccacaccaaaactactactatccggaaacacccagaccagcggggagcactaccttgacgatcatggcgaccgctcctgctacggtggtgccgcgcctgaagctgggctcccagggtatggaggtctcggcgcagggcctcggctgcatgggtatgtccgccttctacggcccgcccaagcccgagccagacatggtcgcgctcatccaccacgccgtcgacgccggcgtcaccctgctcgactcctccgacatctacgggccgcacaccagcgagatcctgctcagcaaggcgctgctggggggcgtgagggagagggtagagctggccaccaagttcggcatctcgttcgccgacggcaagcgggaggttcgcggggatccggcctacgtgcgggcggcgtgcgagggcagcctcaagcggctcggcgtcagctgcattgacctttactaccagcaccgcgtcgacaccagggtgcctatcgaggtcacggttggagaactcaagaagcttgttgaagaaggaaaaataaaatacatcggattatctgaagcatctgcatcaacaatcaggagggctcatgctattcatcctatcactgcagttcagatggagtggtcactgtggtcaagagatgtcgaagaagacataattccaacttgcagagaacttggaattggaattgttgcttacagcccacttggtagaggattcttctcaaaaggagcaaaattggttgactcactatcagaccaggacttccgcaagaatttacctagatttcaaccagagagtctcgagaagaatgcccagatatttgagcgtgttgatgcgatggccacaaggaaaggatgcacaccatcacaacttgccttggcttgggttcaccatcagggaagcgatgtttgccccatacctgggacaacaaaaattgaaaatttcaaccaaaatatgggagcattagctgtgaggctcacaccagaggaaatggctgaactcgagtcttacgcggctgcaggtgatgtccagggtgacaggtaccctccaatggctagtacttggagggagtctgagacccctccattgtcatcttggaaagctgagtagacagtttcatctcttcaacaactacagtgtttacttttggtgagaaggtaaaagcagggtacagttgaacccaggatttcgttttccatttctgcagatgcatgtatatgagctgagctgtgacgtgtgtatgttatgcttggttaccgatttactcctgcttaaaacaatgtcattgctaccaaggcttctgtattgtattgaccaacaaaatacaagtgatgtgtgat

SEQ ID NO: 27719 - protein, 373 aa, Triticum aestivum
PFTSEPHQNYYYPETPRPAGSTTLTIMATAPATVVPRLKLGSQGMEVSAQGLGCMGMSAFYGPPKPEPDMVALIHHAVDAGVTLLDSSDIYGPHTSEILLSKALLGGVRERVELATKFGISFADGKREVRGDPAYVRAACEGSLKRLGVSCIDLYYQHRVDTRVPIEVTVGELKKLVEEGKIKYIGLSEASASTIRRAHAIHPITAVQMEWSLWSRDVEEDIIPTCRELGIGIVAYSPLGRGFFSKGAKLVDSLSDQDFRKNLPRFQPESLEKNAQIFERVDAMATRKGCTPSQLALAWVHHQGSDVCPIPGTTKIENFNQNMGALAVRLTPEEMAELESYAAAGDVQGDRYPPMASTWRESETPPLSSWKAE

SEQ ID NO: 27720 - protein, 347 aa, Triticum aestivum
MATAPATVVPRLKLGSQGMEVSAQGLGCMGMSAFYGPPKPEPDMVALIHHAVDAGVTLLDSSDIYGPHTSEILLSKALLGGVRERVELATKFGISFADGKREVRGDPAYVRAACEGSLKRLGVSCIDLYYQHRVDTRVPIEVTVGELKKLVEEGKIKYIGLSEASASTIRRAHAIHPITAVQMEWSLWSRDVEEDIIPTCRELGIGIVAYSPLGRGFFSKGAKLVDSLSDQDFRKNLPRFQPESLEKNAQIFERVDAMATRKGCTPSQLALAWVHHQGSDVCPIPGTTKIENFNQNMGALAVRLTPEEMAELESYAAAGDVQGDRYPPMASTWRESETPPLSSWKAE

SEQ ID NO: 27721 - protein, 329 aa, Triticum aestivum
MEVSAQGLGCMGMSAFYGPPKPEPDMVALIHHAVDAGVTLLDSSDIYGPHTSEILLSKALLGGVRERVELATKFGISFADGKREVRGDPAYVRAACEGSLKRLGVSCIDLYYQHRVDTRVPIEVTVGELKKLVEEGKIKYIGLSEASASTIRRAHAIHPITAVQMEWSLWSRDVEEDIIPTCRELGIGIVAYSPLGRGFFSKGAKLVDSLSDQDFRKNLPRFQPESLEKNAQIFERVDAMATRKGCTPSQLALAWVHHQGSDVCPIPGTTKIENFNQNMGALAVRLTPEEMAELESYAAAGDVQGDRYPPMASTWRESETPPLSSWKAE

SEQ ID NO: 27722 - DNA, 1165 bp, Triticum aestivum
actctagtacttgtcatcttcttccccgaagcttctcgtcctctcccctccccctcgcaccgccggagggaggcgccggccgcgccgtctcctcgccccgtccgtccggccgccgctcgtcgtgggtggttggttccgagcgagcgacgcccagccagcatggcggcaaatgtgggggagtccacgagcggcagcagcagcgtggccggcgacggcgggggcagcttcgagtgcaacatatgctttgagctgccgcaggagcccatcgtcacgctctgcggccacctcttctgctggccctgcctctacaagtggctgcacatccactcgcactcgcccgagtgccccgtctgcaaggccgtcgtcgaggaggacaagctcgtcccgctctacggccgcggcaaggaccgcgtcgaccccaggtccaagggggtgccggccggggccgagatccccaaccggccgaccgggcagcggcccgccaccgccccgcaggccgaccccaacaaccacttccccaacgcaaccctaacccctggttcatggggggagggggcgtccctttggccaacgcgcggtggggaaactacaccttctcggccgcgtttggcggcctgttcccgctgctgagcttccaggtgcatggattcccggacgcgaccgcgtacgggcagcctgccgggtttccctatggctacgggcatggccatggccatgggcatgctttccatggcgggcacgcccacgccgctgccccccggcacgcgccgcccgggcagcagcagcagcaggcggacgtgtacctcaaggcgctcctcatcctggttggctttctcgtgatcgcgagcctcatcacattctaggttcgtcaccattgtcatttgtcaccgtcataataagagaaacgattgtcatgatacttctcagatgttgtgtgcattaccttgcccccccgtacgaaagccccggtctaaatctgagtggtgcgttttgagcgaaagtgttcatagaactcatgtatatatgtgctatttagacgcggtctgaatggggggtgcctgtgtaccgtagtagtttcacactgattcgtgaatgatttggaaacctctgtttggagtggatgtaccagaccaattatatcatgtgtaattttgtttcgactgcc

SEQ ID NO: 27723 - protein, 209 aa, Triticum aestivum
TLVLVIFFPEASRPLPSPSHRRREAPAAPSPRPVRPAAARRGWLVPSERRPASMAANVGESTSGSSSVAGDGGGSFECNICFELPQEPIVTLCGHLFCWPCLYKWLHIHSHSPECPVCKAVVEEDKLVPLYGRGKDRVDPRSKGVPAGAEIPNRPTGQRPATAPQADPNNHFPNATLTPGSWGEGASLWPTRGGETTPSRPRLAACSRC

SEQ ID NO: 27724 - protein, 156 aa, Triticum aestivum
MAANVGESTSGSSSVAGDGGGSFECNICFELPQEPIVTLCGHLFCWPCLYKWLHIHSHSPECPVCKAVVEEDKLVPLYGRGKDRVDPRSKGVPAGAEIPNRPTGQRPATAPQADPNNHFPNATLTPGSWGEGASLWPTRGGETTPSRPRLAACSRC

SEQ ID NO: 27725 - protein, 120 aa, Triticum aestivum
MWGSPRAAAAAWPATAGAASSATYALSCRRSPSSRSAATSSAGPASTSGCTSTRTRPSAPSARPSSRRTSSSRSTAAARTASTPGPRGCRPGPRSPTGRPGSGPPPPRRPTPTTTSPTQP

SEQ ID NO: 27726 - DNA, 1284 bp, Triticum aestivum
gaggccagccgagttatcgtcgtcacatcgaacgaacgctactcaaagaccagtccaaccacggaaggtcgtgcaagcgcaaactatggagagcacaggggtagcgagacggacgtcgacggtgcaggagctcgccagcgccctcggcaaaccagacgtgccggcccagtacgtctcacgcggacaccacgaaaacgaccagcagcccgccgcggtgccggtccctgtcatcgacatcggccgccttttcaaccaggacggcgccgccgcagctgacgacgaggcggcgaagctccggcaggcgctcgagtcgtggggcctcttcctggtgactaaccacggcgtggacacctcggtgatggacggcatgatggtcgcgtcgagggagttcttccggcagccacccgaagagaagcagagatacaccaacctcatcggcggcgagcggttccagctcgaggggtatgggaccgaccgggtgaactcatcggaacagatcctggactggtcagaccgcctctacctcaaggtggagcccgaagacgagcgcagcctcgccctctggccagcccatccccaaaccttcaggaatcttctgcacgagttcaccacgaaatgtagggtggtgaaggacggactggtccgggcaatggcgaggctgctcgagctcgacaacgactatatcattgaacagtttggggagaaggctgacacttacgctagattcagctactacccggagtgcccaaggccagagctcgtgttcggcctcaagccccactccgatgggagcgttcttaccgtgctcatggtcgatgacaccgttggtgggctgcagattttgagagacggtgtttggttcgatgtaccgatagttcctcacaccctgctgatcaacataggagaccaaactgagataatgagcaatgggatcttcaaaagccccgtgcatagagttgtgacaaatgctgagaaagaaaggctatcgctggctctattctactcgcttgatcccgagagagaaattgagccagcgactcagctggtagatgggaagagaccggcgttgtacagaaaggtcaaggtgaaggactacattgctggactctttgaacatgtgtcgcaaggaacgatggttattgatacagtgaagatataaacaagtgtggtatcatgctggtaatgcaaaacgtgtaatcgttctaggaacaatttatctccatgtattgttgcatgctaactttattaagtactccctttgttcagcatcacatatcgttttgg

SEQ ID NO: 27727 - protein, 385 aa, Triticum aestivum
RPAELSSSHRTNATQRPVQPRKVVQAQTMESTGVARRTSTVQELASALGKPDVPAQYVSRGHHENDQQPAAVPVPVIDIGRLFNQDGAAAADDEAAKLRQALESWGLFLVTNHGVDTSVMDGMMVASREFFRQPPEEKQRYTNLIGGERFQLEGYGTDRVNSSEQILDWSDRLYLKVEPEDERSLALWPAHPQTFRNLLHEFTTKCRVVKDGLVRAMARLLELDNDYIIEQFGEKADTYARFSYYPECPRPELVFGLKPHSDGSVLTVLMVDDTVGGLQILRDGVWFDVPIVPHTLLINIGDQTEIMSNGIFKSPVHRVVTNAEKERLSLALFYSLDPEREIEPATQLVDGKRPALYRKVKVKDYIAGLFEHVSQGTMVIDTVKI

SEQ ID NO: 27728 - protein, 357 aa, Triticum aestivum
MESTGVARRTSTVQELASALGKPDVPAQYVSRGHHENDQQPAAVPVPVIDIGRLFNQDGAAAADDEAAKLRQALESWGLFLVTNHGVDTSVMDGMMVASREFFRQPPEEKQRYTNLIGGERFQLEGYGTDRVNSSEQILDWSDRLYLKVEPEDERSLALWPAHPQTFRNLLHEFTTKCRVVKDGLVRAMARLLELDNDYIIEQFGEKADTYARFSYYPECPRPELVFGLKPHSDGSVLTVLMVDDTVGGLQILRDGVWFDVPIVPHTLLINIGDQTEIMSNGIFKSPVHRVVTNAEKERLSLALFYSLDPEREIEPATQLVDGKRPALYRKVKVKDYIAGLFEHVSQGTMVIDTVKI

SEQ ID NO: 27729 - protein, 266 aa, Triticum aestivum
MDGMMVASREFFRQPPEEKQRYTNLIGGERFQLEGYGTDRVNSSEQILDWSDRLYLKVEPEDERSLALWPAHPQTFRNLLHEFTTKCRVVKDGLVRAMARLLELDNDYIIEQFGEKADTYARFSYYPECPRPELVFGLKPHSDGSVLTVLMVDDTVGGLQILRDGVWFDVPIVPHTLLINIGDQTEIMSNGIFKSPVHRVVTNAEKERLSLALFYSLDPEREIEPATQLVDGKRPALYRKVKVKDYIAGLFEHVSQGTMVIDTVKI

SEQ ID NO: 27730 - DNA, 521 bp, Triticum aestivum
atccagtatcttggccagcccatcttgacacgagaaaggaccaaacgagcctctctccgccggcggtgagaaaggagaggatggagcggcggcgcaagcctcttccgcgccggccgacgtactgcgctccttttaggtcaggtcgtccaccagccaagaagaggaagagattgggctccgagggagagattgaaccttcggccggggcggcaggagtcgaccggatcagcgccctccccgacgaactcctcggcgagatcatctccctcctccccatcaaggacggcgcccgcacccagatcctcgcgtcccggtggcgccacctctggctctccgcccctctcaacctcgactgccgtggcttcgccaccgccgccgatctcgcggtcgtcagataccgcagggtctacaacaacgtcccctctgctgtagcgcacattcttgaccgccaccaaggccccggccgccgcctccgtgtcaaggggtaccgtctccccgtcgccgccgcagccgccgccgcc

SEQ ID NO: 27731 - protein, 173 aa, Triticum aestivum
PVSWPAHLDTRKDQTSLSPPAVRKERMERRRKPLPRRPTYCAPFRSGRPPAKKRKRLGSEGEIEPSAGAAGVDRISALPDELLGEIISLLPIKDGARTQILASRWRHLWLSAPLNLDCRGFATAADLAVVRYRRVYNNVPSAVAHILDRHQGPGRRLRVKGYRLPVAAAAAAA

SEQ ID NO: 27732 - protein, 147 aa, Triticum aestivum
MERRRKPLPRRPTYCAPFRSGRPPAKKRKRLGSEGEIEPSAGAAGVDRISALPDELLGEIISLLPIKDGARTQILASRWRHLWLSAPLNLDCRGFATAADLAVVRYRRVYNNVPSAVAHILDRHQGPGRRLRVKGYRLPVAAAAAAA

SEQ ID NO: 27733 - DNA, 1662 bp, Triticum aestivum
aaacgaaaaaggtggcgagagggagagggagaggaaggtgccggccctagcaatggcggggtggtacgaggaggcggcgggtctgctgctgcgccggtcggcgttggcggagatggcggtagatgtgctgctgtgcgccgtgccgatctgggcggcggtcatgatctgcctcttcatagggtgggcatggcggccgcgctggaccgggctgatcttcctcggtttccgcagccgtctccggctcctctacgtgcctcccgggctcggcgcgcgccgcctatggctcgcctgcaccgcgctctccgccttctccgtcgcgccgcagctgctctcctccgccttccgccgccatgggaagtaccagcgcaaggattcctcgaacgacgacacggacgcctgcggggattctggcgcttgcgctaacggcaggtcaatttttgaggtcaagcatggtattgtcactgagaaggacctagatcacctcgtgcagcttttagataataaggagagtgggcatacaacatggcagcatttgatggagcgtaccacttccaacatgacgtacaaggcctggaggcatgagcccgaggtgggacctataatgcattgtagccagaccattttcgaggatgctactcctgaactggttagagatttcttctgggatgatgattttcgtctaaagtgggaccccatgcttgtgtgcttcaaaattttggatgagttccctctgaatggaaccacaattattcactggattaaaaagttccctttcttctgcagtgaccgtgaatacatttttgggcggcgtatctgggagtcggggaaggcttactattgtgttacgaagggaattccttatccatctttgcccaagaaggaaaaaccgaggcgtgtggaattgtacttctcgagttggcgtattagacctgttcaatcgcccaaaaaagatggccagcaacacatggcatgtgaagtaacactgtttcactacgaggatatgggcatacccaaggatgttgctaaagttggtgtccgccacggcatgtggggtgctgttaaaaagctgcagtccggctttagagcatatcagctaatgagaaaatcagaaaacatcctgtcacgcagtgccatcatggctcgggtgaccaccaagacatgcattgctggttctgatggctccttggatcaagggcccttcagcacagaacaagccagtacagaggacgacaactccagggcagtccaacatggtttcgactggaagtgggtggtggtcggtggcgcggtggctgccgtttgcgtgcttaacaccggaattgtagggaaggccctcttacttggagctgcaagaaggcaggcaaagaagtgatgagcatctaccagcatccacaaagtgagcttcacgaccatcagggcctgtctctgtctagaaagtcgcaatcgagaccgaggataaaggaatgaaatccataccatactacaggatgcagataattcgggtgcctaattttggattgtgccttttaagcagtatatcgcaaatgtgtcttgctataaccgattatgtggtatcaggaatcgttagatgacgatgtatctcaagatgtgagttctgttaacaacatttgctaacttccaagttccaagagtgcacttttc

SEQ ID NO: 27734 - protein, 456 aa, Triticum aestivum
NEKGGERERERKVPALAMAGWYEEAAGLLLRRSALAEMAVDVLLCAVPIWAAVMICLFIGWAWRPRWTGLIFLGFRSRLRLLYVPPGLGARRLWLACTALSAFSVAPQLLSSAFRRHGKYQRKDSSNDDTDACGDSGACANGRSIFEVKHGIVTEKDLDHLVQLLDNKESGHTTWQHLMERTTSNMTYKAWRHEPEVGPIMHCSQTIFEDATPELVRDFFWDDDFRLKWDPMLVCFKILDEFPLNGTTIIHWIKKFPFFCSDREYIFGRRIWESGKAYYCVTKGIPYPSLPKKEKPRRVELYFSSWRIRPVQSPKKDGQQHMACEVTLFHYEDMGIPKDVAKVGVRHGMWGAVKKLQSGFRAYQLMRKSENILSRSAIMARVTTKTCIAGSDGSLDQGPFSTEQASTEDDNSRAVQHGFDWKWVVVGGAVAAVCVLNTGIVGKALLLGAARRQAKK

SEQ ID NO: 27735 - protein, 439 aa, Triticum aestivum
MAGWYEEAAGLLLRRSALAEMAVDVLLCAVPIWAAVMICLFIGWAWRPRWTGLIFLGFRSRLRLLYVPPGLGARRLWLACTALSAFSVAPQLLSSAFRRHGKYQRKDSSNDDTDACGDSGACANGRSIFEVKHGIVTEKDLDHLVQLLDNKESGHTTWQHLMERTTSNMTYKAWRHEPEVGPIMHCSQTIFEDATPELVRDFFWDDDFRLKWDPMLVCFKILDEFPLNGTTIIHWIKKFPFFCSDREYIFGRRIWESGKAYYCVTKGIPYPSLPKKEKPRRVELYFSSWRIRPVQSPKKDGQQHMACEVTLFHYEDMGIPKDVAKVGVRHGMWGAVKKLQSGFRAYQLMRKSENILSRSAIMARVTTKTCIAGSDGSLDQGPFSTEQASTEDDNSRAVQHGFDWKWVVVGGAVAAVCVLNTGIVGKALLLGAARRQAKK

SEQ ID NO: 27736 - protein, 419 aa, Triticum aestivum
MAVDVLLCAVPIWAAVMICLFIGWAWRPRWTGLIFLGFRSRLRLLYVPPGLGARRLWLACTALSAFSVAPQLLSSAFRRHGKYQRKDSSNDDTDACGDSGACANGRSIFEVKHGIVTEKDLDHLVQLLDNKESGHTTWQHLMERTTSNMTYKAWRHEPEVGPIMHCSQTIFEDATPELVRDFFWDDDFRLKWDPMLVCFKILDEFPLNGTTIIHWIKKFPFFCSDREYIFGRRIWESGKAYYCVTKGIPYPSLPKKEKPRRVELYFSSWRIRPVQSPKKDGQQHMACEVTLFHYEDMGIPKDVAKVGVRHGMWGAVKKLQSGFRAYQLMRKSENILSRSAIMARVTTKTCIAGSDGSLDQGPFSTEQASTEDDNSRAVQHGFDWKWVVVGGAVAAVCVLNTGIVGKALLLGAARRQAKK

SEQ ID NO: 27737 - DNA, 809 bp, Triticum aestivum
accattacctagaacatcctaatcgaaaagaaaggcgtcttcgtctcgacttgcttcccctccgagagaccgacctacccatccaatccatacactttcctgcaaagggtaggggatagacagggattctaaggctccgctccacaccaagagtagcgaagatctctgatttgagagagggaagcatcgaatcagccgacaggaggaggtctcagtcaccaacccagcagcagccatgagtgccatgaagttttgccgtgaatgcaacaacatcttgtatcccaaggaggaccgggaccagaaggtgctcctcttcgcctgcaggaactgcgaccaccaggaggttgcagacaacaactgtgtctaccgcaacgtggtgcaccacagcgctggagagttcacccaggtgctccaggacgtcgccggcgacccaacacttccccgcaccaaggaagtccggtgcgccgtctgtggtcacggcgaagctgtcttcttccaggccaccgcgagaggtgaggaggggatgacgctcttcttcgtctgctgcaacccgagctgcggtcatcggtggagagaatgatgtgtccatcacccaaccgatgacggatttcaccgatgcaacagtctgagagagttgttttttctttcttcccaagagatattttccccagtagcatgaattggctgtatgtttcagatgtattgaggcggcatatcattttcataactccatgaggaaaaaacaaccgcgtctaccggggtaaaaatatccctgtggtccattgcattaatcaaaggatgctacgagg

SEQ ID NO: 27738 - protein, 114 aa, Triticum aestivum
MSAMKFCRECNNILYPKEDRDQKVLLFACRNCDHQEVADNNCVYRNVVHHSAGEFTQVLQDVAGDPTLPRTKEVRCAVCGHGEAVFFQATARGEEGMTLFFVCCNPSCGHRWRE

SEQ ID NO: 27739 - protein, 111 aa, Triticum aestivum
MKFCRECNNILYPKEDRDQKVLLFACRNCDHQEVADNNCVYRNVVHHSAGEFTQVLQDVAGDPTLPRTKEVRCAVCGHGEAVFFQATARGEEGMTLFFVCCNPSCGHRWRE

SEQ ID NO: 27740 - protein, 84 aa, Triticum aestivum
MQQHLVSQGGPGPEGAPLRLQELRPPGGCRQQLCLPQRGAPQRWRVHPGAPGRRRRPNTSPHQGSPVRRLWSRRSCLLPGHRER

SEQ ID NO: 27741 - DNA, 1577 bp, Triticum aestivum
acaaaaagcaagctctatatccagctgactagccacaagtacgacacacatactgcagtgttagcgctacacacacgggcaccagagttatggggaggcaggtcgccgccctgtgcgggcttctcgtcgtgctgctccggctcacgtccggcgtcaatgcacagacggagatcttgttccaggggttcaactgggactcgtggagcaagcaggggggctggtacaacatgctcaaggcccaggttggcgacatcgccggcgccggggtcactcacgtctggctgcccccacctacacactccgtttcatctcaaggatacatgccgggccggctctacgacctggacgcgtccaagtacggcacggcggtggagctcaggtcgctcatcgcggccttcggtgccaagggcatcaagtgcgtcgccgacatcgtcatcaaccaccgctgcgccgaggacaaggacgggcgcggcatctactgcatcttcaagggcggaggacccgagggcctcctggactggggtccgggcatgatctgcagcgacgacaccaagttctccgacggcacgggctaccgtgataccggcgcggacttcgccgccgcgcccgacatcgaccacctcaacccgcgcgtccagaaggagctctccgactggctcaactggctcaagtccgacctcggcttcgacggctggcgcctcgacttcgccaagggctactcggccgacgtcgccaggacgtacgtgcagaacacgagccccggcttcgtcgtcgcggaaatatggaactccctgagctacgacggcgacgggaagcccgccgtcaaccaggacggggagcggcaggagctggtgaactgggcgaaggcggtcggcggccctgccatggcgttcgacttcacgaccaagggcatcctgcagtcggcggtgcagggcgagctgtggaggatgcgggacaaggagggcaacgctcccgggatgatcggcctgttgccggagaaggcggtcacgttcgtggacaaccacgacacgggctcgtcgcagaagaaatggccgttcccggccgacaaggtcatgatgggctacgcctacatcctcacccaccctggagtcccatgcatcttctacgatcacgtgttcgactggaacctgaagcaagagatcaacgcgctggcggcggtgaggaaccgcaacgggatcaacgccgggagcaagctgcgcatcctggcggcggagagcgacatgtacgtggcgacggttgacgagaaagttatcgtcaagctcggaccgaggttcgacgctggcagcgtcatcccgtcggacttccacgtcgtggctcacggcaataactactgcgtctgggagaagagcggccttagggtgccggccgggcggcgctagctacctagtagacgttagcaacttcgcaccggcggccagaccgttgtactcctacaagaaatgtttgttccagttcgtcgtagactaggcaataaagtttgtaccaccaccgctctccttccaaccttgcggaaggagcgtgagctatcaaatatattattaattttacgcgtttgt

SEQ ID NO: 27742 - protein, 436 aa, Triticum aestivum
MGRQVAALCGLLVVLLRLTSGVNAQTEILFQGFNWDSWSKQGGWYNMLKAQVGDIAGAGVTHVWLPPPTHSVSSQGYMPGRLYDLDASKYGTAVELRSLIAAFGAKGIKCVADIVINHRCAEDKDGRGIYCIFKGGGPEGLLDWGPGMICSDDTKFSDGTGYRDTGADFAAAPDIDHLNPRVQKELSDWLNWLKSDLGFDGWRLDFAKGYSADVARTYVQNTSPGFVVAEIWNSLSYDGDGKPAVNQDGERQELVNWAKAVGGPAMAFDFTTKGILQSAVQGELWRMRDKEGNAPGMIGLLPEKAVTFVDNHDTGSSQKKWPFPADKVMMGYAYILTHPGVPCIFYDHVFDWNLKQEINALAAVRNRNGINAGSKLRILAAESDMYVATVDEKVIVKLGPRFDAGSVIPSDFHVVAHGNNYCVWEKSGLRVPAGRR

SEQ ID NO: 27743 - protein, 390 aa, Triticum aestivum
MLKAQVGDIAGAGVTHVWLPPPTHSVSSQGYMPGRLYDLDASKYGTAVELRSLIAAFGAKGIKCVADIVINHRCAEDKDGRGIYCIFKGGGPEGLLDWGPGMICSDDTKFSDGTGYRDTGADFAAAPDIDHLNPRVQKELSDWLNWLKSDLGFDGWRLDFAKGYSADVARTYVQNTSPGFVVAEIWNSLSYDGDGKPAVNQDGERQELVNWAKAVGGPAMAFDFTTKGILQSAVQGELWRMRDKEGNAPGMIGLLPEKAVTFVDNHDTGSSQKKWPFPADKVMMGYAYILTHPGVPCIFYDHVFDWNLKQEINALAAVRNRNGINAGSKLRILAAESDMYVATVDEKVIVKLGPRFDAGSVIPSDFHVVAHGNNYCVWEKSGLRVPAGRR

SEQ ID NO: 27744 - protein, 359 aa, Triticum aestivum
MPGRLYDLDASKYGTAVELRSLIAAFGAKGIKCVADIVINHRCAEDKDGRGIYCIFKGGGPEGLLDWGPGMICSDDTKFSDGTGYRDTGADFAAAPDIDHLNPRVQKELSDWLNWLKSDLGFDGWRLDFAKGYSADVARTYVQNTSPGFVVAEIWNSLSYDGDGKPAVNQDGERQELVNWAKAVGGPAMAFDFTTKGILQSAVQGELWRMRDKEGNAPGMIGLLPEKAVTFVDNHDTGSSQKKWPFPADKVMMGYAYILTHPGVPCIFYDHVFDWNLKQEINALAAVRNRNGINAGSKLRILAAESDMYVATVDEKVIVKLGPRFDAGSVIPSDFHVVAHGNNYCVWEKSGLRVPAGRR

SEQ ID NO: 27745 - DNA, 614 bp, Triticum aestivum
acagcaaaacatactatagcgcagccaaggtctgcagagctccggctgtctgtcacgtacgtgcgtatatacatacacgcagcccgccagccatgtctgccgccgcatgcgtctccttctgcccctcccccgcgtcctctcgccacggcgggccgatcgtcgacttggccgggctgccgccggctacggaggcggaggagcgcggcgcccagagggacctcctggagttcggggtcaacggaacgatcggcgccaacagtgacagtgacgaagatgctgctgctgctgagatcgatgacgaggaggagcactcggtgaggaggccacgggcggtggttcagaagttcatgtgcgaacgcaaggctgtcggcgacggcttcgctctccggaggagcattggcaggcctgagttgcagagcttggatcctttcatctccttggatgagtttgaattttctcgtccagctggcttttctgatcatccacaccgaggattcgagaatgttacctacatgcttgagggaggcttgagttaccatgacttttcaggccacaagggcacgatcaacaccggagatgttcagtggatgacggccgggcgtggtgtggtgcac

SEQ ID NO: 27746 - protein, 204 aa, Triticum aestivum
SKTYYSAAKVCRAPAVCHVRAYIHTRSPPAMSAAACVSFCPSPASSRHGGPIVDLAGLPPATEAEERGAQRDLLEFGVNGTIGANSDSDEDAAAAEIDDEEEHSVRRPRAVVQKFMCERKAVGDGFALRRSIGRPELQSLDPFISLDEFEFSRPAGFSDHPHRGFENVTYMLEGGLSYHDFSGHKGTINTGDVQWMTAGRGVVH

SEQ ID NO: 27747 - protein, 174 aa, Triticum aestivum
MSAAACVSFCPSPASSRHGGPIVDLAGLPPATEAEERGAQRDLLEFGVNGTIGANSDSDEDAAAAEIDDEEEHSVRRPRAVVQKFMCERKAVGDGFALRRSIGRPELQSLDPFISLDEFEFSRPAGFSDHPHRGFENVTYMLEGGLSYHDFSGHKGTINTGDVQWMTAGRGVVH

SEQ ID NO: 27748 - protein, 105 aa, Triticum aestivum
TAKHTIAQPRSAELRLSVTYVRIYIHAARQPCLPPHASPSAPPPRPLATAGRSSTWPGCRRLRRRRSAAPRGTSWSSGSTERSAPTVTVTKMLLLLRSMTRRSTR

SEQ ID NO: 27749 - DNA, 1321 bp, Triticum aestivum
aattggttgggcaaactctgtttcgacacagcctcgccatttcgtcgaacacgtggtagtgcgtcgcaccggcccttccgcaatggcctccttcctcgtcgcccgccgcctcctctgccctgcctccgcccggcgcctcctcccatgcacttccccgccaccttctgcccccgctgctctctgctggctgtccaccgacgcctcgccctcaccgcctcttcccgtcccccctctggagcccacagtcgaccctcccaagaaggatggagcctccttctccgccggttccggcgctggaggggcctaccggactggacagggagctgcatcggggggtcgccgatctggtggcgcggggtacgaggaggagcagcagaaggtcctccgcgcgtcgcttctccacgtgccgaggatgggatggagcgagtcggccatgatcgcgggtgcgagggacgtggccatgtcgccggccatcgttggtgccttcccaaggaaggaggctgcgctagttgagtttttcatggatgactgccttcaacaactcatggatcgcattgatgctggtgagggagagcttttgaaaaacttgatgctcactgagagactatctaggcttgttcggatgaggcttgagatgcagacaccttacatatcaaagtggcctcaagcgctgagcattcagtcccaaccagcaaatgtctcaacaagcttaaagcagagagcagtccttgttgatgagatttggcatgctgctggagatgctggatcagatattgattggtatgtgaaacgtactgtgcttggtggcatctactcagcctcagaggtgtacatgttaacagataattctccagagtttcacgacacatggacatttgtgaatcgccgcatcaaagatgctcttgatttgcagaaatcttataaggaggtcgcttatctaaccgaaaccctgggagcagggatcggtggctccatacagggcgtcctgaacaaggttttccagaaatgaaaaaacttgcctttgcaggctgccttctcggcatttccgccaccactttcttatgtcacgttaagattctatgacattgtatatagtactctcttttacaaacaaacgctgttagggtagccaagaagctatttagtcggtggtcagaggtcagaggtcagttgagttgttgattagtcgtcattgcgcaattctgctacaggttggcgaaaaatgtgtgaactctacagactctagtccatgtgtcatgtgcgagttgctgcaaacagaacaagacactcgtggctttgcatggacacgacttggcattcg

SEQ ID NO: 27750 - protein, 335 aa, Triticum aestivum
IGWANSVSTQPRHFVEHVVVRRTGPSAMASFLVARRLLCPASARRLLPCTSPPPSAPAALCWLSTDASPSPPLPVPPLEPTVDPPKKDGASFSAGSGAGGAYRTGQGAASGGRRSGGAGYEEEQQKVLRASLLHVPRMGWSESAMIAGARDVAMSPAIVGAFPRKEAALVEFFMDDCLQQLMDRIDAGEGELLKNLMLTERLSRLVRMRLEMQTPYISKWPQALSIQSQPANVSTSLKQRAVLVDEIWHAAGDAGSDIDWYVKRTVLGGIYSASEVYMLTDNSPEFHDTWTFVNRRIKDALDLQKSYKEVAYLTETLGAGIGGSIQGVLNKVFQK

SEQ ID NO: 27751 - protein, 308 aa, Triticum aestivum
MASFLVARRLLCPASARRLLPCTSPPPSAPAALCWLSTDASPSPPLPVPPLEPTVDPPKKDGASFSAGSGAGGAYRTGQGAASGGRRSGGAGYEEEQQKVLRASLLHVPRMGWSESAMIAGARDVAMSPAIVGAFPRKEAALVEFFMDDCLQQLMDRIDAGEGELLKNLMLTERLSRLVRMRLEMQTPYISKWPQALSIQSQPANVSTSLKQRAVLVDEIWHAAGDAGSDIDWYVKRTVLGGIYSASEVYMLTDNSPEFHDTWTFVNRRIKDALDLQKSYKEVAYLTETLGAGIGGSIQGVLNKVFQK

SEQ ID NO: 27752 - protein, 198 aa, Triticum aestivum
MGWSESAMIAGARDVAMSPAIVGAFPRKEAALVEFFMDDCLQQLMDRIDAGEGELLKNLMLTERLSRLVRMRLEMQTPYISKWPQALSIQSQPANVSTSLKQRAVLVDEIWHAAGDAGSDIDWYVKRTVLGGIYSASEVYMLTDNSPEFHDTWTFVNRRIKDALDLQKSYKEVAYLTETLGAGIGGSIQGVLNKVFQK

SEQ ID NO: 27753 - DNA, 1307 bp, Triticum aestivum
acctagaacatcctaatcaaaaaaaaatttcaaacgcagccgtcgccagcgccccttgccccaaacctaccacgcccaacagcgccgcagccaatccccgaaacccgccgccgccgccgccatgggaaggctgggcgacaagtccgactatgagagcatccgcgaggcccgcatctcggagaacatggcccggatggagatgctcggcctgcgccgctgcgccggggagctgagcgccatctcctccgccccctccccccgcgccgggagcgtcaccccgaggaagaccccgaagccgccgcgggtcctcaccccgctccgccgctcgggccgcctgattgccgccgcgacgccgcccggctccggctctcgccgctccgcgcggctcaacggggactccgtgcagcacaaggcgctgccctacagaggagcggacgccgaggaagaggagcaggaggagaagtgtcccatgtacatcgacaaggagaggctgcgggtgctgcaggagacgcggtgcgacagcaaggcgagggggtccgtgtacgaccccgttctcgggatctgctgccatttctgcaggcagaagaaactctgcggcgaggagggctgcaagcgctgtggggaaggagactttgagcagcaatgcatagggaagacggagtgctcctcttgccattcctcctatgggatcctctgccgtgcttgccttaaagttaggtacggtgaagagatggaagaggtcaggaagaacaagaagtggatgtgccctcactgtgttgaggagaagggtaccaagaaattctggatatgcaacagctccatctgcttgaagaagaggaagatagcaccaaccgggatcgccatattccaagcgcgtgagcaaggatatgcgtcggtcgcacaccttctcatggaccagctgaagagccgcggatcattctgacaacgacgtacgcctgcctggagttccccgcttgctcacttcttcagtgattttagggatgattgatggttgctctggatcttttgtttcgttgacggtttagatggtagacagcttagagtctgttgctgaagaatgtggagctaccaaaaccttctcccagatgttcccagagtgaccttcgctgaagatcgaagcaaggattctgcgtctctcacatgtagcggatggatgagctttgagcttatccttgtatgttctctgttgtttgtaaaacgtcagttgtgtgcacttgtgctgtagaatctatgcttttggaatcattggtgcttcttcagtcaagaaaataaaagtgaatgtcgtc

SEQ ID NO: 27754 - protein, 273 aa, Triticum aestivum
MGRLGDKSDYESIREARISENMARMEMLGLRRCAGELSAISSAPSPRAGSVTPRKTPKPPRVLTPLRRSGRLIAAATPPGSGSRRSARLNGDSVQHKALPYRGADAEEEEQEEKCPMYIDKERLRVLQETRCDSKARGSVYDPVLGICCHFCRQKKLCGEEGCKRCGEGDFEQQCIGKTECSSCHSSYGILCRACLKVRYGEEMEEVRKNKKWMCPHCVEEKGTKKFWICNSSICLKKRKIAPTGIAIFQAREQGYASVAHLLMDQLKSRGSF

SEQ ID NO: 27755 - protein, 252 aa, Triticum aestivum
MARMEMLGLRRCAGELSAISSAPSPRAGSVTPRKTPKPPRVLTPLRRSGRLIAAATPPGSGSRRSARLNGDSVQHKALPYRGADAEEEEQEEKCPMYIDKERLRVLQETRCDSKARGSVYDPVLGICCHFCRQKKLCGEEGCKRCGEGDFEQQCIGKTECSSCHSSYGILCRACLKVRYGEEMEEVRKNKKWMCPHCVEEKGTKKFWICNSSICLKKRKIAPTGIAIFQAREQGYASVAHLLMDQLKSRGSF

SEQ ID NO: 27756 - protein, 249 aa, Triticum aestivum
MEMLGLRRCAGELSAISSAPSPRAGSVTPRKTPKPPRVLTPLRRSGRLIAAATPPGSGSRRSARLNGDSVQHKALPYRGADAEEEEQEEKCPMYIDKERLRVLQETRCDSKARGSVYDPVLGICCHFCRQKKLCGEEGCKRCGEGDFEQQCIGKTECSSCHSSYGILCRACLKVRYGEEMEEVRKNKKWMCPHCVEEKGTKKFWICNSSICLKKRKIAPTGIAIFQAREQGYASVAHLLMDQLKSRGSF

SEQ ID NO: 27757 - DNA, 1293 bp, Triticum aestivum
aaaaccggagacagcacaggcagctccccccataattgcctgtgccactggtggttggactggaagccgcctccctctcccccctgtcctccccttgcccgtcctcgacctcgccgccggccagcgatggagcggcgatccaccacccgcttctcgccttccgagattgcaaggatggagaagttggtttcatcagacagaaaagagcaagtcttggttgatagtttctgccagaagcttgtagaagaatttaatcgttctccagctcgagtcggaagcagagctctacaggctacacaggttcgaggatggttccttgataagctccctgcatcaactcctaaacctgcttccttgcctactacttctgaagaaaagcctttagcctcagaaccagatgcgttaatttctgagataaagacttcagcttctgatgaagaaaaagttttagctcttgatacaagtatttcaaacaatgaggatgcactttctgcggatttacccaaagagactacagataaggttcctgaatttgaagacttgcagtttgaggctaagtcatcaaaggattctgcatggtacgacgtcgccctcttcttggcacacaggaagacaagtttgggagaagttgaagtccgggtgaggtttatcggatatggggctgaagaagatgagtgggtgaatgtcaggaaggctgtccgccagcaatccattccgctggagtcctcagaatgccgaagcattgtcaaaggagatcttgtcctgtgtttcaaggagagcaatgatgaagcactgcatttcgatgcgcacgttgtggatgtccagcggaaacagcatgatataaggggatgcagatgcctcttccatgttgaatatgatcatgatcaaagccaggagatggtgaacctcaagagaatctccaggcggccaagatacctttgatggcttctgctaacatggatctgcttcctgctgctatccgagcttgtgtcgtactaacgggagccctcgaatcttggttgagaccgctgcactctgattgtttgttcttattgatgtactgtgtctagtagtaaaacacccgggagagtagttaagccccctctttggcacatagctgctgtaacggctatgagtaggctccgtgatagccaatttttgcacacacacgagaaagttggtgccaaagcgggcggagagccggattttaactggtgtgttggcagcagattaccatgtcactatgtcagtgtttgccgttctgaacctcttggggcgatttgcctctgcttc

SEQ ID NO: 27758 - protein, 313 aa, Triticum aestivum
KTGDSTGSSPHNCLCHWWLDWKPPPSPPCPPLARPRPRRRPAMERRSTTRFSPSEIARMEKLVSSDRKEQVLVDSFCQKLVEEFNRSPARVGSRALQATQVRGWFLDKLPASTPKPASLPTTSEEKPLASEPDALISEIKTSASDEEKVLALDTSISNNEDALSADLPKETTDKVPEFEDLQFEAKSSKDSAWYDVALFLAHRKTSLGEVEVRVRFIGYGAEEDEWVNVRKAVRQQSIPLESSECRSIVKGDLVLCFKESNDEALHFDAHVVDVQRKQHDIRGCRCLFHVEYDHDQSQEMVNLKRISRRPRYL

SEQ ID NO: 27759 - protein, 271 aa, Triticum aestivum
MERRSTTRFSPSEIARMEKLVSSDRKEQVLVDSFCQKLVEEFNRSPARVGSRALQATQVRGWFLDKLPASTPKPASLPTTSEEKPLASEPDALISEIKTSASDEEKVLALDTSISNNEDALSADLPKETTDKVPEFEDLQFEAKSSKDSAWYDVALFLAHRKTSLGEVEVRVRFIGYGAEEDEWVNVRKAVRQQSIPLESSECRSIVKGDLVLCFKESNDEALHFDAHVVDVQRKQHDIRGCRCLFHVEYDHDQSQEMVNLKRISRRPRYL

SEQ ID NO: 27760 - protein, 255 aa, Triticum aestivum
MEKLVSSDRKEQVLVDSFCQKLVEEFNRSPARVGSRALQATQVRGWFLDKLPASTPKPASLPTTSEEKPLASEPDALISEIKTSASDEEKVLALDTSISNNEDALSADLPKETTDKVPEFEDLQFEAKSSKDSAWYDVALFLAHRKTSLGEVEVRVRFIGYGAEEDEWVNVRKAVRQQSIPLESSECRSIVKGDLVLCFKESNDEALHFDAHVVDVQRKQHDIRGCRCLFHVEYDHDQSQEMVNLKRISRRPRYL

SEQ ID NO: 27761 - DNA, 1187 bp, Triticum aestivum
  misc_feature (491)..(491): n is a, c, g, or t
atagaggaaaactttcgaggactatgacgatggggcgcaacttggcggcggtgctcgtcgtgcttgcctgcctcgtttccctcgcgtcggcgcagcaggtcaagacgacggacacgcggtggagctaccgtctgccgctgcccgacggcgtcagcggcgccgagagcctcgcgttcgccggcaaggacggggtctacaccggcgtctccgacgggcgcgttctcaggtggggcgggagcgccgccggctggaccaccttcgcttacaatgccaactacaggaaaattcctctgtgctcggattctggggtgccgtcggaacaaaaggagagcatatgcgggcggccgctgggtgtccggttcaacaggaagaccggcgagctctacatcgccgacgcctacttggggctcatgaaggtcggcccggaaggcggcgaagcccaggtgctagcgacggaggcgaacggcatccccttccacttcctcaacggnctcgacgttgatcaggcgaccggcgatgtctacttcaccgacagcagcgccaactacccccggaggttcaacacggagatcatcatgaacgccgacgcgaccggccgcctgctcaagtacgacgcacgcacgaagctcgtcacggtgctcaaggcggagctgccgtacccgaacggcgtcgcgctcagccgcgacaggacgcacctggtggtggcgcacacggtgccgtgccaggcgttccggtactggctcaaggggcccaaggccgggcagtacgagctcttcgccgacctgccggggtacccggacaacgtgaggcgcgacgggcagggcggtttctgggtggcgctcaaccaggagaaggcgcggctcaacgcgacggcggctccggtgaagcacttggtcggcgtccgtctcggcgccgacggcgtggaggtcgaggagctgacggccgccaggggcgtgacgctcagcgaggtggcggagcagaacggcaacaagctgtggctgggctccgtcgagcttgattatataggcctcttcgtttgatcgattatgtgccagcgcctttatggatttgtacgggttcgttagtggttgtctcattgagttagtagacagagttaaaggtcatggcttcgtacggtttcaggactacatgcaacgtttttctacagatgtaattatgcgagtatt

SEQ ID NO: 27762 - protein, 345 aa, Triticum aestivum
  misc_feature (163)..(163): Xaa can be any naturally occurring amino acid
RGKLSRTMTMGRNLAAVLVVLACLVSLASAQQVKTTDTRWSYRLPLPDGVSGAESLAFAGKDGVYTGVSDGRVLRWGGSAAGWTTFAYNANYRKIPLCSDSGVPSEQKESICGRPLGVRFNRKTGELYIADAYLGLMKVGPEGGEAQVLATEANGIPFHFLNXLDVDQATGDVYFTDSSANYPRRFNTEIIMNADATGRLLKYDARTKLVTVLKAELPYPNGVALSRDRTHLVVAHTVPCQAFRYWLKGPKAGQYELFADLPGYPDNVRRDGQGGFWVALNQEKARLNATAAPVKHLVGVRLGADGVEVEELTAARGVTLSEVAEQNGNKLWLGSVELDYIGLFV

SEQ ID NO: 27763 - protein, 338 aa, Triticum aestivum
  misc_feature (156)..(156): Xaa can be any naturally occurring amino acid
MTMGRNLAAVLVVLACLVSLASAQQVKTTDTRWSYRLPLPDGVSGAESLAFAGKDGVYTGVSDGRVLRWGGSAAGWTTFAYNANYRKIPLCSDSGVPSEQKESICGRPLGVRFNRKTGELYIADAYLGLMKVGPEGGEAQVLATEANGIPFHFLNXLDVDQATGDVYFTDSSANYPRRFNTEIIMNADATGRLLKYDARTKLVTVLKAELPYPNGVALSRDRTHLVVAHTVPCQAFRYWLKGPKAGQYELFADLPGYPDNVRRDGQGGFWVALNQEKARLNATAAPVKHLVGVRLGADGVEVEELTAARGVTLSEVAEQNGNKLWLGSVELDYIGLFV

SEQ ID NO: 27764 - protein, 336 aa, Triticum aestivum
  misc_feature (154)..(154): Xaa can be any naturally occurring amino acid
MGRNLAAVLVVLACLVSLASAQQVKTTDTRWSYRLPLPDGVSGAESLAFAGKDGVYTGVSDGRVLRWGGSAAGWTTFAYNANYRKIPLCSDSGVPSEQKESICGRPLGVRFNRKTGELYIADAYLGLMKVGPEGGEAQVLATEANGIPFHFLNXLDVDQATGDVYFTDSSANYPRRFNTEIIMNADATGRLLKYDARTKLVTVLKAELPYPNGVALSRDRTHLVVAHTVPCQAFRYWLKGPKAGQYELFADLPGYPDNVRRDGQGGFWVALNQEKARLNATAAPVKHLVGVRLGADGVEVEELTAARGVTLSEVAEQNGNKLWLGSVELDYIGLFV

SEQ ID NO: 27765 - DNA, 770 bp, Triticum aestivum
aacctctgaagagacccatcccctctccatctgccctctcatcggctccctcggctccggcgaccgcgaccgcgaccgcgaccggcgaccggcggcgggcgtccctcccaggtgtacaggacagagtaaataggcagggtcgtgcaaaaggagaggaaagtgcgcgtccatttgattgaatggcttcaaggattcaagccttcttgaaccatcccgccggccccaaaactattcatttttgggctccaacatttaaacgggggatcaacattgcaaacattgctgactttgctaagcctccagaaaagatatcctatcctcagcaaattgcggttgcctgcactggagtcgtctggtcacgctacagcatggttatcacaccgaaaaactggaaccttttcagcgttaacgttgcgatggccggcacaggcctgtatcagctttcccgtaaaataaggcaagactacttctctgatggtggaaaggaggtggctgctgcatcactggaagggtagcgaggaccgactggattaataatcgactgcacagcgtgcctgctgccccggaactctgggccgcggaccggcgcaacttccgtgccgttcattctttcccatgtcgaaacttctttgtcaatcacgcccttgaacaaagcagagcggtatgaaaattccgtgcagattaataatctttgtgcatttcgtgcaaaaaggtgtacagattgaatacatacatgcggccttgcggcgaagaaagttattccgtccttt

SEQ ID NO: 27766 - protein, 111 aa, Triticum aestivum
MASRIQAFLNHPAGPKTIHFWAPTFKRGINIANIADFAKPPEKISYPQQIAVACTGVVWSRYSMVITPKNWNLFSVNVAMAGTGLYQLSRKIRQDYFSDGGKEVAAASLEG

SEQ ID NO: 27767 - protein, 58 aa, Triticum aestivum
PLKRPIPSPSALSSAPSAPATATATATGDRRRASLPGVQDRVNRQGRAKGEESARPFD

SEQ ID NO: 27768 - DNA, 937 bp, Triticum aestivum
attagtttcacctttaggtccgtaccttgtttacgctcacaaaaaatcattgttctttacaattctctcatgctaaatagcaatcttcttttctaagtatagtctttgtaacggtgccacttatttcagggtcttgatctacctgaaatcatagtggaatcagagaaacgtgggatgacatttgacaaattgctgacaattcctgagaaagataattgggtctacactgatggccaatcagcatcttgtgtggcctacgtcctcatgatgtacaaggaggctggactctttgaaccaatttccagctctatagaagtcacggagttcacgataaaagatgcttacatcctgaacttctttgaagccaacatgacacggcttccgtcgtggtgcaacaaagacgacactgtgaagctcccgttttgccaaatcaagggcagatatcgaatggaactgccaggatacaacgccatggaaccatacgctcacatgaatgaaaggtgtgcatcgctgcccccggactacctgagggatgagaactgctgagtactcatatttaaccgtgcgcccatgcgatttgattgtactcccttttagtcagtacttcagctgtacatatcacggtaggtctggaatatttcccatgatgcacaccggcttgccacgaggtacgatcaacttcctcgaataaggccacggtggcacaattgtatagcaaaaaagctctgcatctggcgcgcagctgctgtcatgttctgaaaacattcatagtgtttttgccagaaaatagatacacgtttgacaaagatgtatgtgcaccgttgtattcagctgattagaaatggttggaaacctatgtacactatgtagaagtgctatttggtttggctcgtattgttcaattgccatcctatgagcggtgtaaaagctccaagtt

SEQ ID NO: 27769 - protein, 123 aa, Triticum aestivum
MTFDKLLTIPEKDNWVYTDGQSASCVAYVLMMYKEAGLFEPISSSIEVTEFTIKDAYILNFFEANMTRLPSWCNKDDTVKLPFCQIKGRYRMELPGYNAMEPYAHMNERCASLPPDYLRDENC

SEQ ID NO: 27770 - protein, 93 aa, Triticum aestivum
MMYKEAGLFEPISSSIEVTEFTIKDAYILNFFEANMTRLPSWCNKDDTVKLPFCQIKGRYRMELPGYNAMEPYAHMNERCASLPPDYLRDENC

SEQ ID NO: 27771 - protein, 92 aa, Triticum aestivum
MYKEAGLFEPISSSIEVTEFTIKDAYILNFFEANMTRLPSWCNKDDTVKLPFCQIKGRYRMELPGYNAMEPYAHMNERCASLPPDYLRDENC

SEQ ID NO: 27772 - DNA, 1154 bp, Triticum aestivum
cagagctcacacagtgctggacacgccgcgacgagtcggaggggaaagatcaagatggaggcggccgcctccaatccgtcgagcaagaggatcgccctggtcaccggagggaacaaaggggtcgggctggagacgtgcaggcagctcgcgtccaaggggctcaaggtcgtgctgacggcgaggaacgagggcaggggactagaggcggtcgaaggcgtcaggcgctccggtgctgacgtcgtcttccatcagctggatgtcaccgaccctgacagcgtcgcccggctggcggatttcgtcagggatcagttcgggaagctcgatatcctgataaacaatgcaggcatttcaggcgtcgatcgagatccagttctggttgcgaaagttaaagaacaggttgaaagcatggatgtagatcagagagttcaatggatgaaagaaaattccaaggagacatatgaggaagcaaaagaatgcatgagaacaaactactatggggcaaagcttgtcacggaggcactacttcctcttcttcagttgtcctcctctgggagaattgtcaatgtctcatcaggcttttcactgctaagaaacttcaacagtgaaaaactgaagaatgagtttaacaacgctgacaatcttactgaaaagagactagaggagctgttggattcgttcctagaagatttcaaggccaatttgatagaggcacatgggtggccgaccggtggctcgtcagcctacaaagtcgccaaagctgccctcaatgcttacacaaggattctcgccaagaagtaccctaggatgcgcatcaactgtttgacgcctggttatgtcaagagcgacatgtcgatgcacatgggagttttgacgcccgaggagggcgctagcaaccctgtgaaggtcgctctcttgcccgacgatggcccgacgggtgcttattttgatagggatggcgtggcctcgtttgtgtgactctgtcgtacgtgtaatgttttcgtccggttttactctcagaatatgagacaccgtaacagtagttgtcaataaacagtgtgcagtttaacctgtgctgtgcactcgaatcgacatgcaaaattgacaaatttgatcaaaaaaaaaaaaaaaaaagcttatcgataccgtcgacctcg

SEQ ID NO: 27773 - protein, 324 aa, Triticum aestivum
QSSHSAGHAATSRRGKIKMEAAASNPSSKRIALVTGGNKGVGLETCRQLASKGLKVVLTARNEGRGLEAVEGVRRSGADVVFHQLDVTDPDSVARLADFVRDQFGKLDILINNAGISGVDRDPVLVAKVKEQVESMDVDQRVQWMKENSKETYEEAKECMRTNYYGAKLVTEALLPLLQLSSSGRIVNVSSGFSLLRNFNSEKLKNEFNNADNLTEKRLEELLDSFLEDFKANLIEAHGWPTGGSSAYKVAKAALNAYTRILAKKYPRMRINCLTPGYVKSDMSMHMGVLTPEEGASNPVKVALLPDDGPTGAYFDRDGVASFV

SEQ ID NO: 27774 - protein, 306 aa, Triticum aestivum
MEAAASNPSSKRIALVTGGNKGVGLETCRQLASKGLKVVLTARNEGRGLEAVEGVRRSGADVVFHQLDVTDPDSVARLADFVRDQFGKLDILINNAGISGVDRDPVLVAKVKEQVESMDVDQRVQWMKENSKETYEEAKECMRTNYYGAKLVTEALLPLLQLSSSGRIVNVSSGFSLLRNFNSEKLKNEFNNADNLTEKRLEELLDSFLEDFKANLIEAHGWPTGGSSAYKVAKAALNAYTRILAKKYPRMRINCLTPGYVKSDMSMHMGVLTPEEGASNPVKVALLPDDGPTGAYFDRDGVASFV

SEQ ID NO: 27775 - protein, 189 aa, Triticum aestivum
MDVDQRVQWMKENSKETYEEAKECMRTNYYGAKLVTEALLPLLQLSSSGRIVNVSSGFSLLRNFNSEKLKNEFNNADNLTEKRLEELLDSFLEDFKANLIEAHGWPTGGSSAYKVAKAALNAYTRILAKKYPRMRINCLTPGYVKSDMSMHMGVLTPEEGASNPVKVALLPDDGPTGAYFDRDGVASFV

SEQ ID NO: 27776 - DNA, 1499 bp, Triticum aestivum
ctctcacacggctttccctctctctcctcccgttcgaactaggaatccgaggtgagcacgggcaaagcgatggccgcggccaggccgcaccacagggcgccgccggggcgcgtgcccacgaggtgcgtcgccgcgctctgcgccgcctgcttcctcctcggcgtctgcgtcgtcaaccgctactgggcggttcccgagccacccgattgcccaagcaaggcgaactctgggcgttcgagggccgtgctgagccaagcacaaacccgcgaagtcatcatcgcgttggacagaacgatatcggacatcgagatgcgcctggccgccgccagagccgcgcagatgaggaaccaaggcgtgtcgccgagtgattcagccgctgaccagggaaacatgcgacctagattgcttttcgtcatgggtatcatgaccacattcgataatcggaggcgcagagactctatcaggaagacgtggatgccacaaggtgagcgtttgcgaatgctggagaaggacaagggcattgtcacgcgttttgttattggacgaagtgcaaatcctggtcctgacagtgaagtggagcgtgccatggatgcagaagagaaagaatacaatgatattcttagacttaatcacgttgaaggccaggatgggcttcctttgaagattcagatgtttctttcaagtgctctgtccacgtgggatgctgatttctatgtcaaagttgacgatgatgttcatgtcaacattggtattaccagatcgattttggcacgacataggtcaaaacctcgggtgtacatcggctgcatgaaatccggacctgtgatcgctaacaatgaatctaaatattacgaaccagatcattggaagtttgggactgcgggtaacaactactttaggcacgcaacacggcagctgtatgctataacaagggacttggcgacctacatatcagcaaacaagcatatcttgcacaaatatacaaatgaagatgtatcatttggttcttggttgattgggttggatgttgagcatgttgatgagagaagcctttgttgtggtattcctccagactgcgaatggaaggcgcaggctgggaacccatgtggggcatccttcgactggaactgctccggcgtctgcaatccagcagagagaatggaggaggtgcaccggcgatgctgggaacatcgcgaggctgctctgccacaagcgcaggagtcttgacaatcaaggggtggtggcatccttgtgctgctccatgtaaactcatgtaaattattcggtagacgaagacgcagcagctgtcgtgccgttgtctgggttcttggagctacacatttttgccttccgacgccgtgcatttgcatgaattggaggggaaatttgaacagagctacggcatagtgaaggttttgcatcgtgtatgtaagatatccgatatgtgaaaatgaatgcaggaaagctctgcaaattgtgtcgtcatgattaaatggtcg

SEQ ID NO: 27777 - protein, 385 aa, Triticum aestivum
MAAARPHHRAPPGRVPTRCVAALCAACFLLGVCVVNRYWAVPEPPDCPSKANSGRSRAVLSQAQTREVIIALDRTISDIEMRLAAARAAQMRNQGVSPSDSAADQGNMRPRLLFVMGIMTTFDNRRRRDSIRKTWMPQGERLRMLEKDKGIVTRFVIGRSANPGPDSEVERAMDAEEKEYNDILRLNHVEGQDGLPLKIQMFLSSALSTWDADFYVKVDDDVHVNIGITRSILARHRSKPRVYIGCMKSGPVIANNESKYYEPDHWKFGTAGNNYFRHATRQLYAITRDLATYISANKHILHKYTNEDVSFGSWLIGLDVEHVDERSLCCGIPPDCEWKAQAGNPCGASFDWNCSGVCNPAERMEEVHRRCWEHREAALPQAQES

SEQ ID NO: 27778 - protein, 305 aa, Triticum aestivum
MRLAAARAAQMRNQGVSPSDSAADQGNMRPRLLFVMGIMTTFDNRRRRDSIRKTWMPQGERLRMLEKDKGIVTRFVIGRSANPGPDSEVERAMDAEEKEYNDILRLNHVEGQDGLPLKIQMFLSSALSTWDADFYVKVDDDVHVNIGITRSILARHRSKPRVYIGCMKSGPVIANNESKYYEPDHWKFGTAGNNYFRHATRQLYAITRDLATYISANKHILHKYTNEDVSFGSWLIGLDVEHVDERSLCCGIPPDCEWKAQAGNPCGASFDWNCSGVCNPAERMEEVHRRCWEHREAALPQAQES

SEQ ID NO: 27779 - protein, 295 aa, Triticum aestivum
MRNQGVSPSDSAADQGNMRPRLLFVMGIMTTFDNRRRRDSIRKTWMPQGERLRMLEKDKGIVTRFVIGRSANPGPDSEVERAMDAEEKEYNDILRLNHVEGQDGLPLKIQMFLSSALSTWDADFYVKVDDDVHVNIGITRSILARHRSKPRVYIGCMKSGPVIANNESKYYEPDHWKFGTAGNNYFRHATRQLYAITRDLATYISANKHILHKYTNEDVSFGSWLIGLDVEHVDERSLCCGIPPDCEWKAQAGNPCGASFDWNCSGVCNPAERMEEVHRRCWEHREAALPQAQES

SEQ ID NO: 27780 - DNA, 1511 bp, Triticum aestivum
  misc_feature (1418)..(1418): n is a, c, g, or t
  misc_feature (1420)..(1420): n is a, c, g, or t
  misc_feature (1426)..(1426): n is a, c, g, or t
  misc_feature (1442)..(1442): n is a, c, g, or t
  misc_feature (1467)..(1467): n is a, c, g, or t
  misc_feature (1501)..(1501): n is a, c, g, or t
aaagctaaagaaacaaggtagtgtagccagccatcaagtacaccgcagtgctgcaccgagcggctctaggctagcggagttgagtgtcgtcagacagccaccaccttccagttccagccatggccacggcgtcggcggcgcggatagtgccggtgctgctggccctcgcggccctcatctgcgcggcggcggaggcgtcgccagcgaaggtgccggcgatgtacgtgttcggggactcaacggccgacgtcggcagcaacaactacctgcctggcagcgcggtgccgcgggccaacttcccgcacaacggcgtcgacttccccacctcgcgccccaccggccgcttcagcaatggcttcaacggcatcgacttcttagctctgaacatgggcttcaagcgcagccccccgccgttcctctcggtggccaacagaaccaacaggcagatcgcgcgagggctgctgggagcaaacttcgcctccgcaggatcaggcgttcttgacacgacgggtgactccatcgtctcgatgagcaagcaggtcgagcagttcgccattctgcgatgcaacatctctgcgcgcatcggcaaagaggcggccgacaccgtgctgtcgaggtccctgtttgtcatcagcaccggcggcaacgacatcttcgccttcttctcggcgaacagcacgccgacggccgcgcagatgcagctgttcaccgccaacctggtttcgcagtacaaaaatcatgtgaaggctctgttcggcctcggggcgaggaagttggccgtgatcgacgtcccgccgatcgggtgctgcccctacccgagaagcctgcaccctctcggtgcctgtatcgacgtcctcaacgagctgacccgtgggctcaacaagggcgtcaaggacgccatgcatggcctcagcgtcagcttgggtggcctcaagtactccatcgggagctcccacgccgtcgtgcaaagcatcatgaagcacccccaaagactagggttcaaggaggtgaccatggcgtgctgcggctccggcaagttcaacggcaagtcgggctgcacgcccaacgccacgctgtgcgacaaccggcacgagtacctcttctgggacctgctgcacccgactcacgccacgtccaagctcgccgccgcggccatctacaacggctcgctgcacttcgcagcgcccataaacttcaggcagctagcggaggaccagtgctagatagactgatagagcacgcacggccgcgtgcgcggtcgtgtctgctgcgttattaggtttgcttcacgtgtctgtgatggtgatgtttgtgtgtaggatatgtatgcacagtggtgttcgtctgtggtttcatttgtgtattgttaggtgggtgcctggcgtagtgtggaacctaaagatcaaaatggtaccatntntgtaangcaggttaattacttntcgaggtttgtatgtagtactgtanatccgaatgaactaaaatttaattaaatatattntagtattttt

SEQ ID NO: 27781 - protein, 367 aa, Triticum aestivum
MATASAARIVPVLLALAALICAAAEASPAKVPAMYVFGDSTADVGSNNYLPGSAVPRANFPHNGVDFPTSRPTGRFSNGFNGIDFLALNMGFKRSPPPFLSVANRTNRQIARGLLGANFASAGSGVLDTTGDSIVSMSKQVEQFAILRCNISARIGKEAADTVLSRSLFVISTGGNDIFAFFSANSTPTAAQMQLFTANLVSQYKNHVKALFGLGARKLAVIDVPPIGCCPYPRSLHPLGACIDVLNELTRGLNKGVKDAMHGLSVSLGGLKYSIGSSHAVVQSIMKHPQRLGFKEVTMACCGSGKFNGKSGCTPNATLCDNRHEYLFWDLLHPTHATSKLAAAAIYNGSLHFAAPINFRQLAEDQC

SEQ ID NO: 27782 - protein, 334 aa, Triticum aestivum
MYVFGDSTADVGSNNYLPGSAVPRANFPHNGVDFPTSRPTGRFSNGFNGIDFLALNMGFKRSPPPFLSVANRTNRQIARGLLGANFASAGSGVLDTTGDSIVSMSKQVEQFAILRCNISARIGKEAADTVLSRSLFVISTGGNDIFAFFSANSTPTAAQMQLFTANLVSQYKNHVKALFGLGARKLAVIDVPPIGCCPYPRSLHPLGACIDVLNELTRGLNKGVKDAMHGLSVSLGGLKYSIGSSHAVVQSIMKHPQRLGFKEVTMACCGSGKFNGKSGCTPNATLCDNRHEYLFWDLLHPTHATSKLAAAAIYNGSLHFAAPINFRQLAEDQC

SEQ ID NO: 27783 - protein, 278 aa, Triticum aestivum
MGFKRSPPPFLSVANRTNRQIARGLLGANFASAGSGVLDTTGDSIVSMSKQVEQFAILRCNISARIGKEAADTVLSRSLFVISTGGNDIFAFFSANSTPTAAQMQLFTANLVSQYKNHVKALFGLGARKLAVIDVPPIGCCPYPRSLHPLGACIDVLNELTRGLNKGVKDAMHGLSVSLGGLKYSIGSSHAVVQSIMKHPQRLGFKEVTMACCGSGKFNGKSGCTPNATLCDNRHEYLFWDLLHPTHATSKLAAAAIYNGSLHFAAPINFRQLAEDQC

SEQ ID NO: 27784 - DNA, 699 bp, Triticum aestivum
aaaaaaaacacaccgactccactgcatctgcttcgccgcgggcgagtccggccgccggcgatgcggggcccgcacaaccgcccccagtgcacgccggcccaccaggcgggcgccctcctcctggtcgccgtcaccttcctcctcacccgcctcctctccgcccctccccctgccccgcccttccccacccccggcccccggctctccgccgcggccgaccacctccgcgtctacgtctacgccgaggacgaggtcgacggcctgcgcgcgctgctccgcggccgcgacggcgccgtctccgccgccacctgcctcaagggccagtggggaacgcaggtgaagatccaccagcttctcctgaggtcaaggtataggacactggacaaggacgaagcgcatctcttctttgttcccagctacgtcaaatgtgttcgcatgaccggagctctcacagacaaggaaatcaatcagacatatgtcaaggttctgagtcagatgtcatatttccgcagatcgggtgggcgtgaccacatttttgtcttcccaagtggtgctggagctcacctgtttcgctcgtgggcaacttttctgaatcgatccatcatcctcactccagagggtgaccgtactgacaagcgaggtataagcgcatttaatacatggaaagacattattatcccggggaatgtggatgattct

SEQ ID NO: 27785 - protein, 233 aa, Triticum aestivum
KKNTPTPLHLLRRGRVRPPAMRGPHNRPQCTPAHQAGALLLVAVTFLLTRLLSAPPPAPPFPTPGPRLSAAADHLRVYVYAEDEVDGLRALLRGRDGAVSAATCLKGQWGTQVKIHQLLLRSRYRTLDKDEAHLFFVPSYVKCVRMTGALTDKEINQTYVKVLSQMSYFRRSGGRDHIFVFPSGAGAHLFRSWATFLNRSIILTPEGDRTDKRGISAFNTWKDIIIPGNVDDS

SEQ ID NO: 27786 - protein, 213 aa, Triticum aestivum
MRGPHNRPQCTPAHQAGALLLVAVTFLLTRLLSAPPPAPPFPTPGPRLSAAADHLRVYVYAEDEVDGLRALLRGRDGAVSAATCLKGQWGTQVKIHQLLLRSRYRTLDKDEAHLFFVPSYVKCVRMTGALTDKEINQTYVKVLSQMSYFRRSGGRDHIFVFPSGAGAHLFRSWATFLNRSIILTPEGDRTDKRGISAFNTWKDIIIPGNVDDS

SEQ ID NO: 27787 - protein, 123 aa, Triticum aestivum
KKHTDSTASASPRASPAAGDAGPAQPPPVHAGPPGGRPPPGRRHLPPHPPPLRPSPCPALPHPRPPALRRGRPPPRLRLRRGRGRRPARAAPRPRRRRLRRHLPQGPVGNAGEDPPASPEVKV

SEQ ID NO: 27788 - DNA, 2241 bp, Triticum aestivum
aacacaccaaccaatcgtttattccacaccgttttgagaatctaatcatcagctggttagcaaaaacgtcagtcggcaggcgtgcatcagctcagctggtggcaatatgttgactgccttcttgctgctcctggcggcggcggcggccgccaccgagacgcccgagcgcgtcgtcgtggctcatggctgtcagagcagctgcggcggcgtggacatccgctaccccttcggcatcggcgtcggcgccggcggccgcgactgcttccgcgagggctttgagatcgactgcgtctacgacggccccgtgctcgccaacacgacccttcgggtggtgcagctgtccgtggatcccgccgagtcgctggtgatgctccccgttgggcggatgtgctacaacgccaccgacccgcgccgcgccgaggagtacagccatggcgagacgctgatgaacaagcacggcgtgtaccgcttctccagcgcgcgcaacatgctcgtcgtcctcggctgcaacaccatgggcaccatcgggagcgacaagaccacgcgcctcgtcgacggctactcctactacctcgggtgcatgaacttctgcaacagctcggccagcgcgcaggacgggcagtgcgccagcctcgggtgctgccacgtcgacatcccgccggggctcacccacaactacttcaggttccgggagtacgaccacaccagcatgatggactacagcccatgcgactacgccttcctcgtcgacaggaccaactacaccttccggcgctccgacctcctcagggacaccctccggacctcgccggtgtggctggactgggccatccgtggcgccggcgacgactccgtctcattatcgtgtgcccaagccaacaagaccaaggagtacgcctgcctgagcaatcagagctactgcgtcgacgccaccaatgggcctggctacaattgtaactgctccgaaggctatgagggcaacgcctaccttgtcgccggatgcaccaatatagatgaatgtgcagattcaaacaaatatccttgcaaaggtgtatgcagggacacccaaggatcttaccaatgcacctgccctccgggttatgggagcgatgacccaaaaactcaacgctgtactccaaagttcccacccgctgcacaaatttgcataggtgtgataggtggtattcttgccatcacattggtggcattcatcattattattcgaaaagagaagcggaagaccagagagttatatgagaaaaatggtggtcttaccttggagaaggctaaagtcattaagattttcaaagtggaggagctcaagccaattttaaagagcagcaatgtaattggaaaaggtggctttggtgaagtttataagggggttcttgataatgtacttgtcgcggtaaagaaaccaattggtcgtaatgtgcaggagaacaagcaatttgcaaatgaagtcatcatccaatctcaagtcatccacaagaacatcgttaggctcattggttgttgcctagaagtggatagccccctgctagtgtatgagttcatttccaaaggaagcatgcatgacattcttcacgagtttagggagcctctcaacttggatgtgcgtctaagcattgtcttagaatcagcacatggtctagcttatatgcattcacaagcccataccaaaatcctgcacggtgatgttaaaccagcaaacatactcttggatgacaactttgtaccaaagatctcagacttcggcatatcgaggttgattgcagtagacaaggaacatactgccaacgtaattggtgacatgagttatatggatccagtatacctacaaacaggcctcttgactgagaaaagtgatgtctatagttttggggttgtcatcttagaggtcattagcaggaggaaggccactcatgctgacaataacaacttagtgacgagttttctcgagtcccacaaagaagggaagaaagcaaccgagttgtttgatcaggaaattgcaggagcaggaaatttggagcttcttgacactctggcaggaatcgccgtggaatgtcttagccttgatgtggatcaaagaccatcgatgacagatgttgtggcgcgctttctcacattaaatagatcacgtgtgttgtaactttgtttctggggttgagtttgaagtttggaacatgtatggacctttattgtgctccttcaaagtttggaatacatcgaattccttcc

SEQ ID NO: 27789 - protein, 681 aa, Triticum aestivum
MLTAFLLLLAAAAAATETPERVVVAHGCQSSCGGVDIRYPFGIGVGAGGRDCFREGFEIDCVYDGPVLANTTLRVVQLSVDPAESLVMLPVGRMCYNATDPRRAEEYSHGETLMNKHGVYRFSSARNMLVVLGCNTMGTIGSDKTTRLVDGYSYYLGCMNFCNSSASAQDGQCASLGCCHVDIPPGLTHNYFRFREYDHTSMMDYSPCDYAFLVDRTNYTFRRSDLLRDTLRTSPVWLDWAIRGAGDDSVSLSCAQANKTKEYACLSNQSYCVDATNGPGYNCNCSEGYEGNAYLVAGCTNIDECADSNKYPCKGVCRDTQGSYQCTCPPGYGSDDPKTQRCTPKFPPAAQICIGVIGGILAITLVAFIIIIRKEKRKTRELYEKNGGLTLEKAKVIKIFKVEELKPILKSSNVIGKGGFGEVYKGVLDNVLVAVKKPIGRNVQENKQFANEVIIQSQVIHKNIVRLIGCCLEVDSPLLVYEFISKGSMHDILHEFREPLNLDVRLSIVLESAHGLAYMHSQAHTKILHGDVKPANILLDDNFVPKISDFGISRLIAVDKEHTANVIGDMSYMDPVYLQTGLLTEKSDVYSFGVVILEVISRRKATHADNNNLVTSFLESHKEGKKATELFDQEIAGAGNLELLDTLAGIAVECLSLDVDQRPSMTDVVARFLTLNRSRVL

SEQ ID NO: 27790 - protein, 594 aa, Triticum aestivum
MLPVGRMCYNATDPRRAEEYSHGETLMNKHGVYRFSSARNMLVVLGCNTMGTIGSDKTTRLVDGYSYYLGCMNFCNSSASAQDGQCASLGCCHVDIPPGLTHNYFRFREYDHTSMMDYSPCDYAFLVDRTNYTFRRSDLLRDTLRTSPVWLDWAIRGAGDDSVSLSCAQANKTKEYACLSNQSYCVDATNGPGYNCNCSEGYEGNAYLVAGCTNIDECADSNKYPCKGVCRDTQGSYQCTCPPGYGSDDPKTQRCTPKFPPAAQICIGVIGGILAITLVAFIIIIRKEKRKTRELYEKNGGLTLEKAKVIKIFKVEELKPILKSSNVIGKGGFGEVYKGVLDNVLVAVKKPIGRNVQENKQFANEVIIQSQVIHKNIVRLIGCCLEVDSPLLVYEFISKGSMHDILHEFREPLNLDVRLSIVLESAHGLAYMHSQAHTKILHGDVKPANILLDDNFVPKISDFGISRLIAVDKEHTANVIGDMSYMDPVYLQTGLLTEKSDVYSFGVVILEVISRRKATHADNNNLVTSFLESHKEGKKATELFDQEIAGAGNLELLDTLAGIAVECLSLDVDQRPSMTDVVARFLTLNRSRVL

SEQ ID NO: 27791 - protein, 588 aa, Triticum aestivum
MCYNATDPRRAEEYSHGETLMNKHGVYRFSSARNMLVVLGCNTMGTIGSDKTTRLVDGYSYYLGCMNFCNSSASAQDGQCASLGCCHVDIPPGLTHNYFRFREYDHTSMMDYSPCDYAFLVDRTNYTFRRSDLLRDTLRTSPVWLDWAIRGAGDDSVSLSCAQANKTKEYACLSNQSYCVDATNGPGYNCNCSEGYEGNAYLVAGCTNIDECADSNKYPCKGVCRDTQGSYQCTCPPGYGSDDPKTQRCTPKFPPAAQICIGVIGGILAITLVAFIIIIRKEKRKTRELYEKNGGLTLEKAKVIKIFKVEELKPILKSSNVIGKGGFGEVYKGVLDNVLVAVKKPIGRNVQENKQFANEVIIQSQVIHKNIVRLIGCCLEVDSPLLVYEFISKGSMHDILHEFREPLNLDVRLSIVLESAHGLAYMHSQAHTKILHGDVKPANILLDDNFVPKISDFGISRLIAVDKEHTANVIGDMSYMDPVYLQTGLLTEKSDVYSFGVVILEVISRRKATHADNNNLVTSFLESHKEGKKATELFDQEIAGAGNLELLDTLAGIAVECLSLDVDQRPSMTDVVARFLTLNRSRVL

SEQ ID NO: 27792 - DNA, 1235 bp, Triticum aestivum
atcctacactgagtttagctagatcaatttgtgagcttagcatatctgcgatggcttccaggacatggcatttcttgctcgccctcttcctcctgtcctccgctgcgtatgggcagctctcgccgtccttctacgccacgagctgccccctgctggagctcaccgtgcgcgccaccatgatcgctgcgctcctcgccgagcgccgaatgggcgcctccctcctcaggctccacttccatgactgctttgttcaaggctgtgacggatccattcttctggatgacgtgggcagcttcgtcggcgagaagacggccttcccgaacgtgaactccgtgcgcggctacgaggtgatcgaccggatcaaggccaacgtggagctgctctgccccggcgtcgtctcctgtgccgacatcgtcgccctcgcagcacgcgacggcacgtttctgctaggcgggccgagctgggcggtgccgctgggccggcgggactcgacgacggcgagcctggcggaggcgaacgccgacctcccggggccgacgctgaacctcgaccagctcatccgcgcgttcgacaagaagcagctgaccccgcgggacctgacggcgctgtcgggcgcgcacaccatcggcttctcgcagtgccagttcttccgcggccacatctacaacgacaccaacatcgacccggcgttcgcggcgctgcgccggcaggcatgccccgccgcggcccccgccggcgactccaacctggcgcccttcgacgcgcagacccagctcgtcttcgacaacgcctactaccgcaacctagtcgcccaacgcggcctgctgcactcggatcaggagctcttcaacggcgcctcccaggatgcgctggtgcgccagtacggctccaacccggcgctcttcgccgccgacttcgtggccgccatgatcaagatgggcaacatcgcccccctcaccgggtccagcggccagatcaggcgcaactgcagggtcgtcaacagctagctgattggtcgtctaaatgatcaattgatcatgctacgtgatgatggagatgtctcaagtttggttggctacgaaggtaaccaaccagcatgcatgcatggcagaataagagccgtttggttcaggtttagatgattgttgcctttgtccgtgcttcatcatgtaagttgccggtctctgcagtactactatcatggaaatcaagcaactctcgaatgtgtatttgcc

SEQ ID NO: 27793 - protein, 334 aa, Triticum aestivum
PTLSLARSICELSISAMASRTWHFLLALFLLSSAAYGQLSPSFYATSCPLLELTVRATMIAALLAERRMGASLLRLHFHDCFVQGCDGSILLDDVGSFVGEKTAFPNVNSVRGYEVIDRIKANVELLCPGVVSCADIVALAARDGTFLLGGPSWAVPLGRRDSTTASLAEANADLPGPTLNLDQLIRAFDKKQLTPRDLTALSGAHTIGFSQCQFFRGHIYNDTNIDPAFAALRRQACPAAAPAGDSNLAPFDAQTQLVFDNAYYRNLVAQRGLLHSDQELFNGASQDALVRQYGSNPALFAADFVAAMIKMGNIAPLTGSSGQIRRNCRVVNS

SEQ ID NO: 27794 - protein, 318 aa, Triticum aestivum
MASRTWHFLLALFLLSSAAYGQLSPSFYATSCPLLELTVRATMIAALLAERRMGASLLRLHFHDCFVQGCDGSILLDDVGSFVGEKTAFPNVNSVRGYEVIDRIKANVELLCPGVVSCADIVALAARDGTFLLGGPSWAVPLGRRDSTTASLAEANADLPGPTLNLDQLIRAFDKKQLTPRDLTALSGAHTIGFSQCQFFRGHIYNDTNIDPAFAALRRQACPAAAPAGDSNLAPFDAQTQLVFDNAYYRNLVAQRGLLHSDQELFNGASQDALVRQYGSNPALFAADFVAAMIKMGNIAPLTGSSGQIRRNCRVVNS

SEQ ID NO: 27795 - protein, 276 aa, Triticum aestivum
MIAALLAERRMGASLLRLHFHDCFVQGCDGSILLDDVGSFVGEKTAFPNVNSVRGYEVIDRIKANVELLCPGVVSCADIVALAARDGTFLLGGPSWAVPLGRRDSTTASLAEANADLPGPTLNLDQLIRAFDKKQLTPRDLTALSGAHTIGFSQCQFFRGHIYNDTNIDPAFAALRRQACPAAAPAGDSNLAPFDAQTQLVFDNAYYRNLVAQRGLLHSDQELFNGASQDALVRQYGSNPALFAADFVAAMIKMGNIAPLTGSSGQIRRNCRVVNS

SEQ ID NO: 27796 - DNA, 1364 bp, Triticum aestivum
aaaccctgcaagcactggacaaccacagaaacccagaccccccgccgccgccgccgccatggtcgccgccggagctcttcacgctggcagccgtgtcctcctaccgatccgccgaagcttcagcacaccctggtcccacgtccgctcccacctccactccaccaagcccccttctgctccactcccgcccccacctccgccgccgccttcttcccacgccgcgtccgcgcgcttcacccctgccttcacccctaccactaggaggagcggatcaatcgggtccggggtagtcgcgtggtacctgggctcgatcgaggcgcggcccctgctgaccaagagcatcacggctgccacaatttacaccgttgccgacctcacctcccagatgatcacacttcctcctgaggagtcactcgatctaattaggactctgcgcatggctagttatgggatgctgttctcaggaccttcactgcactattggttcaactttatctcaaaagtagtccccaaaaaggatgtagtgagcaccttcaagaagatgtttctaggacaagcagtttatggcccaattattaattgtattttcttctcgtataatgcaggattacaaggtgagacgatcccagagatcattgcaagattaaagcgggatataattccgaccatcaaaagtgggctcatttattggcctctttgtgacttcatcactttcaagtttatccctgttcatttgcagccgctagtaagcaattcctttgcgtttctttggaccatctacctaacatacatggccggcttaaagaaaccaggcgtggaggtgatcacgagctcttagtcataatcaaatgactgagtttctgccagttatttctgaaaggaagtcttcatgggcattacttggaactatgacggggccgtcattaccaccactagctcatttaagctttcaatgttcaacgacgaaaacggagacaaactgcttgctaggcatatttcgtattcagtagagtagtatccaccaggcttttctagcttgcgtacagttttgggtaggcatttctgtatggatggtagaatgacactaggcatttctcccatctttctgaagtttgtcatattgcacttagaaacaagcagtttttaccaaattgtctgtgcccagttatgcagatgttaggtaaaattgttcttgtccctaagataaagtggacaaggtaaggtttacgcttgaagatctctacatacaatgcaacatttattagcggatagttatgtacatctccctcccttgtacgcagaaagaagacgattacacagtttgttcgcttaaaaaaaaaaaaaaaaaagcttatcgataccgt

SEQ ID NO: 27797 - protein, 278 aa, Triticum aestivum
NPASTGQPQKPRPPAAAAAMVAAGALHAGSRVLLPIRRSFSTPWSHVRSHLHSTKPPSAPLPPPPPPPPSSHAASARFTPAFTPTTRRSGSIGSGVVAWYLGSIEARPLLTKSITAATIYTVADLTSQMITLPPEESLDLIRTLRMASYGMLFSGPSLHYWFNFISKVVPKKDVVSTFKKMFLGQAVYGPIINCIFFSYNAGLQGETIPEIIARLKRDIIPTIKSGLIYWPLCDFITFKFIPVHLQPLVSNSFAFLWTIYLTYMAGLKKPGVEVITSS

SEQ ID NO: 27798 - protein, 259 aa, Triticum aestivum
MVAAGALHAGSRVLLPIRRSFSTPWSHVRSHLHSTKPPSAPLPPPPPPPPSSHAASARFTPAFTPTTRRSGSIGSGVVAWYLGSIEARPLLTKSITAATIYTVADLTSQMITLPPEESLDLIRTLRMASYGMLFSGPSLHYWFNFISKVVPKKDVVSTFKKMFLGQAVYGPIINCIFFSYNAGLQGETIPEIIARLKRDIIPTIKSGLIYWPLCDFITFKFIPVHLQPLVSNSFAFLWTIYLTYMAGLKKPGVEVITSS

SEQ ID NO: 27799 - protein, 150 aa, Triticum aestivum
MITLPPEESLDLIRTLRMASYGMLFSGPSLHYWFNFISKVVPKKDVVSTFKKMFLGQAVYGPIINCIFFSYNAGLQGETIPEIIARLKRDIIPTIKSGLIYWPLCDFITFKFIPVHLQPLVSNSFAFLWTIYLTYMAGLKKPGVEVITSS

SEQ ID NO: 27800 - DNA, 1628 bp, Triticum aestivum
cttgctcatctcatctcattccctcccttgtgccatctgctctgctctctcctatcatctatctagcaactcaattccatttgcatgcctacacacatcttacattcactacctcaacacttaccactccaccctagctaagctatcttcacctccatcacaaatcatcaattgcttcagtttgatcccatcaccatgggcgagcaagtagccaccaaggaggaggccaacaaggaagaatcacctgcacccgccgccgcacctgaagctgcaccggcaccggcaccggcagaggagaagaaggacgaggcagcagccgaccaagacccaaagaaggaggaaccaccagcagccgacccaccgtcccctccgccgccggtgccggtgatcctgggcgtcgaggtgcactgcacgggctgcgccaagcggatcaggcgctccctcctccgctgcaagggcgtcgaggccgtccacgtcgacatgtccgccaaccaggtcaccatcaagggcgccgtcgacccgcaggccctctgcgaccgcctccgcgccaagaccaagcgcgacgccaccctcatctcccctctgccacctcctccgccggccgagggcgaggagcctccgccgccccctcctccggcaccgccgctcgtcagcgaggcccgcacagtggagctgctcgtcaacatgcactgcgaggcctgcgcgcagcagctgcagaccaagatgatgaggatgaagggggtggtcagcgctcagacggacctcgccgccgggaggctcacgctcagtgccaccgtggaggacgagaagattgtggagtacatccaccgacggactgggaagatcgcctccgtcgtgccgccgccgcctccggagccgcccaaggaggaggaaccaccagctcctgctgctgatgctgagccaccaaaggatgaagcaccagccgacggcaagaaagaagaggccggcgacaacaaggcggctgaagacggcaaaggagctgcagaggccggggaggagaagaaggaaggtgccggcgaggaggaccagaagccggggaagcaagaaggtgtggcggtggacggcttcccgccggaggagatgatgaagcggatggtctactggccctacggcggcgcacccggcggcggcatccactacaagctgcatccggccgacgccgaggaggccatgatggccaggaggatggccatgcacgccatgccgccacctatgccgccgccgccgcaccaccaccaccacaacccctacgccatgatgcaccagcagtgggcgcctccaccgccgccgccacctccggggatgccgatgtacaacagctacaactacggcagcagctacatgatggagcggccgccgcagatgttcagcgacgagaaccccaacgcctgcgtcatctcctagtcctagctatctcggatcgatggatggatcaccacatgggccatggcatggatatgagctgagcatgtgagcttggccggattattggaccatcctccatatacatttctatactccgattatgtactgctgcgtaattataagcagtagttattgtactattagcgacgaaattaaaggacattggtcacgcttgtaagatc

SEQ ID NO: 27801 - protein, 409 aa, Triticum aestivum
MGEQVATKEEANKEESPAPAAAPEAAPAPAPAEEKKDEAAADQDPKKEEPPAADPPSPPPPVPVILGVEVHCTGCAKRIRRSLLRCKGVEAVHVDMSANQVTIKGAVDPQALCDRLRAKTKRDATLISPLPPPPPAEGEEPPPPPPPAPPLVSEARTVELLVNMHCEACAQQLQTKMMRMKGVVSAQTDLAAGRLTLSATVEDEKIVEYIHRRTGKIASVVPPPPPEPPKEEEPPAPAADAEPPKDEAPADGKKEEAGDNKAAEDGKGAAEAGEEKKEGAGEEDQKPGKQEGVAVDGFPPEEMMKRMVYWPYGGAPGGGIHYKLHPADAEEAMMARRMAMHAMPPPMPPPPHHHHHNPYAMMHQQWAPPPPPPPPGMPMYNSYNYGSSYMMERPPQMFSDENPNACVIS

SEQ ID NO: 27802 - protein, 314 aa, Triticum aestivum
MSANQVTIKGAVDPQALCDRLRAKTKRDATLISPLPPPPPAEGEEPPPPPPPAPPLVSEARTVELLVNMHCEACAQQLQTKMMRMKGVVSAQTDLAAGRLTLSATVEDEKIVEYIHRRTGKIASVVPPPPPEPPKEEEPPAPAADAEPPKDEAPADGKKEEAGDNKAAEDGKGAAEAGEEKKEGAGEEDQKPGKQEGVAVDGFPPEEMMKRMVYWPYGGAPGGGIHYKLHPADAEEAMMARRMAMHAMPPPMPPPPHHHHHNPYAMMHQQWAPPPPPPPPGMPMYNSYNYGSSYMMERPPQMFSDENPNACVIS

SEQ ID NO: 27803 - protein, 246 aa, Triticum aestivum
MHCEACAQQLQTKMMRMKGVVSAQTDLAAGRLTLSATVEDEKIVEYIHRRTGKIASVVPPPPPEPPKEEEPPAPAADAEPPKDEAPADGKKEEAGDNKAAEDGKGAAEAGEEKKEGAGEEDQKPGKQEGVAVDGFPPEEMMKRMVYWPYGGAPGGGIHYKLHPADAEEAMMARRMAMHAMPPPMPPPPHHHHHNPYAMMHQQWAPPPPPPPPGMPMYNSYNYGSSYMMERPPQMFSDENPNACVIS

SEQ ID NO: 27804 - DNA, 1292 bp, Triticum aestivum
aaccaaacccaacggctccgcagtccgcaccaacccctccccctcgccccaaccgccgccctcctcgcctccaccggaagagctgctccccccgcaaccgggcggatcccgctaggcggaggcggagatccggcagccgccatggcggcgagcgacgtgcccatgagccccgagctcgagcaggtcgacggcgagatccaggacatcttccgcgccctacacaatgggttccagaagattgacaagatgaaggactccaacaggcagtccaagcagctggaagaactcactgggaagatgagggagtgcaagcgcttaatcaaggaatttgatcgtgtactcaaagatgaggagaaaagcaatacttctgaggtcaacaaacagctaaatgacaagaagcaatttatgatcaaggagttgaattcttatgtcaccatgaggaagacgtaccaaagtagccttggtaataagaggatcgaactattcgatgctggtaatgaccaggtagctgaagataacgttcaaatggcatcagaaatgtcaaatcaacaactgattgattctggaatgaaacaaatggaccaaacagaccaagctattgagcgttcgaaaatggttgttgcacaaactgttgatgttggagctcaaactgctacaactctaacacagcaaactgaccaaatgaagagaattggcaatgagctagattccgttcacttctcattgaagaaagctagtcaaatggtgaaagagattggtcgtcaggttgcaactgacaaatgcatcatggggtttctgtttttgatagtttgtggtgtgattgcgatcattgttgtcaagatcgtcaacccgcataacaagagcatcccagacatcccgggactggcgcctcctgcacctcctgcgcagaaccggaagctgctatccgtagatcctttcagaatgctctgagcattcgggaatggaagtctcgtgccatgcaggtctctcgctctgaagccaaaacacacgatgtcaactgttccattggtgcttgcttgtacattatacccgtatgtaattttctttgattggttcattctttccacactggttgctgttagcttcggattgttagtagcacttcggttgtgtggtgtttaaattgcctggctttcttggttgtgtacatgcgttagtggtgaccagtgagagttatgcgattaatgtttgctcgtataccttcctaaaaccagccgattctattcattatgagaatgtgaatgttggccatccattatcctggccttgtg

SEQ ID NO: 27805 - protein, 316 aa, Triticum aestivum
NQTQRLRSPHQPLPLAPTAALLASTGRAAPPATGRIPLGGGGDPAAAMAASDVPMSPELEQVDGEIQDIFRALHNGFQKIDKMKDSNRQSKQLEELTGKMRECKRLIKEFDRVLKDEEKSNTSEVNKQLNDKKQFMIKELNSYVTMRKTYQSSLGNKRIELFDAGNDQVAEDNVQMASEMSNQQLIDSGMKQMDQTDQAIERSKMVVAQTVDVGAQTATTLTQQTDQMKRIGNELDSVHFSLKKASQMVKEIGRQVATDKCIMGFLFLIVCGVIAIIVVKIVNPHNKSIPDIPGLAPPAPPAQNRKLLSVDPFRML

SEQ ID NO: 27806 - protein, 269 aa, Triticum aestivum
MAASDVPMSPELEQVDGEIQDIFRALHNGFQKIDKMKDSNRQSKQLEELTGKMRECKRLIKEFDRVLKDEEKSNTSEVNKQLNDKKQFMIKELNSYVTMRKTYQSSLGNKRIELFDAGNDQVAEDNVQMASEMSNQQLIDSGMKQMDQTDQAIERSKMVVAQTVDVGAQTATTLTQQTDQMKRIGNELDSVHFSLKKASQMVKEIGRQVATDKCIMGFLFLIVCGVIAIIVVKIVNPHNKSIPDIPGLAPPAPPAQNRKLLSVDPFRML

SEQ ID NO: 27807 - protein, 262 aa, Triticum aestivum
MSPELEQVDGEIQDIFRALHNGFQKIDKMKDSNRQSKQLEELTGKMRECKRLIKEFDRVLKDEEKSNTSEVNKQLNDKKQFMIKELNSYVTMRKTYQSSLGNKRIELFDAGNDQVAEDNVQMASEMSNQQLIDSGMKQMDQTDQAIERSKMVVAQTVDVGAQTATTLTQQTDQMKRIGNELDSVHFSLKKASQMVKEIGRQVATDKCIMGFLFLIVCGVIAIIVVKIVNPHNKSIPDIPGLAPPAPPAQNRKLLSVDPFRML

SEQ ID NO: 27808 - DNA, 1383 bp, Triticum aestivum
gaacatcctaatcgaaaacttctccggttgtgaggccccgtgctgcctcctcctctctgtctgtttctaccgacgccgccccagcccccgcgagagagaaaccctagcctagggttccacgcgccgccgccgccgccgccgacgtcgaccccgcctcgcccttcccccgagctcgccatggacgcgggccgcaagagggccgtgccggagggcgccaacggcggcgccgccgtcaagcgcgccagagaatcggagtcggttcaaacgggtgtaggaagcaaatcgaagccatgcaccaaatttttcagcactgctggttgtccctttggttcaagttgccattttctccataacttccctggaggtcaccaggctgtttcaaagatgaccaacttgggtggtccagctgtttcagctcctcaaggaagaatgcccatgggacctggtgttcctgatgggccacctacacccagcttgaagactcgcttgtgtaacaagtttaacacagcagaaggttgtaaatgggggaacaagtgtcattttgctcatggagagagggagctcggaaagcccatgctgttgaacaactcaatggcacctccaatgggaccaagacccaatggccacttccagcccccaccgatgcctggcccagacatggttcctccctcaacctttggcgcatcggccacagccaagatcagtgttgatgcatcccttgccggcgccattattgggaagggtggagtcaacacaaagcacatatccagaatgactggggccaagctggccatacgggataatgaggcagaccccaaccataaaaacattgagctcgaggggtcgtttgatcaggtcaaccatgccagtgcaatggtgaaagagctgattctccgcattggtggcaacgcccctcctcaagcaaagaacccagggagggggcctgcgggtggtggtgggggaagcaacttcaagaccaagctgtgcgacaacttcaacaaaggctcttgcacatttggagacagatgccacttcgcccatggtgagagtgaactgcgcaagtcggctgcggcttgagagatgcttttttttttatggcttttcatgattaatagtgattagcaaagcctgagctccaaatccgaggccattcacccatggtcatgttgagttgcataagcctgttgttgattgattgggagatactgtcatggcttcggtgtgatcagctcgctgtaactgatagatatccgagaatggatttgcttttgagatttattataggcttagtgtattgccgtcttttttctctctctgctccgcatccaatttttgtactgtttctaaggcattttaatatggcaaatttagcgattctattcc

SEQ ID NO: 27809 - protein, 299 aa, Triticum aestivum
MDAGRKRAVPEGANGGAAVKRARESESVQTGVGSKSKPCTKFFSTAGCPFGSSCHFLHNFPGGHQAVSKMTNLGGPAVSAPQGRMPMGPGVPDGPPTPSLKTRLCNKFNTAEGCKWGNKCHFAHGERELGKPMLLNNSMAPPMGPRPNGHFQPPPMPGPDMVPPSTFGASATAKISVDASLAGAIIGKGGVNTKHISRMTGAKLAIRDNEADPNHKNIELEGSFDQVNHASAMVKELILRIGGNAPPQAKNPGRGPAGGGGGSNFKTKLCDNFNKGSCTFGDRCHFAHGESELRKSAAA

SEQ ID NO: 27810 - protein, 230 aa, Triticum aestivum
MTNLGGPAVSAPQGRMPMGPGVPDGPPTPSLKTRLCNKFNTAEGCKWGNKCHFAHGERELGKPMLLNNSMAPPMGPRPNGHFQPPPMPGPDMVPPSTFGASATAKISVDASLAGAIIGKGGVNTKHISRMTGAKLAIRDNEADPNHKNIELEGSFDQVNHASAMVKELILRIGGNAPPQAKNPGRGPAGGGGGSNFKTKLCDNFNKGSCTFGDRCHFAHGESELRKSAAA

SEQ ID NO: 27811 - protein, 215 aa, Triticum aestivum
MPMGPGVPDGPPTPSLKTRLCNKFNTAEGCKWGNKCHFAHGERELGKPMLLNNSMAPPMGPRPNGHFQPPPMPGPDMVPPSTFGASATAKISVDASLAGAIIGKGGVNTKHISRMTGAKLAIRDNEADPNHKNIELEGSFDQVNHASAMVKELILRIGGNAPPQAKNPGRGPAGGGGGSNFKTKLCDNFNKGSCTFGDRCHFAHGESELRKSAAA

SEQ ID NO: 27812 - DNA, 1061 bp, Triticum aestivum
accagtgcggtatacaccccggttgactagcgctgatttgctccctctccagctccggctcccagatcgagacggcggcggcggcggcgatgggcgcccacccttacgtgccggcgagcctggacctcccgggctacgtgccgctgcgcctcacccagctcgagatcctcggggcctacctcggcacctccctcttcgtcctcgtcgccgtctggctcctctccgggagatgccgcaggttgtccggcaccgaccgcctgctcatgtgctggtgggcgttcaccggcctcacccacatactcatcgagggccccttcgtcttcacccccgatttcttcaccaagaccaaccccaacttcttcgacgaagtctggaaggagtacagcaagggtgactccaggtacgtcgccagggacaccgccaccgtcaccgtcgaaggaatcacggccgtgctgaaaggccctgcctcgctgctcgcagtctatgccattgcatcacgcaagtcctacagccacatcctccagttcgccgtgtgcctcggtcagctctacggatgcatcgtctacttcaccaccgcctacttggacggcttcaacttctgggccagtccgttctacttctgggcatatttcatcggcgcaaacagttcatgggttgtgataccgttgctgatcgccacaaggagctggaagaggatctgcgcagcgattcatcaaagtgagaagatcaagactaagtaattcctgcagcagacaggatttggttgcaaccaggacacactgaacttcttattttacggctagaaatttgttggcttatattgtaccctttgcaaactacattgcctgaaacaagtatgttgtactactggattgtgttgtaacatcaaggagggcggctgtttattgctgcaaatgaaaattatatgccacccttgcatgggcaatcaccattgcacatactatcaggcaactagtagtaagaggccgggtgttgctcattatactttgtatccgattgagactatattttgagttaataaaagcaccttttatttgggt

SEQ ID NO: 27813 - protein, 216 aa, Triticum aestivum
MGAHPYVPASLDLPGYVPLRLTQLEILGAYLGTSLFVLVAVWLLSGRCRRLSGTDRLLMCWWAFTGLTHILIEGPFVFTPDFFTKTNPNFFDEVWKEYSKGDSRYVARDTATVTVEGITAVLKGPASLLAVYAIASRKSYSHILQFAVCLGQLYGCIVYFTTAYLDGFNFWASPFYFWAYFIGANSSWVVIPLLIATRSWKRICAAIHQSEKIKTK

SEQ ID NO: 27814 - protein, 158 aa, Triticum aestivum
MCWWAFTGLTHILIEGPFVFTPDFFTKTNPNFFDEVWKEYSKGDSRYVARDTATVTVEGITAVLKGPASLLAVYAIASRKSYSHILQFAVCLGQLYGCIVYFTTAYLDGFNFWASPFYFWAYFIGANSSWVVIPLLIATRSWKRICAAIHQSEKIKTK

SEQ ID NO: 27815 - protein, 130 aa, Triticum aestivum
PVRYTPRLTSADLLPLQLRLPDRDGGGGGDGRPPLRAGEPGPPGLRAAAPHPARDPRGLPRHLPLRPRRRLAPLREMPQVVRHRPPAHVLVGVHRPHPHTHRGPLRLHPRFLHQDQPQLLRRSLEGVQQG

SEQ ID NO: 27816 - DNA, 1891 bp, Triticum aestivum
aaaacaaacccacacacaacccctctgtctcctcctccttggctttgctagcttcctgctcccttcgcttcccacatgcagccatatcttgagctagcttctctccgcatcaccgccaccatcccgctgtccccaagaatatatagcaccatcttcctcgaggccatggctgccatggcctatatagccctccggggcgcggcattggccgccatcgtcgccctcatccattgggtgtacaggtggcgccaccccaaatgcgccggcacgctcccgccgggatccatgggcatccccatcatcggcgagacgctgcagttcttcgcccccaacccgacctgcggcctctcccccttcgtccgggacagggtgaagaggtacgggagcatgttcaagacgagcatcgtggggcggccggtggtggtgtcggcggacccggacgtgaaccactacgtgttccagaacgaggggaagctgttcgagagctggtacccggacaccttcaccgagatcttcggccgcgacaacgtcggctccctgcacggcttcatctacaagtacctcaagaccctcgtgctccgcctctacggccaggagaacctcaaggcggtgctcctcgccgagaccgacgccgcctgccgcggcagcctcgccgcgtgggcggcgcagccctgtgtcgacatcaaagacgggctctccactatgatatttgatcttactgccaagaagctgatcggctacgagccgaccaagtcctcggagagcctgcgggagaatttcacggcgttcattcgcggcctgatctcgttccccctcaacattcccggcacggcctatcacgaatgcatggaggggaggaagaaagcgatgaaggtgctcaagggcatgatgcaggagaggatggcggatccggagaggaagtgcgaggacttcttcgaccacgtgatccaggaactgaggagggagaagccgcttctgacggagaccatcgcgctggacctcatgttcgtgctcctcttcgccagcttcgagaccacggcgctcgccctcaccctcggcgtcaagctgctcaccgagaaccccagagtcgtcgacgcgctaacggaggaacacgaagcgatcgtgaggaacagggaggacccagatgccgcgatcacgtgggccgagtacaagtcgatgaccttcacagctcatgtcatcatggagatcgtcagactcgccaacatcgtgccggggattttccggaaggccttgcaagacgttgagatcaaaggctacacggttccagcgggatggggtatcatggtgtgtccgccggcggtgcacctaaaccctgacatatacgaagatccgctggcgttcaacccatggaggtggcaggacaaacctgaaatcaccggcggaacgaagcatttcatggcgttcggaggcgggcttcggttctgcgtcggaaccgatctcaccaaggtcttgatggcaacattcattcacaatcttgttacgaaatacagatggaagacagtaaaaggagggaacatagtccggacgccgggcctcggcttcccggatggctttgacatccagctcttccctaagaactgacccttttttgatgatatctcgacagtttagtggttgcagttaaacacaagattgttcctgcaaaagatcacattttaggatggaaaaccatatacttagtctagtggtaggatacacattcctagttataactacagtcatattgccgggtaccacctctcatggatccagaatgggttttttgtacttttggctgttcgttttccatgtggttagtcatctatccatgtgttgtgtgtaaatcaatcccatacatctcaaatgagaaagagagcatattaactgtgtg

SEQ ID NO: 27817 - protein, 508 aa, Triticum aestivum
MQPYLELASLRITATIPLSPRIYSTIFLEAMAAMAYIALRGAALAAIVALIHWVYRWRHPKCAGTLPPGSMGIPIIGETLQFFAPNPTCGLSPFVRDRVKRYGSMFKTSIVGRPVVVSADPDVNHYVFQNEGKLFESWYPDTFTEIFGRDNVGSLHGFIYKYLKTLVLRLYGQENLKAVLLAETDAACRGSLAAWAAQPCVDIKDGLSTMIFDLTAKKLIGYEPTKSSESLRENFTAFIRGLISFPLNIPGTAYHECMEGRKKAMKVLKGMMQERMADPERKCEDFFDHVIQELRREKPLLTETIALDLMFVLLFASFETTALALTLGVKLLTENPRVVDALTEEHEAIVRNREDPDAAITWAEYKSMTFTAHVIMEIVRLANIVPGIFRKALQDVEIKGYTVPAGWGIMVCPPAVHLNPDIYEDPLAFNPWRWQDKPEITGGTKHFMAFGGGLRFCVGTDLTKVLMATFIHNLVTKYRWKTVKGGNIVRTPGLGFPDGFDIQLFPKN

SEQ ID NO: 27818 - protein, 478 aa, Triticum aestivum
MAAMAYIALRGAALAAIVALIHWVYRWRHPKCAGTLPPGSMGIPIIGETLQFFAPNPTCGLSPFVRDRVKRYGSMFKTSIVGRPVVVSADPDVNHYVFQNEGKLFESWYPDTFTEIFGRDNVGSLHGFIYKYLKTLVLRLYGQENLKAVLLAETDAACRGSLAAWAAQPCVDIKDGLSTMIFDLTAKKLIGYEPTKSSESLRENFTAFIRGLISFPLNIPGTAYHECMEGRKKAMKVLKGMMQERMADPERKCEDFFDHVIQELRREKPLLTETIALDLMFVLLFASFETTALALTLGVKLLTENPRVVDALTEEHEAIVRNREDPDAAITWAEYKSMTFTAHVIMEIVRLANIVPGIFRKALQDVEIKGYTVPAGWGIMVCPPAVHLNPDIYEDPLAFNPWRWQDKPEITGGTKHFMAFGGGLRFCVGTDLTKVLMATFIHNLVTKYRWKTVKGGNIVRTPGLGFPDGFDIQLFPKN

SEQ ID NO: 27819 - protein, 475 aa, Triticum aestivum
MAYIALRGAALAAIVALIHWVYRWRHPKCAGTLPPGSMGIPIIGETLQFFAPNPTCGLSPFVRDRVKRYGSMFKTSIVGRPVVVSADPDVNHYVFQNEGKLFESWYPDTFTEIFGRDNVGSLHGFIYKYLKTLVLRLYGQENLKAVLLAETDAACRGSLAAWAAQPCVDIKDGLSTMIFDLTAKKLIGYEPTKSSESLRENFTAFIRGLISFPLNIPGTAYHECMEGRKKAMKVLKGMMQERMADPERKCEDFFDHVIQELRREKPLLTETIALDLMFVLLFASFETTALALTLGVKLLTENPRVVDALTEEHEAIVRNREDPDAAITWAEYKSMTFTAHVIMEIVRLANIVPGIFRKALQDVEIKGYTVPAGWGIMVCPPAVHLNPDIYEDPLAFNPWRWQDKPEITGGTKHFMAFGGGLRFCVGTDLTKVLMATFIHNLVTKYRWKTVKGGNIVRTPGLGFPDGFDIQLFPKN

SEQ ID NO: 27820 - DNA, 1210 bp, Triticum aestivum
ctacggccgcttagccaacgcgaggcgccgccggagacggcgatgcaggcggcggcctcttaccggggcgcggcaggccaccgccgcgccggccacccctcccggcgccctcccggtccctctcttcttctacccgtcagcgtcgctggcgtcggccgtttctccgacgcggcggttccgctccgagtcggctccctgccccttcctcgggctcgcggcggcggcgatttcgcgcggctggatgccagggacggggaggcgtggcagctgacgcgcgcgctcgggctaatccttcctggtcaccagaaaatggtgcatgctaacctgctgaaaactgctgttctttcaacaatgtcgatgctcataatgcctcttgaggcatcagcggagacatgtcaaccaactagttcttttgccaatatgccgattttcattgctgtcgctctaataggagctgctgtgggtggattattagcacggcaaagaaaggacgaactgaagcgattgaataatcaacttcgtcagattaatactgcccttagaaggcaggcacagattgaatcgtttgcccccggccttacttatgcgcctgtagggagagcaggagaaattgaggtcattgttgatcccaggaagcagcagttggtggtaaatttgaaaaatgggaagaattatatgaggaatcaggaccttgataaggcagtaatggagttcaagacagctctggagcttgcagaaagcataggggatcgctttgaggagaagaaagctgcgcgaggattaggcgcatcactacaaaggttgggacagtacagagaagcaatgagctggtactacaaggttctggcgctatcaaaggagaccggcgaggattctggctgcaccgaggcctacggcgcgatagccgactgctgcgtcgatctcggcgacttggaaggagcagcgaagctgtatgacgagtacatatcaaggctgcagccccgtgattgagcgctcggaccgttgttggagatcaaacacatcatatgccagagcccgtccgttgccctgcttctgatgtcgcggttgcttgcttgctatctggcggaaaacgagccgattttgcttgtcttttaacttggttggagcacttggattgtccatgaggagcccctctctacttgtgtatatgaatttcgatggtgctatggcatgtgctggttcagagttc

SEQ ID NO: 27821 - protein, 329 aa, Triticum aestivum
LRPLSQREAPPETAMQAAASYRGAAGHRRAGHPSRRPPGPSLLLPVSVAGVGRFSDAAVPLRVGSLPLPRARGGGDFARLDARDGEAWQLTRALGLILPGHQKMVHANLLKTAVLSTMSMLIMPLEASAETCQPTSSFANMPIFIAVALIGAAVGGLLARQRKDELKRLNNQLRQINTALRRQAQIESFAPGLTYAPVGRAGEIEVIVDPRKQQLVVNLKNGKNYMRNQDLDKAVMEFKTALELAESIGDRFEEKKAARGLGASLQRLGQYREAMSWYYKVLALSKETGEDSGCTEAYGAIADCCVDLGDLEGAAKLYDEYISRLQPRD

SEQ ID NO: 27822 - protein, 315 aa, Triticum aestivum
MQAAASYRGAAGHRRAGHPSRRPPGPSLLLPVSVAGVGRFSDAAVPLRVGSLPLPRARGGGDFARLDARDGEAWQLTRALGLILPGHQKMVHANLLKTAVLSTMSMLIMPLEASAETCQPTSSFANMPIFIAVALIGAAVGGLLARQRKDELKRLNNQLRQINTALRRQAQIESFAPGLTYAPVGRAGEIEVIVDPRKQQLVVNLKNGKNYMRNQDLDKAVMEFKTALELAESIGDRFEEKKAARGLGASLQRLGQYREAMSWYYKVLALSKETGEDSGCTEAYGAIADCCVDLGDLEGAAKLYDEYISRLQPRD

SEQ ID NO: 27823 - protein, 226 aa, Triticum aestivum
MVHANLLKTAVLSTMSMLIMPLEASAETCQPTSSFANMPIFIAVALIGAAVGGLLARQRKDELKRLNNQLRQINTALRRQAQIESFAPGLTYAPVGRAGEIEVIVDPRKQQLVVNLKNGKNYMRNQDLDKAVMEFKTALELAESIGDRFEEKKAARGLGASLQRLGQYREAMSWYYKVLALSKETGEDSGCTEAYGAIADCCVDLGDLEGAAKLYDEYISRLQPRD

SEQ ID NO: 27824 - DNA, 549 bp, Triticum aestivum
agagctccgtccccccgcgtcgccgcttagcgtacgcaccaccgcaccggcagcaggcgaggggcggccggcgacctactttggagcgcagacggaaggtttctacattttccatggcgcttgtggtgatgtgcgggcagccgtgcagcggcaagtcagaggctgcagcttgtctcgctgccgctcttcgctcctccgtgcttgacgttactgtccgcgtcattgacgagtcatcgctccatcttggacgcgatgaaagctacaaagatatggttgtggagaaaaacttaagaggagttttgagatcagaagttgataggtccgtgtcacgggatggcataatcatcgtggattctctgaacaatattaaggggtaccgatacgagctgtggtgtcttgcgcgtgcttcgggaataagatattgtgtgttcttttgtgatacagaagtggaccattgtagggattggaacgtcaagcgtcaggagaaaggagaaccctcatatgatagcaatatatttgaagatctggcaaggagatttgagaggcctg

SEQ ID NO: 27825 - protein, 182 aa, Triticum aestivum
SSVPPRRRLAYAPPHRQQARGGRRPTLERRRKVSTFSMALVVMCGQPCSGKSEAAACLAAALRSSVLDVTVRVIDESSLHLGRDESYKDMVVEKNLRGVLRSEVDRSVSRDGIIIVDSLNNIKGYRYELWCLARASGIRYCVFFCDTEVDHCRDWNVKRQEKGEPSYDSNIFEDLARRFERP

SEQ ID NO: 27826 - protein, 145 aa, Triticum aestivum
MALVVMCGQPCSGKSEAAACLAAALRSSVLDVTVRVIDESSLHLGRDESYKDMVVEKNLRGVLRSEVDRSVSRDGIIIVDSLNNIKGYRYELWCLARASGIRYCVFFCDTEVDHCRDWNVKRQEKGEPSYDSNIFEDLARRFERP

SEQ ID NO: 27827 - protein, 140 aa, Triticum aestivum
MCGQPCSGKSEAAACLAAALRSSVLDVTVRVIDESSLHLGRDESYKDMVVEKNLRGVLRSEVDRSVSRDGIIIVDSLNNIKGYRYELWCLARASGIRYCVFFCDTEVDHCRDWNVKRQEKGEPSYDSNIFEDLARRFERP

SEQ ID NO: 27828 - DNA, 1479 bp, Triticum aestivum
acacagcccactcgcagcagcagtgccactaccagcgcacaccaatccagctgattttgagcacgagcagctcttgcccaacagccaccgtcgtcggctactgtcatccatggccatgaggaacgcgacgcagcaggtggtccgggccttggagccgtccctcaccaggagccttcatgcgtccccggacagcaagaagatcgtgggcgtgttctacaagggcggcgagtacgcggggcagaaccccaacttcgtggggtgtgtggagaacgcgctgggcatccgtagctggctcgagtcgcagggccaccagtacatcgtcaccgacgacaaggacggccccaactgcgagctagagaagcacatcgcggacgcgcacgtgctcatcaccacgccgttccacccggcgtacgtgagcgcggaccggatcaggcgcggcaagaacctggagctgctcctcacggcggggatcggctccgaccacatcgagctgtcggcggcggcggccgcggggctgaccgtcgccgaggtcacgggcagcaacaccgtgtcggtggcggaggaccagctgatgcgcatcctggtcctcatgcgcaacttcctgccgggccaccaccaagccatcaacggggagtgggacctcgccggcatcgcgcaccgggcctacgacctggagggcaagacggtgggcaccgtcggcgccggccgcatcgggaagctgctgctccagcgcctcaagccattcggctgcaacctgctctaccacgacaagctccgcgtcgacgccgcgctggagaaggagctcggcgccgccttcgaggaggacctcgacgccatgctgcccaagtgcgacgtcgtcgtgctcaacatgccgctcaccgagaagacaaagggcatgttcaacaaggagaagatcgccaagatgaagaaaggcgtcatcatcgtgaacaacgctcgtggagcgatcatggatacgcaggcagtggcagacgcttgcaagagtaggcacatcgctggatacggcggcgacgtgtggtacccgcagccggcgcccaaggagcacccgtggaggtacatgcccaacaacgcaatgaccccgcacatctccggcaccaccattgacggccagctgaggtacgcggccggtgtgaaggacatgctggagaggtacttcaagggacaggacttcccggagcccaactacattgtcaaggaaggcaagctcgccagccagtaccagtgagcgtccatccatggagccgcagctgcacgcctgcatcagcatgccggttaccagaaactaaataaaagatgcttggccgttgcaatggccatcacccataaatatatctatacctaaataaaatggaacaaaaactggttgctttaatttgctatcagcttcctttgctgtatttttctcgtacactgtccttcgctgtatttcgtttgaactataataaagtcaaagtgttgtcc

SEQ ID NO: 27829 - protein, 413 aa, Triticum aestivum
HSPLAAAVPLPAHTNPADFEHEQLLPNSHRRRLLSSMAMRNATQQVVRALEPSLTRSLHASPDSKKIVGVFYKGGEYAGQNPNFVGCVENALGIRSWLESQGHQYIVTDDKDGPNCELEKHIADAHVLITTPFHPAYVSADRIRRGKNLELLLTAGIGSDHIELSAAAAAGLTVAEVTGSNTVSVAEDQLMRILVLMRNFLPGHHQAINGEWDLAGIAHRAYDLEGKTVGTVGAGRIGKLLLQRLKPFGCNLLYHDKLRVDAALEKELGAAFEEDLDAMLPKCDVVVLNMPLTEKTKGMFNKEKIAKMKKGVIIVNNARGAIMDTQAVADACKSRHIAGYGGDVWYPQPAPKEHPWRYMPNNAMTPHISGTTIDGQLRYAAGVKDMLERYFKGQDFPEPNYIVKEGKLASQYQ

SEQ ID NO: 27830 - protein, 377 aa, Triticum aestivum
MAMRNATQQVVRALEPSLTRSLHASPDSKKIVGVFYKGGEYAGQNPNFVGCVENALGIRSWLESQGHQYIVTDDKDGPNCELEKHIADAHVLITTPFHPAYVSADRIRRGKNLELLLTAGIGSDHIELSAAAAAGLTVAEVTGSNTVSVAEDQLMRILVLMRNFLPGHHQAINGEWDLAGIAHRAYDLEGKTVGTVGAGRIGKLLLQRLKPFGCNLLYHDKLRVDAALEKELGAAFEEDLDAMLPKCDVVVLNMPLTEKTKGMFNKEKIAKMKKGVIIVNNARGAIMDTQAVADACKSRHIAGYGGDVWYPQPAPKEHPWRYMPNNAMTPHISGTTIDGQLRYAAGVKDMLERYFKGQDFPEPNYIVKEGKLASQYQ

SEQ ID NO: 27831 - protein, 375 aa, Triticum aestivum
MRNATQQVVRALEPSLTRSLHASPDSKKIVGVFYKGGEYAGQNPNFVGCVENALGIRSWLESQGHQYIVTDDKDGPNCELEKHIADAHVLITTPFHPAYVSADRIRRGKNLELLLTAGIGSDHIELSAAAAAGLTVAEVTGSNTVSVAEDQLMRILVLMRNFLPGHHQAINGEWDLAGIAHRAYDLEGKTVGTVGAGRIGKLLLQRLKPFGCNLLYHDKLRVDAALEKELGAAFEEDLDAMLPKCDVVVLNMPLTEKTKGMFNKEKIAKMKKGVIIVNNARGAIMDTQAVADACKSRHIAGYGGDVWYPQPAPKEHPWRYMPNNAMTPHISGTTIDGQLRYAAGVKDMLERYFKGQDFPEPNYIVKEGKLASQYQ

SEQ ID NO: 27832 - DNA, 1061 bp, Triticum aestivum
attcacagttcaacagtaaagccaagataaaaagtcagaatcaatggagttcccctcttcttcttccctgctactcatcctgcttcctcccgtgctgtacatctcctaccacatcgcgaggagcctcgccaagaagaagcccaccacccacggcctcaggaggcacccgctgctcggccacctcccggcgttcctcaagaaccgcgaccgcttcctcgagtggtccaccgagctcatcgtcgccagccccgacctcaggatgggcttctggatccccgggatgaccaccggcatcgtcaccggcaacccggccgacgtcgagcacatcctgcgcaccaacttcgccaactaccccaagggcgagcgcgccatctccatgctggtggacttcctcggccacggcctcttcaactccgacggggagcagtggctgtggcagcgcaagaacgccagcctcgagttcaccacgcgctcgctccgcggcttcctcgtcgactccgtgcaggccgaggtcgggaacaggctgctcccgctactgcgacgcgccgcggatggcgccggcgccggcggcgtggtgctcgacatgcaggacgtgctcgagcggttcgcgttcgacaccatctgcatggtctcgttcgggcacgacccgtgctgcctcgccgacggcggggccctgacggagggggcgtcggacttcatgcgcgcgttcggcgaggcgcaggacctcattgtcagccggttcctggaccccgtcgcggcctcctggaaggtcaagaggtggctcaacgtcggcaaagagcgccgcctaaagaaggccatcgccgacgtccatgggttcgccatggaaattgtccgcacccgccgtcaaagcgcgtctggggaagaaaacagagacgacgtcctgtcaaggttcgtggcgagcgacgaacacgacgacgaggcgctccgggacatcgtcctcagcttcctgatcgccggccgcgagaccacgtcctcggcgctcacgtggttcttctggctcgtgtcgtcccggccggacgtcgtggcgcgcatcgccgacg

SEQ ID NO: 27833 - protein, 339 aa, Triticum aestivum
MEFPSSSSLLLILLPPVLYISYHIARSLAKKKPTTHGLRRHPLLGHLPAFLKNRDRFLEWSTELIVASPDLRMGFWIPGMTTGIVTGNPADVEHILRTNFANYPKGERAISMLVDFLGHGLFNSDGEQWLWQRKNASLEFTTRSLRGFLVDSVQAEVGNRLLPLLRRAADGAGAGGVVLDMQDVLERFAFDTICMVSFGHDPCCLADGGALTEGASDFMRAFGEAQDLIVSRFLDPVAASWKVKRWLNVGKERRLKKAIADVHGFAMEIVRTRRQSASGEENRDDVLSRFVASDEHDDEALRDIVLSFLIAGRETTSSALTWFFWLVSSRPDVVARIAD

SEQ ID NO: 27834 - protein, 267 aa, Triticum aestivum
MGFWIPGMTTGIVTGNPADVEHILRTNFANYPKGERAISMLVDFLGHGLFNSDGEQWLWQRKNASLEFTTRSLRGFLVDSVQAEVGNRLLPLLRRAADGAGAGGVVLDMQDVLERFAFDTICMVSFGHDPCCLADGGALTEGASDFMRAFGEAQDLIVSRFLDPVAASWKVKRWLNVGKERRLKKAIADVHGFAMEIVRTRRQSASGEENRDDVLSRFVASDEHDDEALRDIVLSFLIAGRETTSSALTWFFWLVSSRPDVVARIAD

SEQ ID NO: 27835 - protein, 260 aa, Triticum aestivum
MTTGIVTGNPADVEHILRTNFANYPKGERAISMLVDFLGHGLFNSDGEQWLWQRKNASLEFTTRSLRGFLVDSVQAEVGNRLLPLLRRAADGAGAGGVVLDMQDVLERFAFDTICMVSFGHDPCCLADGGALTEGASDFMRAFGEAQDLIVSRFLDPVAASWKVKRWLNVGKERRLKKAIADVHGFAMEIVRTRRQSASGEENRDDVLSRFVASDEHDDEALRDIVLSFLIAGRETTSSALTWFFWLVSSRPDVVARIAD

SEQ ID NO: 27836 - DNA, 1278 bp, Triticum aestivum
gaaggagaaccgaggagaaagatccggacgatacgagctcagctcccgtcgcatcgcaccgcatcgcccggcgacacccgcccgctgccctccctcgtccccagctcttccgaatcgcgtcgccggcggccgagaggccattggattcgtggcgttggcgagcgtggtcgccaggagaggaggggtgccggcggcggcggcgactgttcgcgggatgagcttcggcggcgccagctccgttgcggccggtgggaagcggccgttcgagtacgggaggacgcatgtggtgaggcccaagggcgcgcacaaggccaccatcgtctggctccacggcctcggcgacaatggagccagctggtctcaactgttggaaactcttccccttcctaatataaaatggatctgcccaactgcacctacgaggcctgtggcaatttttggtggattcccatctactgcatggtttgatgttgctgatctttcagaagattctcctgatgatgttgaggggctggattcctcagctgcacatgtagcaaatttattgtctaccgaacctgcagacatcaagcttggcgttggtggctttagtatgggtgctgctactgcgctttactccggtacttgctttgctcatggaaaatatggaaatggcaatccataccctgtgaacctaagtgtggctgttggtctcagtggctggctcccgtgtgccaggtcattgaagaacaaaattgagagctcacaggaggctgcacagaaggcttcatcattacctcttatgctttgtcatggaaaagctgatgatgtggtcctctacaaacatggagagagatctgctgatgcacttaagtcaaccgggtttgcaaatgtggaattcaagtcctacagcagactcgggcactataccgttccagaggagatggacgaagttgtcaagtggcttacagcaagcttggaactcggcagttcatcgtcaacttgattgaatgaagagatgccttgagaaaggctcagtgtagcggcgtctaaataataagtacctgtggttgtgccgaattgagtgataaaatggcttggttgccaacttgggctttgggtatacggttatgtcttagcttggcgtttcatatgcggacatgcctcgctgaatcttggtactattgaaatttcatatatttggtatgtgtttccatccaaagtcagagacattgtgatcagtttggttttggttacgaatgatatttttgtttcaacgtgttctatccttttttttcc

SEQ ID NO: 27837 - protein, 327 aa, Triticum aestivum
KENRGERSGRYELSSRRIAPHRPATPARCPPSSPALPNRVAGGREAIGFVALASVVARRGGVPAAAATVRGMSFGGASSVAAGGKRPFEYGRTHVVRPKGAHKATIVWLHGLGDNGASWSQLLETLPLPNIKWICPTAPTRPVAIFGGFPSTAWFDVADLSEDSPDDVEGLDSSAAHVANLLSTEPADIKLGVGGFSMGAATALYSGTCFAHGKYGNGNPYPVNLSVAVGLSGWLPCARSLKNKIESSQEAAQKASSLPLMLCHGKADDVVLYKHGERSADALKSTGFANVEFKSYSRLGHYTVPEEMDEVVKWLTASLELGSSSST

SEQ ID NO: 27838 - protein, 256 aa, Triticum aestivum
MSFGGASSVAAGGKRPFEYGRTHVVRPKGAHKATIVWLHGLGDNGASWSQLLETLPLPNIKWICPTAPTRPVAIFGGFPSTAWFDVADLSEDSPDDVEGLDSSAAHVANLLSTEPADIKLGVGGFSMGAATALYSGTCFAHGKYGNGNPYPVNLSVAVGLSGWLPCARSLKNKIESSQEAAQKASSLPLMLCHGKADDVVLYKHGERSADALKSTGFANVEFKSYSRLGHYTVPEEMDEVVKWLTASLELGSSSST

SEQ ID NO: 27839 - DNA, 1046 bp, Triticum aestivum
actctccgatcgttcccttcgcctatctgcaggtctgcatccacacaacacaagcccacgcccacgcccacgcccacgcgcccccaaacccaaaaccctaccacgcctccgcgcccatggcccctaccgcgccgcagccgccccgcccctccgccgccgccccctccgcggcgccggtcgacgcgctcttcctccagaacctgatgaaccgcgtccagctccgcccgcccttcctcgacaccaactccttcctcacccaggacctcgacgacttcctcctcaacgagttcgccgcgctctccgccgcggcgggcgagtcctacgacgacgacgacgacgacgaagaaggggaggacggcggcctctccgacggggaggcctccggggaggccaggcggcgccggatgctctcgcgggaggaggccaagctggagaaggagatcgtccggatggtgctcgccggcgacggggacgcccttaagcccaactcgggccagtccgtcgccgtcggcgaccaccacgtgtgcgtcggcttccacgacgaggccggtggggagtaccgcgtgtgggagtggcacggccacgtcatgctctttgacgacgaggacggctactccgccgagtacatctacgggaaccacttcgagccgctcgctgccgccgctgccagggccaagcagaaggagaaggagaagagagagaaggacctcacctcgggccttcgggatttgattgtgggtgatggggacagtgccaatggcttgaatttgaatggcaatggcggaggccccagggtggtgcgcaggaacgtcgtaaatgcccctgcagcagcgcctgcaaggtaatcctttctagcagttccaccgggctgcacgaagtgaatgcatcaataccaggggcagagccaataaagtttaatcttttttcctctaatgcttgtttaagcggtctcttttgatctaaggagaaaggctctgtaattcacttttggcatgatatatacaatgtgcccactggattttgggatggaatttttattcaatact

SEQ ID NO: 27840 - protein, 280 aa, Triticum aestivum
SPIVPFAYLQVCIHTTQAHAHAHAHAPPNPKPYHASAPMAPTAPQPPRPSAAAPSAAPVDALFLQNLMNRVQLRPPFLDTNSFLTQDLDDFLLNEFAALSAAAGESYDDDDDDEEGEDGGLSDGEASGEARRRRMLSREEAKLEKEIVRMVLAGDGDALKPNSGQSVAVGDHHVCVGFHDEAGGEYRVWEWHGHVMLFDDEDGYSAEYIYGNHFEPLAAAAARAKQKEKEKREKDLTSGLRDLIVGDGDSANGLNLNGNGGGPRVVRRNVVNAPAAAPAR

SEQ ID NO: 27841 - protein, 242 aa, Triticum aestivum
MAPTAPQPPRPSAAAPSAAPVDALFLQNLMNRVQLRPPFLDTNSFLTQDLDDFLLNEFAALSAAAGESYDDDDDDEEGEDGGLSDGEASGEARRRRMLSREEAKLEKEIVRMVLAGDGDALKPNSGQSVAVGDHHVCVGFHDEAGGEYRVWEWHGHVMLFDDEDGYSAEYIYGNHFEPLAAAAARAKQKEKEKREKDLTSGLRDLIVGDGDSANGLNLNGNGGGPRVVRRNVVNAPAAAPAR

SEQ ID NO: 27842 - protein, 213 aa, Triticum aestivum
MNRVQLRPPFLDTNSFLTQDLDDFLLNEFAALSAAAGESYDDDDDDEEGEDGGLSDGEASGEARRRRMLSREEAKLEKEIVRMVLAGDGDALKPNSGQSVAVGDHHVCVGFHDEAGGEYRVWEWHGHVMLFDDEDGYSAEYIYGNHFEPLAAAAARAKQKEKEKREKDLTSGLRDLIVGDGDSANGLNLNGNGGGPRVVRRNVVNAPAAAPAR

SEQ ID NO: 27843 - DNA, 721 bp, Triticum aestivum
tctcgccgcggaatcccgatatttatttttcttgcgttccggtccccaggcttcgagttatttccctggtctggtgctcgcgcggcggcggcggcggcggagggtttgcgtcggcgctctcgcgagctagggtttcgggccgaggaggaggaggagcgagatggaggaggtgacggagggggtcaagaacctggccgtcacggagccgcacaagaagaaccggatccaggtctccaacacgaagaagccgctcttcttctatgtcaacctcgccaagaggtacatgcagatgcataacgaggtggaactctccgctctcggcatggctatcgccactgtggtgacagttgccgaaattctgaaaaataatggccttgctgttgaaaagaaaatcatgacatccactgttgatgtcaatgatgaatcaaggggccgcccgatgcagaaggctaagattgaaatagtgctgggcaagacggagaacttcgacgagctgatggccgccgccgcggaggagagggaagtcgcagccgccgaggagggcgaggagcagggctaataaactgtcttgagccggctgttgtagcttttatttagtacttgctgctaggttgtgtgttatcttctcttggccagcaagagataggtacttgtgtaaccaaagagttctttgtatttgtttcgtctccgtggtagtttaatgtcgatggtattctggtcc

SEQ ID NO: 27844 - protein, 132 aa, Triticum aestivum
MEEVTEGVKNLAVTEPHKKNRIQVSNTKKPLFFYVNLAKRYMQMHNEVELSALGMAIATVVTVAEILKNNGLAVEKKIMTSTVDVNDESRGRPMQKAKIEIVLGKTENFDELMAAAAEEREVAAAEEGEEQG

SEQ ID NO: 27845 - protein, 98 aa, Triticum aestivum
SRRGIPIFIFLAFRSPGFELFPWSGARAAAAAAEGLRRRSRELGFRAEEEEERDGGGDGGGQEPGRHGAAQEEPDPGLQHEEAALLLCQPRQEVHADA

SEQ ID NO: 27846 - protein, 91 aa, Triticum aestivum
MQMHNEVELSALGMAIATVVTVAEILKNNGLAVEKKIMTSTVDVNDESRGRPMQKAKIEIVLGKTENFDELMAAAAEEREVAAAEEGEEQG

SEQ ID NO: 27847 - DNA, 865 bp, Triticum aestivum
attccattccaccccaccccaccaccacccccactcgcctccgctcctagggtttcccgccgcgcaccacccccaaaaccctcgccccccctccccggcgatcggaccaatggcggcatcggcggcggcgaagaagctcacgctcaagagctccgacggcgaggacttcgaggtggaggtggcggtggcgatggcgtcgcagaccatcaagcacatggtggaggacggctgcgccgaaaacatcatcccgctccccaacgtcaacgccaaggtcctctccaaggtcatcgagtactgcacgcagcacgcccccaaggcagacgacgccgccaccgccgactccgccaccgccgtcaagcccgacgaggagacgctcaaggccttcgacgccgaattcgtcaaggtcgagcaggcgactctcttcgacctcatcctggctgccaactacctggacatcaaggggcttctggacctgacctgccagaccgtcgccgacatgatcaagggcaagactccggaggagatccgcaagaccttcaacatcaccaacgacttcaccccggaggaggaggaggaagtgcggaaggagaaccagtgggcctttgagtgaaggtcgggtccgtgacgcgaataaccagcatggaaggaaacttggcttcgtcgaatgcctgggagcagccgttaaccgttttgtggttctgagacaacgctagtagggaagatgtaagtaggttctggttccggtcgacctggagggtcctcaccatttttctgactctgcttcgctttttggttgtggtggtattttgctgcactcttggacctggttatgaggaaatgagatggtatgctggttattctgcac

SEQ ID NO: 27848 - protein, 202 aa, Triticum aestivum
FHSTPPHHHPHSPPLLGFPAAHHPQNPRPPSPAIGPMAASAAAKKLTLKSSDGEDFEVEVAVAMASQTIKHMVEDGCAENIIPLPNVNAKVLSKVIEYCTQHAPKADDAATADSATAVKPDEETLKAFDAEFVKVEQATLFDLILAANYLDIKGLLDLTCQTVADMIKGKTPEEIRKTFNITNDFTPEEEEEVRKENQWAFE

SEQ ID NO: 27849 - protein, 201 aa, Triticum aestivum
IPFHPTPPPPPLASAPRVSRRAPPPKPSPPLPGDRTNGGIGGGEEAHAQELRRRGLRGGGGGGDGVADHQAHGGGRLRRKHHPAPQRQRQGPLQGHRVLHAARPQGRRRRHRRLRHRRQARRGDAQGLRRRIRQGRAGDSLRPHPGCQLPGHQGASGPDLPDRRRHDQGQDSGGDPQDLQHHQRLHPGGGGGSAEGEPVGL

SEQ ID NO: 27850 - protein, 166 aa, Triticum aestivum
MAASAAAKKLTLKSSDGEDFEVEVAVAMASQTIKHMVEDGCAENIIPLPNVNAKVLSKVIEYCTQHAPKADDAATADSATAVKPDEETLKAFDAEFVKVEQATLFDLILAANYLDIKGLLDLTCQTVADMIKGKTPEEIRKTFNITNDFTPEEEEEVRKENQWAFE

SEQ ID NO: 27851 - DNA, 993 bp, Triticum aestivum
acaacgggcgagtagcatcgcaatcaccaaaatgcaggcgctcctactcccatcgcggctgccgccgccgctgctccggcagcgagggcttcccgctgttgcgtcgctcgccagccatcccctcaacggagctaccctccctactgggcgcctctgcttcgggggcggcgaagccgctccacggcgcctcactgtggcggcggcggcgtcctcgtcttcgtcgggccctctctacccgccgcctccccccaccgagcagacaattgagcgcgccaagctcgagcaggttatcaagaggctagagaaaacagctaggtatttcaagaatttgggtaccctagggttctggtcccagttggtgtgcacgtttgtttctgctggaattttgtcattctccacagttgttaccgggaaggttacatcaccctttacattctacacaactgctgctggcgttgctgcagcttttatttcagtcttctggtcatttggctacatccgtctttctgaaagacttcggaaaacagcaagcgcacccgcaaaggctcctccacgggctgatgtgattaaaagtctgaaaaatggcattgtgctcaatattcttgggatgggcgcagctgttctcggtatgcaggcacttgttggtgctttggtagcaaaagcccttactacctccgcagtcccctattatcaggcaacttccgccggccaaagtcctgttttggctctagatgtattcctggttcaggcctcagcaaacaccatactgtcgcatttcctaggtgtggcgacttccctggagctgctccgttccgtgtcaatcgccccgaccgagcctgctgcgacatgagccaggagcccaagagctgctggattcctttactttgcacttgttttcctttctccctgactgcctaggaatagcatctcgtgtgcgccggtattatgtcttgacatttcggcttaaatgagcaggttccgtgtggcctcctt

SEQ ID NO: 27852 - protein, 282 aa, Triticum aestivum
QRASSIAITKMQALLLPSRLPPPLLRQRGLPAVASLASHPLNGATLPTGRLCFGGGEAAPRRLTVAAAASSSSSGPLYPPPPPTEQTIERAKLEQVIKRLEKTARYFKNLGTLGFWSQLVCTFVSAGILSFSTVVTGKVTSPFTFYTTAAGVAAAFISVFWSFGYIRLSERLRKTASAPAKAPPRADVIKSLKNGIVLNILGMGAAVLGMQALVGALVAKALTTSAVPYYQATSAGQSPVLALDVFLVQASANTILSHFLGVATSLELLRSVSIAPTEPAAT

SEQ ID NO: 27853 - protein, 272 aa, Triticum aestivum
MQALLLPSRLPPPLLRQRGLPAVASLASHPLNGATLPTGRLCFGGGEAAPRRLTVAAAASSSSSGPLYPPPPPTEQTIERAKLEQVIKRLEKTARYFKNLGTLGFWSQLVCTFVSAGILSFSTVVTGKVTSPFTFYTTAAGVAAAFISVFWSFGYIRLSERLRKTASAPAKAPPRADVIKSLKNGIVLNILGMGAAVLGMQALVGALVAKALTTSAVPYYQATSAGQSPVLALDVFLVQASANTILSHFLGVATSLELLRSVSIAPTEPAAT

SEQ ID NO: 27854 - DNA, 716 bp, Triticum aestivum
agccacaacgggacagatcccccgcataaattcctccacccgtcgcgccgcccccattcgcccacgcccacgcgcgcgcacgcggcctccccctcctcctcccccattcgctccctccctccgccggccggggattcgggtttggggggagatggggtacgtcgggagccacggcgtggcgacgctgcgcaagtacaagtacagcggcgtcgaccactccattgtcgccaagtacatcctccagcccttctggtcgcgattcgtcaacgtcttcccgctctggttcccaccaaacatgatcacgctgacaggtttcatgtttctgctgacatcggcattccttggctttttgtattcacctcatcttgatacagcgccccctagatgggttcatctcgcgcatggaatccttctcttcctttaccagacttttgatgctgtggatggtaaacaagcaagacgtaccaactcatcaagtcctttaggcgaactttttgatcacggatgcgacgcgcttgcatgtacttttgagtccctggcttttgggagcacagctatgtgtggaaatgctaccttttggttttgggtcatttcggctgtccccttctactttgcaacctgggaacactattttacaaacacacttgttcttcctatagtcaatgggccaactgaaggccttatgctgatttatgtgtgccatatcttcacctttt

SEQ ID NO: 27855 - protein, 238 aa, Triticum aestivum
ATTGQIPRINSSTRRAAPIRPRPRARTRPPPPPPPFAPSLRRPGIRVWGEMGYVGSHGVATLRKYKYSGVDHSIVAKYILQPFWSRFVNVFPLWFPPNMITLTGFMFLLTSAFLGFLYSPHLDTAPPRWVHLAHGILLFLYQTFDAVDGKQARRTNSSSPLGELFDHGCDALACTFESLAFGSTAMCGNATFWFWVISAVPFYFATWEHYFTNTLVLPIVNGPTEGLMLIYVCHIFTF

SEQ ID NO: 27856 - protein, 188 aa, Triticum aestivum
MGYVGSHGVATLRKYKYSGVDHSIVAKYILQPFWSRFVNVFPLWFPPNMITLTGFMFLLTSAFLGFLYSPHLDTAPPRWVHLAHGILLFLYQTFDAVDGKQARRTNSSSPLGELFDHGCDALACTFESLAFGSTAMCGNATFWFWVISAVPFYFATWEHYFTNTLVLPIVNGPTEGLMLIYVCHIFTF

SEQ ID NO: 27857 - protein, 140 aa, Triticum aestivum
MITLTGFMFLLTSAFLGFLYSPHLDTAPPRWVHLAHGILLFLYQTFDAVDGKQARRTNSSSPLGELFDHGCDALACTFESLAFGSTAMCGNATFWFWVISAVPFYFATWEHYFTNTLVLPIVNGPTEGLMLIYVCHIFTF

SEQ ID NO: 27858 - DNA, 1002 bp, Triticum aestivum
ataccggtccacgatcttctccagcagtaacaactccgctccgcaccgttgtcgtctcctcacccctgccggagatccacgccagaccgccgcgcccctccgcccggctcggccgctgcttccgcgatgcagttcttcggcgggtcgtcgctgacgtccgtcgcgccggagtccagcccggcaccagcggcgcctccggggacgggaacgggctccaacgcccaggtgatctacgtcttcaaccgcaacggcgtgtgcctgctgtaccgcgagtggcaccgcccgctccgcacgctcgcccgcaaccaggaccagaagctcatgttcggcctcctcttctccctccgctccttcaccgccaagatcgaccccacctcaacagaacacgcgaatcttggggcgccactactgccaggtcagggatgttcatttcatagcttcaagacaaacacatataaattgaactacatggagagcccgtctggtataaagcttattctccttacccatccaaggactggtgatcaacgagatgcgctgaagcatatttacagcctatatgtggagtatgttgtaaagaatcctctgtatgctcctggcagcccaatcaagtgtgaccttttcaataaacatctcgatcagtatgtgaaaacattgatttgaccccattcaggtttgggaggaggtgcatggaacagttgatttgaaggcgaacagtaggcactttgtgttttcggaaactctgagccatggaacagttcgctgtgtggtggcatctctgtgctatttggtttgataatcgctatttgttgagaagttgttgcttcaaggatgatacagacttgtcttgtgccaaagtggtcctgctgaatctcactgtatttattgtacacttgcaccctgcattgatggtcttcatgtgtacccactgcaatttgatagctgtacactctgatcacagtccctgtaatttgcacccttcgtcatgatggccccctcaac

SEQ ID NO: 27859 - protein, 178 aa, Triticum aestivum
MQFFGGSSLTSVAPESSPAPAAPPGTGTGSNAQVIYVFNRNGVCLLYREWHRPLRTLARNQDQKLMFGLLFSLRSFTAKIDPTSTEHANLGAPLLPGQGCSFHSFKTNTYKLNYMESPSGIKLILLTHPRTGDQRDALKHIYSLYVEYVVKNPLYAPGSPIKCDLFNKHLDQYVKTLI

SEQ ID NO: 27860 - protein, 144 aa, Triticum aestivum
TGPRSSPAVTTPLRTVVVSSPLPEIHARPPRPSARLGRCFRDAVLRRVVADVRRAGVQPGTSGASGDGNGLQRPGDLRLQPQRRVPAVPRVAPPAPHARPQPGPEAHVRPPLLPPLLHRQDRPHLNRTRESWGATTARSGMFIS

SEQ ID NO: 27861 - protein, 113 aa, Triticum aestivum
MFGLLFSLRSFTAKIDPTSTEHANLGAPLLPGQGCSFHSFKTNTYKLNYMESPSGIKLILLTHPRTGDQRDALKHIYSLYVEYVVKNPLYAPGSPIKCDLFNKHLDQYVKTLI

SEQ ID NO: 27862 - DNA, 1140 bp, Triticum aestivum
cactttgacttcggagcaaccgcgaccacgtcggtagcataaagctttcgcccggctggctcgggtgagagagacagggaaggcggagggggcggaggctgggcggcagaggcggcgccgtcactctgttcttgcgctcatctccagaggaaggggagcgtcacggttcagcaatggcagctccgaatacctacgccgtccatctctcctcggagacccacaagatcgaggcctggtgcgaatcggacgaggctttggctaagcaactgcaggaggaggaggattcgctcgctacaagggaatttgccggcagcgtgtccttggaaccatcatcaccagctgttgagtataggcctgccaataatgcagctcaggtggcgacagaagataatgtcgatccggataatatgtcatacgagcaactgcaagcaatcggtgaagaagtaggaactcagtccagaggattatctgatgacctgatcagctacctggagccttttaggaacaaatgtaacttcttctcctgcaaaaagaataccgatgaatgtgtgatctgcaaatcgaactataaaagcctacagaagttgataagattgccctgcagccattgttaccatgcaaattgcataactcgctggcttaagattaacaaggcatgcccagtctgcaatgaggaggtattcggttaacttgcgatgttagtggagacgctgtggcctcctcgccgcatcatgataatggacaatcttgctctcctatagcctattatactataaaatacttgatggtctaccgtgctttaagaacaaatgtatttcggatcatgccatgtttgatgtcccccaacttagttttgtcattaaggtaatgataaatatgtgcgggcagtgggttatatagtttgcaattttccgagaatgcaaccgagcaggagcagctaagtagatgatgtggtttgctatgtcttgcacagtctttacatcagcccactgtgtaaagtccgaagcaagatttgtaaatgtttatataggacgtctctttttgactttgaaaggttcagacaagtgtgttctggggtttccaaaattttgggaacaaatcttgcatgtaaaaattataatggaatgaactgtgtttttc

SEQ ID NO: 27863 - protein, 171 aa, Triticum aestivum
MAAPNTYAVHLSSETHKIEAWCESDEALAKQLQEEEDSLATREFAGSVSLEPSSPAVEYRPANNAAQVATEDNVDPDNMSYEQLQAIGEEVGTQSRGLSDDLISYLEPFRNKCNFFSCKKNTDECVICKSNYKSLQKLIRLPCSHCYHANCITRWLKINKACPVCNEEVFG

SEQ ID NO: 27864 - protein, 93 aa, Triticum aestivum
MSYEQLQAIGEEVGTQSRGLSDDLISYLEPFRNKCNFFSCKKNTDECVICKSNYKSLQKLIRLPCSHCYHANCITRWLKINKACPVCNEEVFG

SEQ ID NO: 27865 - DNA, 1599 bp, Triticum aestivum
aaatcgaaaacgaaacccaaacccaaatcgcttccgttacgaaattcccccaaatctatcccccgtcggatcgatcgccgccgccgccatgtcgtcgtcggcgccgctcccgctgcagcgctacttctgccaccagtgcgaccgcgccgtcgccatcgccgcgccggcctcccgcgacgacgaggtcttctgcccgctctgcgccggggggttcgtcgaggagctcctcgacgacgaggaccccccaaaccctagcccccaaatccaccccttcttccccctcgccagcttcctcgacctccgcaaccccagcgacctcgccggggtcctcggcccgccctccccctctgcgccccgcgccgcctccgcctccgccaacaaccagttcgacgtcaccgacttcctccacggccacctcggcggcctcctctccggcggcgccaccatccagatcgtcctcgagggttcctccttccccggcggcttcgcctccttcggcgccgggggccccgtccccggcggggtcagcctcggcgactacttcatgggatccggcctcgagcagctcatccagcagctcgccgagaacgaccccagccgctacggcaccccgccagccgccaaggccgccgtcgccgccctgcccgatgtcgccgtctctgctgacatgatggccgccgacgggggcgcccagtgcgccgtctgtatggacgacttccttctcggcgccgccgccaagcagctcccctgcaagcacgtctttcacaaggactgcatcctgccgtggctcaacctccacagctcctgccctgtctgccgccatgagatgcccactgatgaccctgactatgagaaccaccagcgccaggctgctgcccctgctgctgctgcggcagcgcctgcgtcccctggtggcggcccttcgcctagggtcatggagaggaggttcaggatctccctgccgtggcctctcagggccgcttttggcgcgcagcaggcggagagcagcgaccaggatgctgctggctctggtgactacaacgacgatccgaatgcgagcggtcgctcgtatgatgatcttgactgaagcgcctgcaaggaagagggcaacaggggggataaggaggggcaaacggactggctggaagaaggaagggagtctgaatgcgaggaagagaagacaagaagaaggaagacttatgttgttgttgttgatccaaattgaattggaagcttttttggtgatgaagagtggcgccgtccgtctattgatctccgttgcctcctctcccctcccctcccctctttgcctgtcatggttgtagaaagagagagagaaaagtagagatgatattcttttgttgcctggtctggtctggtctggtctggttggtgggttgacttgactgaatatataccttcttgtgggaaggaagaagctccctccttcctaacttgtctgtgttatcatagtacaattgtctgtctgtgtcgattggtcggtcttcctttctctcttgtggggttggaagaaagtaagaaagggaactctagcgatccgatccgaccctcttatatatacataatgtgttatacatg

SEQ ID NO: 27866 - protein, 361 aa, Triticum aestivum
NRKRNPNPNRFRYEIPPNLSPVGSIAAAAMSSSAPLPLQRYFCHQCDRAVAIAAPASRDDEVFCPLCAGGFVEELLDDEDPPNPSPQIHPFFPLASFLDLRNPSDLAGVLGPPSPSAPRAASASANNQFDVTDFLHGHLGGLLSGGATIQIVLEGSSFPGGFASFGAGGPVPGGVSLGDYFMGSGLEQLIQQLAENDPSRYGTPPAAKAAVAALPDVAVSADMMAADGGAQCAVCMDDFLLGAAAKQLPCKHVFHKDCILPWLNLHSSCPVCRHEMPTDDPDYENHQRQAAAPAAAAAAPASPGGGPSPRVMERRFRISLPWPLRAAFGAQQAESSDQDAAGSGDYNDDPNASGRSYDDLD

SEQ ID NO: 27867 - protein, 332 aa, Triticum aestivum
MSSSAPLPLQRYFCHQCDRAVAIAAPASRDDEVFCPLCAGGFVEELLDDEDPPNPSPQIHPFFPLASFLDLRNPSDLAGVLGPPSPSAPRAASASANNQFDVTDFLHGHLGGLLSGGATIQIVLEGSSFPGGFASFGAGGPVPGGVSLGDYFMGSGLEQLIQQLAENDPSRYGTPPAAKAAVAALPDVAVSADMMAADGGAQCAVCMDDFLLGAAAKQLPCKHVFHKDCILPWLNLHSSCPVCRHEMPTDDPDYENHQRQAAAPAAAAAAPASPGGGPSPRVMERRFRISLPWPLRAAFGAQQAESSDQDAAGSGDYNDDPNASGRSYDDLD

SEQ ID NO: 27868 - protein, 222 aa, Triticum aestivum
IENETQTQIASVTKFPQIYPPSDRSPPPPCRRRRRSRCSATSATSATAPSPSPRRPPATTRSSARSAPGGSSRSSSTTRTPQTLAPKSTPSSPSPASSTSATPATSPGSSARPPPLRPAPPPPPPTTSSTSPTSSTATSAASSPAAPPSRSSSRVPPSPAASPPSAPGAPSPAGSASATTSWDPASSSSSSSSPRTTPAATAPRQPPRPPSPPCPMSPSLLT

SEQ ID NO: 27869 - DNA, 961 bp, Triticum aestivum
ccacgcagcacctcctctcctcgccccccgagatcggaatcggcgcccccctccctccgccgccgccgccgccgccgccatgtcgccgtctctgctcggggggctcaccaagtcgctggccatgaccgtgctctccgaggtcggcgacaagaccttcttcgccgccgcgattctggccatgcgccatccccggaagctcgtccttgctggctgtctatcggcgttaacagtgatgaccgctttatctgcttctctcggctgggctgcaccaaatctgatatcacgtaaatggactcatcatatcaccactctgctgttctttgtgtttggcatctggtcattgtgggaaggcttcaaagaagaaggagagtcagaagatctggctgaattggaagcaaagctggatgcggactttaagactaacaaaggggaatcgaaaaataaatcaaaggcaactgaagatacaaagaaaaagcaaaggccatttctcatgcagttcttctcgccaatttttataaaggcattttccatcactttctttggtgagtggggtgacaagagccagattgctacaattggcttggctgctgatgaaaacccattcggtgtcgtcatcgggggagtcatagctcaagcactctgcactaccgctgccgtgatgggagggaagagcctggcctctcagatatccgagaagatggttgaattgtcgagcggggtgctattcctgttgtttggcataatgtccttgttgtcagggccagaagggcaattgtaatttccccaggaacttcggcaggactctgccagactcctggagtagttaccaagcttaccttatttgatgggtgatggcgacgaaagccggccgtccttcaccaactggatggcgattcattagtttagtcaacacatcattgtaacacttggcttgccactcataaataacttgatgttactg

SEQ ID NO: 27870 - protein, 258 aa, Triticum aestivum
HAAPPLLAPRDRNRRPPPSAAAAAAAMSPSLLGGLTKSLAMTVLSEVGDKTFFAAAILAMRHPRKLVLAGCLSALTVMTALSASLGWAAPNLISRKWTHHITTLLFFVFGIWSLWEGFKEEGESEDLAELEAKLDADFKTNKGESKNKSKATEDTKKKQRPFLMQFFSPIFIKAFSITFFGEWGDKSQIATIGLAADENPFGVVIGGVIAQALCTTAAVMGGKSLASQISEKMVELSSGVLFLLFGIMSLLSGPEGQL

SEQ ID NO: 27871 - protein, 232 aa, Triticum aestivum
MSPSLLGGLTKSLAMTVLSEVGDKTFFAAAILAMRHPRKLVLAGCLSALTVMTALSASLGWAAPNLISRKWTHHITTLLFFVFGIWSLWEGFKEEGESEDLAELEAKLDADFKTNKGESKNKSKATEDTKKKQRPFLMQFFSPIFIKAFSITFFGEWGDKSQIATIGLAADENPFGVVIGGVIAQALCTTAAVMGGKSLASQISEKMVELSSGVLFLLFGIMSLLSGPEGQL

SEQ ID NO: 27872 - protein, 218 aa, Triticum aestivum
MTVLSEVGDKTFFAAAILAMRHPRKLVLAGCLSALTVMTALSASLGWAAPNLISRKWTHHITTLLFFVFGIWSLWEGFKEEGESEDLAELEAKLDADFKTNKGESKNKSKATEDTKKKQRPFLMQFFSPIFIKAFSITFFGEWGDKSQIATIGLAADENPFGVVIGGVIAQALCTTAAVMGGKSLASQISEKMVELSSGVLFLLFGIMSLLSGPEGQL

SEQ ID NO: 27873 - DNA, 606 bp, Triticum aestivum
gaaacaaaccccaaagccgacgccgccgccgcctgccccctgcccccgccgaccgtgccgaaaacatggactcgcttcttgccacctacgcctcttccgacgaagacgccgacgagagcatcccctcacccgctcccgcgacccgccgtggcgaggccagcggaaagcccgccggcggcatcttctccgcgctcccgcaacccaagtcggcgcctatcttctcatcgctcccggcgccgaaatccgccgcgaccttctcctccatcccgcctcccaaatcctccgcttcctccggaaaccctaagcgcgtcgtccagttccgcccgccgccgatccgccagaccaccggagtcagctcggacgaggaggatgatgccgagaagcgccgtcccagcgccagcgaggcgcccccgcccccgcccctgtctgctggatcggggccggtgtcttcgttcctcccggcgcccaggcactcgcttgggttcggatccggcgcggccaggaggtcggccgtagacaccgccgggccggagaggtcaaatcttggtgctgctggcccctctagctcggctgtcaacagaggagcgccagaaaggtctgatactg

SEQ ID NO: 27874 - protein, 201 aa, Triticum aestivum
NKPQSRRRRRLPPAPADRAENMDSLLATYASSDEDADESIPSPAPATRRGEASGKPAGGIFSALPQPKSAPIFSSLPAPKSAATFSSIPPPKSSASSGNPKRVVQFRPPPIRQTTGVSSDEEDDAEKRRPSASEAPPPPPLSAGSGPVSSFLPAPRHSLGFGSGAARRSAVDTAGPERSNLGAAGPSSSAVNRGAPERSDT

SEQ ID NO: 27875 - protein, 180 aa, Triticum aestivum
MDSLLATYASSDEDADESIPSPAPATRRGEASGKPAGGIFSALPQPKSAPIFSSLPAPKSAATFSSIPPPKSSASSGNPKRVVQFRPPPIRQTTGVSSDEEDDAEKRRPSASEAPPPPPLSAGSGPVSSFLPAPRHSLGFGSGAARRSAVDTAGPERSNLGAAGPSSSAVNRGAPERSDT

SEQ ID NO: 27876 - protein, 171 aa, Triticum aestivum
ETNPKADAAAACPLPPPTVPKTWTRFLPPTPLPTKTPTRASPHPLPRPAVARPAESPPAASSPRSRNPSRRLSSHRSRRRNPPRPSPPSRLPNPPLPPETLSASSSSARRRSARPPESARTRRMMPRSAVPAPARRPRPRPCLLDRGRCLRSSRRPGTRLGSDPARPGGRP

SEQ ID NO: 27877 - DNA, 1375 bp, Triticum aestivum
cccaatcccaatccaatctcatcgccaagcaattactccagcactccagccctccccaccagcgtgacctcggcagtatggcgagcccgcagtgctgcgcgaacccaccggcgctcaatcccgccgccggcgagggcaaggtcgtggacagcttcggcgggatcaaggcgtacgtcgccggcgccaaagagtcgaaggccgccgtcgtcctcatctccgacgtctacgggtttgaagcgccgaatctgagatagccgataaagttgcttcgtctggatattttgttgtggtgccagatttcttacatggggatccatttgtacctgaagacgctgacagaccaatagcagtgtggataaaggagcataccccggtttgttgtctcctgattccctgaaaccttgttcttgtatttctcctgtaaatgttcaggccacgttgctttagtttatgtttaagctatatgtttcgaaagctttccagtttccatcgcatgacattgctggccttttgtacttagattcggacagtgttaactaaataactgtgagaatatgtgtaggatactgactgattgttgtcctgttcttccaccaacgttgataagctctcctgggtcagaagaattgaatggagacgctctactgagctgataggggtttgagttacttctcgctgaatgtgatgtcacatctaatataaacgaataaattgtgcttttatacagggaaaagcatttgaagaggcaaaacctgttattgctgctctaaaggaacaaggagcgtctagcgttggggctgcaggttattgctggggtgcaaaggtagttgcagagttagcgaaagctaatgagatccaggcagccgttatgtcgcacccttcatttgttactgtcaatgatatagaagaggtgaaatgccccatcgctatacttggagctgaaactgacgtaatgtccccaccagaattggtcaagaagttcgagcaggttctatcctctaactcagggattgctcactttgtcaagatattccctggggtttctcatggatggaccgtgagatacaaaagcgaagacgcagctgctgtgaagagcgccgaggaagccctggcggacatgattgactggttcaacaagaacctcaagtgaacctaatgaattggcggccatccttttataataagccagtgtcactcttcaggagtcaccacgcgagcatccacggtttatgttatggtcttagctatagcctatagggcatgcgtctttgtctgctgcaggtctgctggtatgtgtgtgcttgctcattttggggtctgcttgtgctgaacactgaaactattgcactcagataaaatgtggtatttgcagttt

SEQ ID NO: 27878 - protein, 93 aa, Triticum aestivum
MSHPSFVTVNDIEEVKCPIAILGAETDVMSPPELVKKFEQVLSSNSGIAHFVKIFPGVSHGWTVRYKSEDAAAVKSAEEALADMIDWFNKNLK

SEQ ID NO: 27879 - protein, 83 aa, Triticum aestivum
QSQSNLIAKQLLQHSSPPHQRDLGSMASPQCCANPPALNPAAGEGKVVDSFGGIKAYVAGAKESKAAVVLISDVYGFEAPNLR

SEQ ID NO: 27880 - protein, 82 aa, Triticum aestivum
PNPNPISSPSNYSSTPALPTSVTSAVWRARSAARTHRRSIPPPARARSWTASAGSRRTSPAPKSRRPPSSSSPTSTGLKRRI

SEQ ID NO: 27881 - DNA, 1326 bp, Triticum aestivum
acatcctaatcgaaaaaaaaaaccccaagcaaaagaagcccctttcctcctccgccgccgccgccgcttctgccgccatggccgacgagctggacgagctcatcgagttcctctccaacggctcccctcaggtgcgcggcgccgcggcggacatcgtgcgggggctcacgggggacagcgacgggctgcggtccctcgcggcgcgcgccgaccgcgcgctgccggcgctgctccggctgctcgcatccgtgggggccggctgcgcgggcgaggcggcggctgactcgctcgtcaacctcagccaggacggcgaccttgccgcgcgcctcgtggtgctcggagccgtcgcggccgccatggacgtgatggtcaagcgcggcggcgagcagcccaagctcgcgcgcagccttgtcatgctgctcgtcaacctcacccaggtcgagtccggcatctcggccctcctccaggttggtgatgaaaaggtgcaagggttgtatgttgcaaagcttgtgcgctcattctgcaggtcatcctgtgactctgaagatgaagatatatttgaacacattgcctctatacttgtgaatatctcaaaggtcgaagctggacggagaatactgatggaacctaagagaggtcttctaaagcagattataggacaatttgattcaacaaatcaacttagaaagaaaggggttgctggcaccatccgtaactgttgctttgaagctgatacccagatacaaaatttgctttctatagcagaatatctttggccagctctacttttgccagtagctggaaagaagatctatagcgaagaagatagatcgaaaatgcctcccgagcttgcaaatgcactttctcatgaacgggaagctgttgatgattccgagattcgtgaacgggcactagaggctatttatatgatcgtgatgcaggatgatggacgaaaggccttttggtcagtcaatgggccacggatactgcaggttggttatgaagacgaagaggacttgaaagtgatgggcgcatatgagttgattggttctttgcttgtcggcaagggtgaaattgaacaagatcaagagcaaggagaagataagcctcaatgatgggctcaactatgtacaatttgtaatctgtcttatctacttgctgcaagaaaatagggctgcatcgcttccaatcttaagaatgtcctgtcgtattgatccaaatttcttgcaataactggcttgttctacctcctggtttcagtttgttgtccacagtatttaatacaactatgtaagagcattaagaacatcgtccagtttttgcctc

SEQ ID NO: 27882 - protein, 370 aa, Triticum aestivum
ILIEKKNPKQKKPLSSSAAAAASAAMADELDELIEFLSNGSPQVRGAAADIVRGLTGDSDGLRSLAARADRALPALLRLLASVGAGCAGEAAADSLVNLSQDGDLAARLVVLGAVAAAMDVMVKRGGEQPKLARSLVMLLVNLTQVESGISALLQVGDEKVQGLYVAKLVRSFCRSSCDSEDEDIFEHIASILVNISKVEAGRRILMEPKRGLLKQIIGQFDSTNQLRKKGVAGTIRNCCFEADTQIQNLLSIAEYLWPALLLPVAGKKIYSEEDRSKMPPELANALSHEREAVDDSEIRERALEAIYMIVMQDDGRKAFWSVNGPRILQVGYEDEEDLKVMGAYELIGSLLVGKGEIEQDQEQGEDKPQ

SEQ ID NO: 27883 - protein, 345 aa, Triticum aestivum
MADELDELIEFLSNGSPQVRGAAADIVRGLTGDSDGLRSLAARADRALPALLRLLASVGAGCAGEAAADSLVNLSQDGDLAARLVVLGAVAAAMDVMVKRGGEQPKLARSLVMLLVNLTQVESGISALLQVGDEKVQGLYVAKLVRSFCRSSCDSEDEDIFEHIASILVNISKVEAGRRILMEPKRGLLKQIIGQFDSTNQLRKKGVAGTIRNCCFEADTQIQNLLSIAEYLWPALLLPVAGKKIYSEEDRSKMPPELANALSHEREAVDDSEIRERALEAIYMIVMQDDGRKAFWSVNGPRILQVGYEDEEDLKVMGAYELIGSLLVGKGEIEQDQEQGEDKPQ

SEQ ID NO: 27884 - protein, 252 aa, Triticum aestivum
MDVMVKRGGEQPKLARSLVMLLVNLTQVESGISALLQVGDEKVQGLYVAKLVRSFCRSSCDSEDEDIFEHIASILVNISKVEAGRRILMEPKRGLLKQIIGQFDSTNQLRKKGVAGTIRNCCFEADTQIQNLLSIAEYLWPALLLPVAGKKIYSEEDRSKMPPELANALSHEREAVDDSEIRERALEAIYMIVMQDDGRKAFWSVNGPRILQVGYEDEEDLKVMGAYELIGSLLVGKGEIEQDQEQGEDKPQ

SEQ ID NO: 27885 - DNA, 696 bp, Triticum aestivum
aaacccttgttccccacagccattatccaaagagaccccgacgccgaagcgacccaagagaagaaacccccaaccccaaatggcggccgcatccatgctcaccaccgtcttctcccctctcgccctcctccgcccgtcggcctccttcgcgcgcctgcgccgcgcggctcccgccgccgccgccgtcgtcgtgcgcgccgcggccaagtctaccacggccgcggcggcccccaagaagaagagggcggcgccgaccggcatcacgatgccccggcccgtgtcccccgcgctgcaggcgttcatgggcgccgccgaggtcccccgcaccgaggccatgaagcgcatctgggcctacatcaagcagaacaacctccaggaccctggggacaagaaggtcatcgtgtgcgacgagaagctgaaagccctgtttgcaggcagagagcgtgttgggttcctggagattgccaagcttctgagcccgcactttgtcaagactccgtgaagcctcttccatggagtagtcgagttagcgtagatggtttctactttgtggtggtcttgagggtgcgtaggtttgtcttgttggcccgagttggctcgacttctagggttctttagccctctgtggacaatgttagggtacctctggcagtagaaatctggaacatcttgacagctttaagctcgtatgcttgc

SEQ ID NO: 27886 - protein, 205 aa, Triticum aestivum
KPLFPTAIIQRDPDAEATQEKKPPTPNGGRIHAHHRLLPSRPPPPVGLLRAPAPRGSRRRRRRRARRGQVYHGRGGPQEEEGGADRHHDAPARVPRAAGVHGRRRGPPHRGHEAHLGLHQAEQPPGPWGQEGHRVRREAESPVCRQRACWVPGDCQASEPALCQDSVKPLPWSSRVSVDGFYFVVVLRVRRFVLLARVGSTSRVL

SEQ ID NO: 27887 - protein, 166 aa, Triticum aestivum
NPCSPQPLSKETPTPKRPKRRNPQPQMAAASMLTTVFSPLALLRPSASFARLRRAAPAAAAVVVRAAAKSTTAAAAPKKKRAAPTGITMPRPVSPALQAFMGAAEVPRTEAMKRIWAYIKQNNLQDPGDKKVIVCDEKLKALFAGRERVGFLEIAKLLSPHFVKTP

SEQ ID NO: 27888 - protein, 140 aa, Triticum aestivum
MAAASMLTTVFSPLALLRPSASFARLRRAAPAAAAVVVRAAAKSTTAAAAPKKKRAAPTGITMPRPVSPALQAFMGAAEVPRTEAMKRIWAYIKQNNLQDPGDKKVIVCDEKLKALFAGRERVGFLEIAKLLSPHFVKTP

SEQ ID NO: 27889 - DNA, 1368 bp, Triticum aestivum
aaaacctcccccgactcctaaaaccttaaaccctagctccggccactcccccatggcggccatccgggtcatcctccctcatccccacctccccatcccctcgtggagaccccagctcaagccctcctcatcctatccccgccgcgcggtcgccgccccagcttcgctgtctccgtcgcccctcacggcttccctgcaactcggagatgtgatcgaggcgcagcagttcgatcggcaggcgcttaatgagatctttgaggtggcgcgggagatggaggccgtggagcgcagctcccacgggttccggagccgcgtccttgaggggtacctcatggccacgctcttctacgagccctccacccgcacgcgcctctccttcgaggccgccatgcgccgtcttggcggggaggtgctcactaccgagaacgctcgcgagttctcgtccgctgccaagggcgagaccctagaagataccataagaaccgttgaaggttattctgatattatcgttctgagacattttgaaagtggagctgccagaagagcagcggctactgcagaaattccggttattaatgcaggtgatgggccagggcaacatcctactcaggctttgttggatgtatatacaataaagagagagattggtaggctagatggaatcaaacttggtttggttggagaccttgccaatgggagaactgttcgttctctggcctatttgatcgctaagtaccagaacattaagatatacttcgtatctccagatgttgtaaaaatgaaggatgatattaaggagtacttaacttcacaaggtgttgaatgggaagaaagttcagatttattggatgtggcatccaggtgtgatgtaatttatcaaacacgcattcaaaaagaaagattcggagagaggatcgatcactatgaggcagctcgtgggaaatatattgtggataagaaggttttaggtgtgctgccaaagcatgctgttatcatgcatccccttccaaggctggatgagatcacagtagatgttgatagtgatccaagggctgcatattttaggcaggctaagaatggcctctacataaggatggcactgctcaaacttctgcttgttggccattgacattctttttcctggtgcgtgagctttgcgatgtcaaaggatcagaaatgtagtcttaatcattggctccaagttcaactgttcggtgctgtgcaaggtataagaaaattggatccttgcaagaataaagcaatgattgtatgatacatgctccataggaattttctctgttattatgtggaacatccttttccccaggatggaatgcaatgttcgaaaagaaaattatattttacctg

SEQ ID NO: 27890 - protein, 375 aa, Triticum aestivum
KPPPTPKTLNPSSGHSPMAAIRVILPHPHLPIPSWRPQLKPSSSYPRRAVAAPASLSPSPLTASLQLGDVIEAQQFDRQALNEIFEVAREMEAVERSSHGFRSRVLEGYLMATLFYEPSTRTRLSFEAAMRRLGGEVLTTENAREFSSAAKGETLEDTIRTVEGYSDIIVLRHFESGAARRAAATAEIPVINAGDGPGQHPTQALLDVYTIKREIGRLDGIKLGLVGDLANGRTVRSLAYLIAKYQNIKIYFVSPDVVKMKDDIKEYLTSQGVEWEESSDLLDVASRCDVIYQTRIQKERFGERIDHYEAARGKYIVDKKVLGVLPKHAVIMHPLPRLDEITVDVDSDPRAAYFRQAKNGLYIRMALLKLLLVGH

SEQ ID NO: 27891 - protein, 358 aa, Triticum aestivum
MAAIRVILPHPHLPIPSWRPQLKPSSSYPRRAVAAPASLSPSPLTASLQLGDVIEAQQFDRQALNEIFEVAREMEAVERSSHGFRSRVLEGYLMATLFYEPSTRTRLSFEAAMRRLGGEVLTTENAREFSSAAKGETLEDTIRTVEGYSDIIVLRHFESGAARRAAATAEIPVINAGDGPGQHPTQALLDVYTIKREIGRLDGIKLGLVGDLANGRTVRSLAYLIAKYQNIKIYFVSPDVVKMKDDIKEYLTSQGVEWEESSDLLDVASRCDVIYQTRIQKERFGERIDHYEAARGKYIVDKKVLGVLPKHAVIMHPLPRLDEITVDVDSDPRAAYFRQAKNGLYIRMALLKLLLVGH

SEQ ID NO: 27892 - protein, 285 aa, Triticum aestivum
MEAVERSSHGFRSRVLEGYLMATLFYEPSTRTRLSFEAAMRRLGGEVLTTENAREFSSAAKGETLEDTIRTVEGYSDIIVLRHFESGAARRAAATAEIPVINAGDGPGQHPTQALLDVYTIKREIGRLDGIKLGLVGDLANGRTVRSLAYLIAKYQNIKIYFVSPDVVKMKDDIKEYLTSQGVEWEESSDLLDVASRCDVIYQTRIQKERFGERIDHYEAARGKYIVDKKVLGVLPKHAVIMHPLPRLDEITVDVDSDPRAAYFRQAKNGLYIRMALLKLLLVGH

SEQ ID NO: 27893 - DNA, 1629 bp, Triticum aestivum
agcgcgagacctctcccgcaagcaaacccaaatcggccgccgtcccctctcctcctccgcccacccccgccgccggtgccgcctcctcgcgagatcccgaccatggagggcagcagcggcctcgacgcggcgatcgagtcgctcctgaacacggagaagcagtgccgcctcgccggggatgtggccggcacccggaaggccgccgtcgacatcgtcgagctctgcttcaaggacgccgcctggaagacgctcaacgaccagatcgtcgtcctctccaagcggaggggccagctcaaacaggctattactgctgttgttcagaaagcgatggagtacattgacgtgacaccagacgtggagacacgtattgagcttatcaaaacattgagcagtgtcgctgctggaaaaatatatgtggagatagagagagctagattgatcaaaagacttgcaaaaattaaagaggagcagggaaagattgatgaagctgctgaaatcatgcaggaagttgctgttgaaacatttggctcgatggcaaagacagagaaacttgcattcattctggagcaggttcggctatgcctggatcgtcaagattatgtgcgcgcacaaattttatccaggaagattagccctagggtctttgatgcggatacatcaaaggacaaaaagaagccaaaggaaggcgataatatggttcaggaagcccctgcagatgtaccttcactcttagaactgaagcgcatctactatgaactgatgattcgctattactcacataacaatgattacctggaaatctgccgttgctacaagtcgatctatgaaattccatcaataaaagaggatccagcaaagtggacaccgattcttaggaagatctgttggttcttggtgctggcacctcatgatccaatgcagtcaagccttctcaatgctacactagaggataaaaacctttctgagatcccaaatttcagattactactgaagcaagttgttactatggaggtgatccagtggacaaagttgtgggaattcttcaaggatgaatacgagaacgagaagaatctccttggaggagctttaggcacaaaagctgcggaggatttgaagctgaggatcattgaacataatatcttggttgtttcaaagtactattcgaggattaccctgaagaggctggcggatcttctttgcttgagcctgcaggaggcggagaagcatatctcggacatggtgaactcaaaggctctgattgccaagatcgacagaccgatggggatcgtgtccttccggacggcccaggacagcaacggggtgctcaactcgtgggcgtcgaacctggagaagctcctggacctggtggagaagagctgcccccaaatacacaaggagacgatgatccccaaggcggtgttgaaagcctgaagtgaaccattttgaactgaatggccttgtttaggttgtgtgcgtagtagactttctgtggatctgaattcactttcactgtatgggtaaaactattctctctgctcaagtgggcgtcgcctgtttgctttgggaacttgtgtgcgaaccggtctggaaatactgtaaccccagggaatgacgaatactatttgctgt

SEQ ID NO: 27894 - protein, 476 aa, Triticum aestivum
SARPLPQANPNRPPSPLLLRPPPPPVPPPREIPTMEGSSGLDAAIESLLNTEKQCRLAGDVAGTRKAAVDIVELCFKDAAWKTLNDQIVVLSKRRGQLKQAITAVVQKAMEYIDVTPDVETRIELIKTLSSVAAGKIYVEIERARLIKRLAKIKEEQGKIDEAAEIMQEVAVETFGSMAKTEKLAFILEQVRLCLDRQDYVRAQILSRKISPRVFDADTSKDKKKPKEGDNMVQEAPADVPSLLELKRIYYELMIRYYSHNNDYLEICRCYKSIYEIPSIKEDPAKWTPILRKICWFLVLAPHDPMQSSLLNATLEDKNLSEIPNFRLLLKQVVTMEVIQWTKLWEFFKDEYENEKNLLGGALGTKAAEDLKLRIIEHNILVVSKYYSRITLKRLADLLCLSLQEAEKHISDMVNSKALIAKIDRPMGIVSFRTAQDSNGVLNSWASNLEKLLDLVEKSCPQIHKETMIPKAVLKA

SEQ ID NO: 27895 - protein, 442 aa, Triticum aestivum
MEGSSGLDAAIESLLNTEKQCRLAGDVAGTRKAAVDIVELCFKDAAWKTLNDQIVVLSKRRGQLKQAITAVVQKAMEYIDVTPDVETRIELIKTLSSVAAGKIYVEIERARLIKRLAKIKEEQGKIDEAAEIMQEVAVETFGSMAKTEKLAFILEQVRLCLDRQDYVRAQILSRKISPRVFDADTSKDKKKPKEGDNMVQEAPADVPSLLELKRIYYELMIRYYSHNNDYLEICRCYKSIYEIPSIKEDPAKWTPILRKICWFLVLAPHDPMQSSLLNATLEDKNLSEIPNFRLLLKQVVTMEVIQWTKLWEFFKDEYENEKNLLGGALGTKAAEDLKLRIIEHNILVVSKYYSRITLKRLADLLCLSLQEAEKHISDMVNSKALIAKIDRPMGIVSFRTAQDSNGVLNSWASNLEKLLDLVEKSCPQIHKETMIPKAVLKA

SEQ ID NO: 27896 - protein, 367 aa, Triticum aestivum
MEYIDVTPDVETRIELIKTLSSVAAGKIYVEIERARLIKRLAKIKEEQGKIDEAAEIMQEVAVETFGSMAKTEKLAFILEQVRLCLDRQDYVRAQILSRKISPRVFDADTSKDKKKPKEGDNMVQEAPADVPSLLELKRIYYELMIRYYSHNNDYLEICRCYKSIYEIPSIKEDPAKWTPILRKICWFLVLAPHDPMQSSLLNATLEDKNLSEIPNFRLLLKQVVTMEVIQWTKLWEFFKDEYENEKNLLGGALGTKAAEDLKLRIIEHNILVVSKYYSRITLKRLADLLCLSLQEAEKHISDMVNSKALIAKIDRPMGIVSFRTAQDSNGVLNSWASNLEKLLDLVEKSCPQIHKETMIPKAVLKA

SEQ ID NO: 27897 - DNA, 960 bp, Triticum aestivum
tcaccaaagctagctgaccgatctgcctgtgcagccatgaagagatgcattgctgccgttctgctggtgctttcactcgaggccctcgccgccgggcgcctctcggctaccgtcgccgacgaccatgtggacaccattcgtctcccgagcaacgatcttgccgatgaagtagcgacggcggctacggagatcggcgccgagaagacgaggccgtggaagtgctgcgaccgcccgttgtgcagcaggtcgatcccgccgcggtgccgctgcatggacgcggtggagcagtgcgacgaggcctgcacccgctgcgaagcgtcccagtccgacccttccaagcgcatctgcaacgaccggtaccacggctggcccgggcccagctgcaccaaccccgacgccgacgacatcgcaactggtccgggagtttctggtccgccggtcgcggtggcaacggaggaagaagttgttagcgaggagagcgccgtcgtcggcacggagaagccgaggccatggaagtgctgcgacgacaccctgtgcaccaggtctgccccgccgacctgcgcctgcaacgacaaggtgaagaagtgcgccaagacctgcaagaagtgcgacaaggacgagtcggacgcttcccgcttcgtgtgccgcgaccgctacttcggctggcccgggcccaagtgcaccgagatctagcctcaccgcggtttctagctaggatgtgcatgcacgccgagctctacatgcggcatccagccttgcactgggtgatggtgaatcgaataaagtgagtcgtccggccggtcagtggcctggtatgtgtaccgagtcacggagtcttgtatgcactggagtagctgcgtacctatgtgttgtcctcgtcgtcgttgttcttttaccacttagtacttagttgcatggtgttactatcatgaataagataagatgtgtcgatcgtagagt

SEQ ID NO: 27898 - protein, 230 aa, Triticum aestivum
SPKLADRSACAAMKRCIAAVLLVLSLEALAAGRLSATVADDHVDTIRLPSNDLADEVATAATEIGAEKTRPWKCCDRPLCSRSIPPRCRCMDAVEQCDEACTRCEASQSDPSKRICNDRYHGWPGPSCTNPDADDIATGPGVSGPPVAVATEEEVVSEESAVVGTEKPRPWKCCDDTLCTRSAPPTCACNDKVKKCAKTCKKCDKDESDASRFVCRDRYFGWPGPKCTEI

SEQ ID NO: 27899 - protein, 218 aa, Triticum aestivum
MKRCIAAVLLVLSLEALAAGRLSATVADDHVDTIRLPSNDLADEVATAATEIGAEKTRPWKCCDRPLCSRSIPPRCRCMDAVEQCDEACTRCEASQSDPSKRICNDRYHGWPGPSCTNPDADDIATGPGVSGPPVAVATEEEVVSEESAVVGTEKPRPWKCCDDTLCTRSAPPTCACNDKVKKCAKTCKKCDKDESDASRFVCRDRYFGWPGPKCTEI

SEQ ID NO: 27900 - protein, 140 aa, Triticum aestivum
MDAVEQCDEACTRCEASQSDPSKRICNDRYHGWPGPSCTNPDADDIATGPGVSGPPVAVATEEEVVSEESAVVGTEKPRPWKCCDDTLCTRSAPPTCACNDKVKKCAKTCKKCDKDESDASRFVCRDRYFGWPGPKCTEI

SEQ ID NO: 27901 - DNA, 1621 bp, Triticum aestivum
atacctctcccgtgccagccagtctcccccctccctccctccacccgccgccgccgccacccacaaaccctagaaaccctagctctcatcccctcgcccgagacagccatggcggagcacgacctgacggcgagcgtggcggcgtggatggacccccacctggtgctcccggtgctggagttcctccaggagcgcggggtctacgccgacgaggagatcctgcggggcaagatccgcctcctcggcggcaccaacatggtcgactacgccatggacatccacaagtcgctccacggcaccgacgacgtccccgccgacatggtcgcccgccgctccgaggtcgtcgagaggctccgggccctccaggaggccgtcgcgcccatagtcgccttcctctccagcccgcagctcgtgcaggagctccacgccgacaagcagtacaacctccacatgctccaggagcgccaccagatcggcccggaccagatcgaggccctctaccagtacgccaagttccagtacgagtgcgggatgtactccgacgccgccgatttcctgtcccagtaccgcgctctgtgcaccaacagcgagaggagcctgagtgccctgtgggggaagctggcggcggagatactgatgcagaactgggatgtcgcgcaggaggagctcaacaggctcaaggagatgattgattccagcagcttcacctcgtcgcctgtgaaccagctccacagcaggatatggctgatgcactggagcctcttcatcttcttcaaccatgagaatggaaggaacgggatcatcgacctcttcttccaggacaggtacctcaatgctatccagaccaacgctccccatcttctgaggtaccttgctgctgcagttgttgtcaacaagaggagaaggaacatgcttaaggaactcatcaaggtcatccagcaggagcagaacagctacaaggatcccatcattgagttcctggagtgcctgtatgtcaagtatgattttgatggcgctcagcagaagctcgtcgagtgcgagcaggttatactgaatgatcctttcctgggcaagcgcgttgaagagaggaatggcatcgctgttcctctgagagacgagttccttgaaaatgctcgcctgttcatttttgagacttactgccgtatacatcgctgcatcgatattggtgtgcttgcggagaagctgaacatgacctatgatgaagccgagttgtggataatgaacatggtcaagagttccaagctagatgccaagattgattcagtgacgggaactctcatcatgacgaccaatcgtgttgatgtccatgagcagattattgagagcatgaagaacctcaatgccaggacctacatgctagcaaagagcgtcgtggatccagggcatgcagcagcacagcaggctgctcggtgagaccaacagatgatctgcagctttgaggcggtaaaaattactttgggaactttgttgttaggcagtgacttcgttgctagtatttgaatcatattgctacagcttatgctgatgttttaaatgctttgtactccttttactcaagtttatcgtcctatgaattaatactgcaaaagacgtttaacgc

SEQ ID NO: 27902 - protein, 477 aa, Triticum aestivum
IPLPCQPVSPLPPSTRRRRHPQTLETLALIPSPETAMAEHDLTASVAAWMDPHLVLPVLEFLQERGVYADEEILRGKIRLLGGTNMVDYAMDIHKSLHGTDDVPADMVARRSEVVERLRALQEAVAPIVAFLSSPQLVQELHADKQYNLHMLQERHQIGPDQIEALYQYAKFQYECGMYSDAADFLSQYRALCTNSERSLSALWGKLAAEILMQNWDVAQEELNRLKEMIDSSSFTSSPVNQLHSRIWLMHWSLFIFFNHENGRNGIIDLFFQDRYLNAIQTNAPHLLRYLAAAVVVNKRRRNMLKELIKVIQQEQNSYKDPIIEFLECLYVKYDFDGAQQKLVECEQVILNDPFLGKRVEERNGIAVPLRDEFLENARLFIFETYCRIHRCIDIGVLAEKLNMTYDEAELWIMNMVKSSKLDAKIDSVTGTLIMTTNRVDVHEQIIESMKNLNARTYMLAKSVVDPGHAAAQQAAR

SEQ ID NO: 27903 - protein, 441 aa, Triticum aestivum
MAEHDLTASVAAWMDPHLVLPVLEFLQERGVYADEEILRGKIRLLGGTNMVDYAMDIHKSLHGTDDVPADMVARRSEVVERLRALQEAVAPIVAFLSSPQLVQELHADKQYNLHMLQERHQIGPDQIEALYQYAKFQYECGMYSDAADFLSQYRALCTNSERSLSALWGKLAAEILMQNWDVAQEELNRLKEMIDSSSFTSSPVNQLHSRIWLMHWSLFIFFNHENGRNGIIDLFFQDRYLNAIQTNAPHLLRYLAAAVVVNKRRRNMLKELIKVIQQEQNSYKDPIIEFLECLYVKYDFDGAQQKLVECEQVILNDPFLGKRVEERNGIAVPLRDEFLENARLFIFETYCRIHRCIDIGVLAEKLNMTYDEAELWIMNMVKSSKLDAKIDSVTGTLIMTTNRVDVHEQIIESMKNLNARTYMLAKSVVDPGHAAAQQAAR

SEQ ID NO: 27904 - protein, 428 aa, Triticum aestivum
MDPHLVLPVLEFLQERGVYADEEILRGKIRLLGGTNMVDYAMDIHKSLHGTDDVPADMVARRSEVVERLRALQEAVAPIVAFLSSPQLVQELHADKQYNLHMLQERHQIGPDQIEALYQYAKFQYECGMYSDAADFLSQYRALCTNSERSLSALWGKLAAEILMQNWDVAQEELNRLKEMIDSSSFTSSPVNQLHSRIWLMHWSLFIFFNHENGRNGIIDLFFQDRYLNAIQTNAPHLLRYLAAAVVVNKRRRNMLKELIKVIQQEQNSYKDPIIEFLECLYVKYDFDGAQQKLVECEQVILNDPFLGKRVEERNGIAVPLRDEFLENARLFIFETYCRIHRCIDIGVLAEKLNMTYDEAELWIMNMVKSSKLDAKIDSVTGTLIMTTNRVDVHEQIIESMKNLNARTYMLAKSVVDPGHAAAQQAAR

SEQ ID NO: 27905 - DNA, 1289 bp, Triticum aestivum
gaactgaacccggaagtccaaagccaacccgtcgcgcagaataacctctcgactctcgagcgcctcctccccgaaccccgaccgtccgctccgcccaccctgcgccaaaatcaaacccccgctcgtccgctccggtgatccgccgctccgggaggcgaagccccacgacccgaccgcgcggagcctctgcccgccatgaccgagtattgggtgagccaaggaaacaaatggtgcgacttgtgcaaaatcttcatatccaacaatcccttcagcatcagaacacatgaactcggcaaacgccacaaggacaatgtcacccaaagattgtctacgatgcaaaaggatggtgctgctaaggaaaaggagcagcaacaagcagcaaaagctctccaactgatagaggctaaagctaaaaagagttaccagaaagatttagagaataaccagagaaacactgatggtgacagttctgcagcacctggagaaggatgggtatttgactcaacttcaggatattattatgataaagccactggactttattacgactcgaactctggtttctattattccgacggattaggcaaatgggtaacccaggaagaggcatacaagtgggcggaaacctcaaaaaccaatgttgcgcaatcctcgacctcgcaaccaaaaccggctggtggaggcgggcctgtcgccggtattaaaggagggccagccccaggtgtggttgtcacgaaaccactgaatccgatgagagctgtgaagggtgctccttcagctcttgctgctaataagagaaaaagagaggacaccaagaagcccaaggtggtctcgaaggaggaggaggcagcactcagagcacgggaagcagctcggaaaagagtggaggacagggagaagcctctcatgggattgtacaagacgtactgagttgtcaatgttcccaagctcaaggggcgcgcccatcagttgcgctaaaacagtggagatgctaatggatggaattgttctgaaagaaaagacggggagaccagcactgagtcccgagctcttgagcgtcagtggcacatgtatgcattgtacaatacctcgtcaaaagttcctaaatcagccacaggttccctttgtgcgaaacatgtaaatgatcagctcatcgattatcatctctcgtgttgtgttttcccaatggattgcatgcatgatataatgccgtcaactgtggccgatgtgagcgctgctggagatagattgtactgccatctctacatcatcagttcatttaagttgtg

SEQ ID NO: 27906 - protein, 244 aa, Triticum aestivum
MTEYWVSQGNKWCDLCKIFISNNPFSIRTHELGKRHKDNVTQRLSTMQKDGAAKEKEQQQAAKALQLIEAKAKKSYQKDLENNQRNTDGDSSAAPGEGWVFDSTSGYYYDKATGLYYDSNSGFYYSDGLGKWVTQEEAYKWAETSKTNVAQSSTSQPKPAGGGGPVAGIKGGPAPGVVVTKPLNPMRAVKGAPSALAANKRKREDTKKPKVVSKEEEAALRAREAARKRVEDREKPLMGLYKTY

SEQ ID NO: 27907 - protein, 198 aa, Triticum aestivum
MQKDGAAKEKEQQQAAKALQLIEAKAKKSYQKDLENNQRNTDGDSSAAPGEGWVFDSTSGYYYDKATGLYYDSNSGFYYSDGLGKWVTQEEAYKWAETSKTNVAQSSTSQPKPAGGGGPVAGIKGGPAPGVVVTKPLNPMRAVKGAPSALAANKRKREDTKKPKVVSKEEEAALRAREAARKRVEDREKPLMGLYKTY

SEQ ID NO: 27908 - DNA, 694 bp, Triticum aestivum
caccggcctcgatctctcctcagaggtacttaggccctaataatttggaagttggtgcaggcaatctcttgcagaacctatggacagttctaaatctccccaaccattgaagaagagccgtactagtttgtctggtacggatggccaccaatttgagaatgacgagcttccgtctgaaactgcatcagataaaacgcctggtttgaagtttgaaacagtagataaagcgcaagatgaatttggagaagacagttccccattgcagcaatcagctgcttccaacgtgtcataccgtggatcgccatgtattggggcattcactatccaatgtgctaggtgcttcaaatggagacttattccaacgaaagagaagtatgaagaaatacgcgagcatattatacaggaaccttttgactgcgaaagagcccgtgaatggaaacctgatgtaacatgcgatgatcaagaagatatttctcaggatggaagcagactctgggctatcgacaaacccaaatattgcacagcctcctgctggatgggaaaggcagattagaataagaggtgaaggaggcaccaaatttgctgatgtgtactacacttctcctactgcgaggaaactgaggtcactggttgaagttgatcggtacctccaagaaaatccagagtatggagcgcagggtgtaacattagctca

SEQ ID NO: 27909 - protein, 157 aa, Triticum aestivum
MDSSKSPQPLKKSRTSLSGTDGHQFENDELPSETASDKTPGLKFETVDKAQDEFGEDSSPLQQSAASNVSYRGSPCIGAFTIQCARCFKWRLIPTKEKYEEIREHIIQEPFDCERAREWKPDVTCDDQEDISQDGSRLWAIDKPKYCTASCWMGKAD

SEQ ID NO: 27910 - protein, 79 aa, Triticum aestivum
MIKKIFLRMEADSGLSTNPNIAQPPAGWERQIRIRGEGGTKFADVYYTSPTARKLRSLVEVDRYLQENPEYGAQGVTLA

SEQ ID NO: 27911 - DNA, 1257 bp, Triticum aestivum
accgcaaagaaccacgcgaaccgaacccacgcaccatcagcgaagaggagagggggcggccaaagacaagagaaaacgcagccgccgccgggaggagagcgcagcgtgggagcaaggagcggcagccggcaggcaatgggcaacagcatcggcggccggcgcaagggcgccaaggtgatgcagctggacggcaccgccttcagggtgaagccgccggcgtacgcgggcgccgtgctgcgcgaccacccgggcttccagctgctcgagtcggagcaggtcaagctgctcggcgtccgcgcgcgcccgctcgagcaggacgcgctgctccgcccgggccagctctacttcctcgtcgcgctgccccgccccaccgtgcccccgcgccgcgcctggtccggcgcgctccacgtcggcgcgcgcgagaggctcgagtcgctcatgctcacgcgccgctccacctccgacctcaccttcccgacctcgggcaccgcgccggcctccccgatgtccaccgcctccgagggcgggccggtccagctcaggatgcgcctgcccaaggcgcaggtcgccaagcttatgggcgagagccgggacgccgccgaggcggccgctaagatcatgcagctctgcgccgccaacggcgctgtgacgccggagcggagcccgcggttcctgccgacggcggactggggcactggtgggttcgcgcagacgccagagcggagcccgcggttcgtgccgacgccggactggggcgccggcaggttcgcgcaaaccccagagcggagtcccaggttcgccgtcacgcccgagtggggtgccaggttcatgatgccgacgacgccggagaggggcgtagagacggcgaagacgccggataggtggcccgctttaccccgcacgccggagtatgcatcagcggacgtcaaggccagccggaaggagaagcgaacgcggttcctggccttgccggatgagatcatagcatgatggcttctcgtccacctgaagtgatagatcgatcgaccacagattgccggagctggggacgagaggccgccgacggtttcctgcctcgcgcctcgcccgcttcttcttcttctccttctccttcttcttcttcatacggcatggagcgtcgttttcctctcttgtttacctttttagcctcggcctgcgataacattgctgcgagctgtggtgctctcagtagttagcttaggggagatgtatatggacctctatgtataaacttac

SEQ ID NO: 27912 - protein, 329 aa, Triticum aestivum
TAKNHANRTHAPSAKRRGGGQRQEKTQPPPGGERSVGARSGSRQAMGNSIGGRRKGAKVMQLDGTAFRVKPPAYAGAVLRDHPGFQLLESEQVKLLGVRARPLEQDALLRPGQLYFLVALPRPTVPPRRAWSGALHVGARERLESLMLTRRSTSDLTFPTSGTAPASPMSTASEGGPVQLRMRLPKAQVAKLMGESRDAAEAAAKIMQLCAANGAVTPERSPRFLPTADWGTGGFAQTPERSPRFVPTPDWGAGRFAQTPERSPRFAVTPEWGARFMMPTTPERGVETAKTPDRWPALPRTPEYASADVKASRKEKRTRFLALPDEIIA

SEQ ID NO: 27913 - protein, 284 aa, Triticum aestivum
MGNSIGGRRKGAKVMQLDGTAFRVKPPAYAGAVLRDHPGFQLLESEQVKLLGVRARPLEQDALLRPGQLYFLVALPRPTVPPRRAWSGALHVGARERLESLMLTRRSTSDLTFPTSGTAPASPMSTASEGGPVQLRMRLPKAQVAKLMGESRDAAEAAAKIMQLCAANGAVTPERSPRFLPTADWGTGGFAQTPERSPRFVPTPDWGAGRFAQTPERSPRFAVTPEWGARFMMPTTPERGVETAKTPDRWPALPRTPEYASADVKASRKEKRTRFLALPDEIIA

SEQ ID NO: 27914 - protein, 270 aa, Triticum aestivum
MQLDGTAFRVKPPAYAGAVLRDHPGFQLLESEQVKLLGVRARPLEQDALLRPGQLYFLVALPRPTVPPRRAWSGALHVGARERLESLMLTRRSTSDLTFPTSGTAPASPMSTASEGGPVQLRMRLPKAQVAKLMGESRDAAEAAAKIMQLCAANGAVTPERSPRFLPTADWGTGGFAQTPERSPRFVPTPDWGAGRFAQTPERSPRFAVTPEWGARFMMPTTPERGVETAKTPDRWPALPRTPEYASADVKASRKEKRTRFLALPDEIIA

SEQ ID NO: 27915 - DNA, 1659 bp, Triticum aestivum
gtcacccggggagaggcggcggcgaccaccccggggactctccgatggcgacggagaaggcgcggcagctcctggcccgcctcgccgccaccccggacgccgccgttcctaacctccccttcctccaccgcgcactcctcctccctctcctctccgccgcctccgccctcctacgcctccccgtcatcctctcctcctctccgctacgctcgcgacggaccctaccggtccccgtcatcagcgtaggaaacctcacctggggcggcaacggaaagacacccatggtcgacttcctggcccgcaggtttcacagtatgggcatctcgccactcatcctaacaaggggttatgcgggtggcgatgaatctaagatgctccggaggcgccttgctgatacttccaccaagattggtgttggcgcaaaccgggctgccgtgggttcttccatgttgcaaaagtatggccatgtcgatccttgtgatgccttccgccgggagaagttagggtgcaaccgggtggcaagcggtaaaagtgcgaaaattggagtcgctatactggatgacggaatgcaggcagcaccggagtctgcttcgagatgtggagattgtgatggtcaatgggttgacaccttggggaaatactcatttcattccacgaggacccatgagggaaccgttgagcgcacttactcgagctgatatagtggttattcatcatgcggatctggcttgtgaagcgcagctggaaacaattgcacgtacagtccaggatagtggcacaacatgttcagtgttctttagtaaattggccccatcacatattttcgaggttcatcaaccattacagaaaatatctcttaatgtgttgggtggcatgattgtgctatgtgtttctgcgattggctgcccagatgctttcatacatacagtcagagagattggtccacttaatgttgataggttggatttcagtgatcatcatttcttcaatgattatgacctagaattaatccaagaaagagtgaggcagcttgtggatcaacataacaaagagaccgtagtcttagttactgagaaggattacgaccgtgatccagatgtccttagaatgttgggcgtgaaggtttgggttctgtcttcttctttgcaaattatggccctcaaggaacaaggagaagatgaattgctgaggaaattaaaagacattatcacagcaactaggcatgtggtccagccatgagttgctgatggatctggttatattcggctgggcatatcttgaagcaaaaacagttttccattggtcctgttaattccgtataatgttatatcagatttatctggttaattcaaatcctgttttggcgttttggaacatgcagtattttagttttttttttcaactgggtcagtggtctgagcctccagttaacttgaactggatctaacaagataatgaggaggggattcccgtctattgctcatgtgatgcttttggtttcagtttcttttggaaaaagttgttaggtaaatatatccatcaatactctgatatattacaatgctcacttagtcctgttgacattctggttattacaatgctcctattctaacctacacaatactacagtacattccaaggtactacgtgcacctactt

SEQ ID NO: 27916 - protein, 231 aa, Triticum aestivum
HPGRGGGDHPGDSPMATEKARQLLARLAATPDAAVPNLPFLHRALLLPLLSAASALLRLPVILSSSPLRSRRTLPVPVISVGNLTWGGNGKTPMVDFLARRFHSMGISPLILTRGYAGGDESKMLRRRLADTSTKIGVGANRAAVGSSMLQKYGHVDPCDAFRREKLGCNRVASGKSAKIGVAILDDGMQAAPESASRCGDCDGQWVDTLGKYSFHSTRTHEGTVERTYSS

SEQ ID NO: 27917 - protein, 226 aa, Triticum aestivum
MTECRQHRSLLRDVEIVMVNGLTPWGNTHFIPRGPMREPLSALTRADIVVIHHADLACEAQLETIARTVQDSGTTCSVFFSKLAPSHIFEVHQPLQKISLNVLGGMIVLCVSAIGCPDAFIHTVREIGPLNVDRLDFSDHHFFNDYDLELIQERVRQLVDQHNKETVVLVTEKDYDRDPDVLRMLGVKVWVLSSSLQIMALKEQGEDELLRKLKDIITATRHVVQP

SEQ ID NO: 27918 - protein, 217 aa, Triticum aestivum
MATEKARQLLARLAATPDAAVPNLPFLHRALLLPLLSAASALLRLPVILSSSPLRSRRTLPVPVISVGNLTWGGNGKTPMVDFLARRFHSMGISPLILTRGYAGGDESKMLRRRLADTSTKIGVGANRAAVGSSMLQKYGHVDPCDAFRREKLGCNRVASGKSAKIGVAILDDGMQAAPESASRCGDCDGQWVDTLGKYSFHSTRTHEGTVERTYSS

SEQ ID NO: 27919 - DNA, 1039 bp, Triticum aestivum
acacacacacacacagagagagagagagagagagagagagagagagagagagagagagagatggcagccgctggagttagcagggagcagaggtggagcctcgccggcgcaaccgcgctggtcaccggaggcagcagaggaattggacatgcaattgtggaggagcttgtcgggctcggggcgcgggtgcacacgtgctccgagaacgcggtggagctggaggggtgccgtcggcggtgggaggagatgaagcttccggtcaccgtctccgtctgcgacgtctccgtgcgagccgagagggagaagctcatggagtcggcgaagcaaaccttcgacggcaagctcgacatactagtaaacaacgtgggacggaatgtggccaaggcgaccgtggagtgcacggcggaggagtactcgcatctcatgtcgactaacttagagtcggcgttccacctaagccagctcgcacacccctttctccgagacgcctccatcgccggaggaggcagcgtcgttaacatctcctcagttgcaagctcacttggctactccaccctcgcactgtactgcatatctaaaggaggagttaaccagcttacaaggagccttgctgccgagtgggctcaagataagatccgtgtcaactccgtcgctccgggtgggatcaataccgagctgcaaaacagtgtggatccaaaggtcatagaaaatacgttgttgagaactccgatgcatcggctcggtgagccagtggaggtggcgtcgatggtgtcgttcctttgcatgccagcagcttcgttcgtcaccggccaggttatgtacgtcgatggaggccgaaccattagtggctaatcaattattccaacctactttagtaaccattaagctcctctcccggttgatcggtgcgaacaaaattaggtttttggttgtgatatgtattctaaaaaggtggttgtgagttgtgagcggtaagaaagttattataaactttcagctatggaaaatttgaaagttgtttggttgagggacaaccgtg

SEQ ID NO: 27920 - protein, 283 aa, Triticum aestivum
THTHTEREREREREREREREMAAAGVSREQRWSLAGATALVTGGSRGIGHAIVEELVGLGARVHTCSENAVELEGCRRRWEEMKLPVTVSVCDVSVRAEREKLMESAKQTFDGKLDILVNNVGRNVAKATVECTAEEYSHLMSTNLESAFHLSQLAHPFLRDASIAGGGSVVNISSVASSLGYSTLALYCISKGGVNQLTRSLAAEWAQDKIRVNSVAPGGINTELQNSVDPKVIENTLLRTPMHRLGEPVEVASMVSFLCMPAASFVTGQVMYVDGGRTISG

SEQ ID NO: 27921 - protein, 263 aa, Triticum aestivum
MAAAGVSREQRWSLAGATALVTGGSRGIGHAIVEELVGLGARVHTCSENAVELEGCRRRWEEMKLPVTVSVCDVSVRAEREKLMESAKQTFDGKLDILVNNVGRNVAKATVECTAEEYSHLMSTNLESAFHLSQLAHPFLRDASIAGGGSVVNISSVASSLGYSTLALYCISKGGVNQLTRSLAAEWAQDKIRVNSVAPGGINTELQNSVDPKVIENTLLRTPMHRLGEPVEVASMVSFLCMPAASFVTGQVMYVDGGRTISG

SEQ ID NO: 27922 - protein, 201 aa, Triticum aestivum
MKLPVTVSVCDVSVRAEREKLMESAKQTFDGKLDILVNNVGRNVAKATVECTAEEYSHLMSTNLESAFHLSQLAHPFLRDASIAGGGSVVNISSVASSLGYSTLALYCISKGGVNQLTRSLAAEWAQDKIRVNSVAPGGINTELQNSVDPKVIENTLLRTPMHRLGEPVEVASMVSFLCMPAASFVTGQVMYVDGGRTISG

SEQ ID NO: 27923 - DNA, 869 bp, Triticum aestivum
aatccatcgagctcccgaagtcgagtcccatcccagttcccacttctcacccacccacacgcagcgaggaaccagtcgaggaggaggaaggagaaggaggagccatggccgagctgctgtttgcccccgccgtggccggcctcgtccacctgccggaggtgctcgagcgcctcgccgccgcggacgccgaccaccgcgaccacgcccaccaccacgccgcgcacgggcacgggcacgggcacggccacccacgcgcgcagattgggggcgtgggcggcggcgcgcccgtggacatcgtggagacccccggcgagtacgctttcctgctcgacgtccccggcctctccaagtccgacatccaggtgactctggaggaggacaacgtgctggtgatgaagagcgccagcaacggcggcggggccaacgggaagcggaagcgggaggaggaggaggcggactgccgctacatccggctggagcgccgcgcgtcgccgcggtcgttcgcgcgcaagttccggctgcccgaggacgcggacgccggcgccgtggccgcgcgctgcgagaacggcgtgctcaccgtcaccgtcaagaagcggccgccgcccgagaagaagaccaagtccgtccaggtcgccatcgcctgaccgttcgagccttccttcagtcacgcgaaccttcggtacctcgtcggcgtttgtcgtcagtgatcgttctagcagtagattagtgtggcgagtctggtagatttgggtcttctcaagtcatgtggtctcatgctctgttcgtggtctggctggagattagttgtggtcatcttttgtgaatcttgctgttaatggaactatggagcacgaattgttggctgtcgg

SEQ ID NO: 27924 - protein, 241 aa, Triticum aestivum
IHRAPEVESHPSSHFSPTHTQRGTSRGGGRRRRSHGRAAVCPRRGRPRPPAGGARAPRRRGRRPPRPRPPPRRARARARARPPTRADWGRGRRRARGHRGDPRRVRFPARRPRPLQVRHPGDSGGGQRAGDEERQQRRRGQREAEAGGGGGGLPLHPAGAPRVAAVVRAQVPAARGRGRRRRGRALRERRAHRHRQEAAAAREEDQVRPGRHRLTVRAFLQSREPSVPRRRLSSVIVLAVD

SEQ ID NO: 27925 - protein, 213 aa, Triticum aestivum
SIELPKSSPIPVPTSHPPTRSEEPVEEEEGEGGAMAELLFAPAVAGLVHLPEVLERLAAADADHRDHAHHHAAHGHGHGHGHPRAQIGGVGGGAPVDIVETPGEYAFLLDVPGLSKSDIQVTLEEDNVLVMKSASNGGGANGKRKREEEEADCRYIRLERRASPRSFARKFRLPEDADAGAVAARCENGVLTVTVKKRPPPEKKTKSVQVAIA

SEQ ID NO: 27926 - protein, 179 aa, Triticum aestivum
MAELLFAPAVAGLVHLPEVLERLAAADADHRDHAHHHAAHGHGHGHGHPRAQIGGVGGGAPVDIVETPGEYAFLLDVPGLSKSDIQVTLEEDNVLVMKSASNGGGANGKRKREEEEADCRYIRLERRASPRSFARKFRLPEDADAGAVAARCENGVLTVTVKKRPPPEKKTKSVQVAIA

SEQ ID NO: 27927 - DNA, 561 bp, Triticum aestivum
  misc_feature (355)..(358): n is a, c, g, or t
ctcctctcttcgtgagcctcgactcgtgtctcctctccttccacagagagagggagcaccaccgccgcacggcccgcgtgacctagaccccgccctccgccgccgtattgattcggctgcgctgctgggagctatggcgggcggctctaggggcggcttccccgcctggatgaccgccgccgcggcgcgcatcgacctctccggcggcgccgccgccacgtccggctcacagcctccccaacctgggcctccggccgcggtggtggccgaccaggagctcgggatggccgagcgtgccctctccgccgcaagcgccgccttcatctccgccatcatcgttaaccctctcgacgtnnnnaagacgaggttgcaggcgcaggccgcgggggtgccttactaccaagcaccccagatggcggcgctcggcccggatgcgatactgtctgagttgcgatgctctccatcatgcacacgtggtatcattttgggaagcgaacctatttgcccacccgattgctttcagtacaagggaacagttgatgtattcttgaaagttgttag

SEQ ID NO: 27928 - protein, 186 aa, Triticum aestivum
  misc_feature (118)..(119): Xaa can be any naturally occurring amino acid
SSLREPRLVSPLLPQREGAPPPHGPRDLDPALRRRIDSAALLGAMAGGSRGGFPAWMTAAAARIDLSGGAAATSGSQPPQPGPPAAVVADQELGMAERALSAASAAFISAIIVNPLDXXKTRLQAQAAGVPYYQAPQMAALGPDAILSELRCSPSCTRGIILGSEPICPPDCFQYKGTVDVFLKVV

SEQ ID NO: 27929 - protein, 142 aa, Triticum aestivum
  misc_feature (74)..(75): Xaa can be any naturally occurring amino acid
MAGGSRGGFPAWMTAAAARIDLSGGAAATSGSQPPQPGPPAAVVADQELGMAERALSAASAAFISAIIVNPLDXXKTRLQAQAAGVPYYQAPQMAALGPDAILSELRCSPSCTRGIILGSEPICPPDCFQYKGTVDVFLKVV

SEQ ID NO: 27930 - protein, 130 aa, Triticum aestivum
  misc_feature (62)..(63): Xaa can be any naturally occurring amino acid
MTAAAARIDLSGGAAATSGSQPPQPGPPAAVVADQELGMAERALSAASAAFISAIIVNPLDXXKTRLQAQAAGVPYYQAPQMAALGPDAILSELRCSPSCTRGIILGSEPICPPDCFQYKGTVDVFLKVV

SEQ ID NO: 27931 - DNA, 1009 bp, Triticum aestivum
acacacaccacaaggcattccactttgtaagctcatttgattccaggaagctcttcagtctagagcagccagccagccaccatggcacggcgctttctggctgtgttcgccgtcgccctggcgctctcgcagtccgcctcggccaagtcctggctggacaagaggttcaacactgacggcaccgtccgcacgggatacgacgcttctggacaggaggtggtgatgctcaatctcaaccagcaatccggcgccgccggcttcaactccaaggagcagtacctctacggtgagttcagcatccagatgaagctcatcaccggaaactccgccggcaccgtcgcctgcatctacctttcttctggtgacgacgagtggcgcgacgagatcgacatggagttcatgggcaactcgagcggccacccggtggtgctcaacaccaacgtgtgggccaacggcgacggcaagaaggagcaccagttcgacctctggttcgaccccgccgccgactaccacacctacaccatcatttggaacccggagaacatcctcttcaaggtggacaacctcttcatccggtccttcaagcgcttcgctggcctcccctcccctagctccaagcccatgaggctgcacgccacgctctgggacggcagctactgggccaccgagaagggcaagatcccgatcaactggtccaacgcgccttttgtcgtctcctaccgcaacttctacgccaacacctgcgtcagcggtggcgcgtgccatgccggcagcgacaggtggatgaagaagcagctcgacgccgccgagtggggcaccgtcaagtgggcggagcgcagttacatgcgctataactactgcgacgatgggtacaggttcccgcaggggatgcccggcgagtgcagccgctactgagcccagcctgactgcccgggcatccagtgttgatattgatattttttttcttggaatctctttgtgaatttgtgattaaaaagcagccctacag

SEQ ID NO: 27932 - protein, 277 aa, Triticum aestivum
MARRFLAVFAVALALSQSASAKSWLDKRFNTDGTVRTGYDASGQEVVMLNLNQQSGAAGFNSKEQYLYGEFSIQMKLITGNSAGTVACIYLSSGDDEWRDEIDMEFMGNSSGHPVVLNTNVWANGDGKKEHQFDLWFDPAADYHTYTIIWNPENILFKVDNLFIRSFKRFAGLPSPSSKPMRLHATLWDGSYWATEKGKIPINWSNAPFVVSYRNFYANTCVSGGACHAGSDRWMKKQLDAAEWGTVKWAERSYMRYNYCDDGYRFPQGMPGECSRY

SEQ ID NO: 27933 - protein, 230 aa, Triticum aestivum
MLNLNQQSGAAGFNSKEQYLYGEFSIQMKLITGNSAGTVACIYLSSGDDEWRDEIDMEFMGNSSGHPVVLNTNVWANGDGKKEHQFDLWFDPAADYHTYTIIWNPENILFKVDNLFIRSFKRFAGLPSPSSKPMRLHATLWDGSYWATEKGKIPINWSNAPFVVSYRNFYANTCVSGGACHAGSDRWMKKQLDAAEWGTVKWAERSYMRYNYCDDGYRFPQGMPGECSRY

SEQ ID NO: 27934 - protein, 203 aa, Triticum aestivum
MKLITGNSAGTVACIYLSSGDDEWRDEIDMEFMGNSSGHPVVLNTNVWANGDGKKEHQFDLWFDPAADYHTYTIIWNPENILFKVDNLFIRSFKRFAGLPSPSSKPMRLHATLWDGSYWATEKGKIPINWSNAPFVVSYRNFYANTCVSGGACHAGSDRWMKKQLDAAEWGTVKWAERSYMRYNYCDDGYRFPQGMPGECSRY

SEQ ID NO: 27935 - DNA, 1319 bp, Triticum aestivum
ccaccactcctggcatagatctccacctcccggtgagtgaccatggcggaggccgcaggagcgactcctctcctcgctggcctcccggacgagatcaccgtctcggagatcctcgctcgcctgccccccaaacccctcctccgctgccgcgccgtcagccccgcgtggcgccgcgccacctccacccgcgatttcctcctgtcccaccacgcccgccagcccgccctgcccctcctctgcagccacagcgacgtagccgacggcggccagtccctggacgtcacgctcttcgaccaccgtgcaggagtcgccgccgccgaccagttccagcgcgtcgcgcgactgaaaacaccccccttggaaggggggattgacgggagtgaaagtttcactcccctcttctatccggtggcctcctgcgacggcctcctcctcctctccatcgagtgtgacctctgcatctgcaacccggcgactcggcagtatgctcccctcgagcagctcgatggcttcatgaccgtggggttgtaccctcaccctcttaccggcgagtaccggctgttgctgtaccatgaaacagatcaacgtgccatctatgttttctcaattggctccaaccagccgccgaggcgcatcgggcgccctgatccgttggctggtgacgggcttctgttccgtggtagcctgcattggcacactggcaaccggataatggtattcgacaccgccactgagtcgttccggcagatccgtgccccggttgcccatgaggactatggacgactgtttgagatggatgacatgcttggcatcttctttcttaatgatgaaaagacgaccgttgatatttgggtgatgcaggactaccaaggcgaggtctgggctttcaagtgtcgggttgaattgccggttgccgagatcagggaccggtgtcaaaattctagccatattgaggaagtgatggttgttaatggtgatggtgagttgctcgtgttggtcggttttgaggactggctgtttcaggttgatattgatggcaagttgattgccagtttccatgccagaggcctcccttcctataatattgtgcacaagcaaactcttgttcaacataccttctttccgacactcgagggttatgttatgaatgattcgcctttcatttgaccagatgattatgttgtcaacgcttaggaatattgagtgttgtggtgtttcttattggcctagctctgcatgtccacatgagctgttgtatgtatcaactagatccattattaagcttctttgttcttggttgatgaatataaaaaagtatg

SEQ ID NO: 27936 - protein, 374 aa, Triticum aestivum
MAEAAGATPLLAGLPDEITVSEILARLPPKPLLRCRAVSPAWRRATSTRDFLLSHHARQPALPLLCSHSDVADGGQSLDVTLFDHRAGVAAADQFQRVARLKTPPLEGGIDGSESFTPLFYPVASCDGLLLLSIECDLCICNPATRQYAPLEQLDGFMTVGLYPHPLTGEYRLLLYHETDQRAIYVFSIGSNQPPRRIGRPDPLAGDGLLFRGSLHWHTGNRIMVFDTATESFRQIRAPVAHEDYGRLFEMDDMLGIFFLNDEKTTVDIWVMQDYQGEVWAFKCRVELPVAEIRDRCQNSSHIEEVMVVNGDGELLVLVGFEDWLFQVDIDGKLIASFHARGLPSYNIVHKQTLVQHTFFPTLEGYVMNDSPFI

SEQ ID NO: 27937 - protein, 217 aa, Triticum aestivum
MTVGLYPHPLTGEYRLLLYHETDQRAIYVFSIGSNQPPRRIGRPDPLAGDGLLFRGSLHWHTGNRIMVFDTATESFRQIRAPVAHEDYGRLFEMDDMLGIFFLNDEKTTVDIWVMQDYQGEVWAFKCRVELPVAEIRDRCQNSSHIEEVMVVNGDGELLVLVGFEDWLFQVDIDGKLIASFHARGLPSYNIVHKQTLVQHTFFPTLEGYVMNDSPFI

SEQ ID NO: 27938 - DNA, 1251 bp, Triticum aestivum
atcacgcggcgctaacgagtagcgacgcggacaggggttgcgtgacactaccggcactgcagaagcacgggagccatggcgcgggaggaggaaggacccgcaatgatggacgccgcggagcgacgcctccgcgtggtctccgcgcacctcgagccgcaggccggcgccaccgctggcctcgcctctaaccccaccgccggcgagtacgcccacgtgcagggctacagcgttgttcttcctgaaaagttgcaaactggaaagtggaacgtgtaccgatctgcagagtcacctctgcgtttaattaacagatttcctgctactccagacattggaacactgcatgataattttgtgtatgcagtcgagacttttacagattgtaggtatctgggtacaagagtgtgcgctgatggagcagtcggagactacaaatggatgacgtatggagaagctagtacgagcagaactgcaataggttctggtcttatttatcatggaatatctgaaggtgcacgcattggtctgtattttataaacagacctgagtggatcataattgatcatgcttgtgctgcatattcatatgtatctgtaccactttatgatactcttggtccagatgcagttcagttcattgtgaaccatgcaacagtagaaactattttctgtgtgcctcaaacactaagcactctgctaagcttcctaactcaaatgccatgtgtccgccttatagtggtagttggtggagacaatgcaaatacgccatctacaacagcagctgctggagtggaaatcataacttactccaggctacacagccagggaaagatgagttctcaaacttaccgtcctccaaaacctgaagatgttgccactatctgctacacgagtggcactactggcacaccaaagggagctgttctttctcatgagaacttaatcgcgaatgttgcaggatcaagcttgggcgttaagttttacccctccgacgtgtatatctcatacctacctttagctcacatctatgagagagctaaccaaattgcactgcttcactatggagttgccattggattttaccaaggggtatgtagattttgaactatttaagatgagagctagtagtactttgcattgttgtatagaaactgaacgacatgaaggacatgtattgagagaagtaactgataatatgtgatcttgtataagttttactcatctaatgcaatagtttgcacttgagttgttttt

SEQ ID NO: 27939 - protein, 341 aa, Triticum aestivum
MAREEEGPAMMDAAERRLRVVSAHLEPQAGATAGLASNPTAGEYAHVQGYSVVLPEKLQTGKWNVYRSAESPLRLINRFPATPDIGTLHDNFVYAVETFTDCRYLGTRVCADGAVGDYKWMTYGEASTSRTAIGSGLIYHGISEGARIGLYFINRPEWIIIDHACAAYSYVSVPLYDTLGPDAVQFIVNHATVETIFCVPQTLSTLLSFLTQMPCVRLIVVVGGDNANTPSTTAAAGVEIITYSRLHSQGKMSSQTYRPPKPEDVATICYTSGTTGTPKGAVLSHENLIANVAGSSLGVKFYPSDVYISYLPLAHIYERANQIALLHYGVAIGFYQGVCRF

SEQ ID NO: 27940 - protein, 332 aa, Triticum aestivum
MMDAAERRLRVVSAHLEPQAGATAGLASNPTAGEYAHVQGYSVVLPEKLQTGKWNVYRSAESPLRLINRFPATPDIGTLHDNFVYAVETFTDCRYLGTRVCADGAVGDYKWMTYGEASTSRTAIGSGLIYHGISEGARIGLYFINRPEWIIIDHACAAYSYVSVPLYDTLGPDAVQFIVNHATVETIFCVPQTLSTLLSFLTQMPCVRLIVVVGGDNANTPSTTAAAGVEIITYSRLHSQGKMSSQTYRPPKPEDVATICYTSGTTGTPKGAVLSHENLIANVAGSSLGVKFYPSDVYISYLPLAHIYERANQIALLHYGVAIGFYQGVCRF

SEQ ID NO: 27941 - protein, 331 aa, Triticum aestivum
MDAAERRLRVVSAHLEPQAGATAGLASNPTAGEYAHVQGYSVVLPEKLQTGKWNVYRSAESPLRLINRFPATPDIGTLHDNFVYAVETFTDCRYLGTRVCADGAVGDYKWMTYGEASTSRTAIGSGLIYHGISEGARIGLYFINRPEWIIIDHACAAYSYVSVPLYDTLGPDAVQFIVNHATVETIFCVPQTLSTLLSFLTQMPCVRLIVVVGGDNANTPSTTAAAGVEIITYSRLHSQGKMSSQTYRPPKPEDVATICYTSGTTGTPKGAVLSHENLIANVAGSSLGVKFYPSDVYISYLPLAHIYERANQIALLHYGVAIGFYQGVCRF

SEQ ID NO: 27942 - DNA, 1512 bp, Triticum aestivum
cagtccccgtcccagtcccaatcctaatcccgcccccaccagcggagcggcgtagccgccgcctcggccgccctcggcgcccgcgcctgagagccggcgacgatggcgaaccgcacggaccccctggcccggagcatccacggcaccaaccctcagaacctggtggagaagatcgtgcgggccaagatctaccagagcaactactggaaggagcagtgcttcggcctcacggcggagaccctggtcgacaaggccatggagctcgaccacaccggcggcacccacggcggcaaccgcaggccgacccccttcctctgcctcgccctcaagatgctccagatccagcccgacaaggaaatcgtcgtcgagttcatcaagaacgaggactacaagtatgtccgggttcttggggccttctacctgcgcctcactggcaccgtcgccgacgtttaccagtacctcgagccgctttacaacgactaccgcaagattaggcaaaagctcagcgatggaaaattcacgctgacacacgttgacgaattcattgacgagctcctgaccaaggactatagctgcgacactgccctcccccgcattcagaaaagatggatccttgaagcttctggaactctagaacctagaagaagtgcacttgaagacgattttgatgaagaggaggaagataaggaggatggacagcctatggacgtagacgagcctaacactcgtgaaaaggaccatcttcgtggaaggagccccaccaaagaacgggatagggaaagggagagggacagagacaggaaacacgaaaggcatcacagggaccgagatcatgacagagatcgggatcatgacagggactatggaagaggccgggaaagagatcgagacagagatagaggccgtgaaagagatagagagagggatagggaacgagaccgtcaccggacccgagatgacgattacaaccgagatcgagaccgggatggcagggaaagggaacgccgggacagagaccgtggcaggcacaggagttgctcaaggagcaggagccgggatcggcgtgaaagagaccgtgaagtgggagagctccgtaagaggcgtggccgtggtagtgccagtcctcctcgagggcgtgccgaggatggtccgagggaggagcctaataagaagagaaaggaaaagaaagagaagaagggcagcgggaacggtccagatcctaatgatccagagattatagagatgaacaagctgcgtgcatcgatagggttgggaccactgaagtagtggcacattgctgtaatgtattttgaagctccaagcttaaaaccaacaaaggattagctagcatttttcttttaacactgcaagcttgtcaaaataccctgtaatgtaactttggcggtttggcctgcttttctggctctaccttccgcggtcttttttgcatttttcttgagacacagtgaaggctgatgaaggaaagcatttgatttcaactgtattgtgttg

SEQ ID NO: 27943 - protein, 394 aa, Triticum aestivum
MANRTDPLARSIHGTNPQNLVEKIVRAKIYQSNYWKEQCFGLTAETLVDKAMELDHTGGTHGGNRRPTPFLCLALKMLQIQPDKEIVVEFIKNEDYKYVRVLGAFYLRLTGTVADVYQYLEPLYNDYRKIRQKLSDGKFTLTHVDEFIDELLTKDYSCDTALPRIQKRWILEASGTLEPRRSALEDDFDEEEEDKEDGQPMDVDEPNTREKDHLRGRSPTKERDRERERDRDRKHERHHRDRDHDRDRDHDRDYGRGRERDRDRDRGRERDRERDRERDRHRTRDDDYNRDRDRDGRERERRDRDRGRHRSCSRSRSRDRRERDREVGELRKRRGRGSASPPRGRAEDGPREEPNKKRKEKKEKKGSGNGPDPNDPEIIEMNKLRASIGLGPLK

SEQ ID NO: 27944 - protein, 343 aa, Triticum aestivum
MELDHTGGTHGGNRRPTPFLCLALKMLQIQPDKEIVVEFIKNEDYKYVRVLGAFYLRLTGTVADVYQYLEPLYNDYRKIRQKLSDGKFTLTHVDEFIDELLTKDYSCDTALPRIQKRWILEASGTLEPRRSALEDDFDEEEEDKEDGQPMDVDEPNTREKDHLRGRSPTKERDRERERDRDRKHERHHRDRDHDRDRDHDRDYGRGRERDRDRDRGRERDRERDRERDRHRTRDDDYNRDRDRDGRERERRDRDRGRHRSCSRSRSRDRRERDREVGELRKRRGRGSASPPRGRAEDGPREEPNKKRKEKKEKKGSGNGPDPNDPEIIEMNKLRASIGLGPLK

SEQ ID NO: 27945 - protein, 318 aa, Triticum aestivum
MLQIQPDKEIVVEFIKNEDYKYVRVLGAFYLRLTGTVADVYQYLEPLYNDYRKIRQKLSDGKFTLTHVDEFIDELLTKDYSCDTALPRIQKRWILEASGTLEPRRSALEDDFDEEEEDKEDGQPMDVDEPNTREKDHLRGRSPTKERDRERERDRDRKHERHHRDRDHDRDRDHDRDYGRGRERDRDRDRGRERDRERDRERDRHRTRDDDYNRDRDRDGRERERRDRDRGRHRSCSRSRSRDRRERDREVGELRKRRGRGSASPPRGRAEDGPREEPNKKRKEKKEKKGSGNGPDPNDPEIIEMNKLRASIGLGPLK

SEQ ID NO: 27946 - DNA, 1249 bp, Triticum aestivum
agggtttttctcactgccagcacgccactccccctccccaccccccttcagcagcgcaacacaccaacgccgccgccgcgccgccagcccaccgggagcaccgccggagaaaccagccatggatcggtaccagcgggtcgagaagccgcggcccgaggccgccgccatcagcgagaacgagatccgtatcaccacacagggcctcatccgcaactacgtcacctacgccacctccctcctccaggaaaaacgggtgaaagaaattgtgttgaaggccatgggacaagctatcagcaagacagtggctattactgagatcataaagaaaaggatccctgggttgcatcaagatacaacaatcagttcagtcagtattactgatgtatgggaacccattgaggaaggccttgtaccattggagatgactcgtcatgtttcaatgatctcaatctccttgtcacctaaggagctcgacacaagttcacccggatatcaagctccattgcatgcagagccacttaaaccaaggtaccagcaagttcagcgatatcaacaacagcaccagccaagacaaaatcaaggtcaaacagattcatatgtacgtggaagaggcagagggagaggaaggggctggggtggtaggggaggatatggtggaggttatggtgggtatgataataaccaaggaggttatggtggatatagcaaccagggaggatatggccacaaccaaggtgggtatggcaatcatggaggttacggccacaaccaaggtgggtatggcaaccagggaggttacggcaaccagggagggtacggccaaaaccaaggtggatatggagggggttatggttatgaccaaggtggatatgggggatatgataatggtggctggaattacaaccagaacagaggccgtggtggcggtggacgaggaagaggcaactggggatacagtggtccaggatacgagcgcggtggacgaggtgcaggcggcccaggtggcccaggcggcaggggatacgtgcggggccgtggtcggatgggtcctggccgcgggcggggcaaccagaactattaggtcacatagtgctgtattgttgcaaaaaaagagagaaaaaggtacgcgttctgtgaatcggaaccgaaccttgcgctgtttcattgtgaaccatcgactaggcttcccagtttttagctataattgccaatggtatctgtaccattgcttccattctgtgggattttg

SEQ ID NO: 27947 - protein, 359 aa, Triticum aestivum
GFFSLPARHSPSPPPFSSATHQRRRRAASPPGAPPEKPAMDRYQRVEKPRPEAAAISENEIRITTQGLIRNYVTYATSLLQEKRVKEIVLKAMGQAISKTVAITEIIKKRIPGLHQDTTISSVSITDVWEPIEEGLVPLEMTRHVSMISISLSPKELDTSSPGYQAPLHAEPLKPRYQQVQRYQQQHQPRQNQGQTDSYVRGRGRGRGRGWGGRGGYGGGYGGYDNNQGGYGGYSNQGGYGHNQGGYGNHGGYGHNQGGYGNQGGYGNQGGYGQNQGGYGGGYGYDQGGYGGYDNGGWNYNQNRGRGGGGRGRGNWGYSGPGYERGGRGAGGPGGPGGRGYVRGRGRMGPGRGRGNQNY

SEQ ID NO: 27948 - protein, 320 aa, Triticum aestivum
MDRYQRVEKPRPEAAAISENEIRITTQGLIRNYVTYATSLLQEKRVKEIVLKAMGQAISKTVAITEIIKKRIPGLHQDTTISSVSITDVWEPIEEGLVPLEMTRHVSMISISLSPKELDTSSPGYQAPLHAEPLKPRYQQVQRYQQQHQPRQNQGQTDSYVRGRGRGRGRGWGGRGGYGGGYGGYDNNQGGYGGYSNQGGYGHNQGGYGNHGGYGHNQGGYGNQGGYGNQGGYGQNQGGYGGGYGYDQGGYGGYDNGGWNYNQNRGRGGGGRGRGNWGYSGPGYERGGRGAGGPGGPGGRGYVRGRGRMGPGRGRGNQNY

SEQ ID NO: 27949 - protein, 267 aa, Triticum aestivum
MGQAISKTVAITEIIKKRIPGLHQDTTISSVSITDVWEPIEEGLVPLEMTRHVSMISISLSPKELDTSSPGYQAPLHAEPLKPRYQQVQRYQQQHQPRQNQGQTDSYVRGRGRGRGRGWGGRGGYGGGYGGYDNNQGGYGGYSNQGGYGHNQGGYGNHGGYGHNQGGYGNQGGYGNQGGYGQNQGGYGGGYGYDQGGYGGYDNGGWNYNQNRGRGGGGRGRGNWGYSGPGYERGGRGAGGPGGPGGRGYVRGRGRMGPGRGRGNQNY

SEQ ID NO: 27950 - protein, 247 aa, Triticum aestivum
MQSHLNQGTSKFSDINNSTSQDKIKVKQIHMYVEEAEGEEGAGVVGEDMVEVMVGMIITKEVMVDIATREDMATTKVGMAIMEVTATTKVGMATREVTATREGTAKTKVDMEGVMVMTKVDMGDMIMVAGITTRTEAVVAVDEEEATGDTVVQDTSAVDEVQAAQVAQAAGDTCGAVVGWVLAAGGATRTIRSHSAVLLQKKREKGTRSVNRNRTLRCFIVNHRLGFPVFSYNCQWYLYHCFHSVGF

SEQ ID NO: 27951 - DNA, 1335 bp, Triticum aestivum
ctaaaaccctagctccaccaccacccacctaaaacccgccgccgccaccgccaccgccgttccccttcttccccgccaccgggagatcctggccatcgggtctccttccttcctccgaggatcaaagttcaggttggcgccaacatgtcgtcgaagaagatagagctagaccacaaggacatggttcatgattctgccattgactattatgggaagcgccttgccacagcctcctctgactccactgtgaagatcaccaacattgggagtgcatctgccccgtcccagctcgttgcgaccctcactggccactatggtcctgtgtggcgtgttggatgggcccatcccaagtatggttccattctcgcatcctgcggctatgatggccgtgtgatagtctggaaggaggctgccactgggcaatggtctcagctccatgtgtttgacaaccacaaggcctcagttaactccattgcttgggctccatatgaacttggcctttgccttgcctgtgggtcttctgacggcaccatctctgtcatctccatgcggcttgatacaggaggatgtgacgctgcaaccattgagcgggcacaccctgttggcgtgacagcagtctcctgggctccggcagcagcacttgggtccatggttggctcagatcagctcgtccacaagatcgtgtctggtggctttgactgtgtcgtcaaggtgtgggagtttgtcaatggtggctggaagctggagagtgctttggtctctgacatgcacaaagagtgcgtgagagacgtctcatgggcaccggtcctgggcctggcaaagtcaaccatcgccagtgcttcccaagacggcaaggttgtcatctggaccagtggcaaaggaggaggcaagtgggaaggaaagctcatgcgtgactttgaggctccggtgtggagggtgtcctggtccctgacgggaaacatactgtctgtggctgccggcgagggcgacattactctgtggaaggaatcgtcggacgggcagtgggagtcgctgtggaccaaggcctcagaggagccgccgcaggaggagcaggcgatcgaggaggccatgcagtaggggagtcgacgccacatctcccgtgttgattttggaccatgattcgtgtttctagcgccaacgccatgacttgctttcacctgctgccctgatactcttagagatactcgttgccatcttttttgccgtttgtttctatatggacaatgtctgattgcactgtttaagttttatactggtcatgtactcttatgcacaccgtcagaatgtatcgcctgtttgaactgtttatatcct

SEQ ID NO: 27952 - protein, 317 aa, Triticum aestivum
MSSKKIELDHKDMVHDSAIDYYGKRLATASSDSTVKITNIGSASAPSQLVATLTGHYGPVWRVGWAHPKYGSILASCGYDGRVIVWKEAATGQWSQLHVFDNHKASVNSIAWAPYELGLCLACGSSDGTISVISMRLDTGGCDAATIERAHPVGVTAVSWAPAAALGSMVGSDQLVHKIVSGGFDCVVKVWEFVNGGWKLESALVSDMHKECVRDVSWAPVLGLAKSTIASASQDGKVVIWTSGKGGGKWEGKLMRDFEAPVWRVSWSLTGNILSVAAGEGDITLWKESSDGQWESLWTKASEEPPQEEQAIEEAMQ

SEQ ID NO: 27953 - protein, 305 aa, Triticum aestivum
MVHDSAIDYYGKRLATASSDSTVKITNIGSASAPSQLVATLTGHYGPVWRVGWAHPKYGSILASCGYDGRVIVWKEAATGQWSQLHVFDNHKASVNSIAWAPYELGLCLACGSSDGTISVISMRLDTGGCDAATIERAHPVGVTAVSWAPAAALGSMVGSDQLVHKIVSGGFDCVVKVWEFVNGGWKLESALVSDMHKECVRDVSWAPVLGLAKSTIASASQDGKVVIWTSGKGGGKWEGKLMRDFEAPVWRVSWSLTGNILSVAAGEGDITLWKESSDGQWESLWTKASEEPPQEEQAIEEAMQ

SEQ ID NO: 27954 - protein, 183 aa, Triticum aestivum
MRLDTGGCDAATIERAHPVGVTAVSWAPAAALGSMVGSDQLVHKIVSGGFDCVVKVWEFVNGGWKLESALVSDMHKECVRDVSWAPVLGLAKSTIASASQDGKVVIWTSGKGGGKWEGKLMRDFEAPVWRVSWSLTGNILSVAAGEGDITLWKESSDGQWESLWTKASEEPPQEEQAIEEAMQ

SEQ ID NO: 27955 - DNA, 644 bp, Triticum aestivum
attctttgactatgtctcaaaaaaattggattctttgacttgttggttcgatttctcttctcaaaggaacccccaacaccgccgtcggagcagcggcggcagcaagaggagaggaggagcgagatggcgccgcccagcaaggagccgtgcaagaaggaggcgtgcgacatccaggcctgcctctccaagaacctcttcgattccaagaagtgtttgaaagttattcagtcactacaatcttgttgtgagcaatgcgagtacaaatcaacacattgtggttctttgtcgggcttgctcaaaaacatttcaaagtgatgtaataagactatcactcaataaaggtaattttaggtttgcttgggagttaatcaggatatcagtttctctaatccatcatgtatgactgggaaaaataataatgcgccatcctcaacctgcagaaaggtgctgtggttgctagttgttcggtgctgagtttgtcaacacatttctttaagagggatactgatattgccgtatagctgtattatcctttgtatttcttattatgcccatgtgcagatataattcaagaaaataagtgaaccctggccttgttgtacaccaatctgcatttatgatatgggaagtgttttttgaattgc

SEQ ID NO: 27956 - protein, 71 aa, Triticum aestivum
FFDYVSKKLDSLTCWFDFSSQRNPQHRRRSSGGSKRRGGARWRRPARSRARRRRATSRPASPRTSSIPRSV

SEQ ID NO: 27957 - protein, 63 aa, Triticum aestivum
MAPPSKEPCKKEACDIQACLSKNLFDSKKCLKVIQSLQSCCEQCEYKSTHCGSLSGLLKNISK

SEQ ID NO: 27958 - DNA, 1846 bp, Triticum aestivum
cctacccgatacgaaccaaccccagattttccccgggcgccgcagccgcatttcgtcgagcacaggacgcgcatggcgatggccgcgccccacgtctcgcactcgcagccacccgcagggcgcgccgctttattcgctcaccccaccaccgcgcagaactcctcccctctccgcctccctctcggccgcgccgccgtccggcccgtccgcctctacgccgtctccaccgatgccgcccctgccaccgccgccgccgcgatggacgccgtggccgactgggggctcaccccgctcgcggaggccgacccggaggtgtacgacctcatcgagcgcgagaagcggcgccagcgcacgggcatcgagctaatcgcgtccgagaacttcacctcgctcgccgtcatggaggcgctcggctccccgctcaccaacaagtactccgagggcatgcccggggcgcgctactacggcgggaacgaggtcatcgacgaggtcgaggagctctgccgcgcccgcgccctcaaggcgttccacctcgaccccgcttcctggggcgtcaacgtgcagccctactccggctcccccgccaacttcgccgcctacactgggctgctccaaccccacgagcgcatcatggggctcgatttgccgtccggaggacacctcactcatgggtactacacggccgggggcaagaagatttcggccacctccatctacttttcgagcttgccctacaaggtgagctccgacaccgggtacgtcgactatgataggctggaggagaaggccatggatttccgccccaagctcattatctgtggcgggagcgcgtacccacgggactgggattatgccaggcttagggccatcgcggacaagtgcggggccatgttgctgtgtgacatggctcatatcagcggtctcgttgccgctcaggaggctacgaatccgtttgagtattctgatgtggttaccaccaccacccacaagagtctccgagggccaaggtctggtatgatattctacaggaagggcccgaagcctcccaaaaaaggccagcccgagggtgctctttacgattacgaggacaagatcaactttgcagtgtttccatcactccagggcggccctcacaaccaccagattgctgccctggcagttggcctgaagcaggcaatgtcacctggattcaaggcatatattcagcaggtcaaggccaatgctgttgcccttggaaaccatctgatgagtaagggctacaagatggttactgacggaacagagaaccaccttgttctctgggatcttcgccctcttggcttgtctggtaacaaagttgagaaagtatgtgatctgagcagcattacactcaacaaaaatgccgtctttggtgacagcagtgcactggcacctggtggtgtgcgaattggtacacctgccatgacctcgagaggtttggtcgagaaggactttgtgaagattgctgagtaccttcatcaggctgtagtcatctgcttgaatgtccagaagcagcgaggtaagcgttacaatgatttcatcgttgacttggagaagaacgaggacatcgcggagctcagggcagaggtcgagaagtttgccattgcatttgagatgcctggcttccgggtgtcagacatgaaatacaaggattaggctgtggtaccatgcagatcgttttcttgtagcagcaaattggtgcccttaaggggctgattgctgtgctctattcgtgatgtatgattatggttgagaatgatatgactcatgaataatcattgaaggcatgccataacatggagatggtatttcctagcctcagttttcc

SEQ ID NO: 27959 - protein, 557 aa, Triticum aestivum
PTRYEPTPDFPRAPQPHFVEHRTRMAMAAPHVSHSQPPAGRAALFAHPTTAQNSSPLRLPLGRAAVRPVRLYAVSTDAAPATAAAAMDAVADWGLTPLAEADPEVYDLIEREKRRQRTGIELIASENFTSLAVMEALGSPLTNKYSEGMPGARYYGGNEVIDEVEELCRARALKAFHLDPASWGVNVQPYSGSPANFAAYTGLLQPHERIMGLDLPSGGHLTHGYYTAGGKKISATSIYFSSLPYKVSSDTGYVDYDRLEEKAMDFRPKLIICGGSAYPRDWDYARLRAIADKCGAMLLCDMAHISGLVAAQEATNPFEYSDVVTTTTHKSLRGPRSGMIFYRKGPKPPKKGQPEGALYDYEDKINFAVFPSLQGGPHNHQIAALAVGLKQAMSPGFKAYIQQVKANAVALGNHLMSKGYKMVTDGTENHLVLWDLRPLGLSGNKVEKVCDLSSITLNKNAVFGDSSALAPGGVRIGTPAMTSRGLVEKDFVKIAEYLHQAVVICLNVQKQRGKRYNDFIVDLEKNEDIAELRAEVEKFAIAFEMPGFRVSDMKYKD

SEQ ID NO: 27960 - protein, 533 aa, Triticum aestivum
MAMAAPHVSHSQPPAGRAALFAHPTTAQNSSPLRLPLGRAAVRPVRLYAVSTDAAPATAAAAMDAVADWGLTPLAEADPEVYDLIEREKRRQRTGIELIASENFTSLAVMEALGSPLTNKYSEGMPGARYYGGNEVIDEVEELCRARALKAFHLDPASWGVNVQPYSGSPANFAAYTGLLQPHERIMGLDLPSGGHLTHGYYTAGGKKISATSIYFSSLPYKVSSDTGYVDYDRLEEKAMDFRPKLIICGGSAYPRDWDYARLRAIADKCGAMLLCDMAHISGLVAAQEATNPFEYSDVVTTTTHKSLRGPRSGMIFYRKGPKPPKKGQPEGALYDYEDKINFAVFPSLQGGPHNHQIAALAVGLKQAMSPGFKAYIQQVKANAVALGNHLMSKGYKMVTDGTENHLVLWDLRPLGLSGNKVEKVCDLSSITLNKNAVFGDSSALAPGGVRIGTPAMTSRGLVEKDFVKIAEYLHQAVVICLNVQKQRGKRYNDFIVDLEKNEDIAELRAEVEKFAIAFEMPGFRVSDMKYKD

SEQ ID NO: 27961 - protein, 531 aa, Triticum aestivum
MAAPHVSHSQPPAGRAALFAHPTTAQNSSPLRLPLGRAAVRPVRLYAVSTDAAPATAAAAMDAVADWGLTPLAEADPEVYDLIEREKRRQRTGIELIASENFTSLAVMEALGSPLTNKYSEGMPGARYYGGNEVIDEVEELCRARALKAFHLDPASWGVNVQPYSGSPANFAAYTGLLQPHERIMGLDLPSGGHLTHGYYTAGGKKISATSIYFSSLPYKVSSDTGYVDYDRLEEKAMDFRPKLIICGGSAYPRDWDYARLRAIADKCGAMLLCDMAHISGLVAAQEATNPFEYSDVVTTTTHKSLRGPRSGMIFYRKGPKPPKKGQPEGALYDYEDKINFAVFPSLQGGPHNHQIAALAVGLKQAMSPGFKAYIQQVKANAVALGNHLMSKGYKMVTDGTENHLVLWDLRPLGLSGNKVEKVCDLSSITLNKNAVFGDSSALAPGGVRIGTPAMTSRGLVEKDFVKIAEYLHQAVVICLNVQKQRGKRYNDFIVDLEKNEDIAELRAEVEKFAIAFEMPGFRVSDMKYKD

SEQ ID NO: 27962 - DNA, 1476 bp, Triticum aestivum
aaccaaatccacatccagaaagacccaaccgtcttcgtgcaattgctgctagtctggctgctgcaggaatatttccctcaaagtgcgccttggtacctcctcgagaaatcactaaggaggaactcgtaatggtccatacttcagatcacgtcgaaagcgtagagcagacaaagaacatgctttacagttacttcacttcggatacctacgcgaatggacactcagcatgtgctgccaaacttgcagcaggcttgtgcgctgatcttgctagtttgatagtgtctggccgtgtccggaatggctttgcgctggtgagacctcctgggcatcatgctggggtaaagcaagccatgggcttttgtcttcacaacaatgcagcagtggctgcattagctgcacaaaaagcaggcgctaagaaagtcttgatagttgactgggatgtgcaccatggcaatggcacacaggagatatttgaagggaacaaatcagtcttgtacatatcattacatcgccatgaggatggaagcttctatcctggaactggagcagcagacgaggtgggagatctggatggtaaaggattctcggtaaatataccttggagctgtggtggtgttggtgacaatgattacatctttgcttttcagcacgtggtgcttccaatagctacggaatttgccccagacatcaccattatatctgcaggatttgatgcagcaaggggtgatcctctgggttgttgtgatgttactcctgccggatactctcagatgacgtccatgttaactgcttgctcagaaggaaaattgttggttatacttgagggaggatacaatcttcggtctatatcctcatctgcaactgaagttgtcaaggttctactcggggacggtccaagttatggcacagatgcagcagcaccatcaaaggagggcatgcagactgtcttacaagttctggacatccagcaaaaatattggccagttttagttccaatctttgcatcacttcaagttcaagcgcagcaggggccgacttcttccaattatgttaacgctgaaaacatgctgaagagaaggatgctcaccggaggaccagggcccgtgtggtggaaatggggaagcaagaggcttttgtacgaagtactgtttgagggccgccgtccgagaaagagcaaggcgaaaggaaaatgaagctctggctgatgaaacaaaaccctaggttgttttagttagtgatgctgaagccgcctaactgactttctggtcagtatagttgacatggatagtgtagctggctgtttggtgttcggaaagaagattaccttagcttgcgtacaccgagccgattttttgactgaacaactgaactgtggccgttgtcactgttgattgccgacagagtttcacaggcagcaatcctgttgtgtgggacatgttttttgtgttgtagcaatgcatgaaatttgccgtcgtc

SEQ ID NO: 27963 - protein, 396 aa, Triticum aestivum
PNPHPERPNRLRAIAASLAAAGIFPSKCALVPPREITKEELVMVHTSDHVESVEQTKNMLYSYFTSDTYANGHSACAAKLAAGLCADLASLIVSGRVRNGFALVRPPGHHAGVKQAMGFCLHNNAAVAALAAQKAGAKKVLIVDWDVHHGNGTQEIFEGNKSVLYISLHRHEDGSFYPGTGAADEVGDLDGKGFSVNIPWSCGGVGDNDYIFAFQHVVLPIATEFAPDITIISAGFDAARGDPLGCCDVTPAGYSQMTSMLTACSEGKLLVILEGGYNLRSISSSATEVVKVLLGDGPSYGTDAAAPSKEGMQTVLQVLDIQQKYWPVLVPIFASLQVQAQQGPTSSNYVNAENMLKRRMLTGGPGPVWWKWGSKRLLYEVLFEGRRPRKSKAKGK

SEQ ID NO: 27964 - protein, 354 aa, Triticum aestivum
MVHTSDHVESVEQTKNMLYSYFTSDTYANGHSACAAKLAAGLCADLASLIVSGRVRNGFALVRPPGHHAGVKQAMGFCLHNNAAVAALAAQKAGAKKVLIVDWDVHHGNGTQEIFEGNKSVLYISLHRHEDGSFYPGTGAADEVGDLDGKGFSVNIPWSCGGVGDNDYIFAFQHVVLPIATEFAPDITIISAGFDAARGDPLGCCDVTPAGYSQMTSMLTACSEGKLLVILEGGYNLRSISSSATEVVKVLLGDGPSYGTDAAAPSKEGMQTVLQVLDIQQKYWPVLVPIFASLQVQAQQGPTSSNYVNAENMLKRRMLTGGPGPVWWKWGSKRLLYEVLFEGRRPRKSKAKGK

SEQ ID NO: 27965 - protein, 338 aa, Triticum aestivum
MLYSYFTSDTYANGHSACAAKLAAGLCADLASLIVSGRVRNGFALVRPPGHHAGVKQAMGFCLHNNAAVAALAAQKAGAKKVLIVDWDVHHGNGTQEIFEGNKSVLYISLHRHEDGSFYPGTGAADEVGDLDGKGFSVNIPWSCGGVGDNDYIFAFQHVVLPIATEFAPDITIISAGFDAARGDPLGCCDVTPAGYSQMTSMLTACSEGKLLVILEGGYNLRSISSSATEVVKVLLGDGPSYGTDAAAPSKEGMQTVLQVLDIQQKYWPVLVPIFASLQVQAQQGPTSSNYVNAENMLKRRMLTGGPGPVWWKWGSKRLLYEVLFEGRRPRKSKAKGK

SEQ ID NO: 27966 - DNA, 1459 bp, Triticum aestivum
  misc_feature (1342)..(1344): n is a, c, g, or t
attttctctcgttgtccatttttccccaaacacgcggacgaaggaatcacccctaaaccctcctctccccgccgccgaagccgacatggccgtccaccacctcctccgccgcgggatctctggtgggtctcccctccaccctctgcgcggcctcctcctcgtatcgcaggagctcgggtggcgtcaggcgagctcggcggcggcgggggacgcagtggctgagctgaggggcgcgcgggaggacgtcaagcagctgctgaaggagaagtcctgccatcccatcctggttcgcttgggttggcatgatgctggtacttacgacaagaacattagtgagtggccccagtgtggtggagctaatggtagcttgaggtttgaaattgagttaaaacatgcggctaatgctggtcttgtgaatgctttgaagcttattcaagccatcaaggacaaatatgcaggtgttacttatgcggatctgtttcagcttgccagtgctacagctgtcgaggaagctggtggccccaaaatccccatgatctatggaagggttgatgtttctgcccctgatcaatgcccaccagaggggagactccctgctgctggtccgccttcacctgctgaacatttgcgagaagtattctacagaatgggcctgaatgacaaggaaattgttgcattgtcaggagcacacacacttggacgatcaagaccagagcgcagcggctggggtaaacctgaaacgaaatacactaaaaatggacctggtgcacctggggggcaatcttggacatcacagtggctcaagtttgataacagctatttcaaggatgtcaaagaacgacgagacgaggaccttctagttctgcctactgatgctgtgctctttgaggattcatcattcaagatttatgctgaaaagtatgctgaggaccaggatacattttttgaagactatgctgaagctcatgctaaattgagcaatcttgggtctaagtttgaccctcctaagggtgtatcactagactagctgatatttgctgctgatgaactgcattttggtgagtgaagatgacaaggctctgtttcttcaaactatttttgaggtgtaacaaattcggatccactgaagcagtattttgagttgtgtgctccattaccagaaataaaagcagcattggacagttcccggaccgaacatttatgatacttacatgttgtatcttcaaggtgatcaaatataaaacaatactaccaggctgttgcccctttgcgatatgtctgaaacagaacggtgcctagcaagcacactatgggatattttatttatctttttgtttgatcnnnaaaaaaaaaaaaaaaaaaaaaaaaaaaaaaaaaaaaaaaaaaaaaaaaaaaaaaaaaaaggaaaaaaaaaaaaaaaaaggtttttcaatcccgccaacctcgagggggggcccgg

SEQ ID NO: 27967 - protein, 341 aa, Triticum aestivum
FSLVVHFSPNTRTKESPLNPPLPAAEADMAVHHLLRRGISGGSPLHPLRGLLLVSQELGWRQASSAAAGDAVAELRGAREDVKQLLKEKSCHPILVRLGWHDAGTYDKNISEWPQCGGANGSLRFEIELKHAANAGLVNALKLIQAIKDKYAGVTYADLFQLASATAVEEAGGPKIPMIYGRVDVSAPDQCPPEGRLPAAGPPSPAEHLREVFYRMGLNDKEIVALSGAHTLGRSRPERSGWGKPETKYTKNGPGAPGGQSWTSQWLKFDNSYFKDVKERRDEDLLVLPTDAVLFEDSSFKIYAEKYAEDQDTFFEDYAEAHAKLSNLGSKFDPPKGVSLD

SEQ ID NO: 27968 - protein, 313 aa, Triticum aestivum
MAVHHLLRRGISGGSPLHPLRGLLLVSQELGWRQASSAAAGDAVAELRGAREDVKQLLKEKSCHPILVRLGWHDAGTYDKNISEWPQCGGANGSLRFEIELKHAANAGLVNALKLIQAIKDKYAGVTYADLFQLASATAVEEAGGPKIPMIYGRVDVSAPDQCPPEGRLPAAGPPSPAEHLREVFYRMGLNDKEIVALSGAHTLGRSRPERSGWGKPETKYTKNGPGAPGGQSWTSQWLKFDNSYFKDVKERRDEDLLVLPTDAVLFEDSSFKIYAEKYAEDQDTFFEDYAEAHAKLSNLGSKFDPPKGVSLD

SEQ ID NO: 27969 - DNA, 1128 bp, Triticum aestivum
aaaaccgcagacctcaccatccccctcccccctcccctccccagcagccagcctcccccgcgaacgaaccctagccaggcacggcggcggatccctcgggcggcccggagccacaggccgccgcgatgatggacggcggcggcggcgtcggagacccggtcgaggagttcctcatcgggggcgccggcgacggcggggaggactccctcgccgccttctgcgacggaggacttgggattgaggatgtgcgcggaggtgactctggtctcgggcactctaatttggggaaaaggggcagagatgaaccatctccatctggtccaaagtcaaaggcttgccgcgagaaaatgcggagggataaactgaatgacaggtttcttgaattatgctcggttatgaattctggcaagcacactggtgttgaagaatgttcggctagcaatcctgggaagaacgctaagttggataaagcaagtatcttgagtgatgcaactcgtatgttgacacaactcagaggcgagaccgaaaagctgaaggaatcaaatgtgaatcttcgagagacaatcaaggaccttaaggcggagaagaatgagctccgagatgagaagttgagcctgaaggcagaaaaggaaaggctggaacaacaactcaaagcagcaagtgctgctcctacaggatttgctcctcatatgccttatccagctgcgttccaccccgcagtattccctccatttgcaccaccttatcaagtcccagccaacaaaggcgctccggtccccgctgcattccctggaatggcgatgtggcactggttgcccccaactgccatggacacaactcaagacccaaagctttggccgccgaatgcttaggcgtgccgaccccgggatgctgacttgcgctgccattcgcccattggcaagtcagaacgtttgtcaggtccctgagatgaaaggaagctcgcgattgcagttattgtgtttagcctgttgttttggggtcacttgtcccatagagaggtgatacctgtaattaatctggatcttaaccctcttgcttggaaaatatattcagtgctaccatacctcttgtatgagtgttatgtatggaattgcactggtttgtttc

SEQ ID NO: 27970 - protein, 248 aa, Triticum aestivum
MMDGGGGVGDPVEEFLIGGAGDGGEDSLAAFCDGGLGIEDVRGGDSGLGHSNLGKRGRDEPSPSGPKSKACREKMRRDKLNDRFLELCSVMNSGKHTGVEECSASNPGKNAKLDKASILSDATRMLTQLRGETEKLKESNVNLRETIKDLKAEKNELRDEKLSLKAEKERLEQQLKAASAAPTGFAPHMPYPAAFHPAVFPPFAPPYQVPANKGAPVPAAFPGMAMWHWLPPTAMDTTQDPKLWPPNA

SEQ ID NO: 27971 - protein, 247 aa, Triticum aestivum
MDGGGGVGDPVEEFLIGGAGDGGEDSLAAFCDGGLGIEDVRGGDSGLGHSNLGKRGRDEPSPSGPKSKACREKMRRDKLNDRFLELCSVMNSGKHTGVEECSASNPGKNAKLDKASILSDATRMLTQLRGETEKLKESNVNLRETIKDLKAEKNELRDEKLSLKAEKERLEQQLKAASAAPTGFAPHMPYPAAFHPAVFPPFAPPYQVPANKGAPVPAAFPGMAMWHWLPPTAMDTTQDPKLWPPNA

SEQ ID NO: 27972 - protein, 174 aa, Triticum aestivum
MRRDKLNDRFLELCSVMNSGKHTGVEECSASNPGKNAKLDKASILSDATRMLTQLRGETEKLKESNVNLRETIKDLKAEKNELRDEKLSLKAEKERLEQQLKAASAAPTGFAPHMPYPAAFHPAVFPPFAPPYQVPANKGAPVPAAFPGMAMWHWLPPTAMDTTQDPKLWPPNA

SEQ ID NO: 27973 - DNA, 1393 bp, Triticum aestivum
atattcttcttcttctcccctttgcttcttccagaagctccctgaaagtccaggcccgatcccccatggcctccggcgaaggcaccggagattcgaacgctgcgggggcagggatggaggtgccggaggtggagttgtgcctcgacctcacgagctgccagctgcacgatctgagtgaggtggagatcccgcccaccctggaggagctggaccttacggcgaaccgtctcaccgcagtcgacccccggatcggccacctccctcgcctccgcaaactctcgttccgccagaatctcctcgacgacgacgccgtcgcgcccctcttcacctgggatgccatcgctggcttacaggagatagtccttagagataacaagcttataaagatccccgatgccagcatcttcaagggtcttctggtgtttgatgtttctttcaatgagttgtcgtccttaaatgggttatccaaggtttccagcacagtgaaagaactctacttttcgaagaatgaggttccaaagatggaagaacttgaacatttccatgcattagaattgcttgaacttggtagcaacagattaagggtgatggaaaatctggaaactttgacaaatctacaggagttatggctcggaagaaaccggatccggactatcaacttatgtgggttgaaatcaatcaaaaaaataagtctgcaaagcaacaggctaacttcaatgaatggcttacaagaatgtgttgcgttagaggaactgtatctcagccataatggaatccaaaagatggaaggcctttctatgttacagaaccttcgtgttttagatgtttcatctaacaaactaaccgctatcgaagatattgagccattaaccaggttagaggacttgtggttgaatgacaaccaaataccatcactgtctgggatagaatctgctttgtctggttcacgagagaaactgaccaccatatatcttgagagaaatccttgtgcaaaaactcccaactattcatccacattgaaggaaatgtttccaaatcttgagcaaattgattcagatatgctagcgtgaaacaggttgactcactttctcagattgttgaagttagtcgaaatatgtgttgtgtttctacaggaagaaagcagtcatccagttcagaacagacaacataagctcccggtcaagtagcgctgcagtttgtactggtgatctgaatggattattgccaactttatttgaaaggcccgtcctgaagttgggtcatttcctgccgagatctataaaaactgaacttatgtgataaagccatcctatggtccatgactccatgctcgtgccacgttgcaagggatgatgtatttgttttcccttttcccttgagtgatttttcagtt

SEQ ID NO: 27974 - protein, 355 aa, Triticum aestivum
ILLLLPFASSRSSLKVQARSPMASGEGTGDSNAAGAGMEVPEVELCLDLTSCQLHDLSEVEIPPTLEELDLTANRLTAVDPRIGHLPRLRKLSFRQNLLDDDAVAPLFTWDAIAGLQEIVLRDNKLIKIPDASIFKGLLVFDVSFNELSSLNGLSKVSSTVKELYFSKNEVPKMEELEHFHALELLELGSNRLRVMENLETLTNLQELWLGRNRIRTINLCGLKSIKKISLQSNRLTSMNGLQECVALEELYLSHNGIQKMEGLSMLQNLRVLDVSSNKLTAIEDIEPLTRLEDLWLNDNQIPSLSGIESALSGSREKLTTIYLERNPCAKTPNYSSTLKEMFPNLEQIDSDMLA

SEQ ID NO: 27975 - protein, 334 aa, Triticum aestivum
MASGEGTGDSNAAGAGMEVPEVELCLDLTSCQLHDLSEVEIPPTLEELDLTANRLTAVDPRIGHLPRLRKLSFRQNLLDDDAVAPLFTWDAIAGLQEIVLRDNKLIKIPDASIFKGLLVFDVSFNELSSLNGLSKVSSTVKELYFSKNEVPKMEELEHFHALELLELGSNRLRVMENLETLTNLQELWLGRNRIRTINLCGLKSIKKISLQSNRLTSMNGLQECVALEELYLSHNGIQKMEGLSMLQNLRVLDVSSNKLTAIEDIEPLTRLEDLWLNDNQIPSLSGIESALSGSREKLTTIYLERNPCAKTPNYSSTLKEMFPNLEQIDSDMLA

SEQ ID NO: 27976 - protein, 318 aa, Triticum aestivum
MEVPEVELCLDLTSCQLHDLSEVEIPPTLEELDLTANRLTAVDPRIGHLPRLRKLSFRQNLLDDDAVAPLFTWDAIAGLQEIVLRDNKLIKIPDASIFKGLLVFDVSFNELSSLNGLSKVSSTVKELYFSKNEVPKMEELEHFHALELLELGSNRLRVMENLETLTNLQELWLGRNRIRTINLCGLKSIKKISLQSNRLTSMNGLQECVALEELYLSHNGIQKMEGLSMLQNLRVLDVSSNKLTAIEDIEPLTRLEDLWLNDNQIPSLSGIESALSGSREKLTTIYLERNPCAKTPNYSSTLKEMFPNLEQIDSDMLA

SEQ ID NO: 27977 - DNA, 1517 bp, Triticum aestivum
gaccactgactgaccgccggccgctttctcctctacggcgacgcccggccgcccagctgctcaccgccggcgctctcgccgacggcgatgtcgtcttcggagccgcggccgcgccccgccgcctccttctccggcgacctgcccgaggacgcgctgtacgaggtcctcctccgcatcccggccaaggagctctgccgcctccgcgccgtctgcccggcctggcacgccctcacctccgatccgcccttcgtcgcggctcacaagtccacccaccgcacggcgcccccgctcctcgccattgcctaccgcgacgacagtgaggtcaacggcgttgcgatttcggatctgtcgggcaacgtcgtgaggcggattccagtcaccgggtatgagattgttatggtgaacgagtcgggcgatgccgttcaccggagctcaagcaaggaggagcatgatagcatctgtgttgtgcgcagccggctagacctcgtgtgcttccactggaatgtgtactctaggaccttctgcgtgctgaacccggtcactggagctactctcgacttaccgatgggccactcaaaggaattggagcatgagctggaggtacagggaagaaaatggggctgccatgtcgagtggtgcgcttttgggaaggtctcctctaccagagagtacaaggcgctccgcatctgtagcattcgtgaccggcaggtatgtgaggttatcacctttgatgacaccaaccatggaagctggaggaggaagcaggaccctccgccccgtatctgtaccggtcgtcagatgagatgcgtggtcgtcgatggggtggtgtacttcttgatggattttcactacacatactttgaaaccggggttataaccattgagcctggtagcatagcttcattcaacctcgaggcggaggagtggggtgttctacctggtcccggacaggtcaagaggtttgtgcaagagaacaagaaatacagttactcacagcttgagctccagttatcattggctgagttgaacggctgcttagttctggttcataatattcataaggtatctatggacttgtggtttttgacagattttgagaaaggtatctgggtcaagaaatacagcttgccttcacatgttgctaggcttttttggtatccttttctcatgttagatgatgggagaattttcttcagtgggatggattgtctggaaggtatattaagtggtggagagcaaggagagggattcctgcaaagttatgatccaagaaatgacacttatgctgatgcactagaactgagagatcccagatcaatttgcatttacacaggaagcgtgctgagtttatagcatagctgtcactgatgaggtcaggaatgatacatcgtactggctgttcaccttatgttctaaatgtgaacaattagtgagataatgttctgatgcatgcatctttgaaaaagtacctttgtgccttcaaagtatattatgttaatctccaatacattttgcgc

SEQ ID NO: 27978 - protein, 421 aa, Triticum aestivum
MSSSEPRPRPAASFSGDLPEDALYEVLLRIPAKELCRLRAVCPAWHALTSDPPFVAAHKSTHRTAPPLLAIAYRDDSEVNGVAISDLSGNVVRRIPVTGYEIVMVNESGDAVHRSSSKEEHDSICVVRSRLDLVCFHWNVYSRTFCVLNPVTGATLDLPMGHSKELEHELEVQGRKWGCHVEWCAFGKVSSTREYKALRICSIRDRQVCEVITFDDTNHGSWRRKQDPPPRICTGRQMRCVVVDGVVYFLMDFHYTYFETGVITIEPGSIASFNLEAEEWGVLPGPGQVKRFVQENKKYSYSQLELQLSLAELNGCLVLVHNIHKVSMDLWFLTDFEKGIWVKKYSLPSHVARLFWYPFLMLDDGRIFFSGMDCLEGILSGGEQGEGFLQSYDPRNDTYADALELRDPRSICIYTGSVLSL

SEQ ID NO: 27979 - protein, 318 aa, Triticum aestivum
MVNESGDAVHRSSSKEEHDSICVVRSRLDLVCFHWNVYSRTFCVLNPVTGATLDLPMGHSKELEHELEVQGRKWGCHVEWCAFGKVSSTREYKALRICSIRDRQVCEVITFDDTNHGSWRRKQDPPPRICTGRQMRCVVVDGVVYFLMDFHYTYFETGVITIEPGSIASFNLEAEEWGVLPGPGQVKRFVQENKKYSYSQLELQLSLAELNGCLVLVHNIHKVSMDLWFLTDFEKGIWVKKYSLPSHVARLFWYPFLMLDDGRIFFSGMDCLEGILSGGEQGEGFLQSYDPRNDTYADALELRDPRSICIYTGSVLSL

SEQ ID NO: 27980 - protein, 262 aa, Triticum aestivum
MGHSKELEHELEVQGRKWGCHVEWCAFGKVSSTREYKALRICSIRDRQVCEVITFDDTNHGSWRRKQDPPPRICTGRQMRCVVVDGVVYFLMDFHYTYFETGVITIEPGSIASFNLEAEEWGVLPGPGQVKRFVQENKKYSYSQLELQLSLAELNGCLVLVHNIHKVSMDLWFLTDFEKGIWVKKYSLPSHVARLFWYPFLMLDDGRIFFSGMDCLEGILSGGEQGEGFLQSYDPRNDTYADALELRDPRSICIYTGSVLSL

SEQ ID NO: 27981 - DNA, 1220 bp, Triticum aestivum
atcgaaaacccttcgacccaacccatacaaactcaaacccccacgaaaacccctctctcctctccgcttctccctggccgccgaaaccctaacctagccgcgcgtcgccgccgccgccggcgcaccagtcaccatgtcgaaccccaaggggtcgaagatgctccagttcgtcaactaccggatgcgcgtgacgatccaggacggccgccaactcgtggggaagttcatggccttcgatcgccacatgaacctcgtcctcggcgactgcgaggagttccgcaagctcccgccctcaaaatcttccaagaccacaggcgagcgcgaggagcggaggacgctcggcctgctgcttcttcgtggcgaggaagtcgtctccatgaccgtcgagggcccgcccccgcccgacgagtcccgggccaaggcctccgctggtgttgccgcgctttccggcactggcgtcggtcgcgctgccggccgtggggtggccaccggcccgctgctccaggcgcagcccggcctctccggccctgttcggggcgtgggcggtccggcccccggcatgatgcagccccagatctcgcgtcccccaatgccgaacctctcagcgccgccggtggcgtacccacaggtcgtccgcccgccaccgatgggtatgccgcccatgcgacctggtggcccgccaccgatgcagatgcagtttcagcgcccgccgggtcccccgcctgcgccataccctggggccccgccgcagcagttcatgaggggaccgccaccgatggggcctccaccagggaggccggggatgccaagcatgccaccaccgccagggatgaggccgatgccaccaacgcagtttggacaaccacccaggcatggaatgccgccaccaccgcctggtccacagcagcctggacagaacccccagcagtagaaaaacctttctggtttggtccttgcagtcccacctgtggaagattcatcttcggaagagagaaaagtcttgtcggtgcagcactcttgcttttgatgggaggagacggactgttttccaacgcaatgtacgtaaaagaggctgaagcttgtttaactgttggttgttaagctagggacatggatagactgtttcgttgtgtcagtaccttgttgctggatgtgcttgcacttgtattgagatattatttcgcactattaacttcagatcataaattgctttgcttgcg

SEQ ID NO: 27982 - protein, 366 aa, Triticum aestivum
IENPSTQPIQTQTPTKTPLSSPLLPGRRNPNLAARRRRRRRTSHHVEPQGVEDAPVRQLPDARDDPGRPPTRGEVHGLRSPHEPRPRRLRGVPQAPALKIFQDHRRARGAEDARPAASSWRGSRLHDRRGPAPARRVPGQGLRWCCRAFRHWRRSRCRPWGGHRPAAPGAARPLRPCSGRGRSGPRHDAAPDLASPNAEPLSAAGGVPTGRPPATDGYAAHATWWPATDADAVSAPAGSPACAIPWGPAAAVHEGTATDGASTREAGDAKHATTARDEADATNAVWTTTQAWNAATTAWSTAAWTEPPAVEKPFWFGPCSPTCGRFIFGREKSLVGAALLLLMGGDGLFSNAMYVKEAEACLTVGC

SEQ ID NO: 27983 - protein, 265 aa, Triticum aestivum
MSNPKGSKMLQFVNYRMRVTIQDGRQLVGKFMAFDRHMNLVLGDCEEFRKLPPSKSSKTTGEREERRTLGLLLLRGEEVVSMTVEGPPPPDESRAKASAGVAALSGTGVGRAAGRGVATGPLLQAQPGLSGPVRGVGGPAPGMMQPQISRPPMPNLSAPPVAYPQVVRPPPMGMPPMRPGGPPPMQMQFQRPPGPPPAPYPGAPPQQFMRGPPPMGPPPGRPGMPSMPPPPGMRPMPPTQFGQPPRHGMPPPPPGPQQPGQNPQQ

SEQ ID NO: 27984 - protein, 257 aa, Triticum aestivum
MLQFVNYRMRVTIQDGRQLVGKFMAFDRHMNLVLGDCEEFRKLPPSKSSKTTGEREERRTLGLLLLRGEEVVSMTVEGPPPPDESRAKASAGVAALSGTGVGRAAGRGVATGPLLQAQPGLSGPVRGVGGPAPGMMQPQISRPPMPNLSAPPVAYPQVVRPPPMGMPPMRPGGPPPMQMQFQRPPGPPPAPYPGAPPQQFMRGPPPMGPPPGRPGMPSMPPPPGMRPMPPTQFGQPPRHGMPPPPPGPQQPGQNPQQ

SEQ ID NO: 27985 - DNA, 1156 bp, Triticum aestivum
aatcaaagagagaaaaaaaaactcatcgcagagccgccgacgaccgtagcacagcggcagagaagtgcggcaagcggccatggacttctgcccggcgtgcgggatgctgctgcagatccagccggccaccggcggccaccgcctgcgcctcttctgccccacctgcccgtacgtctgccccatcaaaaacaagatcgtgaagaaggcgaggctggtcaagagggaggtggagtccgcggaatctgcccccaagactgacggtgagcccaaggaatcggcccccaagactgacggcgagcccaaggccgatggtcagctcaagcaatctgcccccaagactgagggtacatgaccaaattgacacaatggagaaacatacttttggcagatgcagattcgattagtacaatatctacaagcattgtgaaacttaagagtatctggacatgcgaacatgtggagcttctttgatcaaattatgttacagcacacaacttgccaaaagccaccaatcttgtgcaaagtaaagtgatatacatctgacagtgcagaagccggagaagctcacttcaatgttagtttgttaattggacacttcctttatgtgacattgcaggctttttggtatggagatgtttttgtgtgtgtgtgagcgtgcgctagaggtgttgatttgctgtatgaatactcttcttattcaaccagcacaagaatgggtatgattttgagtccttgcatagcttccattctccatccttgaaacttgtatgaatttaggttaggggtcgagaagacaatgaaggcaaggggatcagcgggcccacaatggcactctggtcccctgttgacaaatactcgctccatatcaaaatataagacgtttttcaaggctacagcagacacatgggcccgctccaccacagctctgacttcaaagcaaccaagcaacccatggaagagcaactcggacacgctgtgaagaaccgactattgaagtccacgccgcgacccgagcttctgtggatgtattctactttgcatgtaaatttttatgcgagctacacaaaaatctagcacatgtactattcacttcactataaaagtacatgatgtttttgtgtacagctcatatgaaaacaaaatttattttacaccc

SEQ ID NO: 27986 - protein, 90 aa, Triticum aestivum
MDFCPACGMLLQIQPATGGHRLRLFCPTCPYVCPIKNKIVKKARLVKREVESAESAPKTDGEPKESAPKTDGEPKADGQLKQSAPKTEGT

SEQ ID NO: 27987 - protein, 85 aa, Triticum aestivum
NQREKKKLIAEPPTTVAQRQRSAASGHGLLPGVRDAAADPAGHRRPPPAPLLPHLPVRLPHQKQDREEGEAGQEGGGVRGICPQD

SEQ ID NO: 27988 - protein, 82 aa, Triticum aestivum
MLLQIQPATGGHRLRLFCPTCPYVCPIKNKIVKKARLVKREVESAESAPKTDGEPKESAPKTDGEPKADGQLKQSAPKTEGT

SEQ ID NO: 27989 - DNA, 1369 bp, Triticum aestivum
atcgttcacaaacaataaatctccaatacacaagaaggtttctcagtcagctagagaaatggctttcgcgctcaatgcgtcttgctatccttcgtctttccagtcgtcgctgctcccgaggcggatggcagcagcggtgatgataccgaggcggaggaatgttctgcctgtcattagggcggttgccgtggctccgcccgccccggcgccggcgaagccagcagccgtgaggagccggcccgtgtcggtcaccatggccaagctcatggctaagggcaagacagcgctcatcccgtatatcaccgccggtgatcctgacctggccacaacggcagaggcgctgcatctcctggatgcctgtggcgccgacgtcattgagctcggcgtgccgtgctccgacccctacgtggacggtccgatcatccaggcttcgagtgcgagggctctcgctggcggtgccacaatggacggcgtgctggcgatgctcaaggaggtgacgccggagctgtcgtgccctgtggtgctcttctcgtactacaggcctatcttatgtcgagggttggccgaaatcaaagaagccggtgtacacggtcttatagtgcctgatctcccttatgtagccgcgcatgcattatggagtgaagccaagaagaacaacctcgagctggtgctgctcacaacaccagccataccagaagaaagaatgaagggaatcacgaaagcttcggaaggtttcatttacctggtgagcgtcaatggagttacaggtccccgtgaaaacgtgaacctgcgggttaagtccctcattcaagagataaaaaaggttactgacaaacctgttgctgttggctttggcatatcaaaacctgaacacgtaaagcagattgcaggatggggtgcggatggggtgatcattggcagtgcgatggtgaggcagttgggtgaagcagcttcgcccagagaaggattgaaaaggctagaggcatatgcgaggagcatgaagaatgcactaccatgatgaagtgtgtggatggacacagcaccagtaataaattgatcggaagcccagtaataaagctactccgactagatcgtcaatacgttatcagcatgtggagttaaaatcggaatactaccgtgtttccagttcagcgagtagatcgtcattgtatcattagcctttggccggccggtgatggtcctgagtaactagttcaccggttacagcaagttggaataagccgtgtatatacaaaaatgtgcttgaatccatgactcggcaaataaaacaagatgtgctcatgctcatcgggacatcgttctacgtttctagctatctttttttgcgagaataaaagagttttattct

SEQ ID NO: 27990 - protein, 338 aa, Triticum aestivum
SFTNNKSPIHKKVSQSAREMAFALNASCYPSSFQSSLLPRRMAAAVMIPRRRNVLPVIRAVAVAPPAPAPAKPAAVRSRPVSVTMAKLMAKGKTALIPYITAGDPDLATTAEALHLLDACGADVIELGVPCSDPYVDGPIIQASSARALAGGATMDGVLAMLKEVTPELSCPVVLFSYYRPILCRGLAEIKEAGVHGLIVPDLPYVAAHALWSEAKKNNLELVLLTTPAIPEERMKGITKASEGFIYLVSVNGVTGPRENVNLRVKSLIQEIKKVTDKPVAVGFGISKPEHVKQIAGWGADGVIIGSAMVRQLGEAASPREGLKRLEAYARSMKNALP

SEQ ID NO: 27991 - protein, 319 aa, Triticum aestivum
MAFALNASCYPSSFQSSLLPRRMAAAVMIPRRRNVLPVIRAVAVAPPAPAPAKPAAVRSRPVSVTMAKLMAKGKTALIPYITAGDPDLATTAEALHLLDACGADVIELGVPCSDPYVDGPIIQASSARALAGGATMDGVLAMLKEVTPELSCPVVLFSYYRPILCRGLAEIKEAGVHGLIVPDLPYVAAHALWSEAKKNNLELVLLTTPAIPEERMKGITKASEGFIYLVSVNGVTGPRENVNLRVKSLIQEIKKVTDKPVAVGFGISKPEHVKQIAGWGADGVIIGSAMVRQLGEAASPREGLKRLEAYARSMKNALP

SEQ ID NO: 27992 - protein, 297 aa, Triticum aestivum
MAAAVMIPRRRNVLPVIRAVAVAPPAPAPAKPAAVRSRPVSVTMAKLMAKGKTALIPYITAGDPDLATTAEALHLLDACGADVIELGVPCSDPYVDGPIIQASSARALAGGATMDGVLAMLKEVTPELSCPVVLFSYYRPILCRGLAEIKEAGVHGLIVPDLPYVAAHALWSEAKKNNLELVLLTTPAIPEERMKGITKASEGFIYLVSVNGVTGPRENVNLRVKSLIQEIKKVTDKPVAVGFGISKPEHVKQIAGWGADGVIIGSAMVRQLGEAASPREGLKRLEAYARSMKNALP

SEQ ID NO: 27993 - DNA, 1019 bp, Triticum aestivum
acctagaacatcctaatcgaaaaagaacatcccaatcgaaaaaaacggccccggaaaaacacccaaaaaaggcggcggaaaggggagaagggaagaacatggacgggcacgtcggccagttcttccagtcggtcagctcgatcttccgcgggagcgacaccctccccgtctgcgaccgcgacatcatcgccggttgtgagacagaggttgctgaggctgcaaatgaagaacagaagaacgacagcctcatgaggctgtcatgggcgcttgttcactctaggcagcccgaggatgtcaaccgtggcattggaatgcttgaagcttctttcggcaagtctaacagtccgctacaaacaagggagaagctctatttgttggccgttggacactacagaaatggggattacacaagaagccgtgagcttctggaaagatgcttagaggttcaacctgactggaggcaagctcttactttggaaaggctccttgaagagaaaaccaaaagagatggtatgattggcatggccattgtgaccggcgcctttggacttgtggggcttgttgctggtggaatcatagctgctgcttcatcgtccaggaagaaatgaggctccggtatgcggtgaataagatgattagatgagcaagaacttgatgtgaagttgcgtaatcttaccttggcactcttgcgaccatgcatgtgcgcacttatccttgtcctgtcctgtttccatgttggaccaaccttaatcgcactattagtaaatacgacatttcaactgtcggatcgaagaatgtatgttaagctaatgctagatcatagactgttgcattggttcatatcattctgataatccatcttacaagcataagaggagctgtatcttatgccaacgtaagatcgatgttgacgcgaaaatttcagaagagcataagatggaaggaagagaattatttttggtgtttccacatctaataaagttacgcttttatgatttgtggacacgatgttcccaaac

SEQ ID NO: 27994 - protein, 201 aa, Triticum aestivum
LEHPNRKRTSQSKKTAPEKHPKKAAERGEGKNMDGHVGQFFQSVSSIFRGSDTLPVCDRDIIAGCETEVAEAANEEQKNDSLMRLSWALVHSRQPEDVNRGIGMLEASFGKSNSPLQTREKLYLLAVGHYRNGDYTRSRELLERCLEVQPDWRQALTLERLLEEKTKRDGMIGMAIVTGAFGLVGLVAGGIIAAASSSRKK

SEQ ID NO: 27995 - protein, 169 aa, Triticum aestivum
MDGHVGQFFQSVSSIFRGSDTLPVCDRDIIAGCETEVAEAANEEQKNDSLMRLSWALVHSRQPEDVNRGIGMLEASFGKSNSPLQTREKLYLLAVGHYRNGDYTRSRELLERCLEVQPDWRQALTLERLLEEKTKRDGMIGMAIVTGAFGLVGLVAGGIIAAASSSRKK

SEQ ID NO: 27996 - protein, 119 aa, Triticum aestivum
MRLSWALVHSRQPEDVNRGIGMLEASFGKSNSPLQTREKLYLLAVGHYRNGDYTRSRELLERCLEVQPDWRQALTLERLLEEKTKRDGMIGMAIVTGAFGLVGLVAGGIIAAASSSRKK

SEQ ID NO: 27997 - DNA, 2138 bp, Triticum aestivum
gagagagaaagcgagagggagacagagggttccgtgctcatccacgcatcgaatcgggtcgaccctcaggcgtctcgtcggcgccctgtcctgcccgctaagatcaggaggaccctcgccgagctagcccgccccccaccttttttgttcgtcgcgatcgtgatcggacggcgagccatccccgattcggggttgtgaacagtcgattccagggctgttttttcctttgcaatggcatctggaactgatgagaaagccaagatggagagtttgacatcgcctgcagcctttgtagagggtggggtccaggatgcatgtgatgatgcatgtagcatttgtcttgaggctttctgtgagagtgatccttccacattgacaggttgcaaacatgagttccatctccaatgcattcttgaatggtgtcaaagaagttctcagtgccctatgtgctggcagcctgtcagtatgaaggatcctaccaggcaagtgctggaaatatatattgatattcattggatattcaaatgccaaacatgttgttcaacacgtactccctccgtcccatattagggctcctttgattcaaaggaattctataggatttctggaggattgaaatccttaagaatttttcctatgttggtcctttgattcataggattggatcccataggaatttttcctatggaatcttttgtactacatttcataggaaatctaacatccactccaatctctttttacaattcctttgcttttcctgtgccatcaaacactccatgctaattctgtaggattcatgtgtgcatgccactctaaccctatacttttcctattcctacgatttgaaaatcctgcgaatcaaagagggcctaattgatgctcaaacggatgtatctagtactgaaatagtgctagatacatccatttgagcgtcaattaatatgggacggagggagtagaatttttctaactatggctgtactaatatctcagtcaagagcttctggaggcagtagagcgggagaggaatataagaaccaatcaaactcgaaatacgactatatttcatcattctgctcttggtgatttcgaagtgcggcatttacctgttgttgctaatgatgctgaaattgaagagcgtatactgcaacacctagctgctgctgcagcaatgggaaggtcacaccaacatggtagaagagaggggcagaggaaccgatctggctctcatggcagcccacagttcttggttttctctgcacatccaaatactcctgctggctctgtttcatcatcttctgctcagggtgaaggtgctgacgacttgaggattcttgttcccagagttggtgacttaccaccacatgctaatcccattgaagaagcaggcaaccaaagtccgggggtccttacctacgatgctgaacaagatgctgttgtttcatctggaaatagtacccccgtatccagtcctaggtttttcaacaggagacattcctctggacaatcaactccagtaggtaatgacagggctgggccatcagatgttcagtctttctcagattctctaaagttgcgcttaaatgctgtctcctcgaagtacaaagaatctattacaaaaagtactcgagggtggaaggagaggcttttttcacgtaactcatctgtgtctgatcttggttctgaagtgagacgcgaagttaataatggaattgcatctgtatcgaggatgatggagcgtttggaaactagaggaagtggtagaccaagctatagcccaacaacatctacttctgaagtttgtctcactacagaaccaagcaatgagagggttaccgaaagtaactctaatactactacgagtactagcaacacttctaccccttgtgtgaccatgtctggttcaaattagtgcatgctactctttctgaagaaggcctgcatgttcccattcttcatcttcaaaggtataggcaggtggcatacctgaaactccaacgacatgatgatgccgtgtcaactgttgcataaatcacctccagaaaatctgaatttgatgtattggttttgatgaaagggcagtgggcctgaggtattgcctaggaagtcaatttaatttcctgtttcatctctgt

SEQ ID NO: 27998 - protein, 246 aa, Triticum aestivum
MGRSHQHGRREGQRNRSGSHGSPQFLVFSAHPNTPAGSVSSSSAQGEGADDLRILVPRVGDLPPHANPIEEAGNQSPGVLTYDAEQDAVVSSGNSTPVSSPRFFNRRHSSGQSTPVGNDRAGPSDVQSFSDSLKLRLNAVSSKYKESITKSTRGWKERLFSRNSSVSDLGSEVRREVNNGIASVSRMMERLETRGSGRPSYSPTTSTSEVCLTTEPSNERVTESNSNTTTSTSNTSTPCVTMSGSN

SEQ ID NO: 27999 - DNA, 1723 bp, Triticum aestivum
aacaccactctctctgtttctcccctccgacatcagcggtgcacagtccttgtgcttgtgtgaagagcgagctagctagaagcaatggggatggagaagggcaaggctgaccctgccgccttcagcatcgctgaggccggctttggagaccggacggacatcgacgacgacggacgcgagaggcgtaccggtacgctggtgacggcgagcgcgcacatcatcacggcggtgatcgggtccggggtgctgtcgctggcgtgggccatcgcgcagctcgggtgggtcatcggccccgccgtgctcgtcgccttctccgtcatcacctggttctgctccagcctactggccgactgctaccgctcgccagaccccgtccacggcaagcgcaactacacctacggccaagccgtcagggccaacctaggagttagcaatacaggctctgctctctggcccaatacgtcaacttggttggcgtgaccattggctacaccatcaccacggccatcagcatgggggcgatcggacggtcgaattgcttccaccgcaatggccacaatgcggcctgcgaggcatccaacaccaccaacatgattatatttgctgccatccaaatcttgctctcgcagctccccaacttccacaagatctggtggctctccattgttgccgccgtcatgtccctcgcctactcctccattggtctcggcctctccatagcaaaaatcgcaggtggggtgcatgccaagacaacgctaacaggggtgaccgttggggtggatgtatccgggcgtgagaaaatttggaggacgttccagtctcttggggacatcgcctttgcatactcctactccaatgtgctcatcgaaatccaggacacgctgcggtcgagcccggcggagaacacggtgatgaagaaggcgtccttgatcggcgtttccacgaccaccacgttctacatgctgtgtggggtgctgggctacgcggcgttcggcagcagcgccccgggcaacttcctcacgggcttcggcttctacgagcccttctggctcgtcgacatcggcaacgtttgcatcgtcgtgcacctcgttggcgcctaccaggtcttctgccagcccatctaccagttcgtcgagggctgggcgcgctcccggtggcccgacagcgccttcctccatgccgagcgcgtgttgcgccttccggccgttctcggaggcggcgaggtcccggttagcccgttccgcctggtctggcgaacggcgtacgtggttctcacggcggtggtggccatgctgttccccttcttcaacgacttccttggcctcattggcgccgtctcgttttggccgctcaccgtctacttccccgttgagatgtacatggcacaggccaaggtgcgccggttctcgccgacgtggacgtggatgaacgtgcttagcgtcgcgtgccttgtcgtctctgtcctcgccgcagctggttctgtgcaggggctcatcaaggacgtcgcagggtacaagccattcaaggtctcctaagtcctaacatctattcagacaaggcatgcatagtgatgtgatcacgtatattataggtgaagaagggtcgaggttaatccctgtttcatgtttttatctaaaaagtggtaaacctagattgatcagtactgtattagtagcagaagcttaagccatatgggcagcaataagaaagttgacagttgact

SEQ ID NO: 28000 - protein, 340 aa, Triticum aestivum
MGAIGRSNCFHRNGHNAACEASNTTNMIIFAAIQILLSQLPNFHKIWWLSIVAAVMSLAYSSIGLGLSIAKIAGGVHAKTTLTGVTVGVDVSGREKIWRTFQSLGDIAFAYSYSNVLIEIQDTLRSSPAENTVMKKASLIGVSTTTTFYMLCGVLGYAAFGSSAPGNFLTGFGFYEPFWLVDIGNVCIVVHLVGAYQVFCQPIYQFVEGWARSRWPDSAFLHAERVLRLPAVLGGGEVPVSPFRLVWRTAYVVLTAVVAMLFPFFNDFLGLIGAVSFWPLTVYFPVEMYMAQAKVRRFSPTWTWMNVLSVACLVVSVLAAAGSVQGLIKDVAGYKPFKVS

SEQ ID NO: 28001 - protein, 314 aa, Triticum aestivum
MIIFAAIQILLSQLPNFHKIWWLSIVAAVMSLAYSSIGLGLSIAKIAGGVHAKTTLTGVTVGVDVSGREKIWRTFQSLGDIAFAYSYSNVLIEIQDTLRSSPAENTVMKKASLIGVSTTTTFYMLCGVLGYAAFGSSAPGNFLTGFGFYEPFWLVDIGNVCIVVHLVGAYQVFCQPIYQFVEGWARSRWPDSAFLHAERVLRLPAVLGGGEVPVSPFRLVWRTAYVVLTAVVAMLFPFFNDFLGLIGAVSFWPLTVYFPVEMYMAQAKVRRFSPTWTWMNVLSVACLVVSVLAAAGSVQGLIKDVAGYKPFKVS

SEQ ID NO: 28002 - protein, 285 aa, Triticum aestivum
MSLAYSSIGLGLSIAKIAGGVHAKTTLTGVTVGVDVSGREKIWRTFQSLGDIAFAYSYSNVLIEIQDTLRSSPAENTVMKKASLIGVSTTTTFYMLCGVLGYAAFGSSAPGNFLTGFGFYEPFWLVDIGNVCIVVHLVGAYQVFCQPIYQFVEGWARSRWPDSAFLHAERVLRLPAVLGGGEVPVSPFRLVWRTAYVVLTAVVAMLFPFFNDFLGLIGAVSFWPLTVYFPVEMYMAQAKVRRFSPTWTWMNVLSVACLVVSVLAAAGSVQGLIKDVAGYKPFKVS

SEQ ID NO: 28003 - DNA, 664 bp, Triticum aestivum
cacagttccacaacaccttggctttgctagacaagacagactccaagtctccggtgaagcgagcaagcagagagatggcgtccccaagtcgcacggccgccacgcccgccgtcctcctcctcctgctcctgcttgtcgccacagagatggggacgaccaaggtggtggaggcccggacgtgcctgtcgcagagccacaagttcaagggcacctgcctcagcgacagcaactgcgccggcgtgtgccgcaccgagaacttccccgacggcgagtgcaactcccaccgcctcgagcgcaagtgcttctgcaagcggacctgctaagcaagaagtcatccgatggatgctacgtatcagagcatccatgcgtgtgccggccagttagatctgatcgtccctgcatttgtttcacgtccgtcagtagtttcttcgtgtgtttcgtttacaataatggttcatctccatgcatccggaggtacgcactttaggtgacaatcggtcggcgtttcggtggtgtagttagttcgccggccgccgtgtggtgatgtaatatggtcatgggatccctatggtcattgcgttgtttcagcctttcagcatggacggacacccatatgcaatgaatccgttcgtggctttaatttgaataatatttgtgaatttgc

SEQ ID NO: 28004 - protein, 161 aa, Triticum aestivum
TVPQHLGFARQDRLQVSGEASKQRDGVPKSHGRHARRPPPPAPACRHRDGDDQGGGGPDVPVAEPQVQGHLPQRQQLRRRVPHRELPRRRVQLPPPRAQVLLQADLLSKKSSDGCYVSEHPCVCRPVRSDRPCICFTSVSSFFVCFVYNNGSSPCIRRYAL

SEQ ID NO: 28005 - protein, 106 aa, Triticum aestivum
QFHNTLALLDKTDSKSPVKRASREMASPSRTAATPAVLLLLLLLVATEMGTTKVVEARTCLSQSHKFKGTCLSDSNCAGVCRTENFPDGECNSHRLERKCFCKRTC

SEQ ID NO: 28006 - protein, 82 aa, Triticum aestivum
MASPSRTAATPAVLLLLLLLVATEMGTTKVVEARTCLSQSHKFKGTCLSDSNCAGVCRTENFPDGECNSHRLERKCFCKRTC

SEQ ID NO: 28007 - DNA, 555 bp, Triticum aestivum
gaacatcctaatcgaaaaagcaactcgacgacaatacaatacaacacgatacaccaccagttcatcttgtagcacatcgatcggagtaaagtgcgtgaaaatcaaggataatggacgcgaccaacaaggcgaccgggcacggcggcgccaccggccccgcggggaaccacggcggggctcctgccggtgctggtgccgggggcgtgcagcagctccaggcgacgagggacgaccgcaagaccgacggtggcctgggccgttccggcgggcccacggggaaccacggcggtgctcctgccgtcggcgcggccgccgccggtgagaagaagggcgtcgtggaaaatatcaaggagaagcttcccggcgccggcgggcagcagtgagagcgtcgagtcactgagctacatgtaccacacagcctctggcactacgtgtaaaaagctcagccacgcttttacaaataaataacgagctgtgtatgtatgcatgcatgtaccgatgtacttgtcttccatcggaataaaaatacttgtgttttgtaagaatttgaacggg

SEQ ID NO: 28008 - protein, 106 aa, Triticum aestivum
NILIEKATRRQYNTTRYTTSSSCSTSIGVKCVKIKDNGRDQQGDRARRRHRPRGEPRRGSCRCWCRGRAAAPGDEGRPQDRRWPGPFRRAHGEPRRCSCRRRGRRR

SEQ ID NO: 28009 - protein, 90 aa, Triticum aestivum
MDATNKATGHGGATGPAGNHGGAPAGAGAGGVQQLQATRDDRKTDGGLGRSGGPTGNHGGAPAVGAAAAGEKKGVVENIKEKLPGAGGQQ

SEQ ID NO: 28010 - DNA, 787 bp, Triticum aestivum
cctagaacatcctaatcgaaaactctgcttcgggagcgcgagctcggtgcccgcagagcagttaaaggagatcgccgtgggactggagaagagcgggcacgcgttcttatgggccgtgcgagcacccgttgcaccggacgccgacgcgacgaagcggttcgagaggcgggccgaggcggcggtggagccgctgctgccggagggattcttgaacaggacgaggggacgcgggatggtggtttcttcctgggcgccgcaagtggaggtgctccggcacccggcgaccggcgcgttcgtgacgcattgcggatggaactctacgctagaggctgttgtagccggggtgccgatgctgtgctggccgatgtacgcagagcagaggatgaacaaggtgctcgtcgtggaggagatgaaactcggggtggccatgagcggctacgacgaggggatagttaaagcggatgaggtagaggggaaggtgaaactgatcatggagtccgagcaaggggaggagatcagggagcggatgacgatggcgcaagagattgctgccaatgcgctggaaagcggtggatcttcggcggcagcatttgttgacttcctggataatctgaagatttcgatgctcgattgaatcgttgactatgcctttttagccttcttcgtgtaatcgtgttcaccttgtccaacatgtgtactctggagtggaattttcaaagtgagcaacaccacttaatcagtatgcacaaaatgaagtagcaatcagctaatggtgtccctttttttc

SEQ ID NO: 28011 - protein, 210 aa, Triticum aestivum
LEHPNRKLCFGSASSVPAEQLKEIAVGLEKSGHAFLWAVRAPVAPDADATKRFERRAEAAVEPLLPEGFLNRTRGRGMVVSSWAPQVEVLRHPATGAFVTHCGWNSTLEAVVAGVPMLCWPMYAEQRMNKVLVVEEMKLGVAMSGYDEGIVKADEVEGKVKLIMESEQGEEIRERMTMAQEIAANALESGGSSAAAFVDFLDNLKISMLD

SEQ ID NO: 28012 - protein, 133 aa, Triticum aestivum
MVVSSWAPQVEVLRHPATGAFVTHCGWNSTLEAVVAGVPMLCWPMYAEQRMNKVLVVEEMKLGVAMSGYDEGIVKADEVEGKVKLIMESEQGEEIRERMTMAQEIAANALESGGSSAAAFVDFLDNLKISMLD

SEQ ID NO: 28013 - protein, 115 aa, Triticum aestivum
MGRASTRCTGRRRDEAVREAGRGGGGAAAAGGILEQDEGTRDGGFFLGAASGGAPAPGDRRVRDALRMELYARGCCSRGADAVLADVRRAEDEQGARRGGDETRGGHERLRRGDS

SEQ ID NO: 28014 - DNA, 1764 bp, Triticum aestivum
acctagaacatcctaatcgaaaactaaaagaaaaaaaaacactcccctaatcccctccatcttgccgccgccgccgccggattgcttccgcccgtcgccatgtccgccgcgggagaccgctctcccccgcgagaggaaggccgcgcttcgattcgcgcccgggctctccccagcgggccgccggccgggaggctcatcgacgacatcctcgtggagatcctctcgcgcgtcccggccaaggaactctgccgctgcaagagcgtctcgaagcactggttcggcctcatccaccaccccgaccaccgcaagcggctcccccaaaccctggccggcttcttctacggcagcagcgccggcaccaccgcgcagcggctcctggagctgcccttccgcttcaccagcgtctcgggggaccgctgccctccgttcggcgcctccctcaccttcctgcccaaccaccacctgcccgtcgatctgctggactcctgcaacggcctcctcctctgccgatgttaccacgtctccgacggggttggcgcgttccattacgtcgtgtgcaatcccgccacccagaagtgggtcgtgttgcccagctcctgcaaggacagcagcgaggtggccaccacatctctgggcttcgacccggctctatcgtcgcatttccatgtgtttgagctggtagttgagcagaattatactcaggacactgagctttgcggagtggcggtgtattcgtctgaaaccggagaatggatttataaggagaagagatggaacagagctagtcggcactccgcaacagtctttctcgacggccttctgttttttcgtgtccttggccttgaatatcacgactgtgtggctgcggtggacacaaagggagaaacatggatgaaattcagggtccctggtggtcaggttgatgattttggtctggctgatggttttgttcagcagatgttattcagggttcctggtggtccggctgatgattttggtctggctcatggttttattcagcagtcgcagggctgcttgcattttgccaattttcagagggatgaacatggtgttggcattcgattggtggtttatgttctgaaaaactatgaaagcgaagaatggatagtgaagcatagcattaaaacttcagacatatgtggatggacagatttatggcttgatgcggattttgatttcattgcgattcatccagaatgcaactcgttgttcttcattgcggggggtgtcacattaatgtgctataatatggataatcggcaggtcaaagtgatctcctatcttggaggtgccaagccgctatttctgccctatgtgccgttgtacacagagtcactatcactgcactgctaagtggatctctgatcggagtcaattcttcattctatggggcagcgtgcttgccatgtctgcttgaatttggctctcatttgctctgactgatgaatgcatgtttttctggtttggagcaatggtggttcagtatggagggaatttgactgatttctctgtgatctgctatccaaatttgcactaaactttctgccatatgtattggtctctggtttagtcaacttctaccttcatgcattgcttaacctcgtgtagcgtttgtgttaaggtactatgatcattatgtaagacatggacaatggttatcatgcaggaaaacttttctcgaacatcatgctgagggttaaacttttatcttctacagtatttgcagccatgggaattataagc

SEQ ID NO: 28015 - protein, 424 aa, Triticum aestivum
MSAAGDRSPPREEGRASIRARALPSGPPAGRLIDDILVEILSRVPAKELCRCKSVSKHWFGLIHHPDHRKRLPQTLAGFFYGSSAGTTAQRLLELPFRFTSVSGDRCPPFGASLTFLPNHHLPVDLLDSCNGLLLCRCYHVSDGVGAFHYVVCNPATQKWVVLPSSCKDSSEVATTSLGFDPALSSHFHVFELVVEQNYTQDTELCGVAVYSSETGEWIYKEKRWNRASRHSATVFLDGLLFFRVLGLEYHDCVAAVDTKGETWMKFRVPGGQVDDFGLADGFVQQMLFRVPGGPADDFGLAHGFIQQSQGCLHFANFQRDEHGVGIRLVVYVLKNYESEEWIVKHSIKTSDICGWTDLWLDADFDFIAIHPECNSLFFIAGGVTLMCYNMDNRQVKVISYLGGAKPLFLPYVPLYTESLSLHC

SEQ ID NO: 28016 - DNA, 603 bp, Triticum aestivum
gaaaccagaacaggtgcaggcatcatcgaactctccctccgacgacatcgatccccgtctcccgatcttctcctcctgactcctgctgcagctgccaaccatggcctctgagactgtcgtcctcaaggttgcaatgtcctgcggaggctgctcgggagcggttaaaagggtgctcaccaaaatggaaggcgtcgagagcttcgacatcgacatggagcagcagaaggtgaccgtgaagggcaacgtcaagccagaagatgttttccagacggtctccaagaccgggaagaagaccgccttctgggaggccgaagccactcctgcaccggacgctaccccggccgctcctgcagcggaggcagccccggcagcagacgccgcgcctgcaccggaggctgccccagcagcagacgccgcgcctgcaccggaggcaaccccggccaacaccgtcgcttgatgggcacgcacagttgatgccgccgtgacctttgaaaactccaagatattgttgttgagagggtcatgcatgtctgggcggtttgcacgatgttacttacgagttgacaacaacgtaatggaataaacaaagtgtgtatgatttac

SEQ ID NO: 28017 - protein, 118 aa, Triticum aestivum
MASETVVLKVAMSCGGCSGAVKRVLTKMEGVESFDIDMEQQKVTVKGNVKPEDVFQTVSKTGKKTAFWEAEATPAPDATPAAPAAEAAPAADAAPAPEAAPAADAAPAPEATPANTVA

SEQ ID NO: 28018 - protein, 107 aa, Triticum aestivum
MSCGGCSGAVKRVLTKMEGVESFDIDMEQQKVTVKGNVKPEDVFQTVSKTGKKTAFWEAEATPAPDATPAAPAAEAAPAADAAPAPEAAPAADAAPAPEATPANTVA

SEQ ID NO: 28019 - protein, 91 aa, Triticum aestivum
MEGVESFDIDMEQQKVTVKGNVKPEDVFQTVSKTGKKTAFWEAEATPAPDATPAAPAAEAAPAADAAPAPEAAPAADAAPAPEATPANTVA

SEQ ID NO: 28020 - DNA, 1529 bp, Triticum aestivum
ctctcccccgatctctcgcccgcgacctgctccgataccctgcgaagtacggactccggcgagcttacggggctcgcgcggcgagctcgcggccgcgatggacgaggcgggcacctcgtcgtccgcaggctccgccccgcgcggagggcgcccggcgagatcgggagtattctataagttcacccagcaggatcttccagcttggaaaccggcaatgacaccaggatacgtgatagccattttcttgataattgggattatttttgtaccgcttggactaatttgtcttcaagcttcaaacagagttgcagaaatcgttcaccgttatgatattgattgtgtacctaatgcttacagaagcaataagcaggcctatatcaaagacagctcgatttcgaaggaatgcattcagaaagtgaaggtacaataccacatgaaagctccaatttatgtgtattatgaactcgacaacttctaccagaatcatcgtaggtatatcaaaagtagaagcgacaagcaactacgctatgggctgaaatacactgatagctcatgcagtccaatagaaaagagcgacggccttccaattgttccctgtggattgattgcctggagcttgttcaatgatacttatgattttacccgtggatccatgggaatagtggttgatcggaaaaatatttcatggagaagtgatcgggagcataagtatggcaaggatgtctatcctttcaactttcagaatggatctttgattggaggaggaaaacttgaccctgatataccactaagcaatcaggaagatcttatcgtgtggatgcgcgcagctgctcttccccagtttcgaaagctgtatggtgtcatcgaagaggatatacaagctgatgaaatcattaccatgcacataacaaacaattacaatacctacagctttggtggaaagaaaagcctggttcttacaacatcaacctggctaggtggcaagaatgactttcttggatatgtatatcttatcactggttccttgagcattttcttgtcgattctctttgctctgatccatgtgaaaatcccaaggccacatggtgatgctgcttacctatcttggagcaggaaaaacggcaataactaagcttctgtgcatagttttttctttgtgtaagctagcagtacagcaccctggccagaggtttccccgcggcgttccgtctgcgcaccctgtctcgagggaaatggcatagtagcagcttcaggtttcatacactcgacacttggacggagcatgaaatgcgtagcagcttcagatttcatacacatacttggagcatgaaacgcttgatgactgctgaggatatacggtaaggccatggttcaccgacatgttcgtgcaattcaggccagcgctctgacggcgccctcgaggaaaactagagccgtgtaaaaactgatatatgtgtatgtaaagcgccataccatggattccatgatgttgtatgaatgaatacatataatgtttcagtttcgtgccg

SEQ ID NO: 28021 - protein, 376 aa, Triticum aestivum
SPPISRPRPAPIPCEVRTPASLRGSRGELAAAMDEAGTSSSAGSAPRGGRPARSGVFYKFTQQDLPAWKPAMTPGYVIAIFLIIGIIFVPLGLICLQASNRVAEIVHRYDIDCVPNAYRSNKQAYIKDSSISKECIQKVKVQYHMKAPIYVYYELDNFYQNHRRYIKSRSDKQLRYGLKYTDSSCSPIEKSDGLPIVPCGLIAWSLFNDTYDFTRGSMGIVVDRKNISWRSDREHKYGKDVYPFNFQNGSLIGGGKLDPDIPLSNQEDLIVWMRAAALPQFRKLYGVIEEDIQADEIITMHITNNYNTYSFGGKKSLVLTTSTWLGGKNDFLGYVYLITGSLSIFLSILFALIHVKIPRPHGDAAYLSWSRKNGNN

SEQ ID NO: 28022 - protein, 344 aa, Triticum aestivum
MDEAGTSSSAGSAPRGGRPARSGVFYKFTQQDLPAWKPAMTPGYVIAIFLIIGIIFVPLGLICLQASNRVAEIVHRYDIDCVPNAYRSNKQAYIKDSSISKECIQKVKVQYHMKAPIYVYYELDNFYQNHRRYIKSRSDKQLRYGLKYTDSSCSPIEKSDGLPIVPCGLIAWSLFNDTYDFTRGSMGIVVDRKNISWRSDREHKYGKDVYPFNFQNGSLIGGGKLDPDIPLSNQEDLIVWMRAAALPQFRKLYGVIEEDIQADEIITMHITNNYNTYSFGGKKSLVLTTSTWLGGKNDFLGYVYLITGSLSIFLSILFALIHVKIPRPHGDAAYLSWSRKNGNN

SEQ ID NO: 28023 - protein, 305 aa, Triticum aestivum
MTPGYVIAIFLIIGIIFVPLGLICLQASNRVAEIVHRYDIDCVPNAYRSNKQAYIKDSSISKECIQKVKVQYHMKAPIYVYYELDNFYQNHRRYIKSRSDKQLRYGLKYTDSSCSPIEKSDGLPIVPCGLIAWSLFNDTYDFTRGSMGIVVDRKNISWRSDREHKYGKDVYPFNFQNGSLIGGGKLDPDIPLSNQEDLIVWMRAAALPQFRKLYGVIEEDIQADEIITMHITNNYNTYSFGGKKSLVLTTSTWLGGKNDFLGYVYLITGSLSIFLSILFALIHVKIPRPHGDAAYLSWSRKNGNN

SEQ ID NO: 28024 - DNA, 760 bp, Triticum aestivum
gaggagtccatccacacacacacacacacacacaagcgaaacccactccacccaaccgtctcggagcagagcagagcctctctttgtccttcaccttcgtcttcctccctctcggcagctcgacctttgcatggcagcagtggctagctccaaggggcgggtgatcgctgggagcctcgtcgcgcgcgtcctcgccggcaaggccaacgcctccccgaggagggcggtgcacgcgtcggcctacgacaagaacgtggacgagcaggtgcgcccggccttcgtgccggacgatgtgatcggcggcgccgggagcccagacaagtactggggccctcaccccaccaccggcgtcttcggccccgccgcggtcgaccccaagctggccgccaccctcgcgccggccagcgccgccgcgaatggtggcgcctccgtgctggaccagaaggtgtggttccgcccgctcgaggacgtcgagaagccccccgtcgcctgatcgccggcgaccaccaagacgacgatagcccagctcgacatctctatcactccgcttagctgggctcgaccacccacctaattataatctacagtagtgtgcttgtgctatagtacagacatggcaggcaccagaaccagtagtagtattgcggtgttgctgcctggaataagagcgagcagaagatgtgtgatgatgatgatgacactgatgttggtggctgtgatgtactcccgtcttaaaccggtactattgcaagtgtttggc

SEQ ID NO: 28025 - protein, 163 aa, Triticum aestivum
RSPSTHTHTHTSETHSTQPSRSRAEPLFVLHLRLPPSRQLDLCMAAVASSKGRVIAGSLVARVLAGKANASPRRAVHASAYDKNVDEQVRPAFVPDDVIGGAGSPDKYWGPHPTTGVFGPAAVDPKLAATLAPASAAANGGASVLDQKVWFRPLEDVEKPPVA

SEQ ID NO: 28026 - protein, 120 aa, Triticum aestivum
MAAVASSKGRVIAGSLVARVLAGKANASPRRAVHASAYDKNVDEQVRPAFVPDDVIGGAGSPDKYWGPHPTTGVFGPAAVDPKLAATLAPASAAANGGASVLDQKVWFRPLEDVEKPPVA

SEQ ID NO: 28027 - DNA, 870 bp, Triticum aestivum
atcgctataagtaaacgttctataccgggaatagccggccgtccgaccgtccgtccgggaggaaagaaacgagccatgggggacggtggtggtggtgatggcgccgccgcctcctcgtcgccgccggccgccgcggccgccccggggttctcctacctcgccgtcttccacaacttccccctcgtcgccgcgctgctcggcttcgccatcgcgcagtccatcaagttcttcctcaccaggtataaggagaagagatgggatcctaagcggcttatcggctccggtggcatgccgtcatcgcattccgcgaccgttacagcgttatcagtagccattggcttccaagagggcttcggcagtgccctctttgccacatcaacgatattcgcaagtgtggtgatgtacgatgcttctggtgtcagattgcatgctggaaagcaagcagcggtgttgaaccaaatagtctgtgaactaccggctgaacatcccttggctgaaacaagaccattgcgtgaacttttaggccatacaccgacccaggttgtcgccggtgcggtgcttgggtgtatgataggtattgcagggcaaattatcattgcagtgaccagtgttgtatgatgctgctgtgtctcaaggtgcaggagaattgctagtgcttgcagagacctgagaagaagcagcttctctggtgtttctgtgacttaggtatcggttcgatgtgtaatgatgtgccgtagtgctgttgaagattgaatcaagttttgatagcacataattgtatgttcaggtgatgttctcaggctttgatgtacagaacatctattcgataacttcattgctctagtgaaagctagaaagtggctgcatcac

SEQ ID NO: 28028 - protein, 205 aa, Triticum aestivum
IAISKRSIPGIAGRPTVRPGGKKRAMGDGGGGDGAAASSSPPAAAAAPGFSYLAVFHNFPLVAALLGFAIAQSIKFFLTRYKEKRWDPKRLIGSGGMPSSHSATVTALSVAIGFQEGFGSALFATSTIFASVVMYDASGVRLHAGKQAAVLNQIVCELPAEHPLAETRPLRELLGHTPTQVVAGAVLGCMIGIAGQIIIAVTSVV

SEQ ID NO: 28029 - protein, 180 aa, Triticum aestivum
MGDGGGGDGAAASSSPPAAAAAPGFSYLAVFHNFPLVAALLGFAIAQSIKFFLTRYKEKRWDPKRLIGSGGMPSSHSATVTALSVAIGFQEGFGSALFATSTIFASVVMYDASGVRLHAGKQAAVLNQIVCELPAEHPLAETRPLRELLGHTPTQVVAGAVLGCMIGIAGQIIIAVTSVV

SEQ ID NO: 28030 - protein, 109 aa, Triticum aestivum
MPSSHSATVTALSVAIGFQEGFGSALFATSTIFASVVMYDASGVRLHAGKQAAVLNQIVCELPAEHPLAETRPLRELLGHTPTQVVAGAVLGCMIGIAGQIIIAVTSVV

SEQ ID NO: 28031 - DNA, 1122 bp, Triticum aestivum
actgattagtattcccactcactctgtaccgtacgtaagcttgaatttcttttctttccttgccagaaaagcaaagtctcgatctccatcggcactatccaggcgacgacatgctcgccgaccgcaagccccacgcggtgtgcgtgccgtacccggcgcagggccacgccaccccgatgatgaagctggccaaggtcctccactctaggggcttccacatcaccttcgtctacaccgagcacaactaccggcgccttgtccgttcccgcggcccaggcgccatcgcgggcatcccggacttccgcttcgccaccatcccaggcgtccatctgctactccacaacgaccacctgcctcccccacctgaagagcctgcttggcggcctcaacaaaagcgcagcggggacgccgcccgtgacgtgcgtcgtcgcggacagcatcatgagcttcgcggtggacgccgcggcggagctcggcgtgccgtgcccgctcttctggaccgcgagcgcgtgcggttacatgggctattacaacttccggttcctcatggagaaaggcctcactccgcttaaaggtgaagagaaactgacgaacggctacctggacacgccggtgacaaatgctctcggcatgacaaagcacatgtgcctccgggacttcccgtccttcgtccacactcagggtggacacggtccgggccggtccggtccctgaccgagccaccatttggaccggccgccggcggtccggaccggaccggaccgaccagcctagcgggcctgttttcaaggaccggaccggcggcggcaaagcccgggccggaccgagcggaccggccagccacttccggcgacgacttggacgggtgcaacggcaaggtgggcgacgtacgcaggtactgcggcgaggtgggcgagcgccggcggcgaggtgggcgacgtgctatgcgaactgcactgggcggcgcggctgttagccattattttctctgtgccttgatgcttcttccttagcagtttatctattgcatgcaagtaatggagcgcctgcatgagcccacgattttctctgtgagggagatgccgttattagcggatcaaattggacgtgatgttgatcgtc

SEQ ID NO: 28032 - protein, 153 aa, Triticum aestivum
MLADRKPHAVCVPYPAQGHATPMMKLAKVLHSRGFHITFVYTEHNYRRLVRSRGPGAIAGIPDFRFATIPGVHLLLHNDHLPPPPEEPAWRPQQKRSGDAARDVRRRGQHHELRGGRRGGARRAVPALLDRERVRLHGLLQLPVPHGERPHSA

SEQ ID NO: 28033 - protein, 131 aa, Triticum aestivum
MMKLAKVLHSRGFHITFVYTEHNYRRLVRSRGPGAIAGIPDFRFATIPGVHLLLHNDHLPPPPEEPAWRPQQKRSGDAARDVRRRGQHHELRGGRRGGARRAVPALLDRERVRLHGLLQLPVPHGERPHSA

SEQ ID NO: 28034 - protein, 130 aa, Triticum aestivum
MKLAKVLHSRGFHITFVYTEHNYRRLVRSRGPGAIAGIPDFRFATIPGVHLLLHNDHLPPPPEEPAWRPQQKRSGDAARDVRRRGQHHELRGGRRGGARRAVPALLDRERVRLHGLLQLPVPHGERPHSA

SEQ ID NO: 28035 - DNA, 1851 bp, Triticum aestivum
atctatccaggtccagccgagcccatggcggccaagcacctgctctcccgcgcccgcctcctcctcacccgccaccgcagccgccccaccatcctcccgcccgcgctcacccgcctcctcttcggcgggacaaccacccccgccgagccggaggacgacgacaaggccagggcccgggcggcggcggcggcggcggccgtcgccctggacgccaagagggccaagcgggaaggctccgacgacgacgacgagggcgccgggctgccctggacgtcctggcggcccgacgtggcctggctgaccaaggcactcgagcccgcgctgcagctctacaagcactacaactggaagccattcgcctctgacaacatccccgcaagcacccgcacttttagcgagatcataagtgacctccagcacagcaaggtgagcatacaggactggagcctcagtgatcttaccgtcggtctctacctcatttaccttacccaagcttccgcaaagaatgctcaagccttcaagggcgttcagatttcctccaataagaaggttcaagaactaatttatcaccttgaacttgcaaaaggttgctataagggcagtgccactgggcttgcaaagcatagcatgctccggccaaggaatgttttaaagtttgtgaaagattctagtatctttagacctggatattacatcggcatcgatccacgtgctaaactggtcatccttgggattcgtgggacccatacggtttatgaccttgtcaccgatttggttgcattgagcgataagaaggtatcacctaaaggtttctcaacacactttggaacctacgaggccgctcgatggtacctacgccatgagttgagcatcatcagaaaatgtttggaaaaacacaaggactacaagttgcggttggtaggtcactcccttggaggagcttcagctgcattgcttgctataatgttaaggaagaagtcgaaggaggagcttggatttagtcccgacatagtttcagctgttggatttggagtcccaccctgtgtatcgagagagatagccgagagttgcgcaagctatgtcaccactgttgtattgcaggatgatatagttcctaggttaagtgcagcttcactggcaagattgcgaaatgagataattgaaacagattgggccaaagttttggagaaggaagattggaagcatatagtggatatcgtgaccaatgctaagctagttgtttcgtccatccaagacgtggcaaacaaacttgccgattacgccaaagttgtaacatcagctagctccggtgatgccgcgaaagaccagccccgtcttcagggcccgacgaaagttttgaagcctgacggtgaagaagacgtctatgtgcctgaggatctcttcctcccagggacgctgtattacctccagagggacgtcgagaatataaatggcgttgaggacgagtcgtacacgctctggagaggcaacgccggggagaatttccagcggatactgttgtctggcaatttgatgtctgatcacaaatgcgatagcatacagtacgcgctcagagatgtgctcaagactctgcccctccctctgcccctgcaggaggattgatactaccaagttccaaagcttatgcagaaagcgggcttcgcaaaaatcgagtgttttgttgtacagttttaggttatgcaagggattgccaagaatgacaaagtgctaggaaactctcaagttgcagttcagagtttctggtgctgatctaggtgtagtacacctcttctttttttacaagaggtatatatagtgtaactctttgaaacttgagataaaagggtgacg

SEQ ID NO: 28036 - protein, 540 aa, Triticum aestivum
IYPGPAEPMAAKHLLSRARLLLTRHRSRPTILPPALTRLLFGGTTTPAEPEDDDKARARAAAAAAAVALDAKRAKREGSDDDDEGAGLPWTSWRPDVAWLTKALEPALQLYKHYNWKPFASDNIPASTRTFSEIISDLQHSKVSIQDWSLSDLTVGLYLIYLTQASAKNAQAFKGVQISSNKKVQELIYHLELAKGCYKGSATGLAKHSMLRPRNVLKFVKDSSIFRPGYYIGIDPRAKLVILGIRGTHTVYDLVTDLVALSDKKVSPKGFSTHFGTYEAARWYLRHELSIIRKCLEKHKDYKLRLVGHSLGGASAALLAIMLRKKSKEELGFSPDIVSAVGFGVPPCVSREIAESCASYVTTVVLQDDIVPRLSAASLARLRNEIIETDWAKVLEKEDWKHIVDIVTNAKLVVSSIQDVANKLADYAKVVTSASSGDAAKDQPRLQGPTKVLKPDGEEDVYVPEDLFLPGTLYYLQRDVENINGVEDESYTLWRGNAGENFQRILLSGNLMSDHKCDSIQYALRDVLKTLPLPLPLQED

SEQ ID NO: 28037 - protein, 532 aa, Triticum aestivum
MAAKHLLSRARLLLTRHRSRPTILPPALTRLLFGGTTTPAEPEDDDKARARAAAAAAAVALDAKRAKREGSDDDDEGAGLPWTSWRPDVAWLTKALEPALQLYKHYNWKPFASDNIPASTRTFSEIISDLQHSKVSIQDWSLSDLTVGLYLIYLTQASAKNAQAFKGVQISSNKKVQELIYHLELAKGCYKGSATGLAKHSMLRPRNVLKFVKDSSIFRPGYYIGIDPRAKLVILGIRGTHTVYDLVTDLVALSDKKVSPKGFSTHFGTYEAARWYLRHELSIIRKCLEKHKDYKLRLVGHSLGGASAALLAIMLRKKSKEELGFSPDIVSAVGFGVPPCVSREIAESCASYVTTVVLQDDIVPRLSAASLARLRNEIIETDWAKVLEKEDWKHIVDIVTNAKLVVSSIQDVANKLADYAKVVTSASSGDAAKDQPRLQGPTKVLKPDGEEDVYVPEDLFLPGTLYYLQRDVENINGVEDESYTLWRGNAGENFQRILLSGNLMSDHKCDSIQYALRDVLKTLPLPLPLQED

SEQ ID NO: 28038 - protein, 331 aa, Triticum aestivum
MLRPRNVLKFVKDSSIFRPGYYIGIDPRAKLVILGIRGTHTVYDLVTDLVALSDKKVSPKGFSTHFGTYEAARWYLRHELSIIRKCLEKHKDYKLRLVGHSLGGASAALLAIMLRKKSKEELGFSPDIVSAVGFGVPPCVSREIAESCASYVTTVVLQDDIVPRLSAASLARLRNEIIETDWAKVLEKEDWKHIVDIVTNAKLVVSSIQDVANKLADYAKVVTSASSGDAAKDQPRLQGPTKVLKPDGEEDVYVPEDLFLPGTLYYLQRDVENINGVEDESYTLWRGNAGENFQRILLSGNLMSDHKCDSIQYALRDVLKTLPLPLPLQED

SEQ ID NO: 28039 - DNA, 943 bp, Triticum aestivum
gtccctggtgacgcccccaatcgagccgagctcctcgcgattcccaatccccgcacgcctcctcctccggccccgccgccgcctcgccacaggctttacagttattcaagatggaacacaaggaggcgggttgccagcagccggagggcccaatcctatgtgttaataactgtggcttctttggcagcgccgcgaccatgaacatgtgctccaagtgccacaaggagatggtcatgaaggaggagcaggccaagctggctgcctcctccttcgatagcatcgtcaacggtggcgatggtgggaaagcacctgttgttgcggctgtggccgcgagcgcagaggtggcggttgctcaagttgacgtgaaggcgcttgttgtgcagcctgctgctgatgttgcaggcaccagcgaagctgttgccgtgagccccaagaggaaggaggggccgaatcggtgctcaacttgcaggaagagggttgggctgacgggattcaactgccgatgcggtaacatgtactgttcactgcatcgctattccgacaagcatgactgccagttcgactaccggactgcagctagggatgccatcgccaaggccaacccggtggtgaaggcagagaagctcgacaagatttaggtgtcctacagggaagaaatggttgcaatctgccaaggttcatcatccgtctttgcagtgccatccttgcacctccctttcttgttggctgccgcatttcctaaattgtacggcatcgtgatgcacactgcgtcgtggcggctgcaagaactcaatcctcagtattgtggtttgcgtgttgtgtaactttattcatggtggttttttcggtcagtattgtggcttctcattttagctagctctgttatgtactattgtcccatgtgtgttaaattctgatcagtaatagtagccagcaatggttc

SEQ ID NO: 28040 - protein, 175 aa, Triticum aestivum
MEHKEAGCQQPEGPILCVNNCGFFGSAATMNMCSKCHKEMVMKEEQAKLAASSFDSIVNGGDGGKAPVVAAVAASAEVAVAQVDVKALVVQPAADVAGTSEAVAVSPKRKEGPNRCSTCRKRVGLTGFNCRCGNMYCSLHRYSDKHDCQFDYRTAARDAIAKANPVVKAEKLDKI

SEQ ID NO: 28041 - protein, 146 aa, Triticum aestivum
MNMCSKCHKEMVMKEEQAKLAASSFDSIVNGGDGGKAPVVAAVAASAEVAVAQVDVKALVVQPAADVAGTSEAVAVSPKRKEGPNRCSTCRKRVGLTGFNCRCGNMYCSLHRYSDKHDCQFDYRTAARDAIAKANPVVKAEKLDKI

SEQ ID NO: 28042 - protein, 144 aa, Triticum aestivum
MCSKCHKEMVMKEEQAKLAASSFDSIVNGGDGGKAPVVAAVAASAEVAVAQVDVKALVVQPAADVAGTSEAVAVSPKRKEGPNRCSTCRKRVGLTGFNCRCGNMYCSLHRYSDKHDCQFDYRTAARDAIAKANPVVKAEKLDKI

SEQ ID NO: 28043 - DNA, 708 bp, Triticum aestivum
tccctttacttaaccaacccccaatcccccactctttccccaacccaccgccccgttcccccgtctccccgccgcctcctcctcctccgcgtcgcaaaccctcgcccaaatccgccgaatcccgcggcccaggaaccaaggtagatcgatggcgaagagctcgttcaagctggagcacccgctcgagaggaggcaggcggaggctacccacataagggagaagtactctgacagaattcctgtgatcgttgagaaggctgggaagagtgacattcctgacatcgacaagaaaaagtacctggtccctgctgaccttacagttggacagttcgtgtacgttgtccgaaagcggatcaagctcagcgctgagaaggcgatcttcatatttgtgaagaacactcttccaccgacagctgccctgatgtctgccatttatgaggagaacaaggatgaggacggcttcctctacatgacctacagcggcgagaacaccttcggattgctctagatggcgctggctgccacggcaatcgctctgaatgcctcctgtaaataaggcgtgccaatcaactgtgtatatatctggtttgcctcgtcgtaggatctttaaattgcacaaccaagaaaaacctattcgtatcctgacttatcctatttcaatgttctgacttatatatatatatatcaagtatcgactctaaattcggt

SEQ ID NO: 28044 - protein, 119 aa, Triticum aestivum
MAKSSFKLEHPLERRQAEATHIREKYSDRIPVIVEKAGKSDIPDIDKKKYLVPADLTVGQFVYVVRKRIKLSAEKAIFIFVKNTLPPTAALMSAIYEENKDEDGFLYMTYSGENTFGLL

SEQ ID NO: 28045 - protein, 70 aa, Triticum aestivum
PLLNQPPIPHSFPNPPPRSPVSPPPPPPPRRKPSPKSAESRGPGTKVDRWRRARSSWSTRSRGGRRRLPT

SEQ ID NO: 28046 - DNA, 953 bp, Triticum aestivum
ccccaatcctctctcgtccccatccccaatccccgatctcccgaccccgacccccgacgaaaccctagccagcaaaccgcggcggcggcggcaatgggcaacccggagaagctgatggcgcagatcttcgacctcaagttcacgtccaagtcgctgcagcggcaggcgcgcaagtgcgagaaggaggagaaggagcagaagctcaaggtgaagaaggccatcgagaagggcaacgtggacggcgcgcggatctacgccgagaacgccatccgcaagcgcaccgagcacatgaactacctccgcctcgcctcccgcctcgacgccgtcgtcgcgcgcctcgacacgcaggccaagatgcaggccatcggcaagtccatgggcagcatcgtcaagtcgcttgactcctccctcgccacgggcaacctccagaagatgtccgagaccatggacagcttcgagcgccagttcgtcaacatggaggtccaggccgagttcatggagggcgccatggccggctccacctccctctccacgcccgagaccgaggtcaactccctcatgcagcaggtcgccgacgactacggcctcgaggtctccgtcggcctcccccaggccgccgcccacgccatcccggccgccaaggacaaggagaaggtcgacgaggacgacctcacccgccgcctcgcagagctcaaggcccgcggctaaactgaacggccttcgcttcacttcaggtacggctcatgcaatgttcactcgcctcgccgtatgtcagttgtcaagggctgctcatatctgacagccccgtaaatattgttaacgcccatgtgggtgctctctttgtctgggatctctatgtggaactgatttaaacgctgctgtgtgatatgacgtgttattccgaatcggagtgtgatattgatattatgagtcagtaataatacatgtgcttg

SEQ ID NO: 28047 - protein, 235 aa, Triticum aestivum
PQSSLVPIPNPRSPDPDPRRNPSQQTAAAAAMGNPEKLMAQIFDLKFTSKSLQRQARKCEKEEKEQKLKVKKAIEKGNVDGARIYAENAIRKRTEHMNYLRLASRLDAVVARLDTQAKMQAIGKSMGSIVKSLDSSLATGNLQKMSETMDSFERQFVNMEVQAEFMEGAMAGSTSLSTPETEVNSLMQQVADDYGLEVSVGLPQAAAHAIPAAKDKEKVDEDDLTRRLAELKARG

SEQ ID NO: 28048 - protein, 204 aa, Triticum aestivum
MGNPEKLMAQIFDLKFTSKSLQRQARKCEKEEKEQKLKVKKAIEKGNVDGARIYAENAIRKRTEHMNYLRLASRLDAVVARLDTQAKMQAIGKSMGSIVKSLDSSLATGNLQKMSETMDSFERQFVNMEVQAEFMEGAMAGSTSLSTPETEVNSLMQQVADDYGLEVSVGLPQAAAHAIPAAKDKEKVDEDDLTRRLAELKARG

SEQ ID NO: 28049 - protein, 197 aa, Triticum aestivum
MAQIFDLKFTSKSLQRQARKCEKEEKEQKLKVKKAIEKGNVDGARIYAENAIRKRTEHMNYLRLASRLDAVVARLDTQAKMQAIGKSMGSIVKSLDSSLATGNLQKMSETMDSFERQFVNMEVQAEFMEGAMAGSTSLSTPETEVNSLMQQVADDYGLEVSVGLPQAAAHAIPAAKDKEKVDEDDLTRRLAELKARG

SEQ ID NO: 28050 - DNA, 1748 bp, Triticum aestivum
aatttcgtttcccattttgtacgcagctaataattctcgagcagcgttgcctgcacgcccagcctgtggtaaaaaacaagacccgccgtgtcacccgctcaaaagcttcctcgaccgcgggcataatccatccgagactcctagccgatcgtgcaccaaccagatgacgaccccgaccgtcgtgctgctgccggtctgggccgccggccacctcatgtccatgctcgacgccggcaagcggctgctcgcgcgcagcggcggcgcgctgtcgctcacggtgctcgtcatgccggcgccgggggagaaccacaggtgcgaggtcgccgcccacatacagagggaggaggcgtccggcctggacatccgcttccaccacctccccgccgtcgagcccccgacggactgcctgggcatcgaggagttcgtctcccggttcgtgcagctccacgcggcccacgtgaaggcggccgtctccggcctggcgtgccccgtggccgcgctcgtcctcgacttcttctgcacgaccatgctcgacgtgtcccgggagctcgccgtaccggcctacgtgtacatcaccgccgacgccgccttctgcgcgctcctcctgcgcctgccggcgctccacgaggaggtggccgtcgagttcgaggagatggagggcatggtgggcgtgcctggcctgccgccggtgccgccgtcgtccctcccggttccggtgatggacaagaagaaccccaactacacgtggttcatgtaccacggcaggcgtttcacggaggccaagggcgtcatcatcaacacggtcaccgagctggagcagagcgttcttgcagccatcggcgacggctggtgcgcgcccggatttcctgccccggcggtctatccagtaggccccgtgctctccgtgaccccgccagcggagcagccgcacgaatgcgtgcggtggctggacgcgcagcctccggcgtccgtggtgctcctctgcttcggcagcatggggttctccacggcggcacaggcgcacgagatagcccacgggctggagcgcagcgggcaccgcttcctgtgggctctgcgcggcccgccggctgccggcgcgggaccaggacagccctcggacgcggacctcggggagctgctcccggaggggttcctggagaggacgaaggagaagggcctggtgtggccgacgaaggccccgcagaaggagatcctggcgcacgccgccgtggggggcttcgtgacgcacggcgggtggaactcgaccctggagagcctgtggttcggcgtgccgatggtgccgtggccgctgtacgcggagcagcacctcaacgcgttcacgctggtggcctacatgggcgtggccgtggccatggaggtggaccggaagaggaacaactttgtcgccgcgtcggagctggagcgggccgtgaaggcgctcatggagcgcgactccgaggaggggaagagggcgagggagaaggccgcggagatgaaggccgcgtgccggaaggccgtcgaggagggcgggtcctcctactctgccctcgggaggctctctgaggcgataatcaaaggcgccagtaagtaattgacgaacatccggagacgaacttggagagtgtgggtgctctgtggttgcagttcttgttctgcctgccgatcattccgagttgtgtgccggcatcgcgagcaatccacctccggtagagagccttaataaaaccacatgctcctcgtttggtctc

SEQ ID NO: 28051 - protein, 529 aa, Triticum aestivum
ISFPILYAANNSRAALPARPACGKKQDPPCHPLKSFLDRGHNPSETPSRSCTNQMTTPTVVLLPVWAAGHLMSMLDAGKRLLARSGGALSLTVLVMPAPGENHRCEVAAHIQREEASGLDIRFHHLPAVEPPTDCLGIEEFVSRFVQLHAAHVKAAVSGLACPVAALVLDFFCTTMLDVSRELAVPAYVYITADAAFCALLLRLPALHEEVAVEFEEMEGMVGVPGLPPVPPSSLPVPVMDKKNPNYTWFMYHGRRFTEAKGVIINTVTELEQSVLAAIGDGWCAPGFPAPAVYPVGPVLSVTPPAEQPHECVRWLDAQPPASVVLLCFGSMGFSTAAQAHEIAHGLERSGHRFLWALRGPPAAGAGPGQPSDADLGELLPEGFLERTKEKGLVWPTKAPQKEILAHAAVGGFVTHGGWNSTLESLWFGVPMVPWPLYAEQHLNAFTLVAYMGVAVAMEVDRKRNNFVAASELERAVKALMERDSEEGKRAREKAAEMKAACRKAVEEGGSSYSALGRLSEAIIKGASK

SEQ ID NO: 28052 - protein, 475 aa, Triticum aestivum
MTTPTVVLLPVWAAGHLMSMLDAGKRLLARSGGALSLTVLVMPAPGENHRCEVAAHIQREEASGLDIRFHHLPAVEPPTDCLGIEEFVSRFVQLHAAHVKAAVSGLACPVAALVLDFFCTTMLDVSRELAVPAYVYITADAAFCALLLRLPALHEEVAVEFEEMEGMVGVPGLPPVPPSSLPVPVMDKKNPNYTWFMYHGRRFTEAKGVIINTVTELEQSVLAAIGDGWCAPGFPAPAVYPVGPVLSVTPPAEQPHECVRWLDAQPPASVVLLCFGSMGFSTAAQAHEIAHGLERSGHRFLWALRGPPAAGAGPGQPSDADLGELLPEGFLERTKEKGLVWPTKAPQKEILAHAAVGGFVTHGGWNSTLESLWFGVPMVPWPLYAEQHLNAFTLVAYMGVAVAMEVDRKRNNFVAASELERAVKALMERDSEEGKRAREKAAEMKAACRKAVEEGGSSYSALGRLSEAIIKGASK

SEQ ID NO: 28053 - protein, 458 aa, Triticum aestivum
MSMLDAGKRLLARSGGALSLTVLVMPAPGENHRCEVAAHIQREEASGLDIRFHHLPAVEPPTDCLGIEEFVSRFVQLHAAHVKAAVSGLACPVAALVLDFFCTTMLDVSRELAVPAYVYITADAAFCALLLRLPALHEEVAVEFEEMEGMVGVPGLPPVPPSSLPVPVMDKKNPNYTWFMYHGRRFTEAKGVIINTVTELEQSVLAAIGDGWCAPGFPAPAVYPVGPVLSVTPPAEQPHECVRWLDAQPPASVVLLCFGSMGFSTAAQAHEIAHGLERSGHRFLWALRGPPAAGAGPGQPSDADLGELLPEGFLERTKEKGLVWPTKAPQKEILAHAAVGGFVTHGGWNSTLESLWFGVPMVPWPLYAEQHLNAFTLVAYMGVAVAMEVDRKRNNFVAASELERAVKALMERDSEEGKRAREKAAEMKAACRKAVEEGGSSYSALGRLSEAIIKGASK

SEQ ID NO: 28054 - DNA, 1274 bp, Triticum aestivum
accgttcccgacctcattttttacagagactccggcgactccagtccatcgctcgtggaaaatctcagggtcaaagcaggaggcacaccttgatggcgcccctggagtcaggctcctcacagctcttcttcgacagcagtgcgatcgacggcccgttcgatgtctacgagtgcggtaccttggcaggcaccagagtcgtgccagatccacctccacctggaacctcttatggcaagcagagaagttccaggaatgctaaaaaggctcgtcgtgttcatggctctgaggaggtcgaggactgctggaacaggctattcttggaaggatatcaagccgatgtccgcgtatcgacgggcgatggcagccagatcttatcgcattcgtgcattcttggcatcagatctccggttctgagaagtatgttggaagaagctagaattgaacatggtttcagaaacatcctgatttccggtgtcccatcagaagtagtccgtgtcttcatcagatttctgtattcttcacgctttgagcagggtgagatgaagaagtatgcccttcatttgctcgtactctctcatgttttctcggtacaatcgctgaagatcgtctgcaccgaccagctcgagaggttttttcttgctcctgataacgtggtggacgttctacaactggctagactctgtgacgcaccaaggctctcgctcatctgtacccgtatgatcgttggagatttcaagaccatctctctgtcagaagggtggaaagtgatgagacgggccaacccaagcctggagcaagagcttcttgagtttcttgttgaagtggacacaagaaggcaagaaagagctaaaaggatggaggaaaagaaggtttatcttcagttgtatgaagctatggaagctcttgttcatatatgccgagacggttgtaggacgattggcccctgggatcagaaactcaagggcagtcaggttgtttgcaagtttcctgcctgcaagggcatcgagttgctcgtgcgccatttctcggcatgcaaaaaacgtgtgcctcgcggctgcgccaactgcaagcgcatgtggcagcttcttgagctgcattctcgaatgtgttccacaccagacacctgcagggttcctctatgcaggtgaggtcttgtctttgttggtcaggatcatttcatttagacacacaagttttctaggttaatacaacagatgtttgctttcataaaaaaaaaaaaaaaaaagcttatcgataccgtcgacctcgagggg

SEQ ID NO: 28055 - protein, 381 aa, Triticum aestivum
RSRPHFLQRLRRLQSIARGKSQGQSRRHTLMAPLESGSSQLFFDSSAIDGPFDVYECGTLAGTRVVPDPPPPGTSYGKQRSSRNAKKARRVHGSEEVEDCWNRLFLEGYQADVRVSTGDGSQILSHSCILGIRSPVLRSMLEEARIEHGFRNILISGVPSEVVRVFIRFLYSSRFEQGEMKKYALHLLVLSHVFSVQSLKIVCTDQLERFFLAPDNVVDVLQLARLCDAPRLSLICTRMIVGDFKTISLSEGWKVMRRANPSLEQELLEFLVEVDTRRQERAKRMEEKKVYLQLYEAMEALVHICRDGCRTIGPWDQKLKGSQVVCKFPACKGIELLVRHFSACKKRVPRGCANCKRMWQLLELHSRMCSTPDTCRVPLCR

SEQ ID NO: 28056 - protein, 351 aa, Triticum aestivum
MAPLESGSSQLFFDSSAIDGPFDVYECGTLAGTRVVPDPPPPGTSYGKQRSSRNAKKARRVHGSEEVEDCWNRLFLEGYQADVRVSTGDGSQILSHSCILGIRSPVLRSMLEEARIEHGFRNILISGVPSEVVRVFIRFLYSSRFEQGEMKKYALHLLVLSHVFSVQSLKIVCTDQLERFFLAPDNVVDVLQLARLCDAPRLSLICTRMIVGDFKTISLSEGWKVMRRANPSLEQELLEFLVEVDTRRQERAKRMEEKKVYLQLYEAMEALVHICRDGCRTIGPWDQKLKGSQVVCKFPACKGIELLVRHFSACKKRVPRGCANCKRMWQLLELHSRMCSTPDTCRVPLCR

SEQ ID NO: 28057 - protein, 242 aa, Triticum aestivum
MLEEARIEHGFRNILISGVPSEVVRVFIRFLYSSRFEQGEMKKYALHLLVLSHVFSVQSLKIVCTDQLERFFLAPDNVVDVLQLARLCDAPRLSLICTRMIVGDFKTISLSEGWKVMRRANPSLEQELLEFLVEVDTRRQERAKRMEEKKVYLQLYEAMEALVHICRDGCRTIGPWDQKLKGSQVVCKFPACKGIELLVRHFSACKKRVPRGCANCKRMWQLLELHSRMCSTPDTCRVPLCR

SEQ ID NO: 28058 - DNA, 1204 bp, Triticum aestivum
ctgtcgcttcatccttcacgccaccgctctcctcccccttctatatcaatcgccgctcccccggcggcagacacagcggagcgcatctcgacggcggccatggcgacgaacgagagaaccgtcgcgtccgtcgaccccgacgtcgcgctcgcctacaggttccccgaggtctccttcgcctacgacgagagggacgtggcgctctacgcgctcggcgtgggggcctgcggcgcggacgccgtcgacgacaaggagctccacctcgtgcaccacagggacagccagcgccacatcaaggtgcttcctacctttgtttctttatttcctaacaagaacagcaatgggcgtggaattgttaatgtgcctggcattcacttcgatgaaagccttctattgcacggtcaacaatacatagagatctacaagccaattccttcatgtgccagtgttgtaaacaaggttaaggtagctggtttgcacgacaaagggaaagcaacaattcttgagattgaaactacgaccagtctcaaggattctggcgaagtgttatgtatgaacaggagcactattttcttgcgtggtgcgggaggtttttcggactcttccaggccatactcgtatacaacttatcctgccaaccagatttctcgcatttccattccaaattccacaccttccgcagtgcatgaagaccagacacaacaatcccaggcactcttatacaggttatctggggattataatcctttgcattcagaccctatggttgcacagattgcaggattcactcgtccaatactgcacggcctctgcactctggggttcgcggccagggcagtcatcaagtctttctgcaacggggacccagcagcggtgcggaacatcttcggccggttcctgctgcacgtctaccccggcgaaacgctggtcaccgagatgtgggtcgacggccagagggtgcagtaccagaccaaggcgaaagagcgtgaccgcgccgtgctttccggatacgtgctgctcaaacacatcccctcatcattgtaagtgctgtgaggatcatactttttaatcggcgatttgattagttaactgtggtggtctgaagagaggatggtttccggtgtaaactatatatactcctaagagatgacacggttgtgcagatgatgaactcgtattagtgcttgctttttgttttgttcgt

SEQ ID NO: 28059 - protein, 347 aa, Triticum aestivum
LSLHPSRHRSPPPSISIAAPPAADTAERISTAAMATNERTVASVDPDVALAYRFPEVSFAYDERDVALYALGVGACGADAVDDKELHLVHHRDSQRHIKVLPTFVSLFPNKNSNGRGIVNVPGIHFDESLLLHGQQYIEIYKPIPSCASVVNKVKVAGLHDKGKATILEIETTTSLKDSGEVLCMNRSTIFLRGAGGFSDSSRPYSYTTYPANQISRISIPNSTPSAVHEDQTQQSQALLYRLSGDYNPLHSDPMVAQIAGFTRPILHGLCTLGFAARAVIKSFCNGDPAAVRNIFGRFLLHVYPGETLVTEMWVDGQRVQYQTKAKERDRAVLSGYVLLKHIPSSL

SEQ ID NO: 28060 - protein, 314 aa, Triticum aestivum
MATNERTVASVDPDVALAYRFPEVSFAYDERDVALYALGVGACGADAVDDKELHLVHHRDSQRHIKVLPTFVSLFPNKNSNGRGIVNVPGIHFDESLLLHGQQYIEIYKPIPSCASVVNKVKVAGLHDKGKATILEIETTTSLKDSGEVLCMNRSTIFLRGAGGFSDSSRPYSYTTYPANQISRISIPNSTPSAVHEDQTQQSQALLYRLSGDYNPLHSDPMVAQIAGFTRPILHGLCTLGFAARAVIKSFCNGDPAAVRNIFGRFLLHVYPGETLVTEMWVDGQRVQYQTKAKERDRAVLSGYVLLKHIPSSL

SEQ ID NO: 28061 - DNA, 778 bp, Triticum aestivum
aaaaacacttcttttcccaaccaaatccaccaaatctcgtgcgagaaattttgcaatggcgtccgaagtggatcccgccgtggagccccacatcgtcgttgaggagtcgtccagcgccggaggcagccgagaggaggcgcccccagaggcttcggcggtagaagcggtggtcgagacagagccggcggatgcggaggaagaaggggaatgcgggttctgcctgtacatgaaagccggaggttgcaaggaggcgttcgtgtcgtgggaggagtgcatgcaggcggcggagaaggagggctccgacatggttgagcgctgcttccaagtcaccaccgacctcaagaagtgcatggacgcccacgccgactactacgcccccgtgctccaggctgagcagaccgtctccgaccaagccgaagcggccatcgctgctgccaccgccgatacaaacaagaacagcggagaggaatccgctccctccctggacactgattgggtggtggttgaggaggctacttcctccacgcccgccgagggggtgaagaaggaagaagcaatcgtcgacaaggcagagtccttgtctttgggtaactaataattggggagggttagatttttcagctcatgataactttttattcagtatgagttatgatctgattgaggcgcatgaggctagtttttatccccttgtggggaaataaggttgttcttccaataactgttggacatgataccgaatttactgaagaatttctggatgcttttatatgatact

SEQ ID NO: 28062 - protein, 197 aa, Triticum aestivum
KTLLFPTKSTKSRARNFAMASEVDPAVEPHIVVEESSSAGGSREEAPPEASAVEAVVETEPADAEEEGECGFCLYMKAGGCKEAFVSWEECMQAAEKEGSDMVERCFQVTTDLKKCMDAHADYYAPVLQAEQTVSDQAEAAIAAATADTNKNSGEESAPSLDTDWVVVEEATSSTPAEGVKKEEAIVDKAESLSLGN

SEQ ID NO: 28063 - protein, 179 aa, Triticum aestivum
MASEVDPAVEPHIVVEESSSAGGSREEAPPEASAVEAVVETEPADAEEEGECGFCLYMKAGGCKEAFVSWEECMQAAEKEGSDMVERCFQVTTDLKKCMDAHADYYAPVLQAEQTVSDQAEAAIAAATADTNKNSGEESAPSLDTDWVVVEEATSSTPAEGVKKEEAIVDKAESLSLGN

SEQ ID NO: 28064 - protein, 122 aa, Triticum aestivum
MKAGGCKEAFVSWEECMQAAEKEGSDMVERCFQVTTDLKKCMDAHADYYAPVLQAEQTVSDQAEAAIAAATADTNKNSGEESAPSLDTDWVVVEEATSSTPAEGVKKEEAIVDKAESLSLGN

SEQ ID NO: 28065 - DNA, 506 bp, Triticum aestivum
cagagagttccgtttcttttctccccctcttcctcgcagaaggagcggcaagtaatccggtcgaattgataggggagacgaggagcagcgatggccgccgctcgagcccgatggcggttcctcgcgctgcccctcgcgctgctcctcgcgatcggctcgtcgcgcggcctcgacgcggcgcccaagccccccgtccccaaggccatctccgacctgagggaggcgatcgtcaaggggctggggctccagtcggaggagctcaaggtgtccgggttcgacgtgagggacgcgctggtggggcatgcggtggcgtacgagttcgacatggaggtcgggaggaaggccgtgccggtgcgactgctcgaggacgtcaaccggtgggacttcgtcgacctgcccatcttccggtcccaggccgacgccgacgacacggcgctcgccgagatcgggcgggggagcttcgaccccacgctgtgttaaacacaataaagttggaactggagggg

SEQ ID NO: 28066 - protein, 168 aa, Triticum aestivum
ESSVSFLPLFLAEGAASNPVELIGETRSSDGRRSSPMAVPRAAPRAAPRDRLVARPRRGAQAPRPQGHLRPEGGDRQGAGAPVGGAQGVRVRREGRAGGACGGVRVRHGGREEGRAGATARGRQPVGLRRPAHLPVPGRRRRHGARRDRAGELRPHAVLNTIKLELEG

SEQ ID NO: 28067 - protein, 132 aa, Triticum aestivum
MAVPRAAPRAAPRDRLVARPRRGAQAPRPQGHLRPEGGDRQGAGAPVGGAQGVRVRREGRAGGACGGVRVRHGGREEGRAGATARGRQPVGLRRPAHLPVPGRRRRHGARRDRAGELRPHAVLNTIKLELEG

SEQ ID NO: 28068 - protein, 129 aa, Triticum aestivum
MAAARARWRFLALPLALLLAIGSSRGLDAAPKPPVPKAISDLREAIVKGLGLQSEELKVSGFDVRDALVGHAVAYEFDMEVGRKAVPVRLLEDVNRWDFVDLPIFRSQADADDTALAEIGRGSFDPTLC

SEQ ID NO: 28069 - DNA, 1407 bp, Triticum aestivum
gcaagcaaccacccatggacacgcccgtgccgaaacggcctcgcctcgtgccagcaccggcaccggcgcctcggacaatcgccgacatggccccggagatcctcctccgcctccctccagacgaccccccgcgccttgtgcgcgcctcccttgtctgctggcgctggcgccgcctcctcaccgacccggcgtacctccgccgctaccgcgcattccatcgaacacctcccatgctcggcttcgtcctcaacctgaaacagcactaccaaggcatggcccagctcgtccccacctcctccttccgccccgctgcctccgaccgccccggcctgaatgtgctggacgcccgccacggccgcgtgctcctccacaccgctcagggccagcgcctcgtcgtctgggaccccgtcacgggtgaagagtgcaagatcccccgcgtgccgtcctacgcgctcggcttcaacgcggccgtgctctgcgccgcggtcggctgcgaccacctcgactgtcatggcggacccttccgtgtcgccttcgtgggatgcggcgaacgcggcatcacgttcgcctgcacctactcgtcggaggccggtgcctggagccagcgaattgagatcgagcagccggcgtttgttgacgggcgaccgagcgtccttgtggggaacacgctctacttcacctgcgacccgtacctcagtttcaaaatgttggggtacaacatcgtcacgcaggaactctcggtgatctggccgccgtcccagcatgagtactactcttgcactgtcctcgtgaaagcggatgatggcaagctggggttcgccggcgtgcagaatggcacgctctacctgtggtcgatgaaggacggcgccgacggatatgtggaatgggtgcagcgcagagttatccagcacaagacgatgctccgtactcgtggcctctcgacgccacctgaggtcgttggcttcgcggatggtcacggattcattttcgtgaggacaggcaacacggtgttctccatggatctcaagtcaggccatgtccgtaaagtatacacctgcaggtcaagaaactacgacgtcatcgttgttccctacatgagcttctgcactccagatcgtgctatgggcagactgccatcgccacgaggacccactgtcatcctgtaacaaggacttgctgctcttggcttgttgcatagatgacgctcaaagtattttgctttcaaggtggactgtttaagtagttaccatggtcaatgttggtatgtttagtttacagtgtggcagttgaaacaaggaaaaaagtaatatgtaatcacggtcagtttagtatgttctctttgcagttgtgaagcttaagcaagactgatggttaattagtagaaaaaaaaaaaaaaaaaagcttatc

SEQ ID NO: 28070 - protein, 387 aa, Triticum aestivum
KQPPMDTPVPKRPRLVPAPAPAPRTIADMAPEILLRLPPDDPPRLVRASLVCWRWRRLLTDPAYLRRYRAFHRTPPMLGFVLNLKQHYQGMAQLVPTSSFRPAASDRPGLNVLDARHGRVLLHTAQGQRLVVWDPVTGEECKIPRVPSYALGFNAAVLCAAVGCDHLDCHGGPFRVAFVGCGERGITFACTYSSEAGAWSQRIEIEQPAFVDGRPSVLVGNTLYFTCDPYLSFKMLGYNIVTQELSVIWPPSQHEYYSCTVLVKADDGKLGFAGVQNGTLYLWSMKDGADGYVEWVQRRVIQHKTMLRTRGLSTPPEVVGFADGHGFIFVRTGNTVFSMDLKSGHVRKVYTCRSRNYDVIVVPYMSFCTPDRAMGRLPSPRGPTVIL

SEQ ID NO: 28071 - protein, 383 aa, Triticum aestivum
MDTPVPKRPRLVPAPAPAPRTIADMAPEILLRLPPDDPPRLVRASLVCWRWRRLLTDPAYLRRYRAFHRTPPMLGFVLNLKQHYQGMAQLVPTSSFRPAASDRPGLNVLDARHGRVLLHTAQGQRLVVWDPVTGEECKIPRVPSYALGFNAAVLCAAVGCDHLDCHGGPFRVAFVGCGERGITFACTYSSEAGAWSQRIEIEQPAFVDGRPSVLVGNTLYFTCDPYLSFKMLGYNIVTQELSVIWPPSQHEYYSCTVLVKADDGKLGFAGVQNGTLYLWSMKDGADGYVEWVQRRVIQHKTMLRTRGLSTPPEVVGFADGHGFIFVRTGNTVFSMDLKSGHVRKVYTCRSRNYDVIVVPYMSFCTPDRAMGRLPSPRGPTVIL

SEQ ID NO: 28072 - protein, 359 aa, Triticum aestivum
MAPEILLRLPPDDPPRLVRASLVCWRWRRLLTDPAYLRRYRAFHRTPPMLGFVLNLKQHYQGMAQLVPTSSFRPAASDRPGLNVLDARHGRVLLHTAQGQRLVVWDPVTGEECKIPRVPSYALGFNAAVLCAAVGCDHLDCHGGPFRVAFVGCGERGITFACTYSSEAGAWSQRIEIEQPAFVDGRPSVLVGNTLYFTCDPYLSFKMLGYNIVTQELSVIWPPSQHEYYSCTVLVKADDGKLGFAGVQNGTLYLWSMKDGADGYVEWVQRRVIQHKTMLRTRGLSTPPEVVGFADGHGFIFVRTGNTVFSMDLKSGHVRKVYTCRSRNYDVIVVPYMSFCTPDRAMGRLPSPRGPTVIL

SEQ ID NO: 28073 - DNA, 1205 bp, Triticum aestivum
actcctctccaccgcctggacgccgcgccgccgcctcgaccgagcctcggccacgcggctcgccccgtcccccggcctgtcctgccgctcctcccggccgacgcgctccgtgcgcccgatggcgtcgtcgacgaccgcggcccgggccgacgcggcgccgccggggctgaaggagggcatcgcggggctctacgacgagtcgtccggcctgtgggagagcatctggggcgagcacatgcaccacggcttctacgactccggcgaggccgcctccatgtccgaccaccgccgcgcccagatccgcatgatcgaggaggccctcgccttcgccgccgtccccgacgatccgacaaacaaaccgaaaacgattgttgatgttggatgcggaatcggtggtagctcaagatacctggcgaacaaatatggagcacaatgctctgggatcacattgagcccagtgcaagccgagagaggaaatgccctcgcagcagtgcaggggttgtcggacaaggcttctttccaagttgctgatgctctggagcaaccatttcctgatgggcagtttgatcttgtctggtctatggagagtggtgagcacatgccgaacaaacagaagtttgtaagcgagctggcacgcgtcgcagctccaggagcaactatcatcatcgtgacctggtgccataggaacctcgcgccgtcggaggactcactgaaacctgacgagctgaatcttttgaaaaagatttgtgatgcatattacctcccagattggtgctcgccctcggattatgtcaagattgccgagtcattgtctcttgaggatatcaaaacggctgactggtctgaaaacgtggccccgttctggcctgctgtcatccaatcagcactgacatggaaaggcctcacttctctactaaggagtggatggaagacgataaagggagcactggtgatgcctctcatgatccaaggctacaagaaaggcctcattaagttcagcatcatcacctgccgcaaaccccaagcagcaatagaaggagaacctgaggccgcatcgcccagtgtagaatagaacccatgtgattggaatagactcggcttgctgtcgcctcgtagctgaataatttcatgttaccgtgcatctgtatctgcaactggaagtgccatatgaaagtggttcctaaagcaaaattctcctcacattc

SEQ ID NO: 28074 - protein, 356 aa, Triticum aestivum
LLSTAWTPRRRLDRASATRLAPSPGLSCRSSRPTRSVRPMASSTTAARADAAPPGLKEGIAGLYDESSGLWESIWGEHMHHGFYDSGEAASMSDHRRAQIRMIEEALAFAAVPDDPTNKPKTIVDVGCGIGGSSRYLANKYGAQCSGITLSPVQAERGNALAAVQGLSDKASFQVADALEQPFPDGQFDLVWSMESGEHMPNKQKFVSELARVAAPGATIIIVTWCHRNLAPSEDSLKPDELNLLKKICDAYYLPDWCSPSDYVKIAESLSLEDIKTADWSENVAPFWPAVIQSALTWKGLTSLLRSGWKTIKGALVMPLMIQGYKKGLIKFSIITCRKPQAAIEGEPEAASPSVE

SEQ ID NO: 28075 - protein, 317 aa, Triticum aestivum
MASSTTAARADAAPPGLKEGIAGLYDESSGLWESIWGEHMHHGFYDSGEAASMSDHRRAQIRMIEEALAFAAVPDDPTNKPKTIVDVGCGIGGSSRYLANKYGAQCSGITLSPVQAERGNALAAVQGLSDKASFQVADALEQPFPDGQFDLVWSMESGEHMPNKQKFVSELARVAAPGATIIIVTWCHRNLAPSEDSLKPDELNLLKKICDAYYLPDWCSPSDYVKIAESLSLEDIKTADWSENVAPFWPAVIQSALTWKGLTSLLRSGWKTIKGALVMPLMIQGYKKGLIKFSIITCRKPQAAIEGEPEAASPSVE

SEQ ID NO: 28076 - protein, 278 aa, Triticum aestivum
MHHGFYDSGEAASMSDHRRAQIRMIEEALAFAAVPDDPTNKPKTIVDVGCGIGGSSRYLANKYGAQCSGITLSPVQAERGNALAAVQGLSDKASFQVADALEQPFPDGQFDLVWSMESGEHMPNKQKFVSELARVAAPGATIIIVTWCHRNLAPSEDSLKPDELNLLKKICDAYYLPDWCSPSDYVKIAESLSLEDIKTADWSENVAPFWPAVIQSALTWKGLTSLLRSGWKTIKGALVMPLMIQGYKKGLIKFSIITCRKPQAAIEGEPEAASPSVE

SEQ ID NO: 28077 - DNA, 725 bp, Triticum aestivum
tcaacaattcatccccaatcatgcctgttgcaaagtcgaagcagaggagcaccctcttcgtcttcctgtacttcgcctcttcggcagcgctcgcggtgctgctctccgcgtcctggcaatggcttgccggggcatccgcccggcccgcccgcatgcgcctgttcatgcacgacgtgctcaccggcccgggcgccacggcggtcgaggtcgtgaacggcacggggccatcgctgttcgggggcgacccgccgctgcggttcgggcaggtggtggtgatcgacgacgcgctcacggatgggccggacccggcgtcgaggcccgtgggacgtgcgcaggtgacctacgtgttcgcgtccatgcacgacccggcgctgctcttctgcatgaatgtggtgctcacggcggggccctactccgggagcaccttcgccgtcgtcggccgcgacaacatcgtcgagccactgcgggagctgtcggtggtgggcggcacagggaggttcaggatggcgacggggtacgtgctctggaggacggcgagctggcagctacgcaagaacgccgtcctcgacctggacgtgtttatctacgtccacgcccacgcccacccccatgcatgatggacggctccaaccctttattttatgttcctttcattttatgtcccttccattttatgtgtattatgtccctttcattttatttttgacatattagcgttttgtttt

SEQ ID NO: 28078 - protein, 234 aa, Triticum aestivum
QQFIPNHACCKVEAEEHPLRLPVLRLFGSARGAALRVLAMACRGIRPARPHAPVHARRAHRPGRHGGRGRERHGAIAVRGRPAAAVRAGGGDRRRAHGWAGPGVEARGTCAGDLRVRVHARPGAALLHECGAHGGALLREHLRRRRPRQHRRATAGAVGGGRHREVQDGDGVRALEDGELAATQERRPRPGRVYLRPRPRPPPCMMDGSNPLFYVPFILCPFHFMCIMSLSFYF

SEQ ID NO: 28079 - protein, 204 aa, Triticum aestivum
NNSSPIMPVAKSKQRSTLFVFLYFASSAALAVLLSASWQWLAGASARPARMRLFMHDVLTGPGATAVEVVNGTGPSLFGGDPPLRFGQVVVIDDALTDGPDPASRPVGRAQVTYVFASMHDPALLFCMNVVLTAGPYSGSTFAVVGRDNIVEPLRELSVVGGTGRFRMATGYVLWRTASWQLRKNAVLDLDVFIYVHAHAHPHA

SEQ ID NO: 28080 - protein, 198 aa, Triticum aestivum
MPVAKSKQRSTLFVFLYFASSAALAVLLSASWQWLAGASARPARMRLFMHDVLTGPGATAVEVVNGTGPSLFGGDPPLRFGQVVVIDDALTDGPDPASRPVGRAQVTYVFASMHDPALLFCMNVVLTAGPYSGSTFAVVGRDNIVEPLRELSVVGGTGRFRMATGYVLWRTASWQLRKNAVLDLDVFIYVHAHAHPHA

SEQ ID NO: 28081 - DNA, 496 bp, Triticum aestivum
aaggacgaccaccaagtatgagtagctgggaggctggaacgggaggaagcggacccgggggaaggtgaggtgagagagtcggagggagccccgctccggccagcctccgtcggcacccacggccggcagcggcagcggcagcggcacgccatggacgcggaggccggagaggcgcccctcctctcccaccagcacagccccaaccaggtcccgtcggcaaatcacaacggcaaacccttcaactggaaggctcctgctattatcttggcgtttgagttcttggagagcattgcctacgctggtattgccctcaacttggtagtatatcttgggaaggtccttcatggaactacggcttcaaatgccgcgaatgtcgatacatggaacggcaccacgttcctcacgcccgttctcggagcatttcttgctgatacatactgggggaagtacaagaccgtcgcaatctccataatattctatcttactgggctgctct

SEQ ID NO: 28082 - protein, 115 aa, Triticum aestivum
MDAEAGEAPLLSHQHSPNQVPSANHNGKPFNWKAPAIILAFEFLESIAYAGIALNLVVYLGKVLHGTTASNAANVDTWNGTTFLTPVLGAFLADTYWGKYKTVAISIIFYLTGLL

SEQ ID NO: 28083 - DNA, 1409 bp, Triticum aestivum
caaaaccgtttgctccgtttcccccaaatctgccgcacgacccaaacaaaacccttgcggcggcgccccaccccatctccggcggccaagcggaatggagcgctcggcggcgggcgcctcgtaccagcgcttcccgcgcgtgcggatccgcgagctcaaggacgagtacgccaagttcgagctcaaggacaccgacgcgagcatggccaacgccctccgccgcgtcatgatcgccgaggtccccaccgtcgccatcgacctcgtcgagatcgagagcaactcctccgtcctcaacgacgagttcctcgcgcaccgcctcggcctcatcccgctcacctcctccgccgccatgtccatgcgcttctcccgcgactgcgacgcctgcgacggggacggctcctgcgagtactgctccgtcgagttccacctcgccgcccgcgccaccgactccggccagacgctcgaggtcacctccaccaaggacctccgctccaccgaccccaaggtctgccctgtcgaccagcaaagggagtaccagcaggccctcggcaacgtcgacgcttacgagcccgatgctgccggtgaccacaggggcatattaattgtaaagctgcgccgtgggcaagagctgcgtcttcgagcaattgccaggaagggaattggaaaggaccatgccaaatggtctccagctgctactgtgaccttcatgtatgagcctgacatacgtattaaccaagaactcatggagacacttacacttgaggaaaaacaaagctgggtggagagcagccctacaaaagtatttgacattgatcctgtcacccaacaggtgacgattgtggacccagaggcctacacatatgacgatgaggtgatcaagaaagcagaggccatggggaagccaggattggtagagatcaacgccaaggaggacagctttgtgttcactgtggagacaacgggggccattacagcctatgagctgattatgaacgctatcacggtcctgaggcagaagctggacgccgttcgcctgcaagacgatgacggcgatctgggcgagctcggcgcccaccttatcggaggctaaccaccgcttgtctgggaaagaagtcgccagcggtatctttgtttctccgtatctaggctcgtctcgtctaactggcttgcctgtggcaagtggtagttgatgcctcctttgatatgcagcaccagaactctacggtaatcgcctttgtatccctctgtttatgccctgacctctgccggaactctgtacgtgcaaaaagccatgggcgctgaagcttagcggcactgtggaacaagagaatagctggtagcccatgattggccgtgccgtgcggtggtgatacggcgtggtgtcttgaatgcagagttattcgcagggc

SEQ ID NO: 28084 - protein, 362 aa, Triticum aestivum
KTVCSVSPKSAARPKQNPCGGAPPHLRRPSGMERSAAGASYQRFPRVRIRELKDEYAKFELKDTDASMANALRRVMIAEVPTVAIDLVEIESNSSVLNDEFLAHRLGLIPLTSSAAMSMRFSRDCDACDGDGSCEYCSVEFHLAARATDSGQTLEVTSTKDLRSTDPKVCPVDQQREYQQALGNVDAYEPDAAGDHRGILIVKLRRGQELRLRAIARKGIGKDHAKWSPAATVTFMYEPDIRINQELMETLTLEEKQSWVESSPTKVFDIDPVTQQVTIVDPEAYTYDDEVIKKAEAMGKPGLVEINAKEDSFVFTVETTGAITAYELIMNAITVLRQKLDAVRLQDDDGDLGELGAHLIGG

SEQ ID NO: 28085 - protein, 331 aa, Triticum aestivum
MERSAAGASYQRFPRVRIRELKDEYAKFELKDTDASMANALRRVMIAEVPTVAIDLVEIESNSSVLNDEFLAHRLGLIPLTSSAAMSMRFSRDCDACDGDGSCEYCSVEFHLAARATDSGQTLEVTSTKDLRSTDPKVCPVDQQREYQQALGNVDAYEPDAAGDHRGILIVKLRRGQELRLRAIARKGIGKDHAKWSPAATVTFMYEPDIRINQELMETLTLEEKQSWVESSPTKVFDIDPVTQQVTIVDPEAYTYDDEVIKKAEAMGKPGLVEINAKEDSFVFTVETTGAITAYELIMNAITVLRQKLDAVRLQDDDGDLGELGAHLIGG

SEQ ID NO: 28086 - protein, 295 aa, Triticum aestivum
MANALRRVMIAEVPTVAIDLVEIESNSSVLNDEFLAHRLGLIPLTSSAAMSMRFSRDCDACDGDGSCEYCSVEFHLAARATDSGQTLEVTSTKDLRSTDPKVCPVDQQREYQQALGNVDAYEPDAAGDHRGILIVKLRRGQELRLRAIARKGIGKDHAKWSPAATVTFMYEPDIRINQELMETLTLEEKQSWVESSPTKVFDIDPVTQQVTIVDPEAYTYDDEVIKKAEAMGKPGLVEINAKEDSFVFTVETTGAITAYELIMNAITVLRQKLDAVRLQDDDGDLGELGAHLIGG

SEQ ID NO: 28087 - DNA, 703 bp, Triticum aestivum
gccacgcaacaacacggcacgatgcggcggtggtgttgctcctccgccggcggcctcgcccgccgcttcctctcctcccccatcgtcgtccatgcccgcccgcccgtgccctccctccccttcctccacgaccactcccacacccacgcgcctctccccatcacgggctcgctgttccactcggcggcagctgctgcgatcgtccggcctccggtgatggcgatgcagctgcgccactacgccatcaagggcaggtcccgcgcgccgaccacgcccaccatctccaaagtcaagaaatacaagatgaaggccccctcgtccatgaagttccgcttcagaacgatgaaggacggccagatccgcaggtggagggccggcaagcgccacaacgcacaccaaaagtccaaggaagcaaagagaagacttcggaagcctgctttagtgcatttagcttatgccaaagttataaagaagctcaacttctgcggctaggaaattgatggatggaggatggtgattggcacatgaatctgatcaatgaatactgattgccaactgttatcttgttacatttgtcctttgatgcattgccatcagatttttgtgcttccatctcttcaccgatgccgatgattattttattgtaccaccatccacttgttttctaaacaatcagttgataaaggctcccctgtgttttgtc

SEQ ID NO: 28088 - protein, 165 aa, Triticum aestivum
HATTRHDAAVVLLLRRRPRPPLPLLPHRRPCPPARALPPLPPRPLPHPRASPHHGLAVPLGGSCCDRPASGDGDAAAPLRHQGQVPRADHAHHLQSQEIQDEGPLVHEVPLQNDEGRPDPQVEGRQAPQRTPKVQGSKEKTSEACFSAFSLCQSYKEAQLLRLGN

SEQ ID NO: 28089 - protein, 163 aa, Triticum aestivum
ATQQHGTMRRWCCSSAGGLARRFLSSPIVVHARPPVPSLPFLHDHSHTHAPLPITGSLFHSAAAAAIVRPPVMAMQLRHYAIKGRSRAPTTPTISKVKKYKMKAPSSMKFRFRTMKDGQIRRWRAGKRHNAHQKSKEAKRRLRKPALVHLAYAKVIKKLNFCG

SEQ ID NO: 28090 - protein, 156 aa, Triticum aestivum
MRRWCCSSAGGLARRFLSSPIVVHARPPVPSLPFLHDHSHTHAPLPITGSLFHSAAAAAIVRPPVMAMQLRHYAIKGRSRAPTTPTISKVKKYKMKAPSSMKFRFRTMKDGQIRRWRAGKRHNAHQKSKEAKRRLRKPALVHLAYAKVIKKLNFCG

SEQ ID NO: 28091 - DNA, 830 bp, Triticum aestivum
agaaaaccgtgggccgaaattgaaaccctgcggctgcaatggaggcggcggcggcggctgctgcggccgtgggcggggaggacgacgggcggggtcggaagggaagctggtacgcggtgggggagcgtgcggtgctggtgccgtacctgcgggagcacgtcccgcggtaccacgagtggatgcaggacccggcgctgctggaggccaccgcgtcggagccgctctccctcgcccaggagttcgaggtccaccgctcctggaccctcgaccctctcaaacatactttcatagtgctggataaggagttgatcgagggagacttcgtggtcgggaaccctcacacggaagctatgattggcgatgtcaacatctatatgaatgaccctgatgatttggaacttgcagagatagagattatgatagctgaacaaaagagccgtggaaagggactaggtcaagaagtgaccttaatgatgatgtcgtttgcagtagagaaatacggaattcacactttcagagcaaaaattagtgactcaaatactgcatcgttaaagctcttcaggaaattgggcttcaaggatgcttcccatagtgcagtttttaaggaggtgacactggaggcgcctgcagctgaactcccattaagctcccctttgaccataggaagttggtgacatctgtgattatatgccccaagatgtgttgcagtagacatgcaatcagtggctggtcttcaccaactgatagaagctaattgtgtgcgctatttggcatacttaatgtaatgagtactgccttcatctgccaacaactgcttgggccgattgctc

SEQ ID NO: 28092 - protein, 211 aa, Triticum aestivum
MEAAAAAAAAVGGEDDGRGRKGSWYAVGERAVLVPYLREHVPRYHEWMQDPALLEATASEPLSLAQEFEVHRSWTLDPLKHTFIVLDKELIEGDFVVGNPHTEAMIGDVNIYMNDPDDLELAEIEIMIAEQKSRGKGLGQEVTLMMMSFAVEKYGIHTFRAKISDSNTASLKLFRKLGFKDASHSAVFKEVTLEAPAAELPLSSPLTIGSW

SEQ ID NO: 28093 - protein, 164 aa, Triticum aestivum
MQDPALLEATASEPLSLAQEFEVHRSWTLDPLKHTFIVLDKELIEGDFVVGNPHTEAMIGDVNIYMNDPDDLELAEIEIMIAEQKSRGKGLGQEVTLMMMSFAVEKYGIHTFRAKISDSNTASLKLFRKLGFKDASHSAVFKEVTLEAPAAELPLSSPLTIGSW

SEQ ID NO: 28094 - protein, 107 aa, Triticum aestivum
MIGDVNIYMNDPDDLELAEIEIMIAEQKSRGKGLGQEVTLMMMSFAVEKYGIHTFRAKISDSNTASLKLFRKLGFKDASHSAVFKEVTLEAPAAELPLSSPLTIGSW

SEQ ID NO: 28095 - DNA, 950 bp, Triticum aestivum
atttcgccgttgccttcagttctgcttgcctcccaacaatggctctccccctcgttcgcctcctcctcccctctctccccgcgtgccagccgccgctccgtcaccccgagtactccgctccacctcgccacagccacgtctccttcgcggtctccgctgccgcccgctcctccggccaccgcttggcgttcgctgtctgcgctgctagcgcctcggtcgccccggcgcctgcggaaacggaggcggatgcggaggatgagcagcccgtggggccgaagacgcggcttatcgcgatgaacatcccatgggatttcacgcccgacgacattcgcgttcttttcgagaagcaaggcaccgtcgtcgacgtggagctttcgatgcacagttccaaaaaaaacagagggttggcatttgtaaccatgggttcagaagaggaggctctttcagcactcaagaatctcaatttgtctactttgaatgatagaacgattaaggtggactttgcaaaacctaaaaagaagcaacctgctgtgccatcagttcctgtggagaaaaatgttgtgtttgtggggaatttaacatggagagtgagatcccgtcatcttcgggagttatttgcctcaactccaggtgtccaatcagttgaagttatctttcataccaccacaccaaggcgatctgctggctatgcatttgtttccttttcctcgaaagaggaggcagaggcggctatttctaccttcaatggcaaggaattgatgggacgatccattaacgtgatgttcaaagaggacactgtcaaaaagaacaagtcttctgattctgaggaagagaagttggaggaggcagaatcatctgaggagagtgatagctaagaatggattattgtgagaaccacagaaagaagttcaatgagttgatctgcaggactataatgctctttttctagt

SEQ ID NO: 28096 - protein, 290 aa, Triticum aestivum
FAVAFSSACLPTMALPLVRLLLPSLPACQPPLRHPEYSAPPRHSHVSFAVSAAARSSGHRLAFAVCAASASVAPAPAETEADAEDEQPVGPKTRLIAMNIPWDFTPDDIRVLFEKQGTVVDVELSMHSSKKNRGLAFVTMGSEEEALSALKNLNLSTLNDRTIKVDFAKPKKKQPAVPSVPVEKNVVFVGNLTWRVRSRHLRELFASTPGVQSVEVIFHTTTPRRSAGYAFVSFSSKEEAEAAISTFNGKELMGRSINVMFKEDTVKKNKSSDSEEEKLEEAESSEESDS

SEQ ID NO: 28097 - protein, 278 aa, Triticum aestivum
MALPLVRLLLPSLPACQPPLRHPEYSAPPRHSHVSFAVSAAARSSGHRLAFAVCAASASVAPAPAETEADAEDEQPVGPKTRLIAMNIPWDFTPDDIRVLFEKQGTVVDVELSMHSSKKNRGLAFVTMGSEEEALSALKNLNLSTLNDRTIKVDFAKPKKKQPAVPSVPVEKNVVFVGNLTWRVRSRHLRELFASTPGVQSVEVIFHTTTPRRSAGYAFVSFSSKEEAEAAISTFNGKELMGRSINVMFKEDTVKKNKSSDSEEEKLEEAESSEESDS

SEQ ID NO: 28098 - protein, 193 aa, Triticum aestivum
MNIPWDFTPDDIRVLFEKQGTVVDVELSMHSSKKNRGLAFVTMGSEEEALSALKNLNLSTLNDRTIKVDFAKPKKKQPAVPSVPVEKNVVFVGNLTWRVRSRHLRELFASTPGVQSVEVIFHTTTPRRSAGYAFVSFSSKEEAEAAISTFNGKELMGRSINVMFKEDTVKKNKSSDSEEEKLEEAESSEESDS

SEQ ID NO: 28099 - DNA, 694 bp, Triticum aestivum
acggaatcatctctgatctcagctgcatacgttgtcactagctcagtagctcacactcactcactcgccggtcatggctggagaagatggtgagacggtcacggtggcggcggcggcgatccctctgctgacgccgtacaggacgggcggcggcgagctggagctggcgcacagggtggtgctggcgccgctgacgaggcagcgctccccggggaacctcccgcagccgcacgccgccgtctactacgcgcagcgcgccaccgccggcgggatgctgatcacggaggccacgggcgtgtccgccgcggcgcagggccaccggcccaccccgggcgtctgggcgggcgagcaggtggaggcgtggcggcccgtcgtcgacgccgtgcacgccaagggcgcggtggtcttctgccagctctggcacgtcgggcgcgtcgtgggcaagctccggccggacggcgcgcgggcagagacgccgcagccggtgtccagcaccggcaggccgatcgccaccccgcggatgaacgacggcgtcgaggaggagttcgcgacgcccaggaggctggatgtggcggggatcgccggcgtcgtcgacgacttcaggagggccgccaggaacgccgtcgacgccggtacgcacggacgagctccggcctctgctcgccatcaacacttcgaacacttgtttaaacac

SEQ ID NO: 28100 - protein, 207 aa, Triticum aestivum
MAGEDGETVTVAAAAIPLLTPYRTGGGELELAHRVVLAPLTRQRSPGNLPQPHAAVYYAQRATAGGMLITEATGVSAAAQGHRPTPGVWAGEQVEAWRPVVDAVHAKGAVVFCQLWHVGRVVGKLRPDGARAETPQPVSSTGRPIATPRMNDGVEEEFATPRRLDVAGIAGVVDDFRRAARNAVDAGTHGRAPASARHQHFEHLFKH

SEQ ID NO: 28101 - protein, 141 aa, Triticum aestivum
MLITEATGVSAAAQGHRPTPGVWAGEQVEAWRPVVDAVHAKGAVVFCQLWHVGRVVGKLRPDGARAETPQPVSSTGRPIATPRMNDGVEEEFATPRRLDVAGIAGVVDDFRRAARNAVDAGTHGRAPASARHQHFEHLFKH

SEQ ID NO: 28102 - DNA, 1134 bp, Triticum aestivum
cttgggccatacaatttggattcttttggagactggaaacaactttcaagctacttgtcacacagtgtcattgaacgccttgagccaattggtggagaaattacaattgcattggaggcatcatggatggatagagctccccaaacagatatggagagacgattgatggaacaacttagagaagacaaatttgcaaagaaagcccctgcacagcctgagaggagaggatgctattacacaactattcccgcttcggttaagcacagaaacatttctgcagatgagctgactttgctgaacttggacagaacaagcttgctggagactgtcctggccaaaagttatcaaggccaagaagatttactcttgggggagctgcagttctctttcatagcgtttatgatgggacagtcgctggaggcgtttatgcagtggaaagcattagtcagtcttcttttgagctgcagtgaagctccacttcatacaaggacgcaaatgtttgtaaagtttataagggttatttactatcaattcaagcatggctttcaacgcacacatgattccagaagtagtgaagacaagggcaactctttgtttctggatgaagcatggttctcaagagacatatttctttaccggctttccaaggatttcttagcggtaatatttgaagctcaagtcgtggatggagaccttctgtcgtgggctaggaaacttaagacgctcttggagaccacgttcggatgggatctcgagaacaatgcggcgaaccttatcgatgaggacgacgagtttgctccggtggtcgtggaaatggacggctcctaggcagcgttatgtactactacggaatctcacgaggatggtgcgttgcgaatttcacacctgttagttaccatgtcaaaaccgcacgcacggttggttgaggatcgttcggtggcctagtttgcttgcatctgtcaccttgagatgttggctgcggcggctgctgctgctgctgctaactactccctccgtttctaaatgtaagtctttttagagatttcactacaaactacataccgatgtatctagacatattctagagtgtagtttactcattttgctccgtatctagttcatagtggaatatct

SEQ ID NO: 28103 - protein, 275 aa, Triticum aestivum
LGPYNLDSFGDWKQLSSYLSHSVIERLEPIGGEITIALEASWMDRAPQTDMERRLMEQLREDKFAKKAPAQPERRGCYYTTIPASVKHRNISADELTLLNLDRTSLLETVLAKSYQGQEDLLLGELQFSFIAFMMGQSLEAFMQWKALVSLLLSCSEAPLHTRTQMFVKFIRVIYYQFKHGFQRTHDSRSSEDKGNSLFLDEAWFSRDIFLYRLSKDFLAVIFEAQVVDGDLLSWARKLKTLLETTFGWDLENNAANLIDEDDEFAPVVVEMDGS

SEQ ID NO: 28104 - protein, 233 aa, Triticum aestivum
MDRAPQTDMERRLMEQLREDKFAKKAPAQPERRGCYYTTIPASVKHRNISADELTLLNLDRTSLLETVLAKSYQGQEDLLLGELQFSFIAFMMGQSLEAFMQWKALVSLLLSCSEAPLHTRTQMFVKFIRVIYYQFKHGFQRTHDSRSSEDKGNSLFLDEAWFSRDIFLYRLSKDFLAVIFEAQVVDGDLLSWARKLKTLLETTFGWDLENNAANLIDEDDEFAPVVVEMDGS

SEQ ID NO: 28105 - protein, 225 aa, Triticum aestivum
MERRLMEQLREDKFAKKAPAQPERRGCYYTTIPASVKHRNISADELTLLNLDRTSLLETVLAKSYQGQEDLLLGELQFSFIAFMMGQSLEAFMQWKALVSLLLSCSEAPLHTRTQMFVKFIRVIYYQFKHGFQRTHDSRSSEDKGNSLFLDEAWFSRDIFLYRLSKDFLAVIFEAQVVDGDLLSWARKLKTLLETTFGWDLENNAANLIDEDDEFAPVVVEMDGS

SEQ ID NO: 28106 - DNA, 639 bp, Triticum aestivum
aatcgaaaaattgaaggggaccgcatctttggaattcaatcttttagtgttagattaggtcaaagcaaggttttctggacttgtgttggtctacttgaggttgcctacggtgttgcgatactgatgggggtaacttcttccagtttgtggagcaaatctctaactgttgtgggccatgcaatcctcgccagcatcttgtggagcagcgcacggtccatcgacttgacaagcaaagctgcgataacatccttctacatgctcatctggaggctgttctacgcggagtacctgctcatccctctggtgagatgaggaccgacaagcagcccacggaagaacttcagtgccggagtacagctgtgcgaatccatttgaatttcggatggtcacggaccgcgcccaataaaactcccagagccttgccccggtacatcgttgattttccagccatgaatggtgagatcaccacctaaagatggataacctccccatgtacccaagctgggccaggtgagctgtagtttagttgatgctagcgagcaacaactcctgcagcaggcacgcggctgcctggaaaataaggctccccactcccaattacattctgttgtacggttttagtacttgtgaattttgctc

SEQ ID NO: 28107 - protein, 103 aa, Triticum aestivum
NRKIEGDRIFGIQSFSVRLGQSKVFWTCVGLLEVAYGVAILMGVTSSSLWSKSLTVVGHAILASILWSSARSIDLTSKAAITSFYMLIWRLFYAEYLLIPLVR

SEQ ID NO: 28108 - protein, 62 aa, Triticum aestivum
MGVTSSSLWSKSLTVVGHAILASILWSSARSIDLTSKAAITSFYMLIWRLFYAEYLLIPLVR

SEQ ID NO: 28109 - protein, 54 aa, Triticum aestivum
MRTDKQPTEELQCRSTAVRIHLNFGWSRTAPNKTPRALPRYIVDFPAMNGEITT

SEQ ID NO: 28110 - DNA, 936 bp, Triticum aestivum
attcattcattctctcacagccatcgatccatctaaactaggtggagcagtacatacacagcaaagcaaggcataatggcctcgggagtgttcggtacccccatttcagagaagacggtgctggccactggagagtataaggaacccatcactcaaaaggatgttgcggactataccatgaagatgatcaacgccggtggtaaggatattaacgcacaaaccttcgtcgacaacctcaaggagaggtacggtaacggaatatctgtaaaatgcctcatctacaatgccaccggtgccactttgaacttggctaactacaaagactggcacggccatatctacgatacaccctacccatcagatattcagaatgggcaatggggggcatttctccacgtccacccaagtggcgctgcggttggttcagctggtgccgttgtgtatcgtaccaaggtcccatccagcagcagctcctgcgattggttgttctcctggaccgtcccctacattggtgccaatgggatctacaccgaaatccgtgaggaagggcactacccaagtgtgggaagctgggattatatctatgacgtgaagctggaaaatgcaaatctcaactctactgataaaaactatggatatgtttccgagactaacatcggtgaaggctctaccatgaacgctcgtggagttttccagtttccctactagatctctttgccagcatcgaggggttattgtggtcttcaaagtcttttgtggcgaggacgtttggggctgttatcttcctttactatatttgtggtgcactccactagtagaaaaagggcctaatgtgaagctcattagtcccggtttgtaattgaaccggcactaatgtgaccattagtgctgcttccaacggctaggcgggcggagctcaaaataatgaagctttgt

SEQ ID NO: 28111 - protein, 210 aa, Triticum aestivum
MASGVFGTPISEKTVLATGEYKEPITQKDVADYTMKMINAGGKDINAQTFVDNLKERYGNGISVKCLIYNATGATLNLANYKDWHGHIYDTPYPSDIQNGQWGAFLHVHPSGAAVGSAGAVVYRTKVPSSSSSCDWLFSWTVPYIGANGIYTEIREEGHYPSVGSWDYIYDVKLENANLNSTDKNYGYVSETNIGEGSTMNARGVFQFPY

SEQ ID NO: 28112 - protein, 176 aa, Triticum aestivum
MKMINAGGKDINAQTFVDNLKERYGNGISVKCLIYNATGATLNLANYKDWHGHIYDTPYPSDIQNGQWGAFLHVHPSGAAVGSAGAVVYRTKVPSSSSSCDWLFSWTVPYIGANGIYTEIREEGHYPSVGSWDYIYDVKLENANLNSTDKNYGYVSETNIGEGSTMNARGVFQFPY

SEQ ID NO: 28113 - protein, 174 aa, Triticum aestivum
MINAGGKDINAQTFVDNLKERYGNGISVKCLIYNATGATLNLANYKDWHGHIYDTPYPSDIQNGQWGAFLHVHPSGAAVGSAGAVVYRTKVPSSSSSCDWLFSWTVPYIGANGIYTEIREEGHYPSVGSWDYIYDVKLENANLNSTDKNYGYVSETNIGEGSTMNARGVFQFPY

SEQ ID NO: 28114 - DNA, 699 bp, Triticum aestivum
  misc_feature (497)..(497): n is a, c, g, or t
  misc_feature (544)..(544): n is a, c, g, or t
  misc_feature (563)..(563): n is a, c, g, or t
  misc_feature (608)..(608): n is a, c, g, or t
  misc_feature (684)..(684): n is a, c, g, or t
agctggatcttctaattctatgtctaatgcaacagcaatgggtatcatttatcggctgactcaacatcatgttcagttgcctgaacatcttggcagttatcagttactcgagtggaatgtgcagcaacctgtatcgagaaggtcatggttgcaagaacatgttgtctccatactggttggtgttttgctagttgttttcctgtctttatcggcctttttaggactgtatctctggagaaagaaatttagaggtcaagctgcatatagacctgtgggctcagtggggcctgagcaagaactccaaccgctataatattggagctctttgactgggcaacaaataggtaattctttggtagagatactattatgtgggctaccatattgcggcggtacacatctgctgttggagtagcccttttcctttgtatgtaacacaaagcatctagcttacagaagaagcacatgatgacatgacttgttggttcaaaacttanagaattagttcataaactatctagcaattcagatcaagagctccctnttgaggcttactgtagaanaaggttttgttcatgtaatgtagattaaatagaatagaccagacncaaatcgcactggtagatgcaatgttgtaatatctatttgataagggccgaagaccttttttgcttcagtaatttntacgacgaaggtttc

SEQ ID NO: 28115 - protein, 103 aa, Triticum aestivum
AGSSNSMSNATAMGIIYRLTQHHVQLPEHLGSYQLLEWNVQQPVSRRSWLQEHVVSILVGVLLVVFLSLSAFLGLYLWRKKFRGQAAYRPVGSVGPEQELQPL

SEQ ID NO: 28116 - protein, 97 aa, Triticum aestivum
MSNATAMGIIYRLTQHHVQLPEHLGSYQLLEWNVQQPVSRRSWLQEHVVSILVGVLLVVFLSLSAFLGLYLWRKKFRGQAAYRPVGSVGPEQELQPL

SEQ ID NO: 28117 - protein, 91 aa, Triticum aestivum
MGIIYRLTQHHVQLPEHLGSYQLLEWNVQQPVSRRSWLQEHVVSILVGVLLVVFLSLSAFLGLYLWRKKFRGQAAYRPVGSVGPEQELQPL

SEQ ID NO: 28118 - DNA, 691 bp, Triticum aestivum
acacactgcagacaatggcgtctccagccagaagcgcgagcgcctctccagtcctcctcttgctcgtcgtcctcgccgccggggcaagcgcggcaccgctcaccatcacgaaccggtgccacttcacggtgtggccggcggtggcgctcgtgctccaccaagggggcggcggcaccgagctccacccaggggccagctggagcctcgacacgccggtgatcggctcccagtacatatgggggcgcacgggctgctccttcgaccgggccggcaaggggcggtgccagaccggcgactgcggtggcagctcgctgacttgcgggggcaacccggcggtgccggtgaccatggccgaggtgtccgtgctccaaggcaactatacctacggcgtcacgtcgacgctcaaggggttcaacctgcccatggacctgaagtgcagctccggcgacgcgctcccgtgccggaaggctgggtgcgacgttgtccagccgtacgcgaagagctgcagcgcggctggaagccggctccagatcgtcttctgcccatgatgagcggcagaacatatatagcacgtatacgcatgtaataaccaccgcacgtacgggtagtagtacctccgtataccgtacacgtgtgtcaggtattcccagccgcagtgcatacactcgagcgagattccaataaaggtgcc

SEQ ID NO: 28119 - protein, 194 aa, Triticum aestivum
HTADNGVSSQKRERLSSPPLARRPRRRGKRGTAHHHEPVPLHGVAGGGARAPPRGRRHRAPPRGQLEPRHAGDRLPVHMGAHGLLLRPGRQGAVPDRRLRWQLADLRGQPGGAGDHGRGVRAPRQLYLRRHVDAQGVQPAHGPEVQLRRRAPVPEGWVRRCPAVREELQRGWKPAPDRLLPMMSGRTYIARIRM

SEQ ID NO: 28120 - protein, 181 aa, Triticum aestivum
TLQTMASPARSASASPVLLLLVVLAAGASAAPLTITNRCHFTVWPAVALVLHQGGGGTELHPGASWSLDTPVIGSQYIWGRTGCSFDRAGKGRCQTGDCGGSSLTCGGNPAVPVTMAEVSVLQGNYTYGVTSTLKGFNLPMDLKCSSGDALPCRKAGCDVVQPYAKSCSAAGSRLQIVFCP

SEQ ID NO: 28121 - protein, 177 aa, Triticum aestivum
MASPARSASASPVLLLLVVLAAGASAAPLTITNRCHFTVWPAVALVLHQGGGGTELHPGASWSLDTPVIGSQYIWGRTGCSFDRAGKGRCQTGDCGGSSLTCGGNPAVPVTMAEVSVLQGNYTYGVTSTLKGFNLPMDLKCSSGDALPCRKAGCDVVQPYAKSCSAAGSRLQIVFCP

SEQ ID NO: 28122 - DNA, 723 bp, Triticum aestivum
caaggaaatctcttcatgtcatccgcgatggctggaagtccacaacatggagcatggcaatacccgttggtttgcaggagcgctggaaccgtgactgtgtatttgatgttaaagacatcagcttggagccatgcctttctgatcgcatggctatgctgagcagcaagaccatgaaggaacttcaagtgggacaccccatcctaagcatggatgatgacatcgtttacttgctttctgaaaccacacccaagcacatggacaagttggcactgatgtttgctattgatgtgaagaagtcaacactgcgaggattggctgagcttgatgtcaagaagttcgattacctgtccagcttctgcactagtgagatctgcaggggtacctgagcaatattaaggtaacttctttatgctggtagaagcgagctctatcgaataaacaaactgaagagggtaaaccatctgaggttcctgcgaagaactggctaggacaaagaaatttcaaccatgtttgttgaaacttgggagctggatgtgaccttggagattgaatttctttagttgatttatcatgtattacatgtaatgcaactatctgggttatattgcttgcttatgtacttgtcccggtcaaaaaaaagtgctagtgaacttgtgtgggctaaatgtcttggttgaaccatgtttttatgtgttttgatttggttttaattgttctgtatgc

SEQ ID NO: 28123 - protein, 127 aa, Triticum aestivum
RKSLHVIRDGWKSTTWSMAIPVGLQERWNRDCVFDVKDISLEPCLSDRMAMLSSKTMKELQVGHPILSMDDDIVYLLSETTPKHMDKLALMFAIDVKKSTLRGLAELDVKKFDYLSSFCTSEICRGT

SEQ ID NO: 28124 - protein, 110 aa, Triticum aestivum
MAIPVGLQERWNRDCVFDVKDISLEPCLSDRMAMLSSKTMKELQVGHPILSMDDDIVYLLSETTPKHMDKLALMFAIDVKKSTLRGLAELDVKKFDYLSSFCTSEICRGT

SEQ ID NO: 28125 - protein, 79 aa, Triticum aestivum
MAMLSSKTMKELQVGHPILSMDDDIVYLLSETTPKHMDKLALMFAIDVKKSTLRGLAELDVKKFDYLSSFCTSEICRGT

SEQ ID NO: 28126 - DNA, 737 bp, Triticum aestivum
gataggctgacagcactgggcgcccttcacctacgacttttcccccaccggcgcggcggcgcttgcgccgaagtctcccgccagtctacggccgcgcgccgccctgccggtttctttggaagggaatggcgggaggcgaggctaggggcggggagtgcggctactacacgacggacgacgcgctgtcccaggtgggcttcgggaggttccaggcgctggtgctggcctacgccggcgtgggctggaccgcggaggccatggagatcatgatgctgtccttcgtcggcccgtccgtgaaggacgagtggggaatctccggccagcaggaggggctcatcaccagcgtcgtcttcgccgggatgatcatcgggggctgcctcgggggcgtcatctcggactcatatggcagaaggtcgggcgcgctttggctcttgtctcttgataagtaattgtagtatctgccctcttctaaattctaattgaatggtccaagccaacaaacctggatcttgcaaatctttcaaggccataatgtgcctgtgggttgtggctaaattacattctccctccgttcacaaatataaggtgttttggatatttctgttagagttataatataagtcatgtaaacccctttgtatttatcccgttgtataaggggtttcctgcatatgtaccacacctgtacatgtatatatatcggcctatggcctcatgggaatacaagttgcttattc

SEQ ID NO: 28127 - protein, 107 aa, Triticum aestivum
MAGGEARGGECGYYTTDDALSQVGFGRFQALVLAYAGVGWTAEAMEIMMLSFVGPSVKDEWGISGQQEGLITSVVFAGMIIGGCLGGVISDSYGRRSGALWLLSLDK

SEQ ID NO: 28128 - protein, 89 aa, Triticum aestivum
DRLTALGALHLRLFPHRRGGACAEVSRQSTAARRPAGFFGREWREARLGAGSAATTRRTTRCPRWASGGSRRWCWPTPAWAGPRRPWRS

SEQ ID NO: 28129 - protein, 63 aa, Triticum aestivum
MEIMMLSFVGPSVKDEWGISGQQEGLITSVVFAGMIIGGCLGGVISDSYGRRSGALWLLSLDK

SEQ ID NO: 28130 - DNA, 634 bp, Triticum aestivum
taaatttggaatcaaagatgccatatctagatcaaaggagcgaaagggaacattacacaaccaacagaaggttctgaatgaggagagactgaagcggaaaaggctggctgcggcagcgaaactgccagatagctaccctgttgtaacacaaagcacagcggccatgcaagtggcacatccatccatgtccaaccccgttacaacataccctgtgactgactatggacagaaccaggtcccgaaaagtcttgaaagggttcgcgaaacgagctcaagtgcaatagctgatgagagcagcaaaaatgctggtgacatgaagaagaagaaaaggaagtcggatcctgatgttgtcgatacacaagccaacattgttaccatgcccaccgtgcttggtctccctttctatgaccaacaaccaagctgattatttcgctgtgacatcagataactttatttctgctcgtaaacttttggggggtggtgtgagaaaatatccctgtagagagagcatgccattttgtaatctctcccggttaacagagttcggttcgaccccctttatatcggtcgtaacttgtaaagcatgagttttatctgttaccgttgagatgtaaattcagattgggaatgtggt

SEQ ID NO: 28131 - protein, 140 aa, Triticum aestivum
KFGIKDAISRSKERKGTLHNQQKVLNEERLKRKRLAAAAKLPDSYPVVTQSTAAMQVAHPSMSNPVTTYPVTDYGQNQVPKSLERVRETSSSAIADESSKNAGDMKKKKRKSDPDVVDTQANIVTMPTVLGLPFYDQQPS

SEQ ID NO: 28132 - protein, 86 aa, Triticum aestivum
MQVAHPSMSNPVTTYPVTDYGQNQVPKSLERVRETSSSAIADESSKNAGDMKKKKRKSDPDVVDTQANIVTMPTVLGLPFYDQQPS

SEQ ID NO: 28133 - protein, 80 aa, Triticum aestivum
MLSIHKPTLLPCPPCLVSLSMTNNQADYFAVTSDNFISARKLLGGGVRKYPCRESMPFCNLSRLTEFGSTPFISVVTCKA

SEQ ID NO: 28134 - DNA, 775 bp, Triticum aestivum
atcggtccatctccatcgctctctcctcttctacctcgccggccagccttctccttggatctcgtcgcagcacggcaacggcaacggcaatggtggtctcgtacacgcaggagcacgtgtacctccacccctggcaccgggtcaccgcggcggcgtggcgcaagttcaccgacccggcggcgctctcccacatcctggacgtgcagacgctgtcccgggacgtcgacccgcgcgccggccggctccacgccgtgcgggccatcgcgggccggcccccgccgctcccgctcctcctccgcggcctcgcggccaccgccggcgccggcgacgtggtgctctgcgtggagcgcacctccgtggacgcggccgcgcgcgccatgcgggtggtctcccgcaacgccacgttccggcggctggtggacgtggaggagcggtgcagctacgcgccccacccggagcggccggacgagtggacggtgttcacgcaggagacgagcatccggtgcgcgccgctggcggccgtgtcggccacggtggccgagatggtggagcggcggtgcgccgagagcttcgcgcagaacgccgccagggggcaggaggtcgtcgagaggatctgcgacggcctcgcgctcgccggccgcgtgccaggaccctcccctgccgacggagaagaaccgtagagacagagcactgcgcagagcatgctcgctctctgttatttactgatgtgtaaatactggctgggaggcaataagaagtgaaattctgtaaattc

SEQ ID NO: 28135 - protein, 243 aa, Triticum aestivum
SVHLHRSLLFYLAGQPSPWISSQHGNGNGNGGLVHAGARVPPPLAPGHRGGVAQVHRPGGALPHPGRADAVPGRRPARRPAPRRAGHRGPAPAAPAPPPRPRGHRRRRRRGALRGAHLRGRGRARHAGGLPQRHVPAAGGRGGAVQLRAPPGAAGRVDGVHAGDEHPVRAAGGRVGHGGRDGGAAVRRELRAERRQGAGGRREDLRRPRARRPRARTLPCRRRRTVETEHCAEHARSLLFTDV

SEQ ID NO: 28136 - protein, 241 aa, Triticum aestivum
IGPSPSLSPLLPRRPAFSLDLVAARQRQRQWWSRTRRSTCTSTPGTGSPRRRGASSPTRRRSPTSWTCRRCPGTSTRAPAGSTPCGPSRAGPRRSRSSSAASRPPPAPATWCSAWSAPPWTRPRAPCGWSPATPRSGGWWTWRSGAATRPTRSGRTSGRCSRRRRASGARRWRPCRPRWPRWWSGGAPRASRRTPPGGRRSSRGSATASRSPAACQDPPLPTEKNRRDRALRRACSLSVIY

SEQ ID NO: 28137 - protein, 225 aa, Triticum aestivum
RSISIALSSSTSPASLLLGSRRSTATATAMVVSYTQEHVYLHPWHRVTAAAWRKFTDPAALSHILDVQTLSRDVDPRAGRLHAVRAIAGRPPPLPLLLRGLAATAGAGDVVLCVERTSVDAAARAMRVVSRNATFRRLVDVEERCSYAPHPERPDEWTVFTQETSIRCAPLAAVSATVAEMVERRCAESFAQNAARGQEVVERICDGLALAGRVPGPSPADGEEP

SEQ ID NO: 28138 - protein, 196 aa, Triticum aestivum
MVVSYTQEHVYLHPWHRVTAAAWRKFTDPAALSHILDVQTLSRDVDPRAGRLHAVRAIAGRPPPLPLLLRGLAATAGAGDVVLCVERTSVDAAARAMRVVSRNATFRRLVDVEERCSYAPHPERPDEWTVFTQETSIRCAPLAAVSATVAEMVERRCAESFAQNAARGQEVVERICDGLALAGRVPGPSPADGEEP

SEQ ID NO: 28139 - DNA, 664 bp, Triticum aestivum
tcaagagaaaccaagctggacttctaaggcacttgctaccgaaatcggcatacctgtagactctctcaacagaagaataggtttctggacaagcaagggggtcctgactgaatcggtgggaccagatgccgatgatcacatcttcacaattgttgatagcatgtctgatgtcaacaaaaacagcatcgtgaacgaaagctgcgaagcgtttcaaatgaatgaggacgaaggtgaaagttccgttgcatccgttgaggaacagcttaagaaagaaatgacagtctatgagaaattcatcataggaatgttaaccaatttcggcaatatgacactggacaaaatacataacactttgaagatgttctgtgccgagccatcgtatgataaatcactgcagcaattgcagagttttctttcgggtctagtatcagatgaaaagcttgaaatgagagatggattgtacttgctaaaaaagtaactgctacttagggtgacacattatgctgttagattaaggatgacaggcagtcaaaccagcgcagatggtgggcttcctgatgttgctctgaactcgcttttcttctttccctagccttgatagtttcaactcctgagacaatgtatttctgttatgaaagtaatggaaaggggaaaagcctggttc

SEQ ID NO: 28140 - protein, 158 aa, Triticum aestivum
QEKPSWTSKALATEIGIPVDSLNRRIGFWTSKGVLTESVGPDADDHIFTIVDSMSDVNKNSIVNESCEAFQMNEDEGESSVASVEEQLKKEMTVYEKFIIGMLTNFGNMTLDKIHNTLKMFCAEPSYDKSLQQLQSFLSGLVSDEKLEMRDGLYLLKK

SEQ ID NO: 28141 - protein, 105 aa, Triticum aestivum
MSDVNKNSIVNESCEAFQMNEDEGESSVASVEEQLKKEMTVYEKFIIGMLTNFGNMTLDKIHNTLKMFCAEPSYDKSLQQLQSFLSGLVSDEKLEMRDGLYLLKK

SEQ ID NO: 28142 - protein, 87 aa, Triticum aestivum
MNEDEGESSVASVEEQLKKEMTVYEKFIIGMLTNFGNMTLDKIHNTLKMFCAEPSYDKSLQQLQSFLSGLVSDEKLEMRDGLYLLKK

SEQ ID NO: 28143 - DNA, 1029 bp, Triticum aestivum
aaaaaaataaacgcatcggcgccgtcaagtcccccagccgaggtcacacaagcccgcacccgcacccgcacccgcacccgcacaacagagacccagagcaggcgacacaccgcccaggcccagctccagctccggcgagatctccggcgacccttcgagatgagccgcggatcgggcgcgggctacgaccgccacatcaccatcttctcccccgagggccgcctctaccaagtcgagtacgcgttcaaggcggtcaagtcggcgggggtcacctcgatcggcgtccgcggcaaggactccgtctgcgtcgtcacccagaagaaagtcccggacaagttgctggatgacaccagcatcacgcacctcttctcgattaccaagtacaccggcttgcttgccaccggcctcacagctgatgcgaggtccttggtctcccaagcaagaaatgaagcagctgagttccgtaaaaaatggggatacgagatgcctgtggatgtattagcaaaatggatagcagacaaagcacaaatatacacgcagcatgcgtacatgagaccccttggtgtagttgccatggtcttgggttatgatgaagagaaaaatgctcagctcttcaagtgtgaccccgcaggtcacttctttggacacaaggcaactagtgccggactgaaggagcaggaagcaataaattttctggagaagaaaatgaaggatagcccgcagttcacatatgacgaaactgttcagattgcagtttctgcattgcaatctgttctgcaggaagatttcaaggctaccgagatcgaggtcggtgttgtgaggaaagaagaccgtgtcttccggtcgctcacgacagaggagattgatcagcacctaacagccattagcgagcgcgactgagctatgagactgtagctgtcaatgcaccataaactgttattttgtttcatagccagccaagaaacattcagtgaatcatttcatgtgtagcaagaaagacgggcatccactctgccatgtattagttgg

SEQ ID NO: 28144 - protein, 299 aa, Triticum aestivum
KKINASAPSSPPAEVTQARTRTRTRTRTTETQSRRHTAQAQLQLRRDLRRPFEMSRGSGAGYDRHITIFSPEGRLYQVEYAFKAVKSAGVTSIGVRGKDSVCVVTQKKVPDKLLDDTSITHLFSITKYTGLLATGLTADARSLVSQARNEAAEFRKKWGYEMPVDVLAKWIADKAQIYTQHAYMRPLGVVAMVLGYDEEKNAQLFKCDPAGHFFGHKATSAGLKEQEAINFLEKKMKDSPQFTYDETVQIAVSALQSVLQEDFKATEIEVGVVRKEDRVFRSLTTEEIDQHLTAISERD

SEQ ID NO: 28145 - protein, 246 aa, Triticum aestivum
MSRGSGAGYDRHITIFSPEGRLYQVEYAFKAVKSAGVTSIGVRGKDSVCVVTQKKVPDKLLDDTSITHLFSITKYTGLLATGLTADARSLVSQARNEAAEFRKKWGYEMPVDVLAKWIADKAQIYTQHAYMRPLGVVAMVLGYDEEKNAQLFKCDPAGHFFGHKATSAGLKEQEAINFLEKKMKDSPQFTYDETVQIAVSALQSVLQEDFKATEIEVGVVRKEDRVFRSLTTEEIDQHLTAISERD

SEQ ID NO: 28146 - DNA, 478 bp, Triticum aestivum
gcgatctgtttcacgatgggatgtgccttcatcattggatctttctttgcattgaaaggaccgaagaatcagctctatcatatgatttccagagagaggttacctttcaccattggatttgttggcagcatgtttgctaccatctatgtgtcaatggtgctccatagctacatactttctgttttcttctcttgtcttcagatccttgcgctagtatactatgccatctcatacttccctggtgggtctgctggaatgaagtttctgtcatctacccttgtggcctcagtgttgagatgcttcgggcgatgagttcacccgttagttgctctcacccatctgtctcgccctgtgttcagctcagtgacaattttttttcttttgctttgacatggagagtgtgtgtcaaagatgaccttggagcttgtgttcacagatatacatgcatgtccaacttaccgatagtattaccgattcc

SEQ ID NO: 28147 - protein, 103 aa, Triticum aestivum
AICFTMGCAFIIGSFFALKGPKNQLYHMISRERLPFTIGFVGSMFATIYVSMVLHSYILSVFFSCLQILALVYYAISYFPGGSAGMKFLSSTLVASVLRCFGR

SEQ ID NO: 28148 - protein, 98 aa, Triticum aestivum
MGCAFIIGSFFALKGPKNQLYHMISRERLPFTIGFVGSMFATIYVSMVLHSYILSVFFSCLQILALVYYAISYFPGGSAGMKFLSSTLVASVLRCFGR

SEQ ID NO: 28149 - protein, 76 aa, Triticum aestivum
MISRERLPFTIGFVGSMFATIYVSMVLHSYILSVFFSCLQILALVYYAISYFPGGSAGMKFLSSTLVASVLRCFGR

SEQ ID NO: 28150 - DNA, 637 bp, Triticum aestivum
atatacttttaacgtaatgaagttcaaggatggtaacaggggagcaatcaatgggatgtggccagatggtacactggacatgtccacaatgcaatctagggagatatggccaggcgtgacatacgcgcttgctgcatctatgattcaagaaggcatggttgaggagggtttcaaaacagctgaaggagtctatcatgctgcctggtcttcagaaggacttggatacgcattccaaactcctgaatcttggaacaatgacgatgagtaccggtccttgtgctacatgcgcccactcgccatatgggcgatacagtgggcactctcaaacccaaagctccacaaggagcctcagacagacataacacaagattcttttccgaagaacccagttctcatatgcacgaatagcgaagctcctgcagttacctgaagatgaatcgtccaagagcgtccctcgggttatctatgagatagttcggaacaggtttacttcatgatatatgggccgcgacatgcctgaatgttgaatgcactattggagcaacattgttcaatttggttgttgattgcggaaacatgttattggtcagcacacattagtatggagttaatggtaataaaagatgagatccatgtt

SEQ ID NO: 28151 - protein, 142 aa, Triticum aestivum
YTFNVMKFKDGNRGAINGMWPDGTLDMSTMQSREIWPGVTYALAASMIQEGMVEEGFKTAEGVYHAAWSSEGLGYAFQTPESWNNDDEYRSLCYMRPLAIWAIQWALSNPKLHKEPQTDITQDSFPKNPVLICTNSEAPAVT

SEQ ID NO: 28152 - protein, 137 aa, Triticum aestivum
MKFKDGNRGAINGMWPDGTLDMSTMQSREIWPGVTYALAASMIQEGMVEEGFKTAEGVYHAAWSSEGLGYAFQTPESWNNDDEYRSLCYMRPLAIWAIQWALSNPKLHKEPQTDITQDSFPKNPVLICTNSEAPAVT

SEQ ID NO: 28153 - protein, 124 aa, Triticum aestivum
MWPDGTLDMSTMQSREIWPGVTYALAASMIQEGMVEEGFKTAEGVYHAAWSSEGLGYAFQTPESWNNDDEYRSLCYMRPLAIWAIQWALSNPKLHKEPQTDITQDSFPKNPVLICTNSEAPAVT

SEQ ID NO: 28154 - DNA, 650 bp, Triticum aestivum
ctatgaactaaacggttgcatgcatgcagaggctgtacgggctgggagcgcggcggatcggggtgacgtcgctgccgcccatggggtgcctgccggcgtccgtcaccctcttcggcggcggcggcgggggcggctgcgtggagcggctcaacaacgactccctcaccttcaacgccaagctgcaggcggcgtcggacgcggccaagaagcgccactcggacctcaagctcgtcgtcttcgacatctacaacccgctcctcaacctcgtcgccgaccccatgagcgccgggttcttcgagtctcggcgcgcgtgctgtgggacggggaccatcgagacgtcggtgctgtgccaccagggggcgccggggacgtgcgccaacgccaccggctacgtcttctgggacggcttccaccccaccgacgccgccaacaaggtgctcgccgacgcgctgctcctccagggactccagctcatctcctagctagctgctcagtccttcctcgccgctccaatggcgctctgacaccgcaccgaccgtcttgtgcatgtctgtccgtttacctcctggcttttcttgcttgtcatctctactaccggatcatctctcctgctgttttgtttgctttcaactactactgtgtttccgtgc

SEQ ID NO: 28155 - protein, 216 aa, Triticum aestivum
YELNGCMHAEAVRAGSAADRGDVAAAHGVPAGVRHPLRRRRRGRLRGAAQQRLPHLQRQAAGGVGRGQEAPLGPQARRLRHLQPAPQPRRRPHERRVLRVSARVLWDGDHRDVGAVPPGGAGDVRQRHRLRLLGRLPPHRRRQQGARRRAAPPGTPAHLLASCSVLPRRSNGALTPHRPSCACLSVYLLAFLACHLYYRIISPAVLFAFNYYCVSV

SEQ ID NO: 28156 - protein, 210 aa, Triticum aestivum
MHAEAVRAGSAADRGDVAAAHGVPAGVRHPLRRRRRGRLRGAAQQRLPHLQRQAAGGVGRGQEAPLGPQARRLRHLQPAPQPRRRPHERRVLRVSARVLWDGDHRDVGAVPPGGAGDVRQRHRLRLLGRLPPHRRRQQGARRRAAPPGTPAHLLASCSVLPRRSNGALTPHRPSCACLSVYLLAFLACHLYYRIISPAVLFAFNYYCVSV

SEQ ID NO: 28157 - protein, 152 aa, Triticum aestivum
MQRLYGLGARRIGVTSLPPMGCLPASVTLFGGGGGGGCVERLNNDSLTFNAKLQAASDAAKKRHSDLKLVVFDIYNPLLNLVADPMSAGFFESRRACCGTGTIETSVLCHQGAPGTCANATGYVFWDGFHPTDAANKVLADALLLQGLQLIS

SEQ ID NO: 28158 - DNA, 754 bp, Triticum aestivum
agcaagccttagctagttagctttacacagcctccattgaagtgcaagaaccaaatccttagcttacacgtccatcaaacacctcagttggctaccatccgttggagagatgaacacgttgtgcgccaagcccatggggttctctggtggcgtgaagtgccagcggcgggcgcgggtgagggtgtcggccgtggcggcggcgccggagagggtgacgatgtacgacgtgctggcggtggggaacgcggcggggccggaggagatcaaggcggcgtacaggcgcgccgcgcggcggtggcacccggacgcgtgcccgggcggcgccgaccggttcatgagggcgcgcgaggcctacgaggtgctctccgaccccgagcgcaggcggggctacgacatccagctgcgctgtggcgcgggcgcgggcgccgccgggtcccgctccagccccgcgccgcgcgcgggcttcgccgactgggaagcacagctggccgggctgcagtggcggatggcggacacgcgaggcgaaacgtgggggagcaggatgcgccgcggcgccgcgcagccgacattgttctaatctctaaaccgcagcgccggctcgtgctctgtgttttctactgtagtactgtatattctacgtagtttcgccttgttctctccttccattccattttacgcggtgggattcggttggtgatgaaactgtatagtgtagtacagacagtgtacaaaagtacggtagtttttttctttg

SEQ ID NO: 28159 - protein, 155 aa, Triticum aestivum
MNTLCAKPMGFSGGVKCQRRARVRVSAVAAAPERVTMYDVLAVGNAAGPEEIKAAYRRAARRWHPDACPGGADRFMRAREAYEVLSDPERRRGYDIQLRCGAGAGAAGSRSSPAPRAGFADWEAQLAGLQWRMADTRGETWGSRMRRGAAQPTLF

SEQ ID NO: 28160 - protein, 147 aa, Triticum aestivum
MGFSGGVKCQRRARVRVSAVAAAPERVTMYDVLAVGNAAGPEEIKAAYRRAARRWHPDACPGGADRFMRAREAYEVLSDPERRRGYDIQLRCGAGAGAAGSRSSPAPRAGFADWEAQLAGLQWRMADTRGETWGSRMRRGAAQPTLF

SEQ ID NO: 28161 - protein, 119 aa, Triticum aestivum
MYDVLAVGNAAGPEEIKAAYRRAARRWHPDACPGGADRFMRAREAYEVLSDPERRRGYDIQLRCGAGAGAAGSRSSPAPRAGFADWEAQLAGLQWRMADTRGETWGSRMRRGAAQPTLF

SEQ ID NO: 28162 - DNA, 659 bp, Triticum aestivum
acctattcttccaccttccaccgtccctgccgacggatcccaactccgccgccgccgccgccgtgtccctgcgaagctccgccgcctgactgcgagtcttcccctcacggcgtccggtgcatccgtccatccatccatccatccagaagacgccgccgccgccgcccctcctccccccgcgcgccgccggcgtctccgcctccaggtactgtaccaagcgcattgaaagatggttaatgcaatcaaggggttgttcatctcctgtgatataccgatggctcaattcattgttaatatgaacgcgtcaatgcccgcatcggagaagttcatcgtgcacattcttgaccccacacacatgtttatccagcctaatatgggagattacatcaaaagtaagatggcggagttcagagaccagaacagctacgagaagccaacgtgaagggccaccatccattaccgcggtgctagcttcaaactccaccaagagatacctatgttgattatcgctatgtagaatggttatatgccgagactgaacgttatgtctctctgttgtggtgttctggaatgacagttctgtagtatcgcagagttttgggtcttatgtatcttcggagtgagcctttagctgatagtaatatatttgcttaacactc

SEQ ID NO: 28163 - protein, 78 aa, Triticum aestivum
TYSSTFHRPCRRIPTPPPPPPCPCEAPPPDCESSPHGVRCIRPSIHPSRRRRRRRPSSPRAPPASPPPGTVPSALKDG

SEQ ID NO: 28164 - protein, 74 aa, Triticum aestivum
PILPPSTVPADGSQLRRRRRRVPAKLRRLTASLPLTASGASVHPSIHPEDAAAAAPPPPARRRRLRLQVLYQAH

SEQ ID NO: 28165 - protein, 70 aa, Triticum aestivum
MVNAIKGLFISCDIPMAQFIVNMNASMPASEKFIVHILDPTHMFIQPNMGDYIKSKMAEFRDQNSYEKPT

SEQ ID NO: 28166 - DNA, 704 bp, Triticum aestivum
gtttctataaataccccacacatcaattgctttgatcccagcattctcctcaaaactcaagcattgcatccctcttgatttgtagtttgttttgtgctttagataaaagttctgccaaatcaagaggggttttaagatcatagtgtgtgttttgcaacaatggctaagttctttgctgctatgatcttggcactctttgccatttccatacttcaaacagtggtaatggctgctaatgaacaaggaggccacttgtatgacaacaagagcaaatatggaagtggaagtgtcaagagttaccaatgcccatcacaatgctcgaggagatgtagccagacccaataccacaagccctgcatgtttttctgtcagaagtgctgcaggaaatgcctgtgtgtgcccccggggtattatggtaataaagctgtgtgcccttgctacaacaactggaagaccaaggaaggaggacccaagtgcccttgagcttcaacttgttcaacttcaattgtcgctttcctacatttttattgcttccttccttgtgccaatttaatgcactagctaccaaatgctactagccccttttggtggcactctatgatattatgtttttatgtattttggtgtatcactccttgggccttgtttgcctttaatgagagtggcttattaatatcaatatatcacctaccaaacttattgct

SEQ ID NO: 28167 - protein, 107 aa, Triticum aestivum
MAKFFAAMILALFAISILQTVVMAANEQGGHLYDNKSKYGSGSVKSYQCPSQCSRRCSQTQYHKPCMFFCQKCCRKCLCVPPGYYGNKAVCPCYNNWKTKEGGPKCP

SEQ ID NO: 28168 - protein, 105 aa, Triticum aestivum
MNKEATCMTTRANMEVEVSRVTNAHHNARGDVARPNTTSPACFSVRSAAGNACVCPRGIMVIKLCALATTTGRPRKEDPSALELQLVQLQLSLSYIFIASFLVPI

SEQ ID NO: 28169 - protein, 100 aa, Triticum aestivum
MILALFAISILQTVVMAANEQGGHLYDNKSKYGSGSVKSYQCPSQCSRRCSQTQYHKPCMFFCQKCCRKCLCVPPGYYGNKAVCPCYNNWKTKEGGPKCP

SEQ ID NO: 28170 - DNA, 772 bp, Triticum aestivum
aataacaagaactagagacaaaggaaaaatcaaagaaaatggagaagattgatgatcatctgaagcctagccacagtgtttccgctggtgctgcgacagagaagtgggaagaggttagtactggtatccgaaccgccgagacaatgctccgggtagctccggtgggtctttgtgttgcggcgcttgttatcatgctcaaagactctcagactaatgagtacggcgaagtttcttactccaacctcacagcgttcaggtacttggtgcacgcaaatggaatatgtgcaggctactctcttctctcagcagccattgcagccatgcctggttcttcttccactatgcctcgtgtttggaccatcttctgtctcgaccagattctgacctacgtggttcttgctgctggagctgtgtctactgaagttctatacttagcctacaaaggagacgatgccattacgtggagcgatgcgtgcagttcatttggcagtttctgccataaagccactgcttctgttataatcacattcgttgtggtttgcttttatgtcgttctctctcttatctcctcttataagctctttactcgctttgatcctccagccaccgttgactccaacaaaaacgtcgaagttgctgtctttggaagttgatccgtagctttctttattcaagacatctctaatttgtcgtgtttacaatgtctctactgtttttaataactttgatcaagaatataatgcttgtaatctgatgttcattttcgcgtgcc

SEQ ID NO: 28171 - protein, 204 aa, Triticum aestivum
MEKIDDHLKPSHSVSAGAATEKWEEVSTGIRTAETMLRVAPVGLCVAALVIMLKDSQTNEYGEVSYSNLTAFRYLVHANGICAGYSLLSAAIAAMPGSSSTMPRVWTIFCLDQILTYVVLAAGAVSTEVLYLAYKGDDAITWSDACSSFGSFCHKATASVIITFVVVCFYVVLSLISSYKLFTRFDPPATVDSNKNVEVAVFGS

SEQ ID NO: 28172 - protein, 169 aa, Triticum aestivum
MLRVAPVGLCVAALVIMLKDSQTNEYGEVSYSNLTAFRYLVHANGICAGYSLLSAAIAAMPGSSSTMPRVWTIFCLDQILTYVVLAAGAVSTEVLYLAYKGDDAITWSDACSSFGSFCHKATASVIITFVVVCFYVVLSLISSYKLFTRFDPPATVDSNKNVEVAVFGS

SEQ ID NO: 28173 - protein, 153 aa, Triticum aestivum
MLKDSQTNEYGEVSYSNLTAFRYLVHANGICAGYSLLSAAIAAMPGSSSTMPRVWTIFCLDQILTYVVLAAGAVSTEVLYLAYKGDDAITWSDACSSFGSFCHKATASVIITFVVVCFYVVLSLISSYKLFTRFDPPATVDSNKNVEVAVFGS

SEQ ID NO: 28174 - DNA, 907 bp, Triticum aestivum
aacctctctgcttcacttaatctgtgtgttgcctcttgaaaaaacccatcataaacccttctttacctttgtgctcatcttccttcctcgttatcaacagtctcaatcgaaaccgattcattgagaatgacggagatggtaacgcctggagacgtgctcggtaatgcggctgagttaaaacccgggaaaggagcttacgtcaacgacaacaccatctacgcttccctcacaggatctcgccggattgtttctcctcttcccgaatctcttgaccagagagctactgtggaagttactggtcacaaggcgcatggacttatccccgagcctggctctcttgtcttagctagggttactaaagttatggctcgtatggcttctgttgatatcttgtgtgttggttcaaaggccgttcgtgaaaaatttgctggcgtaatcaggcaacaagatgttagagaaacagagattgacaaagttgagattcatcagtctttccgtcctggtgacattgttagagctgtggttctgtctcttggtgactcacgggcttactatctgtcaactgctaagaatgagcttggtgtggtctctgctgagagcgctgcaggtgaaacaatggttccgattagttggacagagatgcaatgtcctttgtctggccaaaccgagcagaggaaagttgccaaggtggcctaatttgaatgacactacagataatctggcttctatcatagatgtgtgtctctacaacaagaaaagacatgtttgattattacagttttgagctcttttgacatgctttaacttaaaagaccatgttttgtcaagtgcaaaagcaacttgcctttattcctaaactcagaagacatttcaatgaaagggttaagagagaatgaatttgaatgtg

SEQ ID NO: 28175 - protein, 189 aa, Triticum aestivum
MTEMVTPGDVLGNAAELKPGKGAYVNDNTIYASLTGSRRIVSPLPESLDQRATVEVTGHKAHGLIPEPGSLVLARVTKVMARMASVDILCVGSKAVREKFAGVIRQQDVRETEIDKVEIHQSFRPGDIVRAVVLSLGDSRAYYLSTAKNELGVVSAESAAGETMVPISWTEMQCPLSGQTEQRKVAKVA

SEQ ID NO: 28176 - protein, 186 aa, Triticum aestivum
MVTPGDVLGNAAELKPGKGAYVNDNTIYASLTGSRRIVSPLPESLDQRATVEVTGHKAHGLIPEPGSLVLARVTKVMARMASVDILCVGSKAVREKFAGVIRQQDVRETEIDKVEIHQSFRPGDIVRAVVLSLGDSRAYYLSTAKNELGVVSAESAAGETMVPISWTEMQCPLSGQTEQRKVAKVA

SEQ ID NO: 28177 - protein, 110 aa, Triticum aestivum
MARMASVDILCVGSKAVREKFAGVIRQQDVRETEIDKVEIHQSFRPGDIVRAVVLSLGDSRAYYLSTAKNELGVVSAESAAGETMVPISWTEMQCPLSGQTEQRKVAKVA

SEQ ID NO: 28178 - DNA, 796 bp, Triticum aestivum
ttggaaattatttcaaggaaggtttagctcctattaacttgattattgaagataactttcaccgtgcggcccctggtggaactggaggcgtgaaaactattggaaactatgcctcggtgttgaaagcacagagaactgcaaaggacaaaggatattctgatgtcctctatttggatgccgttcacaacaaatatctggaagaagtttcttcatgcaatattttcgttgtgaaaggcaatgctatttccactccagcaatagaaggaacgatattgcctggtatcacaaggaaaagtatcatcgaagttgccgagagcaaaggctacaaggtggaggaacgccatgtgtctgtagatgaactgcttgatgcagacgaagttttctgcacaggaacagctgttgtggtttcacccgtggggagcattacctataaggggaaaagggtagaatacgatggcaaccaaggagtcggcgtggtgtcacagcagctatacacctcgctgacaagcctccagatgggtcacacagaggatcggatgggctggaccatgcaactgaattaagtatcgcatcaccgatcttggctcgacagatttccagaacactgctatggcagatgaattaaactcttcaactgggacctaggggaagctaatatgtaattctcttgtttaccatcaactaggatcttgcaaaaatggtcagtctagctgggcagctagcgagacttcctgaacacggcacaagaatatgtgtttatcctctgatttcttttttcagaataataaacgttact

SEQ ID NO: 28179 - protein, 186 aa, Triticum aestivum
GNYFKEGLAPINLIIEDNFHRAAPGGTGGVKTIGNYASVLKAQRTAKDKGYSDVLYLDAVHNKYLEEVSSCNIFVVKGNAISTPAIEGTILPGITRKSIIEVAESKGYKVEERHVSVDELLDADEVFCTGTAVVVSPVGSITYKGKRVEYDGNQGVGVVSQQLYTSLTSLQMGHTEDRMGWTMQLN

SEQ ID NO: 28180 - DNA, 558 bp, Triticum aestivum
acgatagagttgagagagagagagagagaaaaaaagagggctaagataaacaaaaagaagacagaatgggtaagaacaataccaaaatcctcatcacagctcttgtgatggttgtaaccgccgcgatgatgattgaagaagctacgagcattcccatatgtggcgtcaacacaaacgacttgaagaaatgtagtccagctgtcactggaaacaacccaccacctcccactccccaatgctgcaaggtggccaaagccgctaatcttgaatgtctctgcccgtacttcaccaggtccgcgcttgacccggccaaaatcaaggctctagggaccaattgtggcattactaaaaaaccctcctgtttgccatgattgaagaactgagctggaagggacaaatgctggcctgccacaagattaagtctctaagttattatgtcttttgttgttctattcgaataaaccaccagattttgcaattatttttcagtcacctttttctaaataaaaaaaccgtgttctatatatttaataaatcaataaagtactgttttgtctt

SEQ ID NO: 28181 - protein, 101 aa, Triticum aestivum
MGKNNTKILITALVMVVTAAMMIEEATSIPICGVNTNDLKKCSPAVTGNNPPPPTPQCCKVAKAANLECLCPYFTRSALDPAKIKALGTNCGITKKPSCLP

SEQ ID NO: 28182 - protein, 87 aa, Triticum aestivum
MVVTAAMMIEEATSIPICGVNTNDLKKCSPAVTGNNPPPPTPQCCKVAKAANLECLCPYFTRSALDPAKIKALGTNCGITKKPSCLP

SEQ ID NO: 28183 - protein, 81 aa, Triticum aestivum
MMIEEATSIPICGVNTNDLKKCSPAVTGNNPPPPTPQCCKVAKAANLECLCPYFTRSALDPAKIKALGTNCGITKKPSCLP

SEQ ID NO: 28184 - DNA, 763 bp, Triticum aestivum
gggatttgctaggcttgcgcaaaagtacaaaaatgttacaagaaattcagagaaggggaaaaagacgaggggaaaatcagcattctgacagcgacttgatcggaccgatcggcacgcgtggcacaccttctttccacacctcccggctgaagctgctgtagaatcctcaaaccaatcaaccaccatccatcaccaaagagcagagcaaggaaatctgtggacgttctgcccgtccaccaaatcccttcagcgcgccgcctccctcgctcgcgaggactctgcggatctctctcagcggcagcaagcagagcggagagagcaatccgccatggccatggtcgcctccacctccatcgcccaccacaagccgcgtttgtcggtgctgtgcaggaagaaggaccgggacagggagctggagcgggagaaggagcacaagtaccccttcaaggtcgtcgagatcacgccgccaccgcgatgcctcggcgtccgctgcttccccacgaacatccactgcggggagagcgtgacgatcgaagggcaggcgtacaccgtgtcggcggtgacgcaccggtaccagctgcgcaaggggcggtacgagccgagcgagaagcgcctcgacgtcctctccaccggcagatacatcctcaacctctacctcgacagcctcctcgacaagtcctagactctctatgctctactctacactactagtacaaatttatttattctactacttcagcaaatttatttatgcctctactgc

SEQ ID NO: 28185 - protein, 117 aa, Triticum aestivum
MAMVASTSIAHHKPRLSVLCRKKDRDRELEREKEHKYPFKVVEITPPPRCLGVRCFPTNIHCGESVTIEGQAYTVSAVTHRYQLRKGRYEPSEKRLDVLSTGRYILNLYLDSLLDKS

SEQ ID NO: 28186 - protein, 115 aa, Triticum aestivum
MVASTSIAHHKPRLSVLCRKKDRDRELEREKEHKYPFKVVEITPPPRCLGVRCFPTNIHCGESVTIEGQAYTVSAVTHRYQLRKGRYEPSEKRLDVLSTGRYILNLYLDSLLDKS

SEQ ID NO: 28187 - protein, 78 aa, Triticum aestivum
MPRRPLLPHEHPLRGERDDRRAGVHRVGGDAPVPAAQGAVRAEREAPRRPLHRQIHPQPLPRQPPRQVLDSLCSTLHY

SEQ ID NO: 28188 - DNA, 1085 bp, Triticum aestivum
gccaaattatttttgcctgagtcgcactcgcacgcagccttccttcctacctccaccccgcagtagtagcagcagctccatcaccatctcccccctgcttccttcctcggatcggagggggagagcgaccggccgaccaggaggaagcggcggcaggatgagtctcttcggcctcggacggaatcagaagactttccgttccaagaaaagtgctccatcaggcagcaagggggcacagctccgaaagcacatagatgcaaccctcggtagtggaaaccttagggaagctgtgaggctgccttctggagaggatatcaatgaatggcttgctgttaacactgtggacttctttaatcaagttaacctgctgtatggcacactcacagagttctgcacatccgaaagctgcccaacaatgactgcaggcccaaagtatgagtaccgatgggctgatggtgtacagataaagaagcccatagaagtgtcagcaccaaaatacgtggagtacctaatggactggattgaaggccagcttgacaatgaatccttatttcctcagaagcttggcacaccatttccacccaacttcaaggatgttgtaaacacaattttcaagcgcttgtttcgtgtttatgcccacatatatcactcccattttcagaagattgtcagcctcaaggaggaggctcatcttaacacctgcttcaagcacttcattctgtttacgaacgaatttgggctgattgacaagaaagaactggctcccctccaggagctcatcgaatcaatcatcgttccatactgagaaggaaacactgaggctgaaccgaactaaacatggctgctactgagtcttctacaggaatggtcgagcgattgggctatctgcgccaataatttactggcacaaatcttcttgttccatttctttgacataaaaacacaaaaacatgtatattaccagtgatgtatttgtgtgtacatgttcagcagttctcctgtgcaaacgcgattgtactgctataacatgcatgtttgggttcggttgtgatagtaataacattgaaaagggcagttttaagatg

SEQ ID NO: 28189 - protein, 267 aa, Triticum aestivum
PNYFCLSRTRTQPSFLPPPRSSSSSSITISPLLPSSDRRGRATGRPGGSGGRMSLFGLGRNQKTFRSKKSAPSGSKGAQLRKHIDATLGSGNLREAVRLPSGEDINEWLAVNTVDFFNQVNLLYGTLTEFCTSESCPTMTAGPKYEYRWADGVQIKKPIEVSAPKYVEYLMDWIEGQLDNESLFPQKLGTPFPPNFKDVVNTIFKRLFRVYAHIYHSHFQKIVSLKEEAHLNTCFKHFILFTNEFGLIDKKELAPLQELIESIIVPY

SEQ ID NO: 28190 - protein, 215 aa, Triticum aestivum
MSLFGLGRNQKTFRSKKSAPSGSKGAQLRKHIDATLGSGNLREAVRLPSGEDINEWLAVNTVDFFNQVNLLYGTLTEFCTSESCPTMTAGPKYEYRWADGVQIKKPIEVSAPKYVEYLMDWIEGQLDNESLFPQKLGTPFPPNFKDVVNTIFKRLFRVYAHIYHSHFQKIVSLKEEAHLNTCFKHFILFTNEFGLIDKKELAPLQELIESIIVPY

SEQ ID NO: 28191 - DNA, 651 bp, Triticum aestivum
aaaacacactcgcctcatcgtctctgtctctatcattctctctataatggcgcagatggatcccgatgcggtggctaaggccttcgtcgagcactactactcgaccttcgacaacaaccgtgtcggcctcgccggtctctaccaggaagcttccatgctcaccttcgaaggtcagaagatccttggagtccagaacatcgtcgccaagctcacctctctccctttccagtgcaagcacaacatctccaccgtcgactgccagccttctggtcccgcctccggtatgctcgttttcgtctccggcaacctccagctcgccggcgaggagcacgccctcaagttcagccagatgtttcacttgatgccgacgccacaaggaagcttttacgtgttcaacgacatattcaggttgaactacgcttgaaaaggaatcagcagattgttaattaagcatacacatcactcttgtagcatctatttgagcaatccttccatcatatctctcttgtgttttttttttctttattacttaagatgatttgtttggagaaagggaggaggaagactactgtctctcttgtatttggtttgaatgttttgttcattttacaaatgtaagaacttgtcaaagacaaatttgaaatggtttcc

SEQ ID NO: 28192 - protein, 140 aa, Triticum aestivum
KHTRLIVSVSIILSIMAQMDPDAVAKAFVEHYYSTFDNNRVGLAGLYQEASMLTFEGQKILGVQNIVAKLTSLPFQCKHNISTVDCQPSGPASGMLVFVSGNLQLAGEEHALKFSQMFHLMPTPQGSFYVFNDIFRLNYA

SEQ ID NO: 28193 - protein, 125 aa, Triticum aestivum
MAQMDPDAVAKAFVEHYYSTFDNNRVGLAGLYQEASMLTFEGQKILGVQNIVAKLTSLPFQCKHNISTVDCQPSGPASGMLVFVSGNLQLAGEEHALKFSQMFHLMPTPQGSFYVFNDIFRLNYA

SEQ ID NO: 28194 - protein, 122 aa, Triticum aestivum
MDPDAVAKAFVEHYYSTFDNNRVGLAGLYQEASMLTFEGQKILGVQNIVAKLTSLPFQCKHNISTVDCQPSGPASGMLVFVSGNLQLAGEEHALKFSQMFHLMPTPQGSFYVFNDIFRLNYA

SEQ ID NO: 28195 - DNA, 924 bp, Triticum aestivum
acacagtcgtaagggcaaacccgctctctctccccccaaatcgatggagtctgacggcgaggaggaggcggcggcgacgccggcggcggggcggctgaagggctgcccagagctgtcggtggagggggacatgcgggagatggccaagacggcggcctggagcgtcagctcctgcaagcccggcaacggcgtcgcctccctccgcgacgacagcctcgacacctactggcagtctgacggcgcgcagccgcacctggtcaacatccagttccagaagaaggtgcagctgcagcttgttgtgctctacgtggatttcaagctggacgagagctacacgcccagcaagatctccatccgggccggcgacggcttccacaatctcaaggaaattaaaacggtggaccttttgaagccagtaggatgggttcatatatcattatctggcactgatcccggagaaacattcattcatacatttatgctccaaatcgcggtgttggccaatcacctgaacgggagggacacccatgtccggcagatcaagatatatgggccacgaccgaaccccgttccccaccagcctttccacttcacttccagggaatgcatcatgtactccaccatcaggtgatggttcgtgaaccctggtcgcgtgggatcctccatatcagagacctttatcgtgtggcctgtgcgcttcagtcctccatgacaaacgagtcactgaagtatccagcatatgttatcatgtactactgtagattaagttgctgctgaagcattaggctgtctctctgaacatctaacacgtactaattcatgttgtattccattccatccatgtattcttggtagtacatctttttcctccatttaatgtaacatttcactatttctggaatggattggaagtttctcctggtt

SEQ ID NO: 28196 - protein, 209 aa, Triticum aestivum
HSRKGKPALSPPKSMESDGEEEAAATPAAGRLKGCPELSVEGDMREMAKTAAWSVSSCKPGNGVASLRDDSLDTYWQSDGAQPHLVNIQFQKKVQLQLVVLYVDFKLDESYTPSKISIRAGDGFHNLKEIKTVDLLKPVGWVHISLSGTDPGETFIHTFMLQIAVLANHLNGRDTHVRQIKIYGPRPNPVPHQPFHFTSRECIMYSTIR

SEQ ID NO: 28197 - protein, 195 aa, Triticum aestivum
MESDGEEEAAATPAAGRLKGCPELSVEGDMREMAKTAAWSVSSCKPGNGVASLRDDSLDTYWQSDGAQPHLVNIQFQKKVQLQLVVLYVDFKLDESYTPSKISIRAGDGFHNLKEIKTVDLLKPVGWVHISLSGTDPGETFIHTFMLQIAVLANHLNGRDTHVRQIKIYGPRPNPVPHQPFHFTSRECIMYSTIR

SEQ ID NO: 28198 - protein, 166 aa, Triticum aestivum
MREMAKTAAWSVSSCKPGNGVASLRDDSLDTYWQSDGAQPHLVNIQFQKKVQLQLVVLYVDFKLDESYTPSKISIRAGDGFHNLKEIKTVDLLKPVGWVHISLSGTDPGETFIHTFMLQIAVLANHLNGRDTHVRQIKIYGPRPNPVPHQPFHFTSRECIMYSTIR

SEQ ID NO: 28199 - DNA, 749 bp, Triticum aestivum
actcaattcacccacaacatagctagtggaacagtgtcttctaaaaaatggcttcaagctccatagcccttttcttggctctcaacctcctgttcttcacaacaatctccgcatgcggtagctgcactccttgcggaggaggctgcccctctcccaagccgaagccaactcctaaaccaaccccaagccctagctctggcaagggaaagtgccctaaagataccctcaagcttggtgtctgcgccaatgtgctcaatggcctcctcgacttgaccctcggcaagccacctgtcaagccatgctgcagcctcatccaaggactcgctgatgttgaagcagccgtttgtctctgcaccgctcttaaggctaacgttcttggaatcaacttgaacctcccaatctctctaagtcttctcctcaatgtttgcagcaaacaagttcctcctggcttccagtgctaagcaaccgtatcatatgtaatttcaatacacaaatgtgtatatttatcttcttgttttggacagacaaggtggttctatttactcttaatattgtgaccctctatattggtgttcttattatagttttcttgttatggggttcactggagccaaattgtgtctctatctggatgatccttaagattcttcaagttcacagttccattatttcccgttactcttatgttggagtaattattgtattgtgatcctatgaattgataaatcaattatcttttatgttatgcg

SEQ ID NO: 28200 - protein, 137 aa, Triticum aestivum
MASSSIALFLALNLLFFTTISACGSCTPCGGGCPSPKPKPTPKPTPSPSSGKGKCPKDTLKLGVCANVLNGLLDLTLGKPPVKPCCSLIQGLADVEAAVCLCTALKANVLGINLNLPISLSLLLNVCSKQVPPGFQC

SEQ ID NO: 28201 - protein, 71 aa, Triticum aestivum
MCIFIFLFWTDKVVLFTLNIVTLYIGVLIIVFLLWGSLEPNCVSIWMILKILQVHSSIISRYSYVGVIIVL

SEQ ID NO: 28202 - DNA, 1038 bp, Triticum aestivum
acctaaaggcccaaccgcccaagcgacggccatagccgaaaaccctaacccgccgccacgccgccctcccgccacccgcgccggcgccgcttctccccgccgatacaggccaaaaccctcgcgcgggggcatcggaggcggaggagggatggcgtccaacggggacaacaagcggctgttccgcgtgcggcgcacggtgttgcagatgctgagagaccgcgggtacacggtgaaggacgaggaaatcaagctgtccctgtacgagttcgtcgaccgctacggagaccccgtccgccgggacgagatcgtcatccattgcgagaagcagggcgaccccaacgacaaggtcaacgtcttcttcctcgacgagtccaagaccggcctggccgtggtcaggagctgcgtcgagaagatgaagctggggaacgccaccaatggcatactcgtcctgcagaaggcgctgagcggcccggcccggaccgaggtcgcacagagcaagaagtaccacctcgaggtcttccaggaaggggagcttcttgtaaacattactgaacaccatctcgttccgaagcacgagctcctgagtgacgaggagaagaaggagctgctgcagaaatacactgcccacgaaactcagctcccgaggattcagctcacggatccggtagcaagataccacggcatgaagcgtgggcaggtggtgaagatcacccggcagagcgaagtcgccggagaatacgtgacctaccgctacgtcatctgatcctcaccgacgtatcaaggcctgaggttggtctgggatttaaaatggttccttcgtcgccaaacccctcccagtactcgaaagaagcattgctgtgtgtgtgtgtggaggaaccaaggtgctcgctgaagtggctcggtgcccctttgtttgtaacttgctggcaatttggcatgagtgtgttagctagaaaaataggtttctgtgtagatgtgctgtgttccgtgctgctaaataactcttgactgtatacgtgagatgcgttggtctgttcc

SEQ ID NO: 28203 - protein, 253 aa, Triticum aestivum
PKGPTAQATAIAENPNPPPRRPPATRAGAASPRRYRPKPSRGGIGGGGGMASNGDNKRLFRVRRTVLQMLRDRGYTVKDEEIKLSLYEFVDRYGDPVRRDEIVIHCEKQGDPNDKVNVFFLDESKTGLAVVRSCVEKMKLGNATNGILVLQKALSGPARTEVAQSKKYHLEVFQEGELLVNITEHHLVPKHELLSDEEKKELLQKYTAHETQLPRIQLTDPVARYHGMKRGQVVKITRQSEVAGEYVTYRYVI

SEQ ID NO: 28204 - protein, 204 aa, Triticum aestivum
MASNGDNKRLFRVRRTVLQMLRDRGYTVKDEEIKLSLYEFVDRYGDPVRRDEIVIHCEKQGDPNDKVNVFFLDESKTGLAVVRSCVEKMKLGNATNGILVLQKALSGPARTEVAQSKKYHLEVFQEGELLVNITEHHLVPKHELLSDEEKKELLQKYTAHETQLPRIQLTDPVARYHGMKRGQVVKITRQSEVAGEYVTYRYVI

SEQ ID NO: 28205 - protein, 185 aa, Triticum aestivum
MLRDRGYTVKDEEIKLSLYEFVDRYGDPVRRDEIVIHCEKQGDPNDKVNVFFLDESKTGLAVVRSCVEKMKLGNATNGILVLQKALSGPARTEVAQSKKYHLEVFQEGELLVNITEHHLVPKHELLSDEEKKELLQKYTAHETQLPRIQLTDPVARYHGMKRGQVVKITRQSEVAGEYVTYRYVI

SEQ ID NO: 28206 - DNA, 679 bp, Triticum aestivum
ccttagggtcatctagtgattcccttggtataatttttcatcagtaagttgtctaactgtcaggattcttatccacttgttgtcctattatttatgtagagccaaaagaagagagttgctgaagagaagaaatcagcgaggaggatggggctcggagtacgccttctgccaccctccgcagaggatgctgccgctgcagctcgtgtgaggttcgcctcgaatttcgagaagaacaggaaggacaagagagcagcgatcaaggccgcctccatcttcccggagccatcaggctcagcttcgaaagacaagctagaccttgcgctgaagaggcggaatataaaagctagtgcagcgtcggcgctgatggcgggcagggcaaagccgtcgtcgtggtcgcggcagagcaccggttctggaagtgcaaggactgctgtgccgatattggcaaggcgcaagtagagccacaccccgagttgtgcttgcgcaaccaagcaagaattttgtgatcttgtccggtctgttgctcagtacgccccatgtatacgtgtatcttgtgtagtaccttcattgatctagcagtgtactgtaaccttggtgttatgtcctgctgtcgtggctggggctgtgagcctgtgacatatcatgagaaactgatttgccttgtaactgatgattctgg

SEQ ID NO: 28207 - protein, 104 aa, Triticum aestivum
MGLGVRLLPPSAEDAAAAARVRFASNFEKNRKDKRAAIKAASIFPEPSGSASKDKLDLALKRRNIKASAASALMAGRAKPSSWSRQSTGSGSARTAVPILARRK

SEQ ID NO: 28208 - DNA, 905 bp, Triticum aestivum
cacaatcaaaacaccgactactcaagggaaatccatggcctctgccgcgctcctcgtcctcctcgccctggccaccatgcaggcgcagaccacgtcgtccgagaaggagacgcacctcaaggtgtactggcacgacgtggtgagcggacaagacccgacatcggtgccggtggcgcgcgcggccacgaccaacacctccaagtcggccttcggcgtcgtcatggtcatggacaactcactcacagaggggccgagcctcgactcatccaggctcatgggccgcgcccagggcacgtacatcgccgccggcaaggaccagctggcgctgctcatgctcatgaacttcgtctttaccgccggaaagtacaacggcagcagcatcgccattgtgggtcgcaacgccgtgtttaccgaggtccgtgagatggctgtcgtcggtggtaccggcgtgttcaggtgggcacgcgggtacgcgcaggccaggacgcataccttagacctcaagaccggcgacgccaccgtcgagtacaacatattcatcaggcactagtctcggccgttgtcaaaatttacttttgaaaacgggtttgctatttcacatctaaatgtgaaatacttatctcacatctaaatctagaacagttgatattgtttgtctttaattttcgtgcaaacatgatcgtctcgcctggcgcacccgttcgcttcacgttgtctgctgcagcggcctgtgtcccggccatgcaagtggtggtgggccgttgttgttcctttttaattcgcgggcttaggctggcagccgttgtttgtctcgattatggactcctgtttacgctttttttactggattgtccacgtatttgttgtctgtataattttttgaagacaatgtgattttagagtgg

SEQ ID NO: 28209 - protein, 182 aa, Triticum aestivum
TIKTPTTQGKSMASAALLVLLALATMQAQTTSSEKETHLKVYWHDVVSGQDPTSVPVARAATTNTSKSAFGVVMVMDNSLTEGPSLDSSRLMGRAQGTYIAAGKDQLALLMLMNFVFTAGKYNGSSIAIVGRNAVFTEVREMAVVGGTGVFRWARGYAQARTHTLDLKTGDATVEYNIFIRH

SEQ ID NO: 28210 - protein, 171 aa, Triticum aestivum
MASAALLVLLALATMQAQTTSSEKETHLKVYWHDVVSGQDPTSVPVARAATTNTSKSAFGVVMVMDNSLTEGPSLDSSRLMGRAQGTYIAAGKDQLALLMLMNFVFTAGKYNGSSIAIVGRNAVFTEVREMAVVGGTGVFRWARGYAQARTHTLDLKTGDATVEYNIFIRH

SEQ ID NO: 28211 - protein, 157 aa, Triticum aestivum
MQAQTTSSEKETHLKVYWHDVVSGQDPTSVPVARAATTNTSKSAFGVVMVMDNSLTEGPSLDSSRLMGRAQGTYIAAGKDQLALLMLMNFVFTAGKYNGSSIAIVGRNAVFTEVREMAVVGGTGVFRWARGYAQARTHTLDLKTGDATVEYNIFIRH

SEQ ID NO: 28212 - DNA, 1012 bp, Triticum aestivum
tcgctcgttgtctctcccgtctcaggtcgccatcgaagcaccagtagcaggaactccttaacgccccagcgtgagatcgcgagattgtttgtagcttgatcgaggcagggaagaccggaagaggatgatgcagtcgccgtcgcagcaccagtcctcctactacgccgtgctcggcgtccacccaggcgcgtcctccgccgagatacgcgccgcgtaccaccgcctcgccatgaggtggcacccggataagattgccaatggccgtgtggatccggcgatcgcggaggaagccaagggaaggttccagaagatacacgaggcataccaggtgttgtcggatcagaagcggagggagctctatgacgccgggatgtacgaccccctcgacgacgaccaagaagaggtcgagggcttccatgatttccttcaggagatgctctcgctcatggccaccgttggtagagaggagcccgtatattccctgggcgaactccaatccatgcttgacgggatgatgcaggatttcacctccccccagccgccgccaccaagcagcttcttcagcagcaccagttcgtcgacgcggttcggcgcacccagcggcggagcgcagcagcagcgtcgacccccctcacgcgtacggcctcaggggttcggcagctcggcatgcttcagccagacggctttctccggctgctaagcacctgcgcgatctgcatcgcagttcatgcgtccgtggggatcaccggcgtgaagacgctgagttgcagagactgggagagacagggaacgtcgagcgctctagcgatgcacacggcgggagccggtactgtacatcacccactggatgagcggaataaagaagacggtagatatttctagttgacagcaactcgaaaggatttccattgttagtttttcttagatagatcgtaggtgtacatagatgagaacagaagtgaagacatgatgttttgcactgtggtgtgtatttacttcaaaagcaagcacg

SEQ ID NO: 28213 - protein, 191 aa, Triticum aestivum
MMQSPSQHQSSYYAVLGVHPGASSAEIRAAYHRLAMRWHPDKIANGRVDPAIAEEAKGRFQKIHEAYQVLSDQKRRELYDAGMYDPLDDDQEEVEGFHDFLQEMLSLMATVGREEPVYSLGELQSMLDGMMQDFTSPQPPPPSSFFSSTSSSTRFGAPSGGAQQQRRPPSRVRPQGFGSSACFSQTAFSGC

SEQ ID NO: 28214 - protein, 190 aa, Triticum aestivum
MQSPSQHQSSYYAVLGVHPGASSAEIRAAYHRLAMRWHPDKIANGRVDPAIAEEAKGRFQKIHEAYQVLSDQKRRELYDAGMYDPLDDDQEEVEGFHDFLQEMLSLMATVGREEPVYSLGELQSMLDGMMQDFTSPQPPPPSSFFSSTSSSTRFGAPSGGAQQQRRPPSRVRPQGFGSSACFSQTAFSGC

SEQ ID NO: 28215 - protein, 156 aa, Triticum aestivum
MRWHPDKIANGRVDPAIAEEAKGRFQKIHEAYQVLSDQKRRELYDAGMYDPLDDDQEEVEGFHDFLQEMLSLMATVGREEPVYSLGELQSMLDGMMQDFTSPQPPPPSSFFSSTSSSTRFGAPSGGAQQQRRPPSRVRPQGFGSSACFSQTAFSGC

SEQ ID NO: 28216 - DNA, 747 bp, Triticum aestivum
acgagaccattacctagaacatcctaatcgaaaaatagccactacctgcttccacttctgattcagaaactcttaggcattccacattctcaaccccgaaccctaagagcagagcgaaaatgacaaccaccttcgcgaccgtcgcaggactcggtggcgcattactgtcatccacctcatctcgtttcacctcagggtttgtgaaatccccagtgattgctaggaatcccttgaggcaagctgtggcaatgggaaatgggaggattacatgctttgagaggaattggctgcgggcagattacagtgtgattgggtttgggttgattggttggctagcaccctcaagcataccggctatcaacggtaaaagtctgactggcctcttctttgagagcattggtgctgagcttgctcactttcccagccctcctgcccttacttcgtccttttggttatggctggttacgtggcaccttggcttgttcattgtcctcacttttgggcaaattggattcaagggaaggactgaagactacttttgaattctaaacctatggtctctgtttttacctttttttttctcttccttgtgtgcccccactgccccagtgccttgcaatctatgatgactctatgctacctttttccttcttactaggagaaatctatgtaatatcgccttcataatgttgtatattattattgttgtacttgctcctcatcaatgtcccaacttcttctagtcgt

SEQ ID NO: 28217 - protein, 140 aa, Triticum aestivum
MTTTFATVAGLGGALLSSTSSRFTSGFVKSPVIARNPLRQAVAMGNGRITCFERNWLRADYSVIGFGLIGWLAPSSIPAINGKSLTGLFFESIGAELAHFPSPPALTSSFWLWLVTWHLGLFIVLTFGQIGFKGRTEDYF

SEQ ID NO: 28218 - protein, 97 aa, Triticum aestivum
MGNGRITCFERNWLRADYSVIGFGLIGWLAPSSIPAINGKSLTGLFFESIGAELAHFPSPPALTSSFWLWLVTWHLGLFIVLTFGQIGFKGRTEDYF

SEQ ID NO: 28219 - DNA, 514 bp, Triticum aestivum
taggaaggaagttggcaggcaaccttcgatcgagtctcgatcaacacaagaaccagcaaattagcttcggtttcatagtcgtatactgtcatgtctagccttacgaccattagtggcggcgccatggaggagtcgcaggaagtagaggagctcgtcgacacaaggctgtccctcgtgatcggcgccgcgagccgtccgcccccgacggtcctggcgctgctgccggcggcatcaccggagaacgaagcggcggcacgcgggaagaggaagggagtcaagggaccagagaacggtgcgggcggtgccgctgctgcttcaagggagcatagcaagaggtccaagacggtgcacgacagcagcgacgtcgacgatgacgacagaggggacgcggccggcggcgacgggacgaggaagaagctcatgctcacggtggagcaggccgcgctcttggaggaaagcttccgtgcccacaacgtcctctctcacggcgagaagcacgatcttgcgaggcagc

SEQ ID NO: 28220 - protein, 141 aa, Triticum aestivum
MSSLTTISGGAMEESQEVEELVDTRLSLVIGAASRPPPTVLALLPAASPENEAAARGKRKGVKGPENGAGGAAAASREHSKRSKTVHDSSDVDDDDRGDAAGGDGTRKKLMLTVEQAALLEESFRAHNVLSHGEKHDLARQ

SEQ ID NO: 28221 - protein, 130 aa, Triticum aestivum
MEESQEVEELVDTRLSLVIGAASRPPPTVLALLPAASPENEAAARGKRKGVKGPENGAGGAAAASREHSKRSKTVHDSSDVDDDDRGDAAGGDGTRKKLMLTVEQAALLEESFRAHNVLSHGEKHDLARQ

SEQ ID NO: 28222 - DNA, 678 bp, Triticum aestivum
gtttttgagaggcttctggaaatccgtggtgtagtaagcggctaggcggtagccaccgatgcctgcgacgccggcggccagccccgggtgcgctgggctgccggcgcaacctccgacgagctcactccccggatttgaaggcccccctagccggctgggcgttcggaggccggcatgggtcgtccgcaccgagtctaatgttaggagagaaagaccaaaacgacctgatcctccatgcaccatctgcaaaggcactgggacaataaattgccgcaactgtttcggtagaggaagaataaatcatgtcgatctcgccgtgctccccaagggagaatggccgcaatggtgccaaatatgcgggggtagcggcctagattactgccaccggtgccatggaacaggtgaatatcgagaacccatgggctttcacttcacagtcaataggaaatgagtgtcgcacaggcagtgttggaaggccggccaagtcaaatggtcaggaaaaaaaaatgtcccattgaggccataggattaacatttgaatgagctgtgtgaagttactgtgaaaactttgatcttatgctaatgctgcagaattttcttgccagcaaagaaacattagatgtagattatgatcagaggctaagggtcttcagttttatcaaccggctaaatttgtgt

SEQ ID NO: 28223 - protein, 130 aa, Triticum aestivum
MPATPAASPGCAGLPAQPPTSSLPGFEGPPSRLGVRRPAWVVRTESNVRRERPKRPDPPCTICKGTGTINCRNCFGRGRINHVDLAVLPKGEWPQWCQICGGSGLDYCHRCHGTGEYREPMGFHFTVNRK

SEQ ID NO: 28224 - DNA, 574 bp, Triticum aestivum
cacaactagagaagcagcgcagaaccgaccaggagctgaagaaaagggttctcaaactcgaattctgccttcaagaatcacggtctcaaatccggaaacttcagaggatgggggagaagagggacaagcagctcaaggagctcaaggatcagatggccatgaagcagcccaagggccctcgccgcgacgaaggcaagaagcccttctgggagaatgacacgttcaagttcgtcgccggcatgtcaatgctggtcgtgatggtcctcgcaaagcgctgagaacagcgtcatcttgtgtagagaagttaagttaggtgagcagctagctcgctctgtagtttttagaagccagccatgtactggagtagcgttgtaaaattaggtttaggcctggacatgctgcatggtcaatgttcagagaccagaattcgccgacatccaagtttagtcctctagaccgtagcaatgtagttcatctgctagttcatgtatggtagtaactgtaatcctgtacttatcttatcatgtttagtactccctactaaacgtagtgatctaagctcttatatttcttt

SEQ ID NO: 28225 - protein, 91 aa, Triticum aestivum
QLEKQRRTDQELKKRVLKLEFCLQESRSQIRKLQRMGEKRDKQLKELKDQMAMKQPKGPRRDEGKKPFWENDTFKFVAGMSMLVVMVLAKR

SEQ ID NO: 28226 - protein, 71 aa, Triticum aestivum
TTREAAQNRPGAEEKGSQTRILPSRITVSNPETSEDGGEEGQAAQGAQGSDGHEAAQGPSPRRRQEALLGE

SEQ ID NO: 28227 - protein, 56 aa, Triticum aestivum
MGEKRDKQLKELKDQMAMKQPKGPRRDEGKKPFWENDTFKFVAGMSMLVVMVLAKR

SEQ ID NO: 28228 - DNA, 484 bp, Triticum aestivum
tctccgagggcggcctcgattaccttggaaaccccaacctcgtccacgcgcagagcatccttgccgtgctgggcttccaggtccttctcatgggtctggttgaagggttccgcatcaatggtctcgacggtgtcggcgagggcaacgacctctaccccggcggccagtacttcgacccgctcggccttgccgacgaccctgtcaccttcgctgagctcaaggtgaaggagatcaagaatggccgtctcgccatgttctctatgtttgggttcttcgtccaagctatcgtcaccggtaagggcccattggagaacctgttcgaccacctcgacgaccctgtcgccaacaatgcatgggttttcgccaccaagtttgcgcctggatcttaggctcgctggccgacgcgccacggtggtctgccattgtaaagtgtaaactactcccatgtgtgtgcaaatagcaacgaatggtcgatgtgatctcg

SEQ ID NO: 28229 - protein, 128 aa, Triticum aestivum
SEGGLDYLGNPNLVHAQSILAVLGFQVLLMGLVEGFRINGLDGVGEGNDLYPGGQYFDPLGLADDPVTFAELKVKEIKNGRLAMFSMFGFFVQAIVTGKGPLENLFDHLDDPVANNAWVFATKFAPGS

SEQ ID NO: 28230 - protein, 99 aa, Triticum aestivum
MGLVEGFRINGLDGVGEGNDLYPGGQYFDPLGLADDPVTFAELKVKEIKNGRLAMFSMFGFFVQAIVTGKGPLENLFDHLDDPVANNAWVFATKFAPGS

SEQ ID NO: 28231 - protein, 74 aa, Triticum aestivum
SPRAASITLETPTSSTRRASLPCWASRSFSWVWLKGSASMVSTVSARATTSTPAASTSTRSALPTTLSPSLSSR

SEQ ID NO: 28232 - DNA, 724 bp, Triticum aestivum
tcccccgggctgcaggaattcgcacgagaccattacatagaacatcctaatcgaaaacagagactaggacctgctggacttgcattgcactatgcaaacactatcatacagatctatggcattgtttctcggtcagggtatgtacccgcaaattcaagagatgccctttaccaaggattgccaccaagggtcaggttggctctaccaaataaattaagaacttcctcaatgcctcgggagctcactattgatcagattagggtaatgatggagagaactctgaaatggcttgttccgatggccatcaataccacctgtgcccgaggcttcttgcggtttagtgaatgggcaaaatcagggaccgagcgagttggaagaggacctggtcgaccggacgtgatcgagacgctctaccacgccgacaaggcaaggacagaggcttacatactcgagttggtcgtgtggcttcaccaccttgtcagcctgagcaaccggacggcaaatgttaaaaaagcccagtccatgtaaccatcatcaggtcatggggtgataacaagcgcattacacacaagtcagggcctgacaagagcagacagaaagccattatgatctgtttcgttttcatcgttgctaggttgtatagaagggggaactgtgtctgttcttaccaggaaggacttgaaacctgatattaggtagggaaataacaagagcttctcctttg

SEQ ID NO: 28233 - protein, 175 aa, Triticum aestivum
SPGLQEFARDHYIEHPNRKQRLGPAGLALHYANTIIQIYGIVSRSGYVPANSRDALYQGLPPRVRLALPNKLRTSSMPRELTIDQIRVMMERTLKWLVPMAINTTCARGFLRFSEWAKSGTERVGRGPGRPDVIETLYHADKARTEAYILELVVWLHHLVSLSNRTANVKKAQSM

SEQ ID NO: 28234 - protein, 99 aa, Triticum aestivum
MPRELTIDQIRVMMERTLKWLVPMAINTTCARGFLRFSEWAKSGTERVGRGPGRPDVIETLYHADKARTEAYILELVVWLHHLVSLSNRTANVKKAQSM

SEQ ID NO: 28235 - protein, 87 aa, Triticum aestivum
MMERTLKWLVPMAINTTCARGFLRFSEWAKSGTERVGRGPGRPDVIETLYHADKARTEAYILELVVWLHHLVSLSNRTANVKKAQSM

SEQ ID NO: 28236 - DNA, 838 bp, Triticum aestivum
gcataccccgaaggatcattgttcgctgacgccgcctcctttggtccttcctctcctcccgtcccctcccctccgccgcgatcgatcccaagagcacgaaaccctagccctagcccaacccatcttctccatggccaacagcaacctcccccgccgcatcatcaaggagacgcagcggctgctcagcgaaccagctcctgggatcagtgcttcaccatcagaggagaacatgcgctacttcaatgtcatgatccttggcccaactcagtcgccatatgaaggaggagtattcaaacttgagttgtttttacctgaagaatatccaatggctccgccaaaggttcgctttctcacaaaaatttaccatccaaacattgacaagcttgggaggatatgccttgatatcttaaaggacaagtggagtcctgcccttcagatccgaacagttcttttgagcattcaagcactcctcagcgctccaaatcctgacgatccgcttgctgacaatgtggcaaagcactggaaggccaacgaaacagaagctgtggaaacagccaaagagtggacccgtgtctacgctaatgatgcatgagctctgcatgctatgactgattgctcagtagtcttggcaaggtgaggcgaaatcgactatcaagtggtttaaaatggaggtccaactgatgaactagtgaaatgtgaagtttcctccttgcatcgcgtgtactgagtgtgatgtatattattaccctagttgggatgcgacggacccatgtgcatgtatattttgtttgagtgttgtaccgtaataaacatcctgaagtcatgtgtgccttttctg

SEQ ID NO: 28237 - protein, 196 aa, Triticum aestivum
HTPKDHCSLTPPPLVLPLLPSPPLRRDRSQEHETLALAQPIFSMANSNLPRRIIKETQRLLSEPAPGISASPSEENMRYFNVMILGPTQSPYEGGVFKLELFLPEEYPMAPPKVRFLTKIYHPNIDKLGRICLDILKDKWSPALQIRTVLLSIQALLSAPNPDDPLADNVAKHWKANETEAVETAKEWTRVYANDA

SEQ ID NO: 28238 - protein, 153 aa, Triticum aestivum
MANSNLPRRIIKETQRLLSEPAPGISASPSEENMRYFNVMILGPTQSPYEGGVFKLELFLPEEYPMAPPKVRFLTKIYHPNIDKLGRICLDILKDKWSPALQIRTVLLSIQALLSAPNPDDPLADNVAKHWKANETEAVETAKEWTRVYANDA

SEQ ID NO: 28239 - protein, 120 aa, Triticum aestivum
MRYFNVMILGPTQSPYEGGVFKLELFLPEEYPMAPPKVRFLTKIYHPNIDKLGRICLDILKDKWSPALQIRTVLLSIQALLSAPNPDDPLADNVAKHWKANETEAVETAKEWTRVYANDA

SEQ ID NO: 28240 - DNA, 1393 bp, Triticum aestivum
acacaaaattccgttcagcgcgtgcagtagagagctccccgcttctcctcatcctcctccccaactccaatactctccacagaaatctccgctccttctcgtcccctctcgctcgcgtgcgcgtgaggtgcgcaatggcggcggcggcggtggcgttgtcgaacggctccggtggcgactccaaggccgagttcgcggaaatatacagcaggctcaaggaggagatgctcgaggaccccgccttcgagttcaccgacgagtcgctccagtggatcgaccgcatgctggattacaatgtcctaggaggaaagtgcaaccgtgggctctctgtcatcgatagctacaagacattgaaaggtgtagatgttttgaggaaggaggagacatttcttgcctgcacccttggttggtgtattgaatggcttcaagcatattttcttgtgcttgatgatatcatggacaactcccagacacgacggggccagccttgctggtttagggtgcctcaggttggccttattgctgtaaacgatgggattatccttcgcaaccatatttcacggatccttcaacgccacttcagaggaaaaccgtattatgttgatctcattgatttgttcaatgaggttgaattcaagacagcttcagggcagttgttggatcttatcactactcacgagggagaaaaggatctcacaaaatataacttgaatgttcaccggcgcattgtgcaatacaagacagcgtactattcattttatcttccggttgcatgtgcattgctgctgtcgggtgagaatttggataacttcggcgatgtaaagaacattcttgttgaaatgggaacatactttcaagttcaggatgattatctagattgttttggagatcctgaatctattggcaagattggaactgacattgaagactacaagtgttcctggttagttgtgcaagctcttgagcatgcagatgagagccaaaagggcattctacttgaaaattatgggaagtcagatccagagtctgttgcaaaagtgaaggatctgtataaagaacttgatctggagacggcatttcacaagtatgagcgggagagctacaataagctgatcgccgacatcgaggcccagccaagcaaagctgttcagaaagttttgatgtctttcctggagaagatctacaagaggcagaagtagagctaagctcttggagaggttgttgtgcctttccgtgctttggtaacttattccatgttctgtgtgtgttggtcttattaccataatgtacagcgtgttattccttccaacaataaactacggtgctattttttagtggtgcgtgaacctgctgtgccataaccatgttatttgaagctctctaatgtttttct

SEQ ID NO: 28241 - protein, 398 aa, Triticum aestivum
TKFRSARAVESSPLLLILLPNSNTLHRNLRSFSSPLARVRVRCAMAAAAVALSNGSGGDSKAEFAEIYSRLKEEMLEDPAFEFTDESLQWIDRMLDYNVLGGKCNRGLSVIDSYKTLKGVDVLRKEETFLACTLGWCIEWLQAYFLVLDDIMDNSQTRRGQPCWFRVPQVGLIAVNDGIILRNHISRILQRHFRGKPYYVDLIDLFNEVEFKTASGQLLDLITTHEGEKDLTKYNLNVHRRIVQYKTAYYSFYLPVACALLLSGENLDNFGDVKNILVEMGTYFQVQDDYLDCFGDPESIGKIGTDIEDYKCSWLVVQALEHADESQKGILLENYGKSDPESVAKVKDLYKELDLETAFHKYERESYNKLIADIEAQPSKAVQKVLMSFLEKIYKRQK

SEQ ID NO: 28242 - protein, 354 aa, Triticum aestivum
MAAAAVALSNGSGGDSKAEFAEIYSRLKEEMLEDPAFEFTDESLQWIDRMLDYNVLGGKCNRGLSVIDSYKTLKGVDVLRKEETFLACTLGWCIEWLQAYFLVLDDIMDNSQTRRGQPCWFRVPQVGLIAVNDGIILRNHISRILQRHFRGKPYYVDLIDLFNEVEFKTASGQLLDLITTHEGEKDLTKYNLNVHRRIVQYKTAYYSFYLPVACALLLSGENLDNFGDVKNILVEMGTYFQVQDDYLDCFGDPESIGKIGTDIEDYKCSWLVVQALEHADESQKGILLENYGKSDPESVAKVKDLYKELDLETAFHKYERESYNKLIADIEAQPSKAVQKVLMSFLEKIYKRQK

SEQ ID NO: 28243 - protein, 324 aa, Triticum aestivum
MLEDPAFEFTDESLQWIDRMLDYNVLGGKCNRGLSVIDSYKTLKGVDVLRKEETFLACTLGWCIEWLQAYFLVLDDIMDNSQTRRGQPCWFRVPQVGLIAVNDGIILRNHISRILQRHFRGKPYYVDLIDLFNEVEFKTASGQLLDLITTHEGEKDLTKYNLNVHRRIVQYKTAYYSFYLPVACALLLSGENLDNFGDVKNILVEMGTYFQVQDDYLDCFGDPESIGKIGTDIEDYKCSWLVVQALEHADESQKGILLENYGKSDPESVAKVKDLYKELDLETAFHKYERESYNKLIADIEAQPSKAVQKVLMSFLEKIYKRQK

SEQ ID NO: 28244 - DNA, 1276 bp, Triticum aestivum
ttttttctcattaaaaaaaactcttggatcgatcaaaccctagagagagagatgagagagactcatcttccatggccggcggcgattcttctcccgtggcggcggcggctgcggcgagaaagtgggagtgggaccaagaagagtatcggtgcgagtcgccggagtattcattggacccgcgatacagcgagtacgaccccaagcagggtcgtttcatatacgtccgctacttcttcaacggcaaactcgacctggacgaggagtcacctgttggtcccatgcgacatactggtaaaatcttcaaagagggattccggctcaaaaattcagtcaatgttgtctccatcaagattgtttcctctgactatggctacccactctatgtctacggtaccatcatagccagggatagtctggatagaaaatgtgtctatatattccggcgcgaccaggatgattgccagctcatcagctcaaaggatgattcattgattttgactggacccaagagaggattcatggtatgcgatgatatattcttcgaaatcaatctgaaggtgaaggatgtgcatgggatgactgtcgatgatgatagactcagtaaaggcctgatggaggtggatgctatccgcaggctggaatatagtcccagatatgtggttgatacggaaacacttgtcagcatgcacagcatattagatttaaactatacattcattaggaggtcggtggagggcactgttgagatcaagaaccttgagggacctgatgaattccatgggaagattgttgcttccactaccagcattccatgcgacattgtgctacatgatagcaaagtgagtggtgcgctaactgcgggtgaaaatggagtcctacaaatggcgcgacgcgtagtaggagtctctgtggatgaggtgctggtgttgactgttgctgctgctgtcggtgatgatgagttatctgcccgcactgttcagtttactccaaggcgcaatggttacgatgatgagagtatcacctgcggggactacaagatgcttctgaaggtcacttggtcgattgtgtatttctgatgtaactcttagttattcagtcacggcagtctgccagattctctagatacttaggatgcaatgaagtttcattatgggaaccagttatggtacatgctaaaacaatatatgtattccagcgtgtattgtatctattctgactcttctccctgatgtaagctagttttactggaagtgcttgcagtacatttatgaaattc

SEQ ID NO: 28245 - protein, 334 aa, Triticum aestivum
MAGGDSSPVAAAAAARKWEWDQEEYRCESPEYSLDPRYSEYDPKQGRFIYVRYFFNGKLDLDEESPVGPMRHTGKIFKEGFRLKNSVNVVSIKIVSSDYGYPLYVYGTIIARDSLDRKCVYIFRRDQDDCQLISSKDDSLILTGPKRGFMVCDDIFFEINLKVKDVHGMTVDDDRLSKGLMEVDAIRRLEYSPRYVVDTETLVSMHSILDLNYTFIRRSVEGTVEIKNLEGPDEFHGKIVASTTSIPCDIVLHDSKVSGALTAGENGVLQMARRVVGVSVDEVLVLTVAAAVGDDELSARTVQFTPRRNGYDDESITCGDYKMLLKVTWSIVYF

SEQ ID NO: 28246 - protein, 265 aa, Triticum aestivum
MRHTGKIFKEGFRLKNSVNVVSIKIVSSDYGYPLYVYGTIIARDSLDRKCVYIFRRDQDDCQLISSKDDSLILTGPKRGFMVCDDIFFEINLKVKDVHGMTVDDDRLSKGLMEVDAIRRLEYSPRYVVDTETLVSMHSILDLNYTFIRRSVEGTVEIKNLEGPDEFHGKIVASTTSIPCDIVLHDSKVSGALTAGENGVLQMARRVVGVSVDEVLVLTVAAAVGDDELSARTVQFTPRRNGYDDESITCGDYKMLLKVTWSIVYF

SEQ ID NO: 28247 - protein, 185 aa, Triticum aestivum
MVCDDIFFEINLKVKDVHGMTVDDDRLSKGLMEVDAIRRLEYSPRYVVDTETLVSMHSILDLNYTFIRRSVEGTVEIKNLEGPDEFHGKIVASTTSIPCDIVLHDSKVSGALTAGENGVLQMARRVVGVSVDEVLVLTVAAAVGDDELSARTVQFTPRRNGYDDESITCGDYKMLLKVTWSIVYF

SEQ ID NO: 28248 - DNA, 731 bp, Triticum aestivum
tactttaaacaatgtttttcaagtgacatatcactggcaacaaacaaagagcttgcttatgccctagcgtcactgccaccctatgaagtatcattttcagatgttacagttatgcatcttcattgcgaggtaccccgtactgagatatggcatagtctgaatgcaaccatagttggcttggcaagtagttgtgacacatctgcaacagcccatgcagttccttggtgtgttgggcttggtattgtcagaggcgttgatgcgcaaaggggcctgttatatgttatcactcctgttgctgttgaacatcttcaaagcgtagatctgctgctgcagggtctcattgagattccgagatctgttctgcaggtcaagggatgcgagtcgccctacatgtccatgaatgtgcgggacaagataacggggaaggatctctacgcgagtaatctcaacagcccactgtccacacaggatgacggcgattctgattcggatgcagatactatgtaaaacttgcatcatgttggtcgcttcattttcgctggagatgtatggcgttagttcagcctgacatctcggagacacaacaattttgatggcggactatctttttttgtgtacccagtagtgaattttttgctcagcttgaagtttgaactgatttttctgccttgtggtatggctgtgtcctgcgatactttgtaacaaagctcggggtaccacattccctggcc

SEQ ID NO: 28249 - protein, 168 aa, Triticum aestivum
YFKQCFSSDISLATNKELAYALASLPPYEVSFSDVTVMHLHCEVPRTEIWHSLNATIVGLASSCDTSATAHAVPWCVGLGIVRGVDAQRGLLYVITPVAVEHLQSVDLLLQGLIEIPRSVLQVKGCESPYMSMNVRDKITGKDLYASNLNSPLSTQDDGDSDSDADTM

SEQ ID NO: 28250 - protein, 131 aa, Triticum aestivum
MHLHCEVPRTEIWHSLNATIVGLASSCDTSATAHAVPWCVGLGIVRGVDAQRGLLYVITPVAVEHLQSVDLLLQGLIEIPRSVLQVKGCESPYMSMNVRDKITGKDLYASNLNSPLSTQDDGDSDSDADTM

SEQ ID NO: 28251 - DNA, 1258 bp, Triticum aestivum
ctctctggacgagggagaatcttgtactagtcccactcccccctcccgtcgccgtcgccgccggcccaaaccaaaccctagccgcctgcccgccggcgggcgccaggccatggaccgcaagcgcatcaacgacgcgctcgacaggcacctgcgggcggccacggagcggtcgtcgccctccacctcccgcggcgccaagcccaagccgccccccgccgccgcccccaaacccaaagagcagctggattcggacagcagcgaggggggcagcgtcggcgggtcctcggaggcggacgacaccttctggatcaactggttctgcgccatgaggggcaacgagttcttcgccgaggtggatgatgactacatccaggacgacttcaatctctgcggcctcagcgcccaggtcccctactacgaccacgcccttgatctcatcctcgacctcgagcccgtccagggggatgtgtttgccgatgaccagaatgagctgatagtggcgtccgcggagatgctttacgggttgatccacgcccggtacatcttgaccaccaagggcttggctgccatgctggagaagttcaagaactgcgactttggaaggtgcccccgcgtgtcctgctctggtcagccctgtcttccaatgggccagtccgatatccctaggtccagtaccgtcaagatatattgtcccaaatgcgaagatctctactacccaagatccaagcaccaagccaatacagacggcgcatactttgggacgacgtttcctcatattttcatgatgacccactcacaattgaagccacagaagccagcgcagcaatacgttccccggatattcggcttcaaagtccacaagaaaacatgacggtatcgtggtggcgtactgccttgggcttgtttcgcctagtatgtcaccaggaacgatgaggacccgcactatagctgggcatggaaaaatgctttggccggttcaagacgacaaggcaccgaacaactatggcacattctttctctgtatgaagacctgctcttgggaaaagaaatctcgaggaggtctgatcaagctgtcagatccatgtcatgttgggtatttggatgatcccggtgagacggcaatgggtttgtgcctctgctctgttttgattttgaatgttcgtccaaacagggcatatgttgctggatctgttgtgtatcctaatgtatttcgctcttcattctgtggtgccgagaaatcggacggctgagactgctg

SEQ ID NO: 28252 - protein, 289 aa, Triticum aestivum
SLDEGESCTSPTPPSRRRRRRPKPNPSRLPAGGRQAMDRKRINDALDRHLRAATERSSPSTSRGAKPKPPPAAAPKPKEQLDSDSSEGGSVGGSSEADDTFWINWFCAMRGNEFFAEVDDDYIQDDFNLCGLSAQVPYYDHALDLILDLEPVQGDVFADDQNELIVASAEMLYGLIHARYILTTKGLAAMLEKFKNCDFGRCPRVSCSGQPCLPMGQSDIPRSSTVKIYCPKCEDLYYPRSKHQANTDGAYFGTTFPHIFMMTHSQLKPQKPAQQYVPRIFGFKVHKKT

SEQ ID NO: 28253 - protein, 253 aa, Triticum aestivum
MDRKRINDALDRHLRAATERSSPSTSRGAKPKPPPAAAPKPKEQLDSDSSEGGSVGGSSEADDTFWINWFCAMRGNEFFAEVDDDYIQDDFNLCGLSAQVPYYDHALDLILDLEPVQGDVFADDQNELIVASAEMLYGLIHARYILTTKGLAAMLEKFKNCDFGRCPRVSCSGQPCLPMGQSDIPRSSTVKIYCPKCEDLYYPRSKHQANTDGAYFGTTFPHIFMMTHSQLKPQKPAQQYVPRIFGFKVHKKT

SEQ ID NO: 28254 - protein, 181 aa, Triticum aestivum
MRGNEFFAEVDDDYIQDDFNLCGLSAQVPYYDHALDLILDLEPVQGDVFADDQNELIVASAEMLYGLIHARYILTTKGLAAMLEKFKNCDFGRCPRVSCSGQPCLPMGQSDIPRSSTVKIYCPKCEDLYYPRSKHQANTDGAYFGTTFPHIFMMTHSQLKPQKPAQQYVPRIFGFKVHKKT

SEQ ID NO: 28255 - DNA, 1031 bp, Triticum aestivum
ttttttcaaccagacaccgcccctcttcttgctctctgctctcctctcctctcctcttctctcctctcccacacgcgtcctaaagcaagcaagctcggacgccatgagcaaggactgcggcaaccacggcgaggacgacatccggcgcacgtgccggcgcttcctggccttcctcttcttcctggccctggtggtggccgtcatcgccctcatcgtctacctcgtcctccgccccacgcacccgcgcttctatctccaggacgcctcgctccggcagctggacgtgctcaccgccaacgcctccgccgcggcgggcgtgctctccaccgtgctccaggtcaccgtcgcctcccgcaaccccaacgaccgcgtcggcgtctactacgaccgcctcgacgtctacgcctcctacaagtaccagcagatcacgctggcctccgcgctcccgccggtgtaccagggccacggcgacgtcgaggtgtggtccccggtgctctccggcccgaacgtccccttcgcgccctacctcgccgacgcgctcgccaaggacgtccaggccgggtacctcatcctccaggtgaagatcgacggccgcgtccggtggaaggtgggcagctggatctccggccactaccacatcttcgtgacctgccccgccttcctcatcggcaccggcggcaacggcgcgcccggggccaacgggctcaggttccagaccgccacctactgccacgtcgaggtctagccgtccgtccgtacgtgctctgcttcctcttcttcttcgtcatcttcctctgctccgtcggcggcggcgaggtaggtttcttgcgggtggcgcgcgcgcgtgcgcgtagccaagaagatcatcaaggctgaaggccaagggggtggtacatggtggtaataagtgttagcgtcgaggggtataggtgtaaaaaggaaaagagaatttagtgttggttactcctactaaattgtgttttgctcgtttttaattgttggtaaggtatttattccacgtttaattgtcg

SEQ ID NO: 28256 - protein, 291 aa, Triticum aestivum
FFQPDTAPLLALCSPLLSSSLLSHTRPKASKLGRHEQGLRQPRRGRHPAHVPALPGLPLLPGPGGGRHRPHRLPRPPPHAPALLSPGRLAPAAGRAHRQRLRRGGRALHRAPGHRRLPQPQRPRRRLLRPPRRLRLLQVPADHAGLRAPAGVPGPRRRRGVVPGALRPERPLRALPRRRARQGRPGRVPHPPGEDRRPRPVEGGQLDLRPLPHLRDLPRLPHRHRRQRRARGQRAQVPDRHLLPRRGLAVRPYVLCFLFFFVIFLCSVGGGEVGFLRVARARARSQEDHQG

SEQ ID NO: 28257 - protein, 247 aa, Triticum aestivum
FFNQTPPLFLLSALLSSPLLSSPTRVLKQASSDAMSKDCGNHGEDDIRRTCRRFLAFLFFLALVVAVIALIVYLVLRPTHPRFYLQDASLRQLDVLTANASAAAGVLSTVLQVTVASRNPNDRVGVYYDRLDVYASYKYQQITLASALPPVYQGHGDVEVWSPVLSGPNVPFAPYLADALAKDVQAGYLILQVKIDGRVRWKVGSWISGHYHIFVTCPAFLIGTGGNGAPGANGLRFQTATYCHVEV

SEQ ID NO: 28258 - protein, 213 aa, Triticum aestivum
MSKDCGNHGEDDIRRTCRRFLAFLFFLALVVAVIALIVYLVLRPTHPRFYLQDASLRQLDVLTANASAAAGVLSTVLQVTVASRNPNDRVGVYYDRLDVYASYKYQQITLASALPPVYQGHGDVEVWSPVLSGPNVPFAPYLADALAKDVQAGYLILQVKIDGRVRWKVGSWISGHYHIFVTCPAFLIGTGGNGAPGANGLRFQTATYCHVEV

SEQ ID NO: 28259 - DNA, 624 bp, Triticum aestivum
agaaaaaccagtcctcccacctcccagcgaaacaccaccgcaccccacaatcccacggctctccccggcgaagtagcagcggcatccatggcccccaaggcggagaagaagccggtggcggagaaggccgagaagacgacggcagccaagaagaccaaggccgagaagcggccgccggcgtccaaggagggcggcgagaagaaggggaagaagaagtccaagaagagcgtggagacgtacaagatctacatcttcaaggtgctgaagcaggtgcacccggacatcggcatctcctccaaggccatgtccatcatgaactccttcatcaacgacattttcgagaagctcgccggcgagtcggccaagcttgcgaggtacaacaagaagcccaccatcacgtcccgggagatccagacctccgtccgcctcgtcctccccggcgagctcgccaagcatgccgtctccgagggcaccaaggctgtcaccaagttcacctcctcctaggctaggatggttttctgtaatagtcagctgttcagaccatgtcttcctgtaacttgtgttggttctgtgggaacaccctgtttcattacctcatgaaatattaatggtgtttctttggtc

SEQ ID NO: 28260 - protein, 168 aa, Triticum aestivum
KNQSSHLPAKHHRTPQSHGSPRRSSSGIHGPQGGEEAGGGEGREDDGSQEDQGREAAAGVQGGRREEGEEEVQEERGDVQDLHLQGAEAGAPGHRHLLQGHVHHELLHQRHFREARRRVGQACEVQQEAHHHVPGDPDLRPPRPPRRARQACRLRGHQGCHQVHLLLG

SEQ ID NO: 28261 - protein, 167 aa, Triticum aestivum
RKTSPPTSQRNTTAPHNPTALPGEVAAASMAPKAEKKPVAEKAEKTTAAKKTKAEKRPPASKEGGEKKGKKKSKKSVETYKIYIFKVLKQVHPDIGISSKAMSIMNSFINDIFEKLAGESAKLARYNKKPTITSREIQTSVRLVLPGELAKHAVSEGTKAVTKFTSS

SEQ ID NO: 28262 - protein, 138 aa, Triticum aestivum
MAPKAEKKPVAEKAEKTTAAKKTKAEKRPPASKEGGEKKGKKKSKKSVETYKIYIFKVLKQVHPDIGISSKAMSIMNSFINDIFEKLAGESAKLARYNKKPTITSREIQTSVRLVLPGELAKHAVSEGTKAVTKFTSS

SEQ ID NO: 28263 - DNA, 1035 bp, Triticum aestivum
aacatcctaatcgaaaaaaaagcacggttcatcccgatcgaagaggaccaaaaaggcccaaacccactcccatcccctcgtcacgcgtctcccggacccttcctcgtctctctctctctgaacaccccacccagccgaccaaatcgccgcacgagggcgcgccatggagccggcggtggagaggaaggtgcccgagcaggaggagcagctgcagccgtcgcacgcccgggccgaggacgcgccgcccgccgccgtcgaggaggaggacgaggcggaggcggaggagagcgagcgccgcaaccgcgagctcaaggccggcctccatcccctcaggcgcaagctcgtgctctggtacacccgccggacgcccgggacgaggtcgcagtcgtacgaggacaacatcaaaaagatcgtcgatttcagcactgtcgagtcgttctgggtttgctactgccacctcgcacgcccgtcctccctcccgagccccacggacctgcatcttttcaaagagggtgtccgtccactctgggaggatcctgcaaatcggaatggtggcaagtggattatacggttcaagaaggctgtttctgggcgtttctgggaggatttggtgctggttctagcgggtgatcaacttgattatagtgatgatgtttgtggcattgtgctaagttgtcgtttcaatgaagacatcctgagcgtctggaatcggaatgcatcagaccaccaggctgtgatgacattaagagactcgattaagaggcacttgaagctgccacacacctatctgatggagtacaaaccacatgacgcctctctgcgagacaactcgtcctacaggaacacatggctgagaggttaagctttatgtcgtcaaaactagtcatggccctcgttccgaactacagtaaatccttgtggatttccagttctgacgtttcaacccagccatgatgtatgattactctttgtcatgctactatgtactctccaaatttcaaatgctgaagtatcgacttttataaaaaaaaaaaa

SEQ ID NO: 28264 - protein, 232 aa, Triticum aestivum
MEPAVERKVPEQEEQLQPSHARAEDAPPAAVEEEDEAEAEESERRNRELKAGLHPLRRKLVLWYTRRTPGTRSQSYEDNIKKIVDFSTVESFWVCYCHLARPSSLPSPTDLHLFKEGVRPLWEDPANRNGGKWIIRFKKAVSGRFWEDLVLVLAGDQLDYSDDVCGIVLSCRFNEDILSVWNRNASDHQAVMTLRDSIKRHLKLPHTYLMEYKPHDASLRDNSSYRNTWLRG

SEQ ID NO: 28265 - protein, 209 aa, Triticum aestivum
NILIEKKARFIPIEEDQKGPNPLPSPRHASPGPFLVSLSLNTPPSRPNRRTRARHGAGGGEEGARAGGAAAAVARPGRGRAARRRRGGGRGGGGGERAPQPRAQGRPPSPQAQARALVHPPDARDEVAVVRGQHQKDRRFQHCRVVLGLLLPPRTPVLPPEPHGPASFQRGCPSTLGGSCKSEWWQVDYTVQEGCFWAFLGGFGAGSSG

SEQ ID NO: 28266 - protein, 206 aa, Triticum aestivum
HPNRKKSTVHPDRRGPKRPKPTPIPSSRVSRTLPRLSLSEHPTQPTKSPHEGAPWSRRWRGRCPSRRSSCSRRTPGPRTRRPPPSRRRTRRRRRRASAATASSRPASIPSGASSCSGTPAGRPGRGRSRTRTTSKRSSISALSSRSGFATATSHARPPSRAPRTCIFSKRVSVHSGRILQIGMVASGLYGSRRLFLGVSGRIWCWF

SEQ ID NO: 28267 - DNA, 1430 bp, Triticum aestivum
aaaaaaacctagatgccacaccctatcccagccgcagccgccgccgccgtcgccgccgccgccgctgcaaccgccgccttcgattccgtgaaattggaggggaagacaattggatctgtctgccgcaggaggagtggggagaaatagattgaaggcgcgacagttcctgaatgttgtgatggagaggtatggcactggcggtgccggtggcagcttgtatacggtcagtcgcatcgacgccaaggaacacctcttctaccgatccacggccgaagcacaggcagcagaaaaatcaaggttcgatatggagtgcatctggcgaatgcctacgtccaggctcaggttcgaagcataccgctcggatgacaagaggctcaatttcctgcccttctatggacgacgcagcggcggcgatagcaagatgctctgcatggacgccgctggccacaccgtgctctgtgatgccgctggcctctctgtcatgccggctccctgccttaacgaacccaaggttgacagccctgtttctttctccatcacccgcaccaacgtggaaacccccaatcgcgccgatgctctctacgtcctcgacagatttgtcacgagccgcaactccttcaacttcgaggcactcatgtttggcgagaagacctgggactgggttcggcttccaccgccgccctatgtcaacaacccggcctacaactccacatccatccagtcctacacgctcctggctgatggctccaccatttgcatctcctcccctcggcacagcctcgtcggcacctactgcttcgacacgattagctgtaagtggagcaaggctggccgctgggcgcttcccttgtacggccgggctgagcatgtacctgagctgggcaacctctggttcggcatggccgacaacagcccccacaatttttccgcattggacctctccaacctagacggggctccaaagttgcttcaagactggcaagaccttgacccgcctgaggattgggtgcagatgaggtgcagcctgctgtacctgggcgcgggcaagttttgcataaccaaattcttcaacatcggggacccagacacagaggacaacacaaccgctgctgtgctcaccggagtggaggtgctgtgtggagtttctggtggggaggtggtgcacggaggatcgtccgaactccagatgatcaagcacaagtcttttatcagctatgacggcatccagtgcgtcctctgaaatacgtactagggaagtcgttaaaacgagagcaaatgaattatgagcattttagaagacggccgagtggttgttttcgttgcagctgtttccattggaagccttgttcgttttgtggatctattttccgctgggattgggttgatctccaccatttcttctgctagagaaatatagtcctagcactttt

SEQ ID NO: 28268 - protein, 353 aa, Triticum aestivum
MERYGTGGAGGSLYTVSRIDAKEHLFYRSTAEAQAAEKSRFDMECIWRMPTSRLRFEAYRSDDKRLNFLPFYGRRSGGDSKMLCMDAAGHTVLCDAAGLSVMPAPCLNEPKVDSPVSFSITRTNVETPNRADALYVLDRFVTSRNSFNFEALMFGEKTWDWVRLPPPPYVNNPAYNSTSIQSYTLLADGSTICISSPRHSLVGTYCFDTISCKWSKAGRWALPLYGRAEHVPELGNLWFGMADNSPHNFSALDLSNLDGAPKLLQDWQDLDPPEDWVQMRCSLLYLGAGKFCITKFFNIGDPDTEDNTTAAVLTGVEVLCGVSGGEVVHGGSSELQMIKHKSFISYDGIQCVL

SEQ ID NO: 28269 - protein, 311 aa, Triticum aestivum
MECIWRMPTSRLRFEAYRSDDKRLNFLPFYGRRSGGDSKMLCMDAAGHTVLCDAAGLSVMPAPCLNEPKVDSPVSFSITRTNVETPNRADALYVLDRFVTSRNSFNFEALMFGEKTWDWVRLPPPPYVNNPAYNSTSIQSYTLLADGSTICISSPRHSLVGTYCFDTISCKWSKAGRWALPLYGRAEHVPELGNLWFGMADNSPHNFSALDLSNLDGAPKLLQDWQDLDPPEDWVQMRCSLLYLGAGKFCITKFFNIGDPDTEDNTTAAVLTGVEVLCGVSGGEVVHGGSSELQMIKHKSFISYDGIQCVL

SEQ ID NO: 28270 - protein, 305 aa, Triticum aestivum
MPTSRLRFEAYRSDDKRLNFLPFYGRRSGGDSKMLCMDAAGHTVLCDAAGLSVMPAPCLNEPKVDSPVSFSITRTNVETPNRADALYVLDRFVTSRNSFNFEALMFGEKTWDWVRLPPPPYVNNPAYNSTSIQSYTLLADGSTICISSPRHSLVGTYCFDTISCKWSKAGRWALPLYGRAEHVPELGNLWFGMADNSPHNFSALDLSNLDGAPKLLQDWQDLDPPEDWVQMRCSLLYLGAGKFCITKFFNIGDPDTEDNTTAAVLTGVEVLCGVSGGEVVHGGSSELQMIKHKSFISYDGIQCVL

SEQ ID NO: 28271 - DNA, 1487 bp, Triticum aestivum
gaggtcgacggtatcgataagcttttttttttttttttttctgaatagtatgttttttattaactcaatggtacgtagcacttgatttctctgtgtttcctagaatgaaacaatgtcttacgaaatgcttgttactctattcttatatgtcctgtacttttgaaattagaaaaataattactacaccacccccatactccatagacagaatttgccggtcttcaagggttagccagctcgaggtctccggttttcctcgccatctgctgctgcagcagctggttcttctgcgccgccgccttcttctgctggaccttctcgccatacatgtaggaggcaaagccccagaggcagagcaccagcgcgatgccctttggcccgtcgaacttctcgtggaggaagatgacggcgaggacctcggagagcggcaggaggacggcgaccatgatgccggcgaggagcgaagaggcgcaagtgacgagccccacgacgcccaggttgagcagctgccacgccacggcaccccatacgagcactaggtagtacttggtctcgccgagcccgaatgccgccgcctcgatcggcagcgcgttgaagtcgctcttgatggccatgccgagcaggcacaccatcgtgccggcgaggcccatcatggcctgcatctgcatcaccgtggagtagggtggcggcgcgctcgcggctggtcccctccgccgcccaaaccgctccatggcgacctcaacgagcggcagcacgagcccggcgagcgcggccgccgcgatggcctcgccgaacccggtccagtacgtcttggatggctcgcccgccggcttcccggacccgggaccgacgccgagcaccgcgggaccgatggtgagcagcaggacggcgttggcagagaagggcgtgaagcggagcccgacgaagaggaacgcgaacacggcggtgaaggcgagctgcgtcgccagtagcaaggacgacgtggacagcggcagcgcctgcgaccccatcgcatacacgaagcacgacacggcgtacaagctgcctagcacgacggccgcgccaacgaggcgaggcgggaggaggaggttgacgatgccgtggcggcggccgcggaagatggagacgcacaggggcgggaggaggagcggccagccggagatctggaccagcgcggagagccacaggcgttgcccgccgtggacgaagtagacccgcagcaggagcggcccgctggagccgatgaggacgaggcaggcgctgaatatgaccagcggtgaaggccggtagcgagccggcgaggcggccgtggcgcggggcggcgaggcgcttggcgtctttgctgcttcctgcatggccgggctggcactagcagttgtgatcgccatgatccgtcttagcttagctgcaagtatgtttgtactgctactttgctgtttcttggatgccctctctaatcctcccgcacagatgggatgagagcttgt

SEQ ID NO: 28272 - protein, 160 aa, Triticum aestivum
MATSTSGSTSPASAAAAMASPNPVQYVLDGSPAGFPDPGPTPSTAGPMVSSRTALAEKGVKRSPTKRNANTAVKASCVASSKDDVDSGSACDPIAYTKHDTAYKLPSTTAAPTRRGGRRRLTMPWRRPRKMETHRGGRRSGQPEIWTSAESHRRCPPWTK

SEQ ID NO: 28273 - protein, 144 aa, Triticum aestivum
MKQCLTKCLLLYSYMSCTFEIRKIITTPPPYSIDRICRSSRVSQLEVSGFPRHLLLQQLVLLRRRLLLLDLLAIHVGGKAPEAEHQRDALWPVELLVEEDDGEDLGERQEDGDHDAGEERRGASDEPHDAQVEQLPRHGTPYEH

SEQ ID NO: 28274 - protein, 143 aa, Triticum aestivum
MASPNPVQYVLDGSPAGFPDPGPTPSTAGPMVSSRTALAEKGVKRSPTKRNANTAVKASCVASSKDDVDSGSACDPIAYTKHDTAYKLPSTTAAPTRRGGRRRLTMPWRRPRKMETHRGGRRSGQPEIWTSAESHRRCPPWTK

SEQ ID NO: 28275 - DNA, 1476 bp, Triticum aestivum
cccgctgcctattagaacccggcctcgctgcctccacaggcagccgccagtgctcaactgcggcagctaaaactcgattttatccccggaaaatagatcgcctctagtcagcggcggcgccgccgcttcgcttctcggcttgctcggctggtttctctgtaaaaatggtcaatgcacagatggtgagtgggtacttggacaattcgttcaatgcactcatggtttctggtggcggtgagagtggacagacacagaatggtggcacggacaccaccttgtcaggttggaaggacctccccatggagcttctgctgaggatcatatcagtagctggagatgacaggatggccattgtagcctccggtgtttgtaccgggtggcgtgatgcactaggatggggagccacgagtctctccttctcgtggtgccaggaccacatgaatgagttggtgatatcactggcccacaaatttacaaagcttcaagtcctttctctaaggcaaatcaagcctcagcttgaagacagtgcagtggaggctgtagcaaattcttgtcatgatttgcgcgagttggatctgagcagaagcttcaggcttagtgatcggtccttgtatgctctggcacatgggtgccctcaccttacaaggctgaacatcagtggatgttccaatttcagtgatgctgctttgatctacctcactagtcagtgcaagaacttgaaatgcttgaatctgtgcgggtgtgtgcgggcagcatccgacagagcattgcaggccatagcccgcaactgtagtcagctgcaatctttgaaccttggttggtgcgatactgtcactgacgggggagtcactagcttggcatcaggatgtcctgaacttagggccgtcgacttgtgtggctgtgttcttataacagatgagagcgtggttgctcttgcaaacggctgcccacacctgcgttccctggggctgtactactgccagaacatcaccaaccgggccatgtactcgctggccgagaacagccgcatcaggagcaagggcatgagctgggacacggccaagagcagccgcggccgcgacgacaaggacggcctcgccagcctcaacatcagccagtgcaccgcgctgacgcccccgaccgtgcaggcggtgtgcgactccttcccggcgctccacacgtgcccggagaggcactccctcatcatcagcggctgcctgagcctcaccgccgtgcactgcgcgtgcgcccaccaccggcaccgcgccggggccgggagagccatcctgtcaaaccatgcctactgaggtccctccctgtgtggatcatggcagggttctgagatcccggcatggccgagtttgtatcgtgctgtatcagcgaacgtgaagtggaaccgaaggtgcggtggaagtctgtgtgtctgtacttggacattaacaaaatgagttctccgaagaatatgtgagccttgcc

SEQ ID NO: 28276 - protein, 380 aa, Triticum aestivum
MVNAQMVSGYLDNSFNALMVSGGGESGQTQNGGTDTTLSGWKDLPMELLLRIISVAGDDRMAIVASGVCTGWRDALGWGATSLSFSWCQDHMNELVISLAHKFTKLQVLSLRQIKPQLEDSAVEAVANSCHDLRELDLSRSFRLSDRSLYALAHGCPHLTRLNISGCSNFSDAALIYLTSQCKNLKCLNLCGCVRAASDRALQAIARNCSQLQSLNLGWCDTVTDGGVTSLASGCPELRAVDLCGCVLITDESVVALANGCPHLRSLGLYYCQNITNRAMYSLAENSRIRSKGMSWDTAKSSRGRDDKDGLASLNISQCTALTPPTVQAVCDSFPALHTCPERHSLIISGCLSLTAVHCACAHHRHRAGAGRAILSNHAY

SEQ ID NO: 28277 - protein, 375 aa, Triticum aestivum
MVSGYLDNSFNALMVSGGGESGQTQNGGTDTTLSGWKDLPMELLLRIISVAGDDRMAIVASGVCTGWRDALGWGATSLSFSWCQDHMNELVISLAHKFTKLQVLSLRQIKPQLEDSAVEAVANSCHDLRELDLSRSFRLSDRSLYALAHGCPHLTRLNISGCSNFSDAALIYLTSQCKNLKCLNLCGCVRAASDRALQAIARNCSQLQSLNLGWCDTVTDGGVTSLASGCPELRAVDLCGCVLITDESVVALANGCPHLRSLGLYYCQNITNRAMYSLAENSRIRSKGMSWDTAKSSRGRDDKDGLASLNISQCTALTPPTVQAVCDSFPALHTCPERHSLIISGCLSLTAVHCACAHHRHRAGAGRAILSNHAY

SEQ ID NO: 28278 - protein, 362 aa, Triticum aestivum
MVSGGGESGQTQNGGTDTTLSGWKDLPMELLLRIISVAGDDRMAIVASGVCTGWRDALGWGATSLSFSWCQDHMNELVISLAHKFTKLQVLSLRQIKPQLEDSAVEAVANSCHDLRELDLSRSFRLSDRSLYALAHGCPHLTRLNISGCSNFSDAALIYLTSQCKNLKCLNLCGCVRAASDRALQAIARNCSQLQSLNLGWCDTVTDGGVTSLASGCPELRAVDLCGCVLITDESVVALANGCPHLRSLGLYYCQNITNRAMYSLAENSRIRSKGMSWDTAKSSRGRDDKDGLASLNISQCTALTPPTVQAVCDSFPALHTCPERHSLIISGCLSLTAVHCACAHHRHRAGAGRAILSNHAY

SEQ ID NO: 28279 - DNA, 670 bp, Triticum aestivum
gaaactacgaatgccttccggggtagcgaacccgccgcatgtctctccgcctcctcctcccacctcgcggcagcctacgcctcctttcccctctccatcgccaccagaccccaaggcctccgccctttcgaacgactgccaccggcgtcccacagagggcctctagtttcttcagtatccctatccgcgccttcaccagtatctccggcatggctgctgggacgcagcagcagaccgtggaggttagggagagcgtggagctgacggaggaggaggagcggatcttcgctaggctgctggacgtcgtccgccacttcggactcggcacccagctccgcgtcgccgggggatgggtccgggacaagctattggggaaaggctctgctgacattgacattgcacttgataatatgacgggccaaaatttctgtgagagagtaaatgagtactcaaaattcatgggtgaagagcagaaaggaatcggcgttatccagtgcaaccctgatcaatccaagcacctggaaactgcaagaatgcttatatatggcatatggattgattttgtcaacttgaggtccgaaaagtacgctgaaaacagtcgtattcctactgtggagattggaacagccaaagaagatgcactcccgcaggactaaaacatcatagctta

SEQ ID NO: 28280 - protein, 205 aa, Triticum aestivum
MSLRLLLPPRGSLRLLSPLHRHQTPRPPPFRTTATGVPQRASSFFSIPIRAFTSISGMAAGTQQQTVEVRESVELTEEEERIFARLLDVVRHFGLGTQLRVAGGWVRDKLLGKGSADIDIALDNMTGQNFCERVNEYSKFMGEEQKGIGVIQCNPDQSKHLETARMLIYGIWIDFVNLRSEKYAENSRIPTVEIGTAKEDALPQD

SEQ ID NO: 28281 - protein, 148 aa, Triticum aestivum
MAAGTQQQTVEVRESVELTEEEERIFARLLDVVRHFGLGTQLRVAGGWVRDKLLGKGSADIDIALDNMTGQNFCERVNEYSKFMGEEQKGIGVIQCNPDQSKHLETARMLIYGIWIDFVNLRSEKYAENSRIPTVEIGTAKEDALPQD

SEQ ID NO: 28282 - DNA, 1695 bp, Triticum aestivum
atgccgccgccgcctaagaatcgcagccacgctcccgcgaaggccgggcagagccggccgccgccacgccagccggggcggcggatggcgagccgcgacgctggggagcgagcggccttcttcgcgcggcgcgaggcggccacggtgctccggcgcgtgctacgcggggacgcctccaagcgctccgggggatccatcaagtccctcgtcttctcaccctccgtacgcaacaagcgcgccaccttcgccctcgtctgtcagaccctcaagtatcttccaattcttaaggaggttttagcatcaagtggagtattcagcagcaaatggaagaaacaagaggaattagtttatgtgacggcctacgacatcctcttcggtcaggaaattgcagtttctggatctgtcgaggagtatattatgctacataaagatacttttaggactgctcttcagaaaatatgtgttaaaaggaaagtcagtaatgttgaggatttgttaagcgagaaaactacagtcaaaccgaagcccaggtttgttcgtgtaaacacactcaagaccacaacaggatcggttattgaagtactaagtaaaatgcacaaggttgataaagatgatatggttccagacatgttggtgctccctcctggaactgatatgcataaacatccattggtcacagatggaaaggtgtttttgcagggaaaagcaagttgtatggtggcagctgcagtgagccctaagccgggttggaaggttattgatgcatgtgcggctccagggaacaaaacagtccatcttgctgcactcatgaatggagaagggagtattattgcttgtgaacttaacaaagagagggccaagacattgcaacatactgtcagaagatctggagcaaacaatattgaaacagttattggtgactttttgaatatagatagcaatgatccgtcatatgcagaggttcgtgctattctgttagacccctcttgctctggatctggaatctctaccgagagactcgaccacttgcttccttcacattctatgatcaggatgatgcaggttcaagcgcaaggatccggaaactgtccgcctttcagcggaaagctctctcacatgctctatcatttccctccgtagagagattggtctacagcacctgttcaatacaccaggcagagaatgaggatgtcgtcagctctgtgctacctttagcctcatcactcggtttcgagctcgctaccccattccctcaatggaggcgccgtggccttccggtcttctacggagccgagcatttgcttcggacagaccccgaggatgacctggagggattcttcatagcgctgtttgtgaggaaagcagccgccgctgatgctttggagcctagcgaagacggtggcgcgttgggaaggaaaaggaaacgagcttgcacaacgcgaagcggaggtctcagggcgttcagctccttgagattgtccaggatggacgtgctctgctccatctggggtatatagagatgttgccctaggatctttgagcgatttcttttggtagcggcagctgaacgaagccggcgttggacttgtaactgaattttgcattttctcgatatgtaggcagaattgtaaactacggccattgtgcacgttcaattttgaagcaattaacatcgaaaaagagacgtgtattact

SEQ ID NO: 28283 - protein, 379 aa, Triticum aestivum
MPPPPKNRSHAPAKAGQSRPPPRQPGRRMASRDAGERAAFFARREAATVLRRVLRGDASKRSGGSIKSLVFSPSVRNKRATFALVCQTLKYLPILKEVLASSGVFSSKWKKQEELVYVTAYDILFGQEIAVSGSVEEYIMLHKDTFRTALQKICVKRKVSNVEDLLSEKTTVKPKPRFVRVNTLKTTTGSVIEVLSKMHKVDKDDMVPDMLVLPPGTDMHKHPLVTDGKVFLQGKASCMVAAAVSPKPGWKVIDACAAPGNKTVHLAALMNGEGSIIACELNKERAKTLQHTVRRSGANNIETVIGDFLNIDSNDPSYAEVRAILLDPSCSGSGISTERLDHLLPSHSMIRMMQVQAQGSGNCPPFSGKLSHMLYHFPP

SEQ ID NO: 28284 - protein, 351 aa, Triticum aestivum
MASRDAGERAAFFARREAATVLRRVLRGDASKRSGGSIKSLVFSPSVRNKRATFALVCQTLKYLPILKEVLASSGVFSSKWKKQEELVYVTAYDILFGQEIAVSGSVEEYIMLHKDTFRTALQKICVKRKVSNVEDLLSEKTTVKPKPRFVRVNTLKTTTGSVIEVLSKMHKVDKDDMVPDMLVLPPGTDMHKHPLVTDGKVFLQGKASCMVAAAVSPKPGWKVIDACAAPGNKTVHLAALMNGEGSIIACELNKERAKTLQHTVRRSGANNIETVIGDFLNIDSNDPSYAEVRAILLDPSCSGSGISTERLDHLLPSHSMIRMMQVQAQGSGNCPPFSGKLSHMLYHFPP

SEQ ID NO: 28285 - protein, 240 aa, Triticum aestivum
MLHKDTFRTALQKICVKRKVSNVEDLLSEKTTVKPKPRFVRVNTLKTTTGSVIEVLSKMHKVDKDDMVPDMLVLPPGTDMHKHPLVTDGKVFLQGKASCMVAAAVSPKPGWKVIDACAAPGNKTVHLAALMNGEGSIIACELNKERAKTLQHTVRRSGANNIETVIGDFLNIDSNDPSYAEVRAILLDPSCSGSGISTERLDHLLPSHSMIRMMQVQAQGSGNCPPFSGKLSHMLYHFPP

SEQ ID NO: 28286 - DNA, 1392 bp, Triticum aestivum
ctagaacatcctaatcgaaaaacaatccacatcaaccttccagttcgtccgtaagcctcagcgccggaagtaccgcgatcgagcgagcgagtttcccgggcccacactgatggctctggttccctcgggctcaggcagcgcgccggtgatcgccgaggtggagatgaacggcggcgccgaccagagcgccaccaccgtgcgagccaccgtcgtgcaggcctccaccgtcttctacgacacccccgccactctcgataaagcagagagattaatagcagaggctgctggatatggttcacagttggtggtgttcccggaagcttttgttggtggttatcctcgtggatccacctttggatttgggatcagtattagtatcactaatccaaaagacaagggaaagggtgaattccagaagtattatgcagccgccatagacgtgcctggtccagaggtcacactcttagctgctatggctgggaaatataaggtctttctggtaatgggtgtgattgagagagaaggttacacactatattgttcagtgctcttctttgaccctctaggtcggtacctgggtaagcaccgcaagctcatgccgacggcattagaacggataatatggggatttggagatggatcaacaattcctgtttatgacactccacttggaaagattggagcccttatttgctgggaaaataagatgccactcttgaggacagcactgtatggtaaaggtattgagatatactgcgctcccacggccgattcaaggccagtgtggcaagcttccatgacacacatcgccatggaggggggatgctttgtgctgtcggcgaaccagttctgccgcagacaggactaccctccgccgtccgagtacgcctttgccggtttaggagaagagccttccccagacaccgtcgtttgccctggaggcagcgttatcatttcgccgtcaggcgaagtcctggcaggtcccaactacgacggagaggcgctgatcacagccgaccttgacatgggagagatcgtccgggccaagtttgattttgacgtggtgggccactactctcggcctgaggtgctgagcttggtggtggatgaccagccgcaccgcccggtgtccttcacctctgccgctgagaaggctccggctgccaagagcgacgacaccgcaaagccctgacgaccttcagctcagtcacaagcagttgatttctatcgatggttctcttttttgtgtgaactgcgaaaagatttctgtcgatagcttaataaagccgatgaaatgtaggctcgggtcgcccgcatgtctgaccgacgcccctgtaactttggctgcttgtaaaaaaaatgccttccggaacaatcagccgaggtccgttc

SEQ ID NO: 28287 - protein, 360 aa, Triticum aestivum
MALVPSGSGSAPVIAEVEMNGGADQSATTVRATVVQASTVFYDTPATLDKAERLIAEAAGYGSQLVVFPEAFVGGYPRGSTFGFGISISITNPKDKGKGEFQKYYAAAIDVPGPEVTLLAAMAGKYKVFLVMGVIEREGYTLYCSVLFFDPLGRYLGKHRKLMPTALERIIWGFGDGSTIPVYDTPLGKIGALICWENKMPLLRTALYGKGIEIYCAPTADSRPVWQASMTHIAMEGGCFVLSANQFCRRQDYPPPSEYAFAGLGEEPSPDTVVCPGGSVIISPSGEVLAGPNYDGEALITADLDMGEIVRAKFDFDVVGHYSRPEVLSLVVDDQPHRPVSFTSAAEKAPAAKSDDTAKP

SEQ ID NO: 28288 - protein, 342 aa, Triticum aestivum
MNGGADQSATTVRATVVQASTVFYDTPATLDKAERLIAEAAGYGSQLVVFPEAFVGGYPRGSTFGFGISISITNPKDKGKGEFQKYYAAAIDVPGPEVTLLAAMAGKYKVFLVMGVIEREGYTLYCSVLFFDPLGRYLGKHRKLMPTALERIIWGFGDGSTIPVYDTPLGKIGALICWENKMPLLRTALYGKGIEIYCAPTADSRPVWQASMTHIAMEGGCFVLSANQFCRRQDYPPPSEYAFAGLGEEPSPDTVVCPGGSVIISPSGEVLAGPNYDGEALITADLDMGEIVRAKFDFDVVGHYSRPEVLSLVVDDQPHRPVSFTSAAEKAPAAKSDDTAKP

SEQ ID NO: 28289 - protein, 239 aa, Triticum aestivum
MAGKYKVFLVMGVIEREGYTLYCSVLFFDPLGRYLGKHRKLMPTALERIIWGFGDGSTIPVYDTPLGKIGALICWENKMPLLRTALYGKGIEIYCAPTADSRPVWQASMTHIAMEGGCFVLSANQFCRRQDYPPPSEYAFAGLGEEPSPDTVVCPGGSVIISPSGEVLAGPNYDGEALITADLDMGEIVRAKFDFDVVGHYSRPEVLSLVVDDQPHRPVSFTSAAEKAPAAKSDDTAKP

SEQ ID NO: 28290 - DNA, 653 bp, Triticum aestivum
ccccttcttccccgcgcttgttcttctccccccgtgagctccagccgcctcttgctgtgcggtggaactcaagcgagcagccgatagcggcggaggagagatgagcgtgaccaagttcatcaagtgcgtcacggtgggggacggcgccgtcggcaagacctgcatgctcatctgctacaccagcaacaggttccccagcgattacatccccaccgtgttcgacaacttcagcgccaacgtctccgtcgacggcaacatcgtcaacctcggcctgtgggacaccgccgggcaagaggactacagcaggctgaggccgctgagctacagaggcgccgacgtcttcgtgctcgccttctccctcatcagcagcgcaagctacgagaatgtcctcaagaagtggatgccagagctccgccggttcgcgcccaacgtccccattgttctagttgggaccaagctagatctgcgtgaccacagagcctacctcgccgaccatcccggtgcctcggcaatcacaaccgcacagggtgaagaactcaggaagcagatcggcgccgcagcgtacatcgagtgtagctcaaagacacagcagaacgtcaaggctgtcttcgacaccgccatcaaggtggtccttcagccgccgaggaggaggg

SEQ ID NO: 28291 - protein, 184 aa, Triticum aestivum
MSVTKFIKCVTVGDGAVGKTCMLICYTSNRFPSDYIPTVFDNFSANVSVDGNIVNLGLWDTAGQEDYSRLRPLSYRGADVFVLAFSLISSASYENVLKKWMPELRRFAPNVPIVLVGTKLDLRDHRAYLADHPGASAITTAQGEELRKQIGAAAYIECSSKTQQNVKAVFDTAIKVVLQPPRRR

SEQ ID NO: 28292 - protein, 163 aa, Triticum aestivum
MLICYTSNRFPSDYIPTVFDNFSANVSVDGNIVNLGLWDTAGQEDYSRLRPLSYRGADVFVLAFSLISSASYENVLKKWMPELRRFAPNVPIVLVGTKLDLRDHRAYLADHPGASAITTAQGEELRKQIGAAAYIECSSKTQQNVKAVFDTAIKVVLQPPRRR

SEQ ID NO: 28293 - DNA, 1058 bp, Triticum aestivum
ctttccttttctcctagtgagaaaaacaccaggaaaacggcggccatggcggcagctgcggcggcgagcggggcgacggcggcagtggagagcgtggtggtggtgcacaacgtggccaaacggcacaacgtgggaacgctggcgcggagcgcaacggccttcggcgtggcggaggtggtggtggtcggccgccgcgacgtcagcgccttcggcagccacggatccacctcccacctccgcttccgacacttcacctccctcgccaccgcctgcgcctacctcaaggacgagagggggtgtgacatttgcggcgtggagatcaccgacgacgcgctgcctgtgacggcccacccgttccgcaggagcaccgcgttcctcttcggcaatgagggtacaggactctcacaaaaggagtgtgaggtctgtgacttcttcgtctacatccctcagtatggtggtggaactgcatcactcaatgttaccgttgcagcatcaattgttctccaccacttcggggtctgggctggctttcctgaaagagggcgagaaggcaataaatttgtggtagctgagaaaccaagggggcagtcgagggggctgtactgctcagattcaattgaagacttgattgaagagcgcaaggcacgcagagaaaatgcctgcgatatattcgaggaaaatggaagtaaccatccgcaagaatcaaatggcctaggaatgatgtttacagactagagtgtttattcgatctcatatctgtttctaagcaagcccctggatgataagggcttgataaggtgaatttgcaatacataagacatgatgtggcgcttgcgtttgtactgtgttaaaaaaaaactaagggtggtcagttttttttaatattgttgttccaacaaggtggcaggagcgaaggggaagggcaatattgggacggaggcagtatgatttattccctagttgtactaaatcagctacgcttattttgggactgaagtagtatgatttatgttctgtacaagattgttgcgtgctgctcaaatttgttttaccttctg

SEQ ID NO: 28294 - protein, 244 aa, Triticum aestivum
LSFSPSEKNTRKTAAMAAAAAASGATAAVESVVVVHNVAKRHNVGTLARSATAFGVAEVVVVGRRDVSAFGSHGSTSHLRFRHFTSLATACAYLKDERGCDICGVEITDDALPVTAHPFRRSTAFLFGNEGTGLSQKECEVCDFFVYIPQYGGGTASLNVTVAASIVLHHFGVWAGFPERGREGNKFVVAEKPRGQSRGLYCSDSIEDLIEERKARRENACDIFEENGSNHPQESNGLGMMFTD

SEQ ID NO: 28295 - protein, 229 aa, Triticum aestivum
MAAAAAASGATAAVESVVVVHNVAKRHNVGTLARSATAFGVAEVVVVGRRDVSAFGSHGSTSHLRFRHFTSLATACAYLKDERGCDICGVEITDDALPVTAHPFRRSTAFLFGNEGTGLSQKECEVCDFFVYIPQYGGGTASLNVTVAASIVLHHFGVWAGFPERGREGNKFVVAEKPRGQSRGLYCSDSIEDLIEERKARRENACDIFEENGSNHPQESNGLGMMFTD

SEQ ID NO: 28296 - DNA, 967 bp, Triticum aestivum
ctagaacatcctaatcgaaaaacatcccgccccccacagccatccgtccacagagtcaccacagccgcaccgcagctccatcttcaccaccgtcatcgtcaacgagaagcagcggcgagcagcagcgcccggccaagagacgagacgagacgagagaacaagtgttgccatggccgcgatggagagcaagagccggaggttcgcgctggcgtgcggcgtcctcagccagtacgtcaaggcggagcagaagatgtcctcctccgccgtcgtcgccccgcccccgcgcgccccgccggccaccacgctcagcctcatgcccggcgccgacgtcggccaggaccacgccgcggcggccgctgaggaggcgggcccggccacgccgctcaccatcttctacggcggcagggtagtcgtcttcgaggacttccccgcggacaaggcggccgaggtcatgcgcatggccaccaccgccggcgtcgagcgcgcggccgccacgcccgccccggccccggcgctcgcggacctgcccatcatgcgcaaggcctccctgcagaggttcttcgagaagcgcaaggaccgcctcggcgcgcgcgcgccctacgcccgccccgccgcgccggcagccaacaagggctcggaggacaagtcggcgtcgtcctcctcgtggctcgggctggccagcgccgacggcgccttcgcgctctgatccggacggacggacggacggggcaagacggcttgctcgctcgcctcaagacatcgtttgtagagcactttcaattttaatgtattctttgggtaaaaattcgaatagcgaaagaaagaaagaaagaaacaagattgagttcatagcaagccctctttgttcgttcgtttgatttgatcgacaaattcttttgatttctgcgcggatcatcagccatggttcgcacagaaacccagttcagttcatgaaccgaacaataac

SEQ ID NO: 28297 - protein, 178 aa, Triticum aestivum
MAAMESKSRRFALACGVLSQYVKAEQKMSSSAVVAPPPRAPPATTLSLMPGADVGQDHAAAAAEEAGPATPLTIFYGGRVVVFEDFPADKAAEVMRMATTAGVERAAATPAPAPALADLPIMRKASLQRFFEKRKDRLGARAPYARPAAPAANKGSEDKSASSSSWLGLASADGAFAL

SEQ ID NO: 28298 - protein, 175 aa, Triticum aestivum
MESKSRRFALACGVLSQYVKAEQKMSSSAVVAPPPRAPPATTLSLMPGADVGQDHAAAAAEEAGPATPLTIFYGGRVVVFEDFPADKAAEVMRMATTAGVERAAATPAPAPALADLPIMRKASLQRFFEKRKDRLGARAPYARPAAPAANKGSEDKSASSSSWLGLASADGAFAL

SEQ ID NO: 28299 - protein, 151 aa, Triticum aestivum
MSSSAVVAPPPRAPPATTLSLMPGADVGQDHAAAAAEEAGPATPLTIFYGGRVVVFEDFPADKAAEVMRMATTAGVERAAATPAPAPALADLPIMRKASLQRFFEKRKDRLGARAPYARPAAPAANKGSEDKSASSSSWLGLASADGAFAL

SEQ ID NO: 28300 - DNA, 636 bp, Triticum aestivum
acagcacacctacccagccaaagccagcctagctagtgccaaccaagctcaagctcgatccatcgatggccgggacaaaggtgacgatggcgagcgcggtggccgtggcgctgctgctggccatggcggccgtgtcgggcgcgggcgcggcgcccggcccgctgatgatgtgcaatgtggacgtgtaccgcatgatcggcgcgtgcaggtcgtactgcgcgagaggcagccgggaggctacgccgagcgggcagtgctgcgccgcgctgaggggagccaacctccggtgcgtgtgccagaagaagggcctgctcgcgtccgcgggcaacatcgacgcccgccgcgccatgcagatcccctccaagtgcggcatcggcaacgtgcccagccggtgctaggtccgtcggaccggctggtgatccatccacagacgcgcgcattccttctgtttttttttcattataagcaaataacggcgtgcgtgagtgcgatggatgatcgatcgatcggccacactgtagttcgcggttctcgatttagattgagctttcttttcgtacgttcgtgcatgtgctaatcgagctagtcgtgcaaatcgtacatgtatcctcttgtgaatcagtcctttcttttgtc

SEQ ID NO: 28301 - protein, 191 aa, Triticum aestivum
QHTYPAKASLASANQAQARSIDGRDKGDDGERGGRGAAAGHGGRVGRGRGARPADDVQCGRVPHDRRVQVVLRERQPGGYAERAVLRRAEGSQPPVRVPEEGPARVRGQHRRPPRHADPLQVRHRQRAQPVLGPSDRLVIHPQTRAFLLFFFHYKQITACVSAMDDRSIGHTVVRGSRFRLSFLFVRSCMC

SEQ ID NO: 28302 - protein, 110 aa, Triticum aestivum
MAGTKVTMASAVAVALLLAMAAVSGAGAAPGPLMMCNVDVYRMIGACRSYCARGSREATPSGQCCAALRGANLRCVCQKKGLLASAGNIDARRAMQIPSKCGIGNVPSRC

SEQ ID NO: 28303 - protein, 103 aa, Triticum aestivum
MASAVAVALLLAMAAVSGAGAAPGPLMMCNVDVYRMIGACRSYCARGSREATPSGQCCAALRGANLRCVCQKKGLLASAGNIDARRAMQIPSKCGIGNVPSRC

SEQ ID NO: 28304 - DNA, 1344 bp, Triticum aestivum
aaaaactcaccaagcaaacacttgagctaaccatatctagtccatatcctctcccaagctagctcgaagcagcaatggcgaaatctttcaccttattagcgctacttagcgcactggttgtcctctcacttcttgtgagccccattgcttgttcccgcaagctccccaggcctgcaaccaaggcccacaagaaccacaccgctgctaccccttcgtcgtctgccgcttatggctccggcggctggttagccggcggcgcgacgtattacggcgcccccaacggcgacggaagcgacggtggcgcgtgtggctaccagagcgctgtcggcaaccggccgttctcgtcgatgatcgccgccggcaacccgtcgctctacagagatggcaagggctgcggagcgtgctacgaggttaaatgcacaggcaaccaggcatgctccggccagccggcgaccgtcgtcatcaccgacgagtgccccgccggggccgcttgcctcggtgaggccgcccacttcgacatgagcggcacctccatgggcgccatggcgaagcctggcatggccgacaaactccgggccggcggtatcatcaagatccagtacaagagggtgccatgcaagtaccctggcatgaacattgccttcaaggtggaccagggctccaacccctactacctggaggtcctgatcgaattcgaggacgacgacggcgacctcaacgccgtggacctcatggaggccaactgcggcacctggacgcccatggcgcagaactggggcgcgctgtaccgcctcaactccaacaccggcaagccgctgcgcgggcccttctcgctccggctcacctccgactccggcaggaagctcgtcgtcaacaacgtcatccccgccagctggaaggccggagccacctaccgctccttggttaactacccctaagttacagcctcatcaactttttttcactgcgccgtacgtgcttggctagtaaccaagaagtgcagtgcagagtgtggtcgtggtaatttagaaccgcgggttaatttctaccgcggggattgtatttatacgaatatgcgtccgggaacggcaggaggctgtgtcagaggaggaggagcaggccatgcaaagattgtgccagctcttccctccatggtctctcggcgctcccctagtgatgcgtgtcgtcgatttgtatgtattttgtttctcttcctctgttttgtcgatgaggagaaaagcttgtagtgcagtgcaaactaaagttgcacgccgatgtatcaagttgtgtgagtgtgtttttggagcccaatccttgagagaaatgaacttttaccatcagatc

SEQ ID NO: 28305 - protein, 287 aa, Triticum aestivum
MAKSFTLLALLSALVVLSLLVSPIACSRKLPRPATKAHKNHTAATPSSSAAYGSGGWLAGGATYYGAPNGDGSDGGACGYQSAVGNRPFSSMIAAGNPSLYRDGKGCGACYEVKCTGNQACSGQPATVVITDECPAGAACLGEAAHFDMSGTSMGAMAKPGMADKLRAGGIIKIQYKRVPCKYPGMNIAFKVDQGSNPYYLEVLIEFEDDDGDLNAVDLMEANCGTWTPMAQNWGALYRLNSNTGKPLRGPFSLRLTSDSGRKLVVNNVIPASWKAGATYRSLVNYP

SEQ ID NO: 28306 - protein, 196 aa, Triticum aestivum
MIAAGNPSLYRDGKGCGACYEVKCTGNQACSGQPATVVITDECPAGAACLGEAAHFDMSGTSMGAMAKPGMADKLRAGGIIKIQYKRVPCKYPGMNIAFKVDQGSNPYYLEVLIEFEDDDGDLNAVDLMEANCGTWTPMAQNWGALYRLNSNTGKPLRGPFSLRLTSDSGRKLVVNNVIPASWKAGATYRSLVNYP

SEQ ID NO: 28307 - DNA, 591 bp, Triticum aestivum
acaccacacggccgcaacagccaccaccagaccagcagcgcacacacacacaccagccaagccaagggaaggtcgccggagagagaagcgccagagatgtccggccgcggcaagggagggaaggggctgggcaagggcggcgccaagcgccaccggaaggtgctgcgcgacaacatccagggcatcaccaagccggccatccggcggctggcgcggcggggcggcgtgaagcgcatctcggggctcatctacgaggagacccgcggcgtgctcaagatcttcctggagaacgtcatccgcgacgccgtcacctacaccgagcatgcccgccgcaagaccgtcaccgccatggacgtcgtctacgcgctcaagcgccagggccgcaccctctacggcttcggcggctaggccgcgccggtcaactcgaattcaccttgtgccgccagccagattcgtagcatagctagctatggctgtccagtgttcattgtcttcagtgtaatggccgcatctcgccgttcttgttcagtgttcagcgttcagtgtttggatgccatacgatagaatggaaatcgcagcattttaccctcg

SEQ ID NO: 28308 - protein, 151 aa, Triticum aestivum
TTRPQQPPPDQQRTHTHQPSQGKVAGERSARDVRPRQGREGAGQGRRQAPPEGAARQHPGHHQAGHPAAGAAGRREAHLGAHLRGDPRRAQDLPGERHPRRRHLHRACPPQDRHRHGRRLRAQAPGPHPLRLRRLGRAGQLEFTLCRQPDS

SEQ ID NO: 28309 - protein, 135 aa, Triticum aestivum
TPHGRNSHHQTSSAHTHTSQAKGRSPEREAPEMSGRGKGGKGLGKGGAKRHRKVLRDNIQGITKPAIRRLARRGGVKRISGLIYEETRGVLKIFLENVIRDAVTYTEHARRKTVTAMDVVYALKRQGRTLYGFGG

SEQ ID NO: 28310 - protein, 103 aa, Triticum aestivum; identical to SEQ ID NO: 71

SEQ ID NO: 28311 - DNA, 925 bp, Triticum aestivum
ctaatcgaaaaaatggatggcatggaagtgaagcctagagggaaggtgcaaactggtaagagaaaaaccagcagatgtcaagcgggtgataaagcagcaaaatttccttgtgatatagaagggtgtgacatgagcttcaactcacagcaggatttgttgttgcacaagcgtgatatttgtcctgttaaaggatgcaagaaaaagttcttctgccataaatacctgctccagcaccgcaaagtgcacatggatgaaagaccactcaattgtgaatggaagggctgcaagaagacattcaagtggccatgggctaggacagaacacatgagggtccatacgggggtgcgaccttacgaatgcatggtacctggctgtggtcagacattcagatttgtgtcggatttcagccgccacaagagaaagactggccattccagtggtaagaaaaataaggagagtacataacttctaatccctgtgcaggagtgcaggttctttctctgaagggtatgctgattgaataactgcatcagattccatttgtcgttggattaacctgcattaggagtctaattcattccattgtttactgactccgcataatgagtcaatttttccagtgccttgggtccaactggcctgttgttgactggggttattccaagtcaattgtatgtgctttagtttatcgccaacgcttggggaagttccttttgtcatcatggttaaattgacatacttatcttgctgtctggtggcattcagttagttgttcgttattattttcctatttattattacaaattgcagcgtaggtaataataatgtgcacgcttattactatgctacatctttgttttttctttttcaaaatattgtcagatagatctcactttcgataaagggtatttttatcgggtttgct

SEQ ID NO: 28312 - protein, 154 aa, Triticum aestivum
LIEKMDGMEVKPRGKVQTGKRKTSRCQAGDKAAKFPCDIEGCDMSFNSQQDLLLHKRDICPVKGCKKKFFCHKYLLQHRKVHMDERPLNCEWKGCKKTFKWPWARTEHMRVHTGVRPYECMVPGCGQTFRFVSDFSRHKRKTGHSSGKKNKEST

SEQ ID NO: 28313 - protein, 150 aa, Triticum aestivum
MDGMEVKPRGKVQTGKRKTSRCQAGDKAAKFPCDIEGCDMSFNSQQDLLLHKRDICPVKGCKKKFFCHKYLLQHRKVHMDERPLNCEWKGCKKTFKWPWARTEHMRVHTGVRPYECMVPGCGQTFRFVSDFSRHKRKTGHSSGKKNKEST

SEQ ID NO: 28314 - protein, 147 aa, Triticum aestivum
MEVKPRGKVQTGKRKTSRCQAGDKAAKFPCDIEGCDMSFNSQQDLLLHKRDICPVKGCKKKFFCHKYLLQHRKVHMDERPLNCEWKGCKKTFKWPWARTEHMRVHTGVRPYECMVPGCGQTFRFVSDFSRHKRKTGHSSGKKNKEST

SEQ ID NO: 28315 - DNA, 1367 bp, Triticum aestivum
cctaatcgaaaaattcaccaaacaatccttgaaatcgacccaagccgctctccctgtcaggtgagccgcgccgccagtctccggcgaccccgagccccaacaatcccatctccggccacaggagctccagggttcctctctccatctggtcctccgctacgccccgaatcgatggagattagggccccgccgacgagcctcaggctcgcgacgccgccttcaaccgccagcttccgcccggtcgccctccggacctccttcctcagcggcagcgtttctcttcgagctgtgcaagtacgtcaatcaaatgtcaacagatttaagtgcaacgccatacggagtaacctcttcgatagactaactagggttgtcaggtcctatgcaaatgcaattctgagttcatttgaagaccctgagaagatcctagatcaagcggtcttggagatgaatgatgatttaataaagatgcggcaagccactgcacaggtcttggcatctcaaaagaggcttgagaacaagtacaaagctgccgaacaagctgatgctgattggtatcggagggctcaacttgctcttcaaaagggtgaagaggatcttgctcgtgaagcccttaaacggcgtaaatcatatgctgaaaatgcaagctcgttaaaggcccagcttgatcagcagaagagtgtcgtcgaaaatcttgtttcaaataccaggcttcttgagagcaagatagcagaggccaagcagaaaaaggataccctaaaagcctgtgctcaatcagcaaagaccgcaacaaaagtgagtgaaatgctggggaatgtgaatacaagtggtgccttgtcagcgtttgagaagatggaggagaaagttatgactatggaatcccaagctgaggcacttggtcaattaggagctgatgatctagaaggaaagtttgcaatgcttgagactacatcggttgacgatgatcttgcacaaatgagaaaagaactgtccgggagatctttgaagggcgaactccctccgggcagagccgcagccagcaaatcaggtagccccttccgagacacagagattgagaaggagctaaatgagctgcggaagaaggccaaagagtattagattttatttacaggccatgtccgtgtcccggggcttgatgaaacctcctacccgaagaaccccagaagttatataggcttgcagatttcagcaatgtgcatctgaaacctccggtgtacttttttttgggggtaaaggtatatgggtgcgtgaagagttctcttgcaattttcctgtgtatgtcattgtactttgtacagttaatcttgtcaccataatgcaaatcattacacccccttttgagcttagct

SEQ ID NO: 28316 - protein, 371 aa, Triticum aestivum
PNRKIHQTILEIDPSRSPCQVSRAASLRRPRAPTIPSPATGAPGFLSPSGPPLRPESMEIRAPPTSLRLATPPSTASFRPVALRTSFLSGSVSLRAVQVRQSNVNRFKCNAIRSNLFDRLTRVVRSYANAILSSFEDPEKILDQAVLEMNDDLIKMRQATAQVLASQKRLENKYKAAEQADADWYRRAQLALQKGEEDLAREALKRRKSYAENASSLKAQLDQQKSVVENLVSNTRLLESKIAEAKQKKDTLKACAQSAKTATKVSEMLGNVNTSGALSAFEKMEEKVMTMESQAEALGQLGADDLEGKFAMLETTSVDDDLAQMRKELSGRSLKGELPPGRAAASKSGSPFRDTEIEKELNELRKKAKEY

SEQ ID NO: 28317 - protein, 314 aa, Triticum aestivum
MEIRAPPTSLRLATPPSTASFRPVALRTSFLSGSVSLRAVQVRQSNVNRFKCNAIRSNLFDRLTRVVRSYANAILSSFEDPEKILDQAVLEMNDDLIKMRQATAQVLASQKRLENKYKAAEQADADWYRRAQLALQKGEEDLAREALKRRKSYAENASSLKAQLDQQKSVVENLVSNTRLLESKIAEAKQKKDTLKACAQSAKTATKVSEMLGNVNTSGALSAFEKMEEKVMTMESQAEALGQLGADDLEGKFAMLETTSVDDDLAQMRKELSGRSLKGELPPGRAAASKSGSPFRDTEIEKELNELRKKAKEY

SEQ ID NO: 28318 - protein, 223 aa, Triticum aestivum
MNDDLIKMRQATAQVLASQKRLENKYKAAEQADADWYRRAQLALQKGEEDLAREALKRRKSYAENASSLKAQLDQQKSVVENLVSNTRLLESKIAEAKQKKDTLKACAQSAKTATKVSEMLGNVNTSGALSAFEKMEEKVMTMESQAEALGQLGADDLEGKFAMLETTSVDDDLAQMRKELSGRSLKGELPPGRAAASKSGSPFRDTEIEKELNELRKKAKEY

SEQ ID NO: 28319 - DNA, 961 bp, Triticum aestivum
aaagcagctataaccccgccccgcgtcgtcccctccgcaccaccagagatccggccggcggcacgagaagaagcagcagcggagacgatggcggccgtgaagcgcgcctacctcgccgtctacaactgggccgtcttcttcggatgggcgcaggtgctctactacgccgtggacgcgctgctccggtcggggcacgagggcgtgtacgccgccgtcgagcggccgctccagctcgcgcagaccgccgccgtcctcgagatcctccacgggctcgtcgggctggtgaggtcgccggtgtcggccacgctgccgcagatcgggtcgcgcctcttcgtcacctggggcatcctctggagcttccccgagacgaggacacacatcctggtgagctccttggtcatcagctggtccatcaccgagattattaggtactcttttttcggcacaaaagagctgtttggatctgccccatcattgcttctatggcttaggtatagctcattcctagtaatgtacccaaccggcatcagcagcgaggttggcttgatatacattgcgttgcagttcatcaaggcatcagagaagtactgcatcagaatgcccaacaaatggaactattcatttgattacttctatgcatcaatcctggtactcctagtctacgttccaggaagcccacatatgtacacctacatgcttgggcagcgtaagaaggcgcttgcaaagtcaaagaccgcgtaaatcttatcgatatgtcttacaaaattcggtgtcacatcactgtgtttctcatttacgtcagcaaatcaaaagtctgttcttgttgggcactagattattaaactctctgtcatgtgaatgtggttgttgctgaatttgcatttggttgctagatacaatgtcaaacagtaaagacaaacatttcgtttgacgtagaccttgctgaatataagctttacct

SEQ ID NO: 28320 - protein, 246 aa, Triticum aestivum
KAAITPPRVVPSAPPEIRPAAREEAAAETMAAVKRAYLAVYNWAVFFGWAQVLYYAVDALLRSGHEGVYAAVERPLQLAQTAAVLEILHGLVGLVRSPVSATLPQIGSRLFVTWGILWSFPETRTHILVSSLVISWSITEIIRYSFFGTKELFGSAPSLLLWLRYSSFLVMYPTGISSEVGLIYIALQFIKASEKYCIRMPNKWNYSFDYFYASILVLLVYVPGSPHMYTYMLGQRKKALAKSKTA

SEQ ID NO: 28321 - protein, 217 aa, Triticum aestivum
MAAVKRAYLAVYNWAVFFGWAQVLYYAVDALLRSGHEGVYAAVERPLQLAQTAAVLEILHGLVGLVRSPVSATLPQIGSRLFVTWGILWSFPETRTHILVSSLVISWSITEIIRYSFFGTKELFGSAPSLLLWLRYSSFLVMYPTGISSEVGLIYIALQFIKASEKYCIRMPNKWNYSFDYFYASILVLLVYVPGSPHMYTYMLGQRKKALAKSKTA

SEQ ID NO: 28322 - protein, 141 aa, Triticum aestivum
SSYNPAPRRPLRTTRDPAGGTRRSSSGDDGGREARLPRRLQLGRLLRMGAGALLRRGRAAPVGARGRVRRRRAAAPARADRRRPRDPPRARRAGEVAGVGHAAADRVAPLRHLGHPLELPRDEDTHPGELLGHQLVHHRDY

SEQ ID NO: 28323 - DNA, 709 bp, Triticum aestivum
  misc_feature (669)..(671): n is a, c, g, or t
aacgccccgagaacgagaactcctgtgctgtgctgcccctctctctctccccccactgagtctcctgtgctgcccccgctgacctgcggccaccgacggcgagtggaggcggacgacgggttcccgccgcgggctcttcggcggcgccgcgtcagggctcgcgcgggctggtgctgatttgagggagattcggggccggggccggagccggcgcggcctctggggatggggtggctttcctgctgcaagcggtcgaacggggcccaacccggcaggaagaagaagaaggacacgacatggcggatcttctcactcaaggagcttcagttggcgaccaacaatttcaactacgataacaagcttggtgaaggtggattcggcagtgtctactggggccagctctgggacggatcacagattgcggtgaaaaggctcaagagttggagcaacaaggctgaaaaggagtctgctgtcgaggtcgaggttttggcacgagtgcggcataagagcctcttgagcttacgtggatattgcgctgaaggccaggagcgcctgatagtctacgactatatgcagaacctgagcttgcactctcacctgcacggacagcatgcagctgaatgccatcttggttgggagcgaagaatgaacatcgccattgattcggcnnnaggcatcgcttatcttcatcaccatgcgatcccacata

SEQ ID NO: 28324 - protein, 161 aa, Triticum aestivum
  misc_feature (148)..(149): Xaa can be any naturally occurring amino acid
MGWLSCCKRSNGAQPGRKKKKDTTWRIFSLKELQLATNNFNYDNKLGEGGFGSVYWGQLWDGSQIAVKRLKSWSNKAEKESAVEVEVLARVRHKSLLSLRGYCAEGQERLIVYDYMQNLSLHSHLHGQHAAECHLGWERRMNIAIDSXXGIAYLHHHAIPH

SEQ ID NO: 28325 - DNA, 1421 bp, Triticum aestivum
aaaaaaaaaaaaagtatttttcccgtcgttacttcacttccggtgttccctcccctgctggcggctgccggggagcgcagccgcaccagccagccatgaagcgcttcttccagcccgtactcaaggacggatcccccgccaagaagaggcccgccggagccgcgatctctgactgcgttgatggccgcgcccccaccgcggccgacgccggcggggacggccctcccggcgaggagccacgcaggttcatcacgtggaacgccaacagccttctgctccggatgaagagcgactggcccgcgttctgtcagttcgtcgcccgcctcgaccccgacgtcatctgcgtccaggaagtgcggatgccagcagctggttccaaaggggcacctaaaaatcctagtgagctaaaagacgacacaacgtcgtcacgcgaagaaaaacagacagtgctgcgtgctttgtcgagctcacctttcaaagactaccgtgtgtggtggtccctttcagattcaaaatatgcaggcacagctgtgtttatgaagaagaagtttgaaccaaagaaagtgtcattcaacttggatagaacatctactaagcatgatgcagacggtcgtgtcatcattgtggaatttgaatcattcttgttgctaaacacatatgctccaaacaacgggtggaaagaggaggaaaattcatttcaaagaagaagaaagtgggataaaagaatgtcggagtttgttcaacaagtagacaagcccttaatctggtgcggagacctgaacgttagtcatgacgaaatcgatgtcagccatcctgatttttttagcgatgctaagctcaatggatatatccctccaaataaagaggactgtggacagccaggattcacccttgcagagagacagcgctttggcaatatattgtcccagggaaagctggtagatgcttacagatacctgcacaaagaaaaagacatggagtgtggcttctcttggtctgggaatccagttgggaagtaccgaggaaagagaatgcggattgactattttgttatttcagaagggttgaaagacagaattgtttcatgtgaaatgcatggtcatggaattgaactggaaggattttatggaagtgatcactgtcctgtttcacttgtgctctccaaagaagcagcggaagcaccagaatcgaagagctccagctaacttctgtgtttttctcgaaccggacaccatggattattagattattattaggtcagttgaagcgcttggcctatcatgagctatttaaacattttttatgacctgtaggccactactgcggcgcaccctctagtccggatctggattggaattagagttcaactcttactgtgatcagctattggtatctaagttcagatttctaagagttgttcc

SEQ ID NO: 28326 - protein, 400 aa, Triticum aestivum
KKKKYFSRRYFTSGVPSPAGGCRGAQPHQPAMKRFFQPVLKDGSPAKKRPAGAAISDCVDGRAPTAADAGGDGPPGEEPRRFITWNANSLLLRMKSDWPAFCQFVARLDPDVICVQEVRMPAAGSKGAPKNPSELKDDTTSSREEKQTVLRALSSSPFKDYRVWWSLSDSKYAGTAVFMKKKFEPKKVSFNLDRTSTKHDADGRVIIVEFESFLLLNTYAPNNGWKEEENSFQRRRKWDKRMSEFVQQVDKPLIWCGDLNVSHDEIDVSHPDFFSDAKLNGYIPPNKEDCGQPGFTLAERQRFGNILSQGKLVDAYRYLHKEKDMECGFSWSGNPVGKYRGKRMRIDYFVISEGLKDRIVSCEMHGHGIELEGFYGSDHCPVSLVLSKEAAEAPESKSSS

SEQ ID NO: 28327 - protein, 369 aa, Triticum aestivum
MKRFFQPVLKDGSPAKKRPAGAAISDCVDGRAPTAADAGGDGPPGEEPRRFITWNANSLLLRMKSDWPAFCQFVARLDPDVICVQEVRMPAAGSKGAPKNPSELKDDTTSSREEKQTVLRALSSSPFKDYRVWWSLSDSKYAGTAVFMKKKFEPKKVSFNLDRTSTKHDADGRVIIVEFESFLLLNTYAPNNGWKEEENSFQRRRKWDKRMSEFVQQVDKPLIWCGDLNVSHDEIDVSHPDFFSDAKLNGYIPPNKEDCGQPGFTLAERQRFGNILSQGKLVDAYRYLHKEKDMECGFSWSGNPVGKYRGKRMRIDYFVISEGLKDRIVSCEMHGHGIELEGFYGSDHCPVSLVLSKEAAEAPESKSSS

SEQ ID NO: 28328 - protein, 307 aa, Triticum aestivum
MKSDWPAFCQFVARLDPDVICVQEVRMPAAGSKGAPKNPSELKDDTTSSREEKQTVLRALSSSPFKDYRVWWSLSDSKYAGTAVFMKKKFEPKKVSFNLDRTSTKHDADGRVIIVEFESFLLLNTYAPNNGWKEEENSFQRRRKWDKRMSEFVQQVDKPLIWCGDLNVSHDEIDVSHPDFFSDAKLNGYIPPNKEDCGQPGFTLAERQRFGNILSQGKLVDAYRYLHKEKDMECGFSWSGNPVGKYRGKRMRIDYFVISEGLKDRIVSCEMHGHGIELEGFYGSDHCPVSLVLSKEAAEAPESKSSS

SEQ ID NO: 28329 - DNA, 688 bp, Triticum aestivum
catcctaatcgaaaaagactagaacaaacgcacgcgcccatctctctcgctcatgtctggtcctctcgatccccttgcgccgccgccacagacgctggccgattccggccgctccggtgagctctagcgccgcccagcacacctacggctgctcctcgatgagctctgtctattcctccgcatcgatttattttcctctgctccttgtggtcgcccccttcagttatgtcttgctagggtttcggtcttggtcgtgctcctcctgctcgccggggctccgcgtgcgcggccaagctgccgccgccgccgccgtgcagccggtcgtgcgcgatgctcaactgcgactcggtggggatccggtacggcaagttctgcggcgtggggtggagcgggtgcaaggggaggacccctacgacgacctcgatgcgtgctgccgcgagcacgacagttgcctcgaaaaaaaagtgtttttgttatgcaggttggaagaaaagaagaagatccagagaagatcttagtaataagatagtttttattaaagtagatatttagttttaggtcatttcttgtaatttcagatatggagtgcttgtctttagtttttgttttgactttgtgaaacttggtacctatggatgaaactgtgtaatattgatgaaactatgtatatgtatggatgaaacttgct

SEQ ID NO: 28330 - protein, 119 aa, Triticum aestivum
MSSVYSSASIYFPLLLVVAPFSYVLLGFRSWSCSSCSPGLRVRGQAAAAAAVQPVVRDAQLRLGGDPVRQVLRRGVERVQGEDPYDDLDACCREHDSCLEKKVFLLCRLEEKKKIQRRS

SEQ ID NO: 28331 - protein, 73 aa, Triticum aestivum
MLNCDSVGIRYGKFCGVGWSGCKGRTPTTTSMRAAASTTVASKKKCFCYAGWKKRRRSREDLSNKIVFIKVDI

SEQ ID NO: 28332 - DNA, 1419 bp, Triticum aestivum
ataagtttgtaagttcgacgacataaggttgcgcatcgaaaaggacccaggttctcttctccaacggtttggttgtgcgccatggacgctggaatgagacaatcgagggtccggttttctggtgtagggcaggaagatcagggcagcggccaggctatggcaatgccaccacagcgacagcgaggcacaccttttggaagaggtgaagaatacgatgccgcgtacgcagcaacggtggcagcagtggcatatgctattgctgcaatggaggaagagaagttgccatcccaacagaagcctatcccagaaaaagcagcatctcggcagaagcgcgtaacagttcatgagcccacagctgccccacccccgagatcaccacccaggagaggtggaagcatgaaaaggccgactgaaggaagcaaaatctcaagattgtttagcggtaacaaagaaatagttgaagttggcgacgaagacgaacgagcaaatgtgtcggtgaggaggccggtgaaaccggcgccaaagaagccaggagatctaactccaggccagaacgtggtagggaaggtggttgactccgtcccgaacctgaaggacgatccaagtttcacgaggaaaacaccggacaagaagaggagcagaaactttgagcaggaggaggcaaatcagagggcgaaacccggggttaacccgacgacctcgtttccaggagagaggaaacagagctggaagcacgagcaggaaccagcgaatcagagggcaccaccggcagccaggcctccaggaatggtttattccagcgaggcggagaggatggcggctgcgtgggagaaggagaagctggctaagatcaaggagcagtataacgagacgatggaaaccatagccgaatgggagactgaaaagaaggccaaggccaggcgccagaaggagcccaaagagggggattcagagaggaagcgagcaaaggcgctggaggagtacaacgacgagatgaagcggatcagcaaggtggccgccgcgtcgaggatgtcggcagaggacaagaaaaggaacgccgagggcaaagtctgggagaaggcggccaaaatccggtcgacggggaagctcccacggtcctgtggctgcttctgaaaccatggacacacataatgtgggccaagaatctggttgtgttgctgctttactgtgtatacttgtttatgtatcgcctaaatgaagtacattgcgccaaccagtgcaaactccaacaacaacaacaacaaagcctttagtcccaagcaagttgaggtaggctagaggtgaaacccataagatctcgcaaccaactcatggctctggcacatggatagcaagcttccatgcatccctgtccatagctagctcttcggtgataccccaatccttcaggtctctctt

SEQ ID NO: 28333 - protein, 350 aa, Triticum aestivum
MDAGMRQSRVRFSGVGQEDQGSGQAMAMPPQRQRGTPFGRGEEYDAAYAATVAAVAYAIAAMEEEKLPSQQKPIPEKAASRQKRVTVHEPTAAPPPRSPPRRGGSMKRPTEGSKISRLFSGNKEIVEVGDEDERANVSVRRPVKPAPKKPGDLTPGQNVVGKVVDSVPNLKDDPSFTRKTPDKKRSRNFEQEEANQRAKPGVNPTTSFPGERKQSWKHEQEPANQRAPPAARPPGMVYSSEAERMAAAWEKEKLAKIKEQYNETMETIAEWETEKKAKARRQKEPKEGDSERKRAKALEEYNDEMKRISKVAAASRMSAEDKKRNAEGKVWEKAAKIRSTGKLPRSCGCF

SEQ ID NO: 28334 - protein, 346 aa, Triticum aestivum
MRQSRVRFSGVGQEDQGSGQAMAMPPQRQRGTPFGRGEEYDAAYAATVAAVAYAIAAMEEEKLPSQQKPIPEKAASRQKRVTVHEPTAAPPPRSPPRRGGSMKRPTEGSKISRLFSGNKEIVEVGDEDERANVSVRRPVKPAPKKPGDLTPGQNVVGKVVDSVPNLKDDPSFTRKTPDKKRSRNFEQEEANQRAKPGVNPTTSFPGERKQSWKHEQEPANQRAPPAARPPGMVYSSEAERMAAAWEKEKLAKIKEQYNETMETIAEWETEKKAKARRQKEPKEGDSERKRAKALEEYNDEMKRISKVAAASRMSAEDKKRNAEGKVWEKAAKIRSTGKLPRSCGCF

SEQ ID NO: 28335 - protein, 325 aa, Triticum aestivum
MAMPPQRQRGTPFGRGEEYDAAYAATVAAVAYAIAAMEEEKLPSQQKPIPEKAASRQKRVTVHEPTAAPPPRSPPRRGGSMKRPTEGSKISRLFSGNKEIVEVGDEDERANVSVRRPVKPAPKKPGDLTPGQNVVGKVVDSVPNLKDDPSFTRKTPDKKRSRNFEQEEANQRAKPGVNPTTSFPGERKQSWKHEQEPANQRAPPAARPPGMVYSSEAERMAAAWEKEKLAKIKEQYNETMETIAEWETEKKAKARRQKEPKEGDSERKRAKALEEYNDEMKRISKVAAASRMSAEDKKRNAEGKVWEKAAKIRSTGKLPRSCGCF

SEQ ID NO: 28336 - DNA, 1042 bp, Triticum aestivum
cttatctcctcgtctcgcaaaagcagagacagaagagagatcgattccgactaaaacctctcgccgccgacgaccaagctcggagacctattgacctagttcctgatgtcggacgccgatgattaccgttgcttcgttgggagtctgtcatggaacacaactgatgtggatctgaaggatgcgtttgggaaatttggtcgagttactgagaccaaggtggttcttgacaagttctctggccggtcacgtggctttggatttgtgacttttgatgacaagaaggccatggaagaagctgttgaggctatgaatggaattgatttggatggaaggaatattactgttgaaagagcacaacctcaaggttcaggcagggaccgtgatggagatcgagactatcgtggtggtggtgaccgctatggtggtggccgtgattttggtggcggtcgtggtggtggtcgtggtggcggcggtgattgctacaaatgtggcaagcctggtcattttgcaagggagtgcccttctggtgatggtggggacaggtatggtagcagggatgacaggtatagtagcagggatgacaggtatagtagtagggatgacaggtatggtggcagggatggtggaagggatgacaagtatggtggtagcaacggcagcagtcgctatgggcctgaccgtggtggtgatcgctattctggaagtcgtgatggaggaagccgcagcagtggtggcggtgatcgatacagccgtgacaggtctggaccgtatgatcgtcgcagccgagatgaatactgatcttgatggtggagattctgtctcaggtatgaaaggtattggataatactagtggtatgtttgctttatcacataaggcagcaaatggtttgctgttgtactctttatgagaagtttaatgcttttgttatccatgctgactagtgcttggtttaccaatgttcctacctggatttggcttgtaaccggttccttgggagcttcagtggattgcgttattttgtctgagtaatatttgggatcc

SEQ ID NO: 28337 - protein, 230 aa, Triticum aestivum
MSDADDYRCFVGSLSWNTTDVDLKDAFGKFGRVTETKVVLDKFSGRSRGFGFVTFDDKKAMEEAVEAMNGIDLDGRNITVERAQPQGSGRDRDGDRDYRGGGDRYGGGRDFGGGRGGGRGGGGDCYKCGKPGHFARECPSGDGGDRYGSRDDRYSSRDDRYSSRDDRYGGRDGGRDDKYGGSNGSSRYGPDRGGDRYSGSRDGGSRSSGGGDRYSRDRSGPYDRRSRDEY

SEQ ID NO: 28338 - protein, 177 aa, Triticum aestivum
MELIWMEGILLLKEHNLKVQAGTVMEIETIVVVVTAMVVAVILVAVVVVVVVAAVIATNVASLVILQGSALLVMVGTGMVAGMTGIVAGMTGIVVGMTGMVAGMVEGMTSMVVATAAVAMGLTVVVIAILEVVMEEAAAVVAVIDTAVTGLDRMIVAAEMNTDLDGGDSVSGMKGIG

SEQ ID NO: 28339 - protein, 172 aa, Triticum aestivum
MEGILLLKEHNLKVQAGTVMEIETIVVVVTAMVVAVILVAVVVVVVVAAVIATNVASLVILQGSALLVMVGTGMVAGMTGIVAGMTGIVVGMTGMVAGMVEGMTSMVVATAAVAMGLTVVVIAILEVVMEEAAAVVAVIDTAVTGLDRMIVAAEMNTDLDGGDSVSGMKGIG

SEQ ID NO: 28340 - DNA, 751 bp, Triticum aestivum
acaaaacggcccggactcgcctcctcctcctccccctcacaactcgccaacgccaaatccgcctccgccaccggccagccagagagcgagcgagcgattcgccgccgccgtcaagcctgcagggagcgagcccctctcgcctccaaacagcctcaccctcgcggcccccgtcccctcaaagtccccgcgtctcccgcgagaatcgcgcccgcccgcctagggtttccgccgccgccggagaggaggggagtgggaggaggggacgagatggccggacggctcctcgggcagctcctcgtcatgggcggcgccgtcgtcggcagggccgtggtccaggcctaccgccaggccatcgtcaatgcacagagaaccggagctgcccaggaagctgtgaatggtattcgaagggctagcaaggctatgaccgaacaagaagcccggcaaatattaggtatcagtgaaaagacgagttgggaagagattgtcaagaagtatgatacgatgtttgagaagaatgccaagagcggaagcttctatctccagtcgaaagtacaccgggccaaagaatgtctggagtccatataccatgataagcccgacataatgaactgaactgagatgggcagcgtttcgtctaatcgatcgattttgtcagtcgatgttctgtctgagctatgctgggctgctgcatcaggtcaaatttggttgtaacaggatgtttgttctgcttgactcgaataatatattcaac

SEQ ID NO: 28341 - protein, 203 aa, Triticum aestivum
TKRPGLASSSSPSQLANAKSASATGQPESERAIRRRRQACRERAPLASKQPHPRGPRPLKVPASPARIAPARLGFPPPPERRGVGGGDEMAGRLLGQLLVMGGAVVGRAVVQAYRQAIVNAQRTGAAQEAVNGIRRASKAMTEQEARQILGISEKTSWEEIVKKYDTMFEKNAKSGSFYLQSKVHRAKECLESIYHDKPDIMN

SEQ ID NO: 28342 - protein, 136 aa, Triticum aestivum
KTARTRLLLLPLTTRQRQIRLRHRPARERASDSPPPSSLQGASPSRLQTASPSRPPSPQSPRVSRENRARPPRVSAAAGEEGSGRRGRDGRTAPRAAPRHGRRRRRQGRGPGLPPGHRQCTENRSCPGSCEWYSKG

SEQ ID NO: 28343 - protein, 114 aa, Triticum aestivum; identical to SEQ ID NO: 15112

SEQ ID NO: 28344 - DNA, 1045 bp, Triticum aestivum
aggacatcaagcacctgagctccacatcgatcagtacccacggccactccactctcagctcagggactcggtgtcagggcgacccaagacagaagaatcggatccagaagaatcatggattccctgacggcgtcgacgacggcgaagcccaccctccgagtggccgcattctgcggctccctccgcaaggactcgtggcaccgcggcctcatccgcgccgcggaggagctttgcgaggagtccatcccggggctgcgcatcgaccacgtggacatctccggcctgcccatggtcaacccggacctggagaccgacggcggcaagggcttcccgccggccgtggaggcgctccgcgacagcgtccgcgccgcagactgcttcctcttcgcctcgcccgagtacaactactcggtcacagcgtccctgaagaacgcgctggactgggcgtcgaggggcaagcgcaactgctgggcggacagggcggcggcgatcgtgtgcgcggggggcgacttcggcggggccagggcgtcgctccacctccgccagatcggggtgttcctcgacctccacttcatcaacaagccggagctccacgtgagggcgtttgcggagccgcccaagttcgacgaggaggggaacctcatcgacgccgagaccagggagcggctcaggaaggtgctcctctcgctccaggccttcgcgctcaggctccagcacaacatggacgactgactgactcaagatcgatcgatgatacctggctctgtgtaccgtgcgcgctggttaatttgcattgcccttcagtttgacgacgttgtgctctatgcactagtattcgtggttccgtgagaagtctgtgctacctttgtgtaataaagcgccgaagcgtgcaaaaaaaaaaagtaataaatcgccgaagaattgcactgtaaaaaaaagaacgtgtgcgtgcgtatgtgttttaccgatgctactagtagaacgcaagggcgcatcggctacgttgagaaaacaatagaactgttgaagaaattgatattgtcgt

SEQ ID NO: 28345 - protein, 268 aa, Triticum aestivum
DIKHLSSTSISTHGHSTLSSGTRCQGDPRQKNRIQKNHGFPDGVDDGEAHPPSGRILRLPPQGLVAPRPHPRRGGALRGVHPGAAHRPRGHLRPAHGQPGPGDRRRQGLPAGRGGAPRQRPRRRLLPLRLARVQLLGHSVPEERAGLGVEGQAQLLGGQGGGDRVRGGRLRRGQGVAPPPPDRGVPRPPLHQQAGAPREGVCGAAQVRRGGEPHRRRDQGAAQEGAPLAPGLRAQAPAQHGRLTDSRSIDDTWLCVPCALVNLHCPSV

SEQ ID NO: 28346 - protein, 205 aa, Triticum aestivum
MDSLTASTTAKPTLRVAAFCGSLRKDSWHRGLIRAAEELCEESIPGLRIDHVDISGLPMVNPDLETDGGKGFPPAVEALRDSVRAADCFLFASPEYNYSVTASLKNALDWASRGKRNCWADRAAAIVCAGGDFGGARASLHLRQIGVFLDLHFINKPELHVRAFAEPPKFDEEGNLIDAETRERLRKVLLSLQAFALRLQHNMDD

SEQ ID NO: 28347 - protein, 147 aa, Triticum aestivum
MVNPDLETDGGKGFPPAVEALRDSVRAADCFLFASPEYNYSVTASLKNALDWASRGKRNCWADRAAAIVCAGGDFGGARASLHLRQIGVFLDLHFINKPELHVRAFAEPPKFDEEGNLIDAETRERLRKVLLSLQAFALRLQHNMDD

SEQ ID NO: 28348 - DNA, 1154 bp, Triticum aestivum
agcctctccgagaggccaagcagaaatggcggcttcctgcacgctcaccgtccccgcccccttcgccgccgcctcctcctcctcctccacttcagcccgtcgctacaggcgattcggggtggttgccatggcgagcgcggggcagaaggtgtacgctcccggcgtggccgtctccgagggcaacggcggcctgcccaagatcagcctcaaatccccgcacgggagtgaggctgagatttatctgtttggagcatgcgtcacgtcttggaaggttcccaatggaaaggatctgctctttgtcagaccagatgctgtgttcaacggccagaaacccatcagcggtggaattccacattgttttccccagtttggccctggccccatgcagcagcatggattcgcaaggaatgtgaattggtctattactgattcagaagtcacagaaggagatccaactgtaactttggaactaaaagacgactcatacagccgttcaatgtgggattttagtttccaagctttatacaaggttgtgctgcactctacaagcctgtcaacgaccctcaaaataataaatacagacgataaacctttctcattcacctcagccctccacacttatttcagtgcttccattgctggtgtttcagtgaaaggtctcaaaggtagcaagactctcaataaggatcctgaccctaaaaatcctctggagggcaaagaagaaagggacgaggtgacctttccaggatttgtggactgtgtttaccttggcgcaccgagtgagcttaccctcgacaatggattgggtgacaaaattgtaatctcaaacacaaactggtcagatgcagtgttgtggaatcctcatttgcagatggaggcatgctacaaagattttgtttgtgttgaaaatgcaaagattgaaacagtacaactgggtccaaaagaatcttgggtggcagagcagaaaattgaacttatctgaagctaatgggttgagaacagtacagtgcggcgagtatgttgtcaaaggacctttttatgtgtctgccaatgtaaacatgtgccattccccaatgtacttcaacttatgccctcacatgagatgtacatcttataactattttatgttttatgagtaaataagtatttcagtc

SEQ ID NO: 28349 - protein, 326 aa, Triticum aestivum
ASPRGQAEMAASCTLTVPAPFAAASSSSSTSARRYRRFGVVAMASAGQKVYAPGVAVSEGNGGLPKISLKSPHGSEAEIYLFGACVTSWKVPNGKDLLFVRPDAVFNGQKPISGGIPHCFPQFGPGPMQQHGFARNVNWSITDSEVTEGDPTVTLELKDDSYSRSMWDFSFQALYKVVLHSTSLSTTLKIINTDDKPFSFTSALHTYFSASIAGVSVKGLKGSKTLNKDPDPKNPLEGKEERDEVTFPGFVDCVYLGAPSELTLDNGLGDKIVISNTNWSDAVLWNPHLQMEACYKDFVCVENAKIETVQLGPKESWVAEQKIELI

SEQ ID NO: 28350 - protein, 318 aa, Triticum aestivum
MAASCTLTVPAPFAAASSSSSTSARRYRRFGVVAMASAGQKVYAPGVAVSEGNGGLPKISLKSPHGSEAEIYLFGACVTSWKVPNGKDLLFVRPDAVFNGQKPISGGIPHCFPQFGPGPMQQHGFARNVNWSITDSEVTEGDPTVTLELKDDSYSRSMWDFSFQALYKVVLHSTSLSTTLKIINTDDKPFSFTSALHTYFSASIAGVSVKGLKGSKTLNKDPDPKNPLEGKEERDEVTFPGFVDCVYLGAPSELTLDNGLGDKIVISNTNWSDAVLWNPHLQMEACYKDFVCVENAKIETVQLGPKESWVAEQKIELI

SEQ ID NO: 28351 - protein, 284 aa, Triticum aestivum
MASAGQKVYAPGVAVSEGNGGLPKISLKSPHGSEAEIYLFGACVTSWKVPNGKDLLFVRPDAVFNGQKPISGGIPHCFPQFGPGPMQQHGFARNVNWSITDSEVTEGDPTVTLELKDDSYSRSMWDFSFQALYKVVLHSTSLSTTLKIINTDDKPFSFTSALHTYFSASIAGVSVKGLKGSKTLNKDPDPKNPLEGKEERDEVTFPGFVDCVYLGAPSELTLDNGLGDKIVISNTNWSDAVLWNPHLQMEACYKDFVCVENAKIETVQLGPKESWVAEQKIELI

SEQ ID NO: 28352 - DNA, 1416 bp, Triticum aestivum
cgaagtcccaaatcaatccatttcatttcggtttcgaatcccctggggacgagctcgcgtcgccttccctctccgcccgccccgtcgccatccgccccttcgaatctgcagggcggcgccgcctggcctcgttgtcgccacgggaggcgcgcgggatggggcggttgtttgcggtggacgccgcggcggcctcgtcggccgcggccgcggcggcgctgaacggcgcggtggactggtggaaagacgtgaacgactcgccgatgtggcaggaccgcatcttccacgccctcgccgtgctctacggcatcgtctccgtcgtcgcgcttgtccaattgatcagaatcgagtgtagggtgcccgagtacgggtggacgacgcagaaggtgttccatttccttaacttcatcgtgaatggcgtgcgggctatcgtatttgtgctgcggcgaaacgtgcagctgatacaaccagagatacttcaacatgtggttcttgacatgcctgggcttgcgttcttcactacatacgcgcttttggtgctattctgggccgatatttactatcaggcacgtgcgatgtcgactgatgggctgaggccaactttctattggatcaatggggtggtgtatgcaattcagataattctgtggttggttttgtggtggaaaccagttcgaattatggtcatattgtccaagatgttctttgcaggcgtatcactgtttgcagcttttgggttccttctgtatggtgggaggctattcctcatgttgcaacgttttcccgtagaatcaaaaggaagacggaagaaattgcaggaggttggctatgtcactaccatctgctttacttgtttcttgatcagatgtgtcatgatgtgtctcaatgcatttgataaagcagctgatcttgatgttctgagccatccgattctgaatttcttttattacctgctggtcgagatcgtaccttcagctatggttctgtttatactaaggaaactgcccccaaaacgtgggatcacgcagtaccatcctatccattagagcagagcagccctggtaccaggctggtacagacgaatgctccttacagagttcgtaaatacatgagaggcaatgtgaagatcaccgcacttgcactgaagcttgcccaggttttaaatgaggaagcctttaggatttcaggttactattgcttgtaaaagagatttgcaatgtagttcaaaaaaagaagagatttgcaatatcatgctgtttacaggtctagaaaaatgcaagttttatataatgtatgtatacctttgttcttctcagtactttcaccctgtagtctgcaccgcgcgacagcaatcacggctggaatcgcatatttgatttttgactgtttaaacacaataaagttggaactggagggggg

SEQ ID NO: 28353 - protein, 346 aa, Triticum aestivum
KSQINPFHFGFESPGDELASPSLSARPVAIRPFESAGRRRLASLSPREARGMGRLFAVDAAAASSAAAAAALNGAVDWWKDVNDSPMWQDRIFHALAVLYGIVSVVALVQLIRIECRVPEYGWTTQKVFHFLNFIVNGVRAIVFVLRRNVQLIQPEILQHVVLDMPGLAFFTTYALLVLFWADIYYQARAMSTDGLRPTFYWINGVVYAIQIILWLVLWWKPVRIMVILSKMFFAGVSLFAAFGFLLYGGRLFLMLQRFPVESKGRRKKLQEVGYVTTICFTCFLIRCVMMCLNAFDKAADLDVLSHPILNFFYYLLVEIVPSAMVLFILRKLPPKRGITQYHPIH

SEQ ID NO: 28354 - protein, 295 aa, Triticum aestivum
MGRLFAVDAAAASSAAAAAALNGAVDWWKDVNDSPMWQDRIFHALAVLYGIVSVVALVQLIRIECRVPEYGWTTQKVFHFLNFIVNGVRAIVFVLRRNVQLIQPEILQHVVLDMPGLAFFTTYALLVLFWADIYYQARAMSTDGLRPTFYWINGVVYAIQIILWLVLWWKPVRIMVILSKMFFAGVSLFAAFGFLLYGGRLFLMLQRFPVESKGRRKKLQEVGYVTTICFTCFLIRCVMMCLNAFDKAADLDVLSHPILNFFYYLLVEIVPSAMVLFILRKLPPKRGITQYHPIH

SEQ ID NO: 28355 - protein, 260 aa, Triticum aestivum
MWQDRIFHALAVLYGIVSVVALVQLIRIECRVPEYGWTTQKVFHFLNFIVNGVRAIVFVLRRNVQLIQPEILQHVVLDMPGLAFFTTYALLVLFWADIYYQARAMSTDGLRPTFYWINGVVYAIQIILWLVLWWKPVRIMVILSKMFFAGVSLFAAFGFLLYGGRLFLMLQRFPVESKGRRKKLQEVGYVTTICFTCFLIRCVMMCLNAFDKAADLDVLSHPILNFFYYLLVEIVPSAMVLFILRKLPPKRGITQYHPIH

SEQ ID NO: 28356 - DNA, 994 bp, Triticum aestivum
ctcgcccggccccacctctcagtcctcaccccgccccctccattcgcccccctcccgccgaccagagaggcagctcgccgccgacgagatctgagggctccggaggtcggatcccggtcacccaaaggcaggcggagatgaatctgtttcggctcgccggggacatgacccacctcgtcagcgtggtggtgctgctcctcaagatccacacaatcaagtcgtgcgcaggcatatccctgaagacgcaggagctatatgcactagtttttgcagctcgctacctggacctgtttgtgcattttgtatctttgtataacaccgtcatgaagctggtcttcctggcgagctctttctcgatagtttggtacatgaggaagcataagatcgtgcgtaggacctatgacaaggagcacgacacctttcgccatcatttcatagtgctgccatgtttggttctggctttcctcattaatgagaggttcaccttcagagaggtgatgtgggcattctccatttacttggaagctgtagcaattctgcctcaacttgtgttgctacagcgcacaaggaatatcgacaacttgactggccaatatgtcttctttttgggtgcctaccgcgtactttatatcctcaactggatttaccgatacttcactgagccccattttgttcactggataagctggattgcgggtatcgtgcagactatgctgtatgctgacttcttctactattacataataagctggaagaacaacgtgaagctagagctaccagcctgagctcgctgtttccttccaagatagactaggtattacggcttgcttaacttaatgggtagacaggaaagatatggatcatatgatacagatgtgcgttttgggtccctggtttttcttgtttccttccaatgttttcggaggtgaaagctaggttcgccttgtatcttgtaaggtaatataaggaggttgtgtacttgtgatactgtttg

SEQ ID NO: 28357 - protein, 260 aa, Triticum aestivum
RPAPPLSPHPAPSIRPPPADQRGSSPPTRSEGSGGRIPVTQRQAEMNLFRLAGDMTHLVSVVVLLLKIHTIKSCAGISLKTQELYALVFAARYLDLFVHFVSLYNTVMKLVFLASSFSIVWYMRKHKIVRRTYDKEHDTFRHHFIVLPCLVLAFLINERFTFREVMWAFSIYLEAVAILPQLVLLQRTRNIDNLTGQYVFFLGAYRVLYILNWIYRYFTEPHFVHWISWIAGIVQTMLYADFFYYYIISWKNNVKLELPA

SEQ ID NO: 28358 - protein, 215 aa, Triticum aestivum
MNLFRLAGDMTHLVSVVVLLLKIHTIKSCAGISLKTQELYALVFAARYLDLFVHFVSLYNTVMKLVFLASSFSIVWYMRKHKIVRRTYDKEHDTFRHHFIVLPCLVLAFLINERFTFREVMWAFSIYLEAVAILPQLVLLQRTRNIDNLTGQYVFFLGAYRVLYILNWIYRYFTEPHFVHWISWIAGIVQTMLYADFFYYYIISWKNNVKLELPA

SEQ ID NO: 28359 - protein, 206 aa, Triticum aestivum
MTHLVSVVVLLLKIHTIKSCAGISLKTQELYALVFAARYLDLFVHFVSLYNTVMKLVFLASSFSIVWYMRKHKIVRRTYDKEHDTFRHHFIVLPCLVLAFLINERFTFREVMWAFSIYLEAVAILPQLVLLQRTRNIDNLTGQYVFFLGAYRVLYILNWIYRYFTEPHFVHWISWIAGIVQTMLYADFFYYYIISWKNNVKLELPA

SEQ ID NO: 28360 - DNA, 1815 bp, Triticum aestivum
accaagcaaagcatccaaccatcagatatgcatatgaccagacctgaccaattgtgcgagatgtttctttgttcagataactataacaggaatggttctacctctagggccatacgaaaacccctctaaactggatatcacatccagccaaccactacaacagagctccaattaaacacccacgggctgtgcacacacagacgtcgcatatcagaatttcaaccacttcttctccttctccttcctggcgaccgcgttggtggccgaggcgtgcgtcgcctcggcgtcggcgagcgccttccgcgtctgctccagcttcctcgacgccgcatcatgcaccgccttgtccttgcggttgcgctgcaccatctcctccagccgcccgacctggctccgcagctccttcacctcgtcgtcgtacgcgagcagagaccttctgttgtcttctttcttgggatgcccattggcctgacccgatggcgactctttcctggccttggcggccgaggagccttctgacgtgtcctggctcaccagctggctgttcatgaagctaaagacggacctctccgcctcctcggccttggcggccctggtcagctccgcaaacttccggtcgcgcttcctttgcccgccccggctgcgcttcttgtctttctcacggtgtatgcttcggccgtcctcgcctgtggttgcagcgaccgcgtggtcgagtgattgcttggccggtagtaccttgactgggattggatcgagcatgccttggccggacacgcctagccccatgccctcccggtaacccatttttgccatcattttggaggcgacgcccctggtgtgctgttcccattttgcaaagatcacggtctcagactgaacaccagttaaatttgtggtttccaaacggccaagaccctgatggatggattcatcctcttgatcgccatcttcacttaactcagattcatcctcacttgagcctctttcatcatcttccccgctcacatcagcatattctgggatagaaagggaatcacccggaagcgttgcagtgctcccatcatcttgaaagaccacctgaccacgcttcaactcatcatcccacgactcaagttcagctctcctccaaaggccagaatggtgcccagaagctgccagtatgctggatcctgccaaggactgtcgccatgcagttggagtgaaccgtttcaaggatgaagtaggaatcacaacaccatgggacaagcggcagttattagcaaaccgacaccgttgctgcagaaagaacttgcacatcgacattttttctgatgtgggtgtcagaaatgagacccgtgcattgcctgaaccttcaagtcccagaatgcatccattataccaacgcccatcattgtgcctgaatctacactttgatccgactgaaaattcctgtggctccaatggttgtggctcaacatcatgtggatctaatggctcaatagcagcttcagttgatagcgatgctgactcctgatttggaaagatctcatcgatttgcttcactagcctagaacgcttcaaatgcagaagcccttcctctgcatccttaatcgcagacagaagttccccgtgcacctcgaggaggtccgcgttggaggcgtcggcggcgagggcctcgtcgacggcggcgagggaggaccgctgctcctccaggtgctgttccagctgcagctcgatctccgccgcctcgtcctcctccccctcgcccgccatggctcaccggtccaggcagcggtcggtcgggagaagagagaagggccgacgatttcgatgggt

SEQ ID NO: 28361 - protein, 117 aa, Triticum aestivum
MLDPAKDCRHAVGVNRFKDEVGITTPWDKRQLLANRHRCCRKNLHIDIFSDVGVRNETRALPEPSSPRMHPLYQRPSLCLNLHFDPTENSCGSNGCGSTSCGSNGSIAASVDSDADS

SEQ ID NO: 28362 - protein, 85 aa, Triticum aestivum
MQKPFLCILNRRQKFPVHLEEVRVGGVGGEGLVDGGEGGPLLLQVLFQLQLDLRRLVLLPLARHGSPVQAAVGREKREGPTISMG

SEQ ID NO: 28363 - protein, 83 aa, Triticum aestivum
MKLKTDLSASSALAALVSSANFRSRFLCPPRLRFLSFSRCMLRPSSPVVAATAWSSDCLAGSTLTGIGSSMPWPDTPSPMPSR

SEQ ID NO: 28364 - DNA, 1156 bp, Triticum aestivum
cattatttcaccatcgagcacacacacacgccgcggccagaaatagcaatggagggaggggagagcaacggcaagagggcgagtgcagaggaagtgaagtcagagccagaggaaggagaggtgctgatgatgctgcaggacggcggcgaaggaggcggcgcgttggtggcggcggaatccatggcgccggcgcagatcgacgtgaggatggacctgacgctgctccactgccagggctgcctcctccccctcaagccccccgtcttcaagtgcgaggccgccgggcacgtcgtgtgctaccactgccgcgccgtccacggcacgatctgcagccgcgccagcacgcactgcggcgagctggacgccgtggtgggcgccgccaaggtgccgtgcccctacagggcgttcggctgcgagcggcacgtcgtgtaccacgaggccgcggaccaccagcgcgcgtgccactgcgcgccctgctcctgcccggacccggcgtgcgcattcgcgggctcccgcgcggcgctccttgaccacttcgcggccgtccaccggcgccccgccgccacggtccgctacggccgggcccgggacctcggcctctccgtgtcgggctgctggcacgcccctcgtcggggaggaggacggcagcgtgttcctcgtgtccctgggcccgctcggcgcggccaccgccgtgtcgctggtgtgcgtccggccggacggcgaggcggcgccgcagttctggtgcaagctctccgtggagcgcctgggcggcgacaacagggacaggctggtcctcatggcctcggcggtgagcagcagcgcgctgtccaccggcgcgccggcgccggggcaggggatgttcttggccgtgccccaggagctgctctccggcgacacgctcacgctcaccgtccgcattgatctgatccgacctgccgccgcggccgccgctcccaagtcgacaacaccacagcctaggacggctaggaggatgcagtgaagtatgcggcccacgatcttctgcactgtgcatgttatgtctatgagactatgagctgtggaggtagtactagtaatgcagctactggtttgtacttagtacttatttgatacgtatgagtgagtgcaaccaattgaagataatttggagatcctg

SEQ ID NO: 28365 - protein, 306 aa, Triticum aestivum
HYFTIEHTHTPRPEIAMEGGESNGKRASAEEVKSEPEEGEVLMMLQDGGEGGGALVAAESMAPAQIDVRMDLTLLHCQGCLLPLKPPVFKCEAAGHVVCYHCRAVHGTICSRASTHCGELDAVVGAAKVPCPYRAFGCERHVVYHEAADHQRACHCAPCSCPDPACAFAGSRAALLDHFAAVHRRPAATVRYGRARDLGLSVSGCWHAPRRGGGRQRVPRVPGPARRGHRRVAGVRPAGRRGGAAVLVQALRGAPGRRQQGQAGPHGLGGEQQRAVHRRAGAGAGDVLGRAPGAALRRHAHAHRPH

SEQ ID NO: 28366 - protein, 290 aa, Triticum aestivum
MEGGESNGKRASAEEVKSEPEEGEVLMMLQDGGEGGGALVAAESMAPAQIDVRMDLTLLHCQGCLLPLKPPVFKCEAAGHVVCYHCRAVHGTICSRASTHCGELDAVVGAAKVPCPYRAFGCERHVVYHEAADHQRACHCAPCSCPDPACAFAGSRAALLDHFAAVHRRPAATVRYGRARDLGLSVSGCWHAPRRGGGRQRVPRVPGPARRGHRRVAGVRPAGRRGGAAVLVQALRGAPGRRQQGQAGPHGLGGEQQRAVHRRAGAGAGDVLGRAPGAALRRHAHAHRPH

SEQ ID NO: 28367 - protein, 264 aa, Triticum aestivum
MMLQDGGEGGGALVAAESMAPAQIDVRMDLTLLHCQGCLLPLKPPVFKCEAAGHVVCYHCRAVHGTICSRASTHCGELDAVVGAAKVPCPYRAFGCERHVVYHEAADHQRACHCAPCSCPDPACAFAGSRAALLDHFAAVHRRPAATVRYGRARDLGLSVSGCWHAPRRGGGRQRVPRVPGPARRGHRRVAGVRPAGRRGGAAVLVQALRGAPGRRQQGQAGPHGLGGEQQRAVHRRAGAGAGDVLGRAPGAALRRHAHAHRPH

SEQ ID NO: 28368 - DNA, 1379 bp, Triticum aestivum
acgtcttctccttctctaccttctccccatcaagaacccaatccaaacctcagcttcgaacgaatcccaagcgattccccaagaggtttcattttgcgtcagatcaagcccagaatccgccactacccgccgagtgaagtagagcggcgagcggcgaggagggaccatggcgtcgttgccagaggaggaggaggccttcgagcacacgctgctggtggtgcgcgaggtgtcggtgttcaagatcccgccgcgcaccaccagcggcggctacaagtgcggcgagtggctgcagacggacaagatctggacgggccgcctccgcgtggtgtcgtgcggcgaccgctgcgagatccggctcgaggacccgggctccggggacctcttcgccgcctgcttcgtgctgcccggccagagggacagcgccgtcgagaccgtgctcgactcgtcgcgctacttcgtgctccgcatcgaggacggcagggggaagcatgccttcgtcggcctgggcttcggcgagcgcaatgaggccttcgacttcaacgtggccctgtcggatcacgagaagtatgtcaagagggagcaagataaggagaccggtggcgaggaggcagacgacagccagattgacatccacccggcagtgaatcgccggctcaaggaaggtgaaaccattaggataaacgtgaaaaacaagccatcaactggaagtggcatgctttcctctgctggcttatctggtggggccactgaaaaacctaaagcaagcatgcttcttgcaccaccgccaggtgcaaccgggaagcttcggtctccgctcccacctccccctaatgactctgcatctgcaagaatgagttctggacccaatgctggaaccagggcctcaaaagaacctaccaagaaaagcatcgaccccttttcagatatttctgctatagagcgaagcctaccctcgtctactgaactgggacaaacaaaaagcaccggtgccggatgggcagcattttgacaacagaatgccatctgctgtgtcacagacaaagaaaattgtgtgactgaaaaagtacacaaaatttctactcactggagcttgtaccctatgaaatcacatggtgaaaaatgacgatctgcatccacttggtacttgaaaaataaacctttggggaggtgctgttatctatcaaggcatcaacccgcatggattcagggagcttcgaaagtctgaatattttcctgaatagaagtgtgggtttccttgtttgtcatatttgtgtttgccagatctcatatactgatacaagaatcatactgacctccacttgtatttctgtcctgaaagattcgagagtactgtttatgcgaaaagcttgttttattct

SEQ ID NO: 28369 - protein, 280 aa, Triticum aestivum
MASLPEEEEAFEHTLLVVREVSVFKIPPRTTSGGYKCGEWLQTDKIWTGRLRVVSCGDRCEIRLEDPGSGDLFAACFVLPGQRDSAVETVLDSSRYFVLRIEDGRGKHAFVGLGFGERNEAFDFNVALSDHEKYVKREQDKETGGEEADDSQIDIHPAVNRRLKEGETIRINVKNKPSTGSGMLSSAGLSGGATEKPKASMLLAPPPGATGKLRSPLPPPPNDSASARMSSGPNAGTRASKEPTKKSIDPFSDISAIERSLPSSTELGQTKSTGAGWAAF

SEQ ID NO: 28370 - protein, 174 aa, Triticum aestivum
TSSPSLPSPHQEPNPNLSFERIPSDSPRGFILRQIKPRIRHYPPSEVERRAARRDHGVVARGGGGLRAHAAGGARGVGVQDPAAHHQRRLQVRRVAADGQDLDGPPPRGVVRRPLRDPARGPGLRGPLRRLLRAARPEGQRRRDRARLVALLRAPHRGRQGEACLRRPGLRRAQ

SEQ ID NO: 28371 - DNA, 736 bp, Triticum aestivum
aaaggacaagagcgcaaaaccccaccacggaccctcgccgtcgctgtctccgtctcccatctcgccggcgctagctagggcaccggtcgccctccccctccgacgatgtcgacgccctctgatccagcggcgtccgcccagcccccctccaccgcggccacctccagcagcggcctcaccttcaagctccaccccctcgtcatcgtgaacgtctccgaccactacacccgcgtcaaggcccaggcctccttccccgccgaggccccgtcgccgggcaaggcgcaggcctcctgctccgccgaaggctccccgccccccgcggagccgccgagagtcttcgggtgcgtgatcggggtgcagcgcggccggacggtcgagatcttcaacagcttcgagctcgtcctcgaccccgtcaccggcacgctcgagcgcgccttcctggagaagaagctcgagctctataagaaggtgttccctgagttctatgtgttgggctggtactctactgggagcgatgtgcaggatactgacatcctaatccacaaggctctgatggacattaatgaaagccctgtttatcttctcttggatcctgcaatcaaccactcccagaaggatctacctgtgacaatttatgagagtgagttgcatgttatcgatgggggcccccagctcatctttgtcaaatcaaattacacaattgagactgtagaagcagagaggatatctgtagatc

SEQ ID NO: 28372 - protein, 210 aa, Triticum aestivum
MSTPSDPAASAQPPSTAATSSSGLTFKLHPLVIVNVSDHYTRVKAQASFPAEAPSPGKAQASCSAEGSPPPAEPPRVFGCVIGVQRGRTVEIFNSFELVLDPVTGTLERAFLEKKLELYKKVFPEFYVLGWYSTGSDVQDTDILIHKALMDINESPVYLLLDPAINHSQKDLPVTIYESELHVIDGGPQLIFVKSNYTIETVEAERISVD

SEQ ID NO: 28373 - DNA, 1193 bp, Triticum aestivum
accttcccgtcgtctccctccccaacgccgcggcgaactgacccaccacccccaaaccctcgccgccgatggagcagccgccgtcctcgccgccgccccccgcggcggccacggccacggctgcgcctacacccgctcccgctccctcttccgctcccattatcctctcggactcgcctcccgcggccgcggcgggggagcccgcgctgaccgccgcacagaaggcgctccgctccaagccggcgcgcgcccccgaggaccccgacaagaagaataagaagctcaaggatgtggagatcagttttccaattgtttatgggaccatttcgttttggcttggcaaaaaagcaagcgagtacaactctcacaaatggaccgtgtacatccgttctgcaacaaatgaggatctgagtgtcatagttaagcgtgtggtgtttcagcttcacccaagtttcactaatccaacaagagttgtagagcaaccgccttttgagttgtccgaatctggatggggggagtttgagattgcaataaccctttattttcacagtgatgtctgcgagaagcgcttggacttgtttcatcagcttaagttgtatccggaagaggacgctggacctcaatcaacaaaaaaaccagttgtagtggagacatacgatgaagttgtcttccctgagcccactgaagccttcttcttgcgagtgcaaaatcaccctgctgctactgtgcccaggctacctcctggtataacattgtcttctccaggtcctatggaacttatgccacatgataagaagcgttttgacaccaaggatcattctctgagccagtggttctcaaacttctctgaagcagatgaactattaaaactggctgctgctcgtcaacaggtgcaggctcacattgctaagctgagaaggcagctaagcatgatagagggaatgccccagcaatccagagttatctctggtcctggtcaacagtttgggcacggctaatggaacggtagctgctgtaaggaagatgctgaaacctgataacaactcgctaacagaatgtgatgaatgtgtcttcattgacgtcttaggctcgcaattgatgtttagtgctggccagtgtgcataaagcgcaacctatggattgtaccgcctttgtgcattttgaaatcaacgggagcatggtgtacctgcctc

SEQ ID NO: 28374 - protein, 309 aa, Triticum aestivum
MEQPPSSPPPPAAATATAAPTPAPAPSSAPIILSDSPPAAAAGEPALTAAQKALRSKPARAPEDPDKKNKKLKDVEISFPIVYGTISFWLGKKASEYNSHKWTVYIRSATNEDLSVIVKRVVFQLHPSFTNPTRVVEQPPFELSESGWGEFEIAITLYFHSDVCEKRLDLFHQLKLYPEEDAGPQSTKKPVVVETYDEVVFPEPTEAFFLRVQNHPAATVPRLPPGITLSSPGPMELMPHDKKRFDTKDHSLSQWFSNFSEADELLKLAAARQQVQAHIAKLRRQLSMIEGMPQQSRVISGPGQQFGHG

SEQ ID NO: 28375 - DNA, 773 bp, Triticum aestivum
acgacgaggctccccacaattccctcctcctgcgaacgcatcgtatcccaagaaaccaagaaacagagcaagaaatatcatagagggagcagagtacagagagagaaagagggataagcgcttgcttgctgggagagccatggatgagatcatgaacaagatgggctcctactggctggggcagagggccaacaaagagatgtcgtcggccggtgacgacatcgagtcgctctcaaccagtgtcggggacggagcaaaatggctggtaaacaagctcaagggtaagatgcagaagccgctggcggagctgctccaggagcacgaccttccggcggggctgttcccgcgggaggccaccaactacgagttcgagccggagacgcggcggctgacggtgcacatcccggcggtctgcgaggtcggctacagggacggctccgagctgcgtttcgacaccacggtgaccggcacgctggacaagggcagcctgacgggggtggagggcctcaaagccaaggtgctcgtctgggccagggtcaccgccgtcaaggccgacgccgcaaaggtctacttcgccgtaggcatcaagaagtcgcgcagccgcgaggcatacgaggtcgtcagaggcgccatcaccgtcgacgagttctagattctagtcgcgcgctcgccgagatgattattctaccgaaataattgatcatgtgctcacactacctgctgtaagaggaggatgcttgtaaatggggattcataattcagtttcgcagctc

SEQ ID NO: 28376 - protein, 216 aa, Triticum aestivum
RRGSPQFPPPANASYPKKPRNRARNIIEGAEYRERKRDKRLLAGRAMDEIMNKMGSYWLGQRANKEMSSAGDDIESLSTSVGDGAKWLVNKLKGKMQKPLAELLQEHDLPAGLFPREATNYEFEPETRRLTVHIPAVCEVGYRDGSELRFDTTVTGTLDKGSLTGVEGLKAKVLVWARVTAVKADAAKVYFAVGIKKSRSREAYEVVRGAITVDEF

SEQ ID NO: 28377 - protein, 170 aa, Triticum aestivum
MDEIMNKMGSYWLGQRANKEMSSAGDDIESLSTSVGDGAKWLVNKLKGKMQKPLAELLQEHDLPAGLFPREATNYEFEPETRRLTVHIPAVCEVGYRDGSELRFDTTVTGTLDKGSLTGVEGLKAKVLVWARVTAVKADAAKVYFAVGIKKSRSREAYEVVRGAITVDEF

SEQ ID NO: 28378 - protein, 166 aa, Triticum aestivum
MNKMGSYWLGQRANKEMSSAGDDIESLSTSVGDGAKWLVNKLKGKMQKPLAELLQEHDLPAGLFPREATNYEFEPETRRLTVHIPAVCEVGYRDGSELRFDTTVTGTLDKGSLTGVEGLKAKVLVWARVTAVKADAAKVYFAVGIKKSRSREAYEVVRGAITVDEF

SEQ ID NO: 28379 - DNA, 675 bp, Triticum aestivum
gtccgactagggtttaccctgcctttgcgccgccccccgacctcggtataacccgccgtccccagaaaccttcggcgcagaacgcaccgtaaccaccgggcaccatcgaattcttgcaaggcaagcaaggcgaattcggcatggactccttctcgtcgccgtcgatgtcgtcgtcagggtcgtcccccaacccggaggcgctcatggagcagatcaaggcgcagctcgcgcaggcctatgcccaggagcttcttgagaccgttgggaacaagtgctttgcaaagtgtgtgaccaagccaggatcaagcctgagcggaagcgagagcagctgcgtgtcacgctgtgttgatcgttacattgaggcaactggcatcgtcggccgggctttgttcagtcaccgttaagaagctgggtagtgatgagatgaggtgaactggtaatatgaggcgagcttttgtctagagtcttgtgtggtcagaatacagtaacagttgctactcaggtcgtcatgcagtgtttggttgggtcgggacgctccatattttcattgcgccattgtaggtttgcgaaagaaacaggatgtatttgagtggtgaaggtcttttggttaaacttgttctaatattatttttttctgagtaaaaaaaaaaaaaaaaaagcttatcgataccgtcg

SEQ ID NO: 28380 - protein, 87 aa, Triticum aestivum
MDSFSSPSMSSSGSSPNPEALMEQIKAQLAQAYAQELLETVGNKCFAKCVTKPGSSLSGSESSCVSRCVDRYIEATGIVGRALFSHR

SEQ ID NO: 28381 - protein, 79 aa, Triticum aestivum
MSSSGSSPNPEALMEQIKAQLAQAYAQELLETVGNKCFAKCVTKPGSSLSGSESSCVSRCVDRYIEATGIVGRALFSHR

SEQ ID NO: 28382 - protein, 66 aa, Triticum aestivum
MEQIKAQLAQAYAQELLETVGNKCFAKCVTKPGSSLSGSESSCVSRCVDRYIEATGIVGRALFSHR

SEQ ID NO: 28383 - DNA, 1262 bp, Triticum aestivum
attttctcagaaaaccactacattctgcctctccgttctgttcttgccttgttctatttttcggctctgctgtacatggcgtcggctgcaggtgaggggaggagccgggtgctggtgataggcggcaccggctacatcggccgcttcatcgtcgccgccagcgcacgcgagggccaccccaccgccgtcctcgtccgcgacgccgcgcccgccgacccagccaaggccgccgtcctccagggattccgggatgccggcgtcgccatcgtcgagggtgatatgtatgatcatgagagcctggtgacagccattaaatcagcagatgttgtgatctcggccgtgggttatcaacagctaccggatcaaactctcattatctcggcaattaaggaagttgggcatgtaaagagattcttcccatcagagtatggtaatgatgtggatcgtaaccatgcagttgaacctgcaaagacagtattcggtgggaaagctcgtataaggcgtgccattgaggctgagggaattccctacacatatgtctcttccaacttctttgctggtcgtttcttgcgaagccttgcgcagattggggtcacggagcctccaactgagaaggttctcattatgggtgatggaaatgtaaaaggagtctttacggcggaagaagacgtgggaacctacactattaaagctgtagatgatccaaggaccctgaacaaaatcctgtatctgaggccaccaagcaacactttgtcccataacgagcttgtctcactctgggagaagaaacttggtaagacacttgagagggtgtacctcccagaagacgaactcctgaagaagattcaagggccgctgagtgtaccactggcaatcagccactctgtctggttgaagggggaccacactaactttgagatcgacccatcatttggagttgaagccactcagctttaccctgatgtgccttacattaccgtggatgaatacctaaataggttcctttaaactcctaaatcctatcgtccccaatattcatatactttgaataaatgttggaggttgtgtatttttattagaatggcacgtgaattacgtaatagtgtgagacctcaatcatgtgaggaatgcatcttgcattcccttgagcttagaatatataaaccgaggttgtataaatttggaaattttagcttgatggaacatgataccgtatgtaacagcccgggggtttacgccaaattagaaattgtttgttattt

SEQ ID NO: 28384 - protein, 335 aa, Triticum aestivum
IFSENHYILPLRSVLALFYFSALLYMASAAGEGRSRVLVIGGTGYIGRFIVAASAREGHPTAVLVRDAAPADPAKAAVLQGFRDAGVAIVEGDMYDHESLVTAIKSADVVISAVGYQQLPDQTLIISAIKEVGHVKRFFPSEYGNDVDRNHAVEPAKTVFGGKARIRRAIEAEGIPYTYVSSNFFAGRFLRSLAQIGVTEPPTEKVLIMGDGNVKGVFTAEEDVGTYTIKAVDDPRTLNKILYLRPPSNTLSHNELVSLWEKKLGKTLERVYLPEDELLKKIQGPLSVPLAISHSVWLKGDHTNFEIDPSFGVEATQLYPDVPYITVDEYLNRFL

SEQ ID NO: 28385 - protein, 310 aa, Triticum aestivum
MASAAGEGRSRVLVIGGTGYIGRFIVAASAREGHPTAVLVRDAAPADPAKAAVLQGFRDAGVAIVEGDMYDHESLVTAIKSADVVISAVGYQQLPDQTLIISAIKEVGHVKRFFPSEYGNDVDRNHAVEPAKTVFGGKARIRRAIEAEGIPYTYVSSNFFAGRFLRSLAQIGVTEPPTEKVLIMGDGNVKGVFTAEEDVGTYTIKAVDDPRTLNKILYLRPPSNTLSHNELVSLWEKKLGKTLERVYLPEDELLKKIQGPLSVPLAISHSVWLKGDHTNFEIDPSFGVEATQLYPDVPYITVDEYLNRFL

SEQ ID NO: 28386 - protein, 242 aa, Triticum aestivum
MYDHESLVTAIKSADVVISAVGYQQLPDQTLIISAIKEVGHVKRFFPSEYGNDVDRNHAVEPAKTVFGGKARIRRAIEAEGIPYTYVSSNFFAGRFLRSLAQIGVTEPPTEKVLIMGDGNVKGVFTAEEDVGTYTIKAVDDPRTLNKILYLRPPSNTLSHNELVSLWEKKLGKTLERVYLPEDELLKKIQGPLSVPLAISHSVWLKGDHTNFEIDPSFGVEATQLYPDVPYITVDEYLNRFL

SEQ ID NO: 28387 - DNA, 828 bp, Triticum aestivum
aaacccaacaatctcacacacccgcctgcacacgcactaccaatggctgagcaaggaggagaagaatacaaggtgctcatcgatcagaccggcaaagacgccggtgaaccgcaccaagacgccgacgatgacgacgccgacgacacctcgagcttcatcctggtcatgaacctcgtcctgagcggcacggcccggctcaacgtgctcctcccgacggccaccatcctgaccttcgccatcttcgcgccgctggtcaccgacgacggcaagtgcgcgcgcgtcaaccgcgtgctcaccggcgcgttcgtgctgctctgcgccgcctcctgcgtcttcttcacgctcaccgacagcttccgctccgccacgggccggctccgctacggcgtggccaccccggcgggcatcgcgacgttctgcgccggcggggggagccggaggaaggcgccgagggagccggagaggtacaggctgcggtggtcggacctgttccacaccgcgctgtccctggtggccttcgtgaccttcgccgcctcccaccacgacatcgtccggtgctactaccccggcgcgcccaggaaggtggtgaacaccgtgcccctcgtcgtcggcttcgtcgtcagcctcctcttcgtcatgttcccttccaagaggagggggatcggctacccgttcctgctccggaccgacctcgtgtacctacggcgctgaacattttggcgacctgtgtagtggacctgaaccctgaggtcgaggcctctctgactctgtctgtatcggagccgcatgtaagctttgcatatatgatttgatttgttggagatgtgc

SEQ ID NO: 28388 - protein, 236 aa, Triticum aestivum
KPNNLTHPPAHALPMAEQGGEEYKVLIDQTGKDAGEPHQDADDDDADDTSSFILVMNLVLSGTARLNVLLPTATILTFAIFAPLVTDDGKCARVNRVLTGAFVLLCAASCVFFTLTDSFRSATGRLRYGVATPAGIATFCAGGGSRRKAPREPERYRLRWSDLFHTALSLVAFVTFAASHHDIVRCYYPGAPRKVVNTVPLVVGFVVSLLFVMFPSKRRGIGYPFLLRTDLVYLRR

SEQ ID NO: 28389 - protein, 222 aa, Triticum aestivum
MAEQGGEEYKVLIDQTGKDAGEPHQDADDDDADDTSSFILVMNLVLSGTARLNVLLPTATILTFAIFAPLVTDDGKCARVNRVLTGAFVLLCAASCVFFTLTDSFRSATGRLRYGVATPAGIATFCAGGGSRRKAPREPERYRLRWSDLFHTALSLVAFVTFAASHHDIVRCYYPGAPRKVVNTVPLVVGFVVSLLFVMFPSKRRGIGYPFLLRTDLVYLRR

SEQ ID NO: 28390 - protein, 181 aa, Triticum aestivum
MNLVLSGTARLNVLLPTATILTFAIFAPLVTDDGKCARVNRVLTGAFVLLCAASCVFFTLTDSFRSATGRLRYGVATPAGIATFCAGGGSRRKAPREPERYRLRWSDLFHTALSLVAFVTFAASHHDIVRCYYPGAPRKVVNTVPLVVGFVVSLLFVMFPSKRRGIGYPFLLRTDLVYLRR

SEQ ID NO: 28391 - DNA, 1624 bp, Triticum aestivum
attgcatccaccaccagagcggcgtcggcgcgtcagtgcagcagcagcatattaggaggagcgagagcggcgccgtactgcaccatggcgggacgatcgggggaggaagcggacgccgcgatggcgggcgtggccaccggcggcgtggaggacgcctacggcgaggaccgcgccaccgaggaccagcccgtcacgccgtgggccgtctgcatcgccagtggccactccctgctgagggatccgcggcacaacaaggggctgtcgttcacggagaaggagcgggacgcgcactacctgcgcggcctgctgcctccggtggtcctgtcccaggagctccaggagaagcggctgctgcagaacgtgcggcagcttgacgtcccgctgcagcgctacatgttcctcatggacctccaggagaggaacgagaggctcttctacaagctcatgatcgacaacgtggaggagctgctccccgtcgtctacacgcccaccgtcggcgaggcctgccagaagtacggctccatcttcaggcgctcgcagggcctctacatcagcctcaaagacaaggggagagtactggaggtgctgaggaactggccggagaagagtattcaggtcatcgttgtcaccgacggcgagcgcatcttaggcctcggagatcttggctgccagggtatgggaattcccgtggggaagcttgcgctgtacacggcccttggtggtgttaggccatctgcttgtttacccatcaccattgatgtggggacgaacaatgaagagctgctgaacgatgagttctacattggattgcggcaaaaaagagctacgggccaggaatacactgagcttctggatgagttcatggttgccgtgaagcagaactatggacagaaggttcttgtccagtttgaagacttcgcaaatcacaatgcgtttacccttcttgagaagtacaaggcgacccatcttgtcttcaatgatgatattcagggaacggctgcggtggttcttgcgggccttatggctggtctgaagtttgctggtggaactttagctgaccacacattcttattcttcggtgccggagaggctggtacaggcattgctgaactagttgctttggagatatcgatgcagtccaagacttcacaggaagaggctcgcaaaaatatctggcttgttgattcaaagggattgatcgtgagttcgcgtaaagattctatacagcccttcaagaagctatatgcacatgagcatgaaccagtcaaagaccttttaagtgccatcaaggatatcaaaccgactgcactaataggatcagctggtgtgggtcaaagtttcacaaaagaggtgatcgaggctatgtcttcgattaacaagaggccaatcatccttgcgctatccaacccaacatcaaagtctgaatgtacagctgagcaggcatattcatggagtcagggccgtgcaatatttgggagtggaagcccgtttgatccggtgaaatataacgacaagcttttcgtacctgcccaggcgaacaatgcatacatcttcccaggatttggtttaggtgtagtgacctctggggcgataagggtgaaagacgatatggtccttgctgctc

SEQ ID NO: 28392 - protein, 541 aa, Triticum aestivum
IASTTRAASARQCSSSILGGARAAPYCTMAGRSGEEADAAMAGVATGGVEDAYGEDRATEDQPVTPWAVCIASGHSLLRDPRHNKGLSFTEKERDAHYLRGLLPPVVLSQELQEKRLLQNVRQLDVPLQRYMFLMDLQERNERLFYKLMIDNVEELLPVVYTPTVGEACQKYGSIFRRSQGLYISLKDKGRVLEVLRNWPEKSIQVIVVTDGERILGLGDLGCQGMGIPVGKLALYTALGGVRPSACLPITIDVGTNNEELLNDEFYIGLRQKRATGQEYTELLDEFMVAVKQNYGQKVLVQFEDFANHNAFTLLEKYKATHLVFNDDIQGTAAVVLAGLMAGLKFAGGTLADHTFLFFGAGEAGTGIAELVALEISMQSKTSQEEARKNIWLVDSKGLIVSSRKDSIQPFKKLYAHEHEPVKDLLSAIKDIKPTALIGSAGVGQSFTKEVIEAMSSINKRPIILALSNPTSKSECTAEQAYSWSQGRAIFGSGSPFDPVKYNDKLFVPAQANNAYIFPGFGLGVVTSGAIRVKDDMVLAA

SEQ ID NO: 28393 - protein, 513 aa, Triticum aestivum
MAGRSGEEADAAMAGVATGGVEDAYGEDRATEDQPVTPWAVCIASGHSLLRDPRHNKGLSFTEKERDAHYLRGLLPPVVLSQELQEKRLLQNVRQLDVPLQRYMFLMDLQERNERLFYKLMIDNVEELLPVVYTPTVGEACQKYGSIFRRSQGLYISLKDKGRVLEVLRNWPEKSIQVIVVTDGERILGLGDLGCQGMGIPVGKLALYTALGGVRPSACLPITIDVGTNNEELLNDEFYIGLRQKRATGQEYTELLDEFMVAVKQNYGQKVLVQFEDFANHNAFTLLEKYKATHLVFNDDIQGTAAVVLAGLMAGLKFAGGTLADHTFLFFGAGEAGTGIAELVALEISMQSKTSQEEARKNIWLVDSKGLIVSSRKDSIQPFKKLYAHEHEPVKDLLSAIKDIKPTALIGSAGVGQSFTKEVIEAMSSINKRPIILALSNPTSKSECTAEQAYSWSQGRAIFGSGSPFDPVKYNDKLFVPAQANNAYIFPGFGLGVVTSGAIRVKDDMVLAA

SEQ ID NO: 28394 - protein, 501 aa, Triticum aestivum
MAGVATGGVEDAYGEDRATEDQPVTPWAVCIASGHSLLRDPRHNKGLSFTEKERDAHYLRGLLPPVVLSQELQEKRLLQNVRQLDVPLQRYMFLMDLQERNERLFYKLMIDNVEELLPVVYTPTVGEACQKYGSIFRRSQGLYISLKDKGRVLEVLRNWPEKSIQVIVVTDGERILGLGDLGCQGMGIPVGKLALYTALGGVRPSACLPITIDVGTNNEELLNDEFYIGLRQKRATGQEYTELLDEFMVAVKQNYGQKVLVQFEDFANHNAFTLLEKYKATHLVFNDDIQGTAAVVLAGLMAGLKFAGGTLADHTFLFFGAGEAGTGIAELVALEISMQSKTSQEEARKNIWLVDSKGLIVSSRKDSIQPFKKLYAHEHEPVKDLLSAIKDIKPTALIGSAGVGQSFTKEVIEAMSSINKRPIILALSNPTSKSECTAEQAYSWSQGRAIFGSGSPFDPVKYNDKLFVPAQANNAYIFPGFGLGVVTSGAIRVKDDMVLAA

SEQ ID NO: 28395 - DNA, 1569 bp, Triticum aestivum
caggtccgtttacgcgtgtgctgggtttgggcacctctgctccatagcgcgaagagcgaaaggcacggccgccgccacgcaccaccccccctgccgccaacacgctgtaggtccgccgccggcaacattgaaggggcaccacagcacacaaagcagagagtaatggcgtcaacaaccatatcgtcctgcgcatatcaggcagtgcaaggcgcccaccgattgaagatctgtcagtttagtcacggtattgttggcatggacgtcaatgctgatggtttcatccgctccagcaccttcagggttgggggattcgactgggctatcttgtactacccagagggttatggcgacgacagtgagggattcatatcagtttttgttgagttcatgagcaagtatgggaaggcgccagcggtcgtcgacataagactgattgatcaagtcactggaaagcccaaatcgttattgtcaagtgtattctttgaagaggatgaggagccatttcgattcaaatctgacagcttcgcagaggctacctggggtaaggagaggtgtataagaagggaggcgttggaggattcagtgtatgtccgagatgactgccttgtgatcgaatgtgtcatcactgttttaggccaattaagggtgtctgaaactaaaccattgtgtgaaattgatgtgccaccccctaacgcactacagcattttcgcaagatgttagaggatacgtccgcagcagatgtgaccttcgacgttcaacaagaaacatttgctgcccacagggcggtgcttgctgcgcggtcacctgtcttccggaagcagttcagcgaacccatgaaggagaagatgagccgcataaccatcaactctgtggaaccagcggttttcaaggctctcctccatttcatttacaccgattccttgcctgtgatggatgatttcactagagctgaaagcaatgctgttttccagcatctacttgcagctgcggatcaatatggtttagagaggttgaagcttatgtgtgcaggcaccttggttatgaaccttaatgtggagaatgtggctagtgcactatggctagctgataagtacaattgccagaagcttaaagaagcttgtgtcaattttatggccccttccaacagagtcgatgctgtggtggcaagccaagggtaccagcttctgaaaagaggttctccttctccattagcagatgtgtgggagaagaggagccgtgctcgccaaagctttctttagagcagatccaaaagctacaatgctagattatgagtgcttctgtcagcagaatgactggtatgatgaaagcagttccaccaaaatttattgtgcgtatctagatcctgtgctttgaaaaatcatctaagcagtccctggtaactctttagctttttgcgagaaactattaatgtcatgttggtcatgtatgtgtagctgtgaaatgttgatctttagatgcattcctgggtcaatttagcggatatgctccagcaagtatgttccgaatgatgtgtgatctgttgatttgcagcttgttttgatttgggc

SEQ ID NO: 28396 - protein, 419 aa, Triticum aestivum
QVRLRVCWVWAPLLHSAKSERHGRRHAPPPLPPTRCRSAAGNIEGAPQHTKQRVMASTTISSCAYQAVQGAHRLKICQFSHGIVGMDVNADGFIRSSTFRVGGFDWAILYYPEGYGDDSEGFISVFVEFMSKYGKAPAVVDIRLIDQVTGKPKSLLSSVFFEEDEEPFRFKSDSFAEATWGKERCIRREALEDSVYVRDDCLVIECVITVLGQLRVSETKPLCEIDVPPPNALQHFRKMLEDTSAADVTFDVQQETFAAHRAVLAARSPVFRKQFSEPMKEKMSRITINSVEPAVFKALLHFIYTDSLPVMDDFTRAESNAVFQHLLAAADQYGLERLKLMCAGTLVMNLNVENVASALWLADKYNCQKLKEACVNFMAPSNRVDAVVASQGYQLLKRGSPSPLADVWEKRSRARQSFL

SEQ ID NO: 28397 - protein, 365 aa, Triticum aestivum
MASTTISSCAYQAVQGAHRLKICQFSHGIVGMDVNADGFIRSSTFRVGGFDWAILYYPEGYGDDSEGFISVFVEFMSKYGKAPAVVDIRLIDQVTGKPKSLLSSVFFEEDEEPFRFKSDSFAEATWGKERCIRREALEDSVYVRDDCLVIECVITVLGQLRVSETKPLCEIDVPPPNALQHFRKMLEDTSAADVTFDVQQETFAAHRAVLAARSPVFRKQFSEPMKEKMSRITINSVEPAVFKALLHFIYTDSLPVMDDFTRAESNAVFQHLLAAADQYGLERLKLMCAGTLVMNLNVENVASALWLADKYNCQKLKEACVNFMAPSNRVDAVVASQGYQLLKRGSPSPLADVWEKRSRARQSFL

SEQ ID NO: 28398 - protein, 334 aa, Triticum aestivum
MDVNADGFIRSSTFRVGGFDWAILYYPEGYGDDSEGFISVFVEFMSKYGKAPAVVDIRLIDQVTGKPKSLLSSVFFEEDEEPFRFKSDSFAEATWGKERCIRREALEDSVYVRDDCLVIECVITVLGQLRVSETKPLCEIDVPPPNALQHFRKMLEDTSAADVTFDVQQETFAAHRAVLAARSPVFRKQFSEPMKEKMSRITINSVEPAVFKALLHFIYTDSLPVMDDFTRAESNAVFQHLLAAADQYGLERLKLMCAGTLVMNLNVENVASALWLADKYNCQKLKEACVNFMAPSNRVDAVVASQGYQLLKRGSPSPLADVWEKRSRARQSFL

SEQ ID NO: 28399 - DNA, 1051 bp, Triticum aestivum
tcggcttcttctccaatcccactcattgcctttccagcgatccccacgggccgcagctagctccgccgtcgcgctaccgggagggggagggagatcagactgtgagatggcttcgccggagccatcggcggcggcggcggcggcggccggggcgggcggcgatgcggccggccagagggctccggtggagccgctccggctgccaacgccggaggagatcaaggggcaggagatgatgaacaactgcgccgtccggagcgtcctcagcggtgtcatggggggtggtcttggtgtacttatgggactattttttggagctttggaaaatccaataatggcagaggagatgacagcaaggcaacaaatagtctaccaggcaaaacagatgggtaggaaaagtatgagccatgctaagacctttgcagtaatgggcttgattttctctgcagctgaatgcgtcgttgaaaaggctcgggcaaagcatgacattaccaattcagcagtagctggctgtgtcacaggaggagctttagctgcaaaaggtggccctcaagctacatgtatcgggtgtgtgggttttggtgccttctctgtggcgattgagaagttcatggagcgatataactgatcggtgatggaaacgttgcatcctataaattgagtgatgctgtctttctagcaagcattagcaggattcagcattggccgaacaacttttggtttattttgcaatattcagtcgttggcatgtctgtactcagagatggtgtgacctatccatcgcactgagtagctacattgtttctccagtctgtagcctgtttgatgtcatggcatgtggtatacgcattttgacttatgctatctcgtagctagctgcatttcttcctcccaggattttgctctgccaaatgccatgacgacacgattttggggacagcactgcggtaagggaaatatgtagttcaaatgcaaattaaaacatctgttttcatctgtgccgtcactagcagcggtatatcttatatctttgcttcagagaagtcgcttc

SEQ ID NO: 28400 - protein, 208 aa, Triticum aestivum
RLLLQSHSLPFQRSPRAAASSAVALPGGGGRSDCEMASPEPSAAAAAAAGAGGDAAGQRAPVEPLRLPTPEEIKGQEMMNNCAVRSVLSGVMGGGLGVLMGLFFGALENPIMAEEMTARQQIVYQAKQMGRKSMSHAKTFAVMGLIFSAAECVVEKARAKHDITNSAVAGCVTGGALAAKGGPQATCIGCVGFGAFSVAIEKFMERYN

SEQ ID NO: 28401 - protein, 173 aa, Triticum aestivum
MASPEPSAAAAAAAGAGGDAAGQRAPVEPLRLPTPEEIKGQEMMNNCAVRSVLSGVMGGGLGVLMGLFFGALENPIMAEEMTARQQIVYQAKQMGRKSMSHAKTFAVMGLIFSAAECVVEKARAKHDITNSAVAGCVTGGALAAKGGPQATCIGCVGFGAFSVAIEKFMERYN

SEQ ID NO: 28402 - protein, 131 aa, Triticum aestivum
MMNNCAVRSVLSGVMGGGLGVLMGLFFGALENPIMAEEMTARQQIVYQAKQMGRKSMSHAKTFAVMGLIFSAAECVVEKARAKHDITNSAVAGCVTGGALAAKGGPQATCIGCVGFGAFSVAIEKFMERYN

SEQ ID NO: 28403 - DNA, 1162 bp, Triticum aestivum
aacacaaaaacgaaatgccactgctgcagctgccgaccgcgtgtggcgccgctgcggcgtcggcgtcggcgccgggccccttcttgctctcacggccgccgccctcgcggctgcgcgcgtcgcacgtcctcttcgccttccctcgcctgaggaaatacggccgccggagccgcgagccggtacccaccaccctcgacgacgacgacgaggaggaggcggatgaggacgacgacgacgacatggaggaggcggttgacgaggacatcttcctcaagaaccggcccaagccggccggtttcggcgtggggaagacctacaccaccgacgtcgaagagcagcttctccgggagatgggcatcggcggcgccgggcgcaagagcaaatcggctccgcccaagagcagcaaaaccaacggctcggccacagaaaccgccgcagattgcagtaatgatggcgttcatgttcgtatttggaacctcccgaaaaagaagaacatacataaggacctgaacctagctttcaaagggtttcctggcctggtaactataaacccagcaaactctggaactaagaagacccgtgatcctatttgtaagggttttgcatttgtcaaactggagtcagtggacgctgcgacgaggtttgttgaactgtactctcgtaaagctgtgtcgttcggcaaggttgagaagccaatcaagtgctgtattgttgaagggcacatctctacggatccttcaggtccagcatccagcagtcagccaccagggtcgaacccacaacggttggtagccgtaagatgagcagcacagttgatctgtcatcaatccagttgccactcggtacttcaacagacggagaattccgggaagaaggttcgctacatagatatcggcatgcttcgctcaagattgcgaagacacggaccgtttggtcggaattcccgattttgtagatgatatcaagcattgacattagcaggaaaccctttctccaatgggtttatttagaagataggcagggattagactcaggtatgcagtggttttttttagttaaattcacgtgaatgtattgtgtctaaattaggtccactgtttcggagaaggatttgaatctaaatccgcggcgtcgttataaatccccagattaaagttgctgc

SEQ ID NO: 28404 - protein, 266 aa, Triticum aestivum
HKNEMPLLQLPTACGAAAASASAPGPFLLSRPPPSRLRASHVLFAFPRLRKYGRRSREPVPTTLDDDDEEEADEDDDDDMEEAVDEDIFLKNRPKPAGFGVGKTYTTDVEEQLLREMGIGGAGRKSKSAPPKSSKTNGSATETAADCSNDGVHVRIWNLPKKKNIHKDLNLAFKGFPGLVTINPANSGTKKTRDPICKGFAFVKLESVDAATRFVELYSRKAVSFGKVEKPIKCCIVEGHISTDPSGPASSSQPPGSNPQRLVAVR

SEQ ID NO: 28405 - protein, 262 aa, Triticum aestivum
MPLLQLPTACGAAAASASAPGPFLLSRPPPSRLRASHVLFAFPRLRKYGRRSREPVPTTLDDDDEEEADEDDDDDMEEAVDEDIFLKNRPKPAGFGVGKTYTTDVEEQLLREMGIGGAGRKSKSAPPKSSKTNGSATETAADCSNDGVHVRIWNLPKKKNIHKDLNLAFKGFPGLVTINPANSGTKKTRDPICKGFAFVKLESVDAATRFVELYSRKAVSFGKVEKPIKCCIVEGHISTDPSGPASSSQPPGSNPQRLVAVR

SEQ ID NO: 28406 - protein, 187 aa, Triticum aestivum
MEEAVDEDIFLKNRPKPAGFGVGKTYTTDVEEQLLREMGIGGAGRKSKSAPPKSSKTNGSATETAADCSNDGVHVRIWNLPKKKNIHKDLNLAFKGFPGLVTINPANSGTKKTRDPICKGFAFVKLESVDAATRFVELYSRKAVSFGKVEKPIKCCIVEGHISTDPSGPASSSQPPGSNPQRLVAVR

SEQ ID NO: 28407 - DNA, 917 bp, Triticum aestivum
tttttacattctaatgttcaccagaaactccatgtccatggagatgctctaagccttatcacaacttcacacggcagcgatggaaggcgacggcggcacggcggcggcctggatggcgacgcaccgcgggatgtacgagcgggccacgcggcaccccttcaccgtctcgatccgcgacggttccgtcgacctggccgccttcaaacgctggctcggtcaggactacatgttcgtgcgggaatttgttgcatttctagctagtgtattgctcaagtgttgcaaagagtcagacagctcggacatggaaacaatcctaggtggcttggcttctcttagtgatgagctctcttggttcaagaaggaagctgctaagtggagtgttgatctggccggtatttctcccctcagttctaatatggagtactgcaggtttctccaaagccttgatgatccagagatcagctacactgtagccataactacgttttggataattgaaaccgtgtaccaggatagttttgctttctgcatagaagaaggtaacaagaccccggcggagctcctggggacgtgtcagagatggggcagccctgagttcaagcagtactgccagtctctgcagcggatcgctgatcgctgcttggcaaatgcgccacctgatgttgtcaagagtgctgaagaggcttttcttcgggtgcttaagctggaaattggattctgggacatgagttcttctctgtcctaagcggcgactacatcgtgccaacaccctgcattacttggacggaatagacgccgcagtgggttcagcattttactgtcatttcccttgtatcttggtttctctggtgaacaccgtgcaataacctggatgaaataaatgttgtgttggttcagaccgaaaaatgtttaaacac

SEQ ID NO: 28408 - protein, 221 aa, Triticum aestivum
MEGDGGTAAAWMATHRGMYERATRHPFTVSIRDGSVDLAAFKRWLGQDYMFVREFVAFLASVLLKCCKESDSSDMETILGGLASLSDELSWFKKEAAKWSVDLAGISPLSSNMEYCRFLQSLDDPEISYTVAITTFWIIETVYQDSFAFCIEEGNKTPAELLGTCQRWGSPEFKQYCQSLQRIADRCLANAPPDVVKSAEEAFLRVLKLEIGFWDMSSSLS

SEQ ID NO: 28409 - protein, 210 aa, Triticum aestivum
MATHRGMYERATRHPFTVSIRDGSVDLAAFKRWLGQDYMFVREFVAFLASVLLKCCKESDSSDMETILGGLASLSDELSWFKKEAAKWSVDLAGISPLSSNMEYCRFLQSLDDPEISYTVAITTFWIIETVYQDSFAFCIEEGNKTPAELLGTCQRWGSPEFKQYCQSLQRIADRCLANAPPDVVKSAEEAFLRVLKLEIGFWDMSSSLS

SEQ ID NO: 28410 - protein, 204 aa, Triticum aestivum
MYERATRHPFTVSIRDGSVDLAAFKRWLGQDYMFVREFVAFLASVLLKCCKESDSSDMETILGGLASLSDELSWFKKEAAKWSVDLAGISPLSSNMEYCRFLQSLDDPEISYTVAITTFWIIETVYQDSFAFCIEEGNKTPAELLGTCQRWGSPEFKQYCQSLQRIADRCLANAPPDVVKSAEEAFLRVLKLEIGFWDMSSSLS

SEQ ID NO: 28411 - DNA, 1571 bp, Triticum aestivum
caccctaatcgaaaaaacttttgcttcgccgtggaagggatcgtcgtagctggcttagcttgctgctttgcttccaagtgttgctgctggtggtgctgtggtagtgtggtgtgaggtgtgatggagctgcaggggctggggaggtactggggcgtgggcggcaggaggtgcgggtcgtgccgggggtcgccggcggcggtgcactgccggacgtgcgatgggggcagtggggacggggcgtacctgtgcgcgggctgtggcgaggggcacgcgcgggcggggcacgagagggtgtgggtctgcgaggtgtgcgagctcgcgccggccgcggtcacctgcaaggccgacgccgccgcgctctgcgccgcctgcgacgccgacatccaccacgccaacccgctcgcgcgccgccacgagcgcgtccccgtgcagcccatcgggtcctcgtcacccgaggggcaggagcaggagcaggatgcgttcgtgatgtcgttcggcggctcggtcgacggggagaagcagcagaaccccgtggtgaacctgaacgacgctctggaggccggcgccggcgggaaggagaacgtgaagctggacttcctgttcgcggacatgatggaccctttcttcggctccgagctcccgcgcttcccgcacgccgacagcgttgtccccagcggcggcgcggtggagctggacttcggtggcgtcgccgcccccgtcgtcgtctccaacccgtcctacagctcctacacggcggcgtcgctcggtggaagtggctcgtcgtcggaggtcggcttggtgccggacgcgatctgtggccgaggcggcggcatcatcgagctggacttcgcacagtccaaggccgcgtacctgccctacacccccacaccaagccacagtaccgtctcctcggtggatgttgggtcggtgccggagcggagcgacagcgccgtcgcggcggcgacgccggcgacgggggaggggagggaggcgcgtctgatgcggtaccgcgagaagcgcaagaaccggcggttcgagaagaccatccggtacgcgtcccggaaggcctacgccgagagcaggccgcgcgtcaagggccgcttcgccaagcgcgccgacgacgcggacaccgacgccgtcgcggcggccacgatcaccacgccggggccatgcgtgctcgacttcggcagctacggcgtcgtgcccaccttctgaggcggcgcctgatttcgtgtccatttcctccggcgagcgtgccggctgggtgcctaattaaatccggcaccgccatggccggcacgagcgcgccgacgtgcatgcgtcgtgttccctcttgtataattgcatgtaatgtttttcgagctggctgatcgctggctggcgtgtagtatactgtaatcaacatgcacgcacgcacgcacgcatgttttgctagaactagaataatacagatagttctagttgactagtctactaccctgtaccctttccctgggctagcttgatgccaaattaggctagggcaatgtaacgtgtttgctggaacagcttagttctagttttggatccgc

SEQ ID NO: 28412 - protein, 364 aa, Triticum aestivum
MELQGLGRYWGVGGRRCGSCRGSPAAVHCRTCDGGSGDGAYLCAGCGEGHARAGHERVWVCEVCELAPAAVTCKADAAALCAACDADIHHANPLARRHERVPVQPIGSSSPEGQEQEQDAFVMSFGGSVDGEKQQNPVVNLNDALEAGAGGKENVKLDFLFADMMDPFFGSELPRFPHADSVVPSGGAVELDFGGVAAPVVVSNPSYSSYTAASLGGSGSSSEVGLVPDAICGRGGGIIELDFAQSKAAYLPYTPTPSHSTVSSVDVGSVPERSDSAVAAATPATGEGREARLMRYREKRKNRRFEKTIRYASRKAYAESRPRVKGRFAKRADDADTDAVAAATITTPGPCVLDFGSYGVVPTF

SEQ ID NO: 28413 - protein, 242 aa, Triticum aestivum
MSFGGSVDGEKQQNPVVNLNDALEAGAGGKENVKLDFLFADMMDPFFGSELPRFPHADSVVPSGGAVELDFGGVAAPVVVSNPSYSSYTAASLGGSGSSSEVGLVPDAICGRGGGIIELDFAQSKAAYLPYTPTPSHSTVSSVDVGSVPERSDSAVAAATPATGEGREARLMRYREKRKNRRFEKTIRYASRKAYAESRPRVKGRFAKRADDADTDAVAAATITTPGPCVLDFGSYGVVPTF

SEQ ID NO: 28414 - protein, 201 aa, Triticum aestivum
MMDPFFGSELPRFPHADSVVPSGGAVELDFGGVAAPVVVSNPSYSSYTAASLGGSGSSSEVGLVPDAICGRGGGIIELDFAQSKAAYLPYTPTPSHSTVSSVDVGSVPERSDSAVAAATPATGEGREARLMRYREKRKNRRFEKTIRYASRKAYAESRPRVKGRFAKRADDADTDAVAAATITTPGPCVLDFGSYGVVPTF

SEQ ID NO: 28415 - DNA, 1108 bp, Triticum aestivum
aatcgaaaaatcgaccccagccacagccagatccgagagcagcagctactagctagtgagcatggcgtccaacaccgcacccgacgacaacgaggtggcgcacgactacggcctcgtccgcgtctacaagagcggccgcgtcgagcgccccctggtggctccgccagcggcggccggcctcgatcccgccaccggcgtcgagtccaaggacgtccagctcggcgactactccgcccgcctctacctgcccccggccgcgtccacggccacagacaagttccctgtcatcgtctacgtccacgggggcggcttcgtggccgagtccgtcgcgtcccccaacggccaccgcttcctcaacagcctcaccgccgcctgccctgccctcgccgtctccgtcgagtaccgcctcgccccggagcacccgctccccgcggcctacgaggactgcgtcgctgccctcacgtgggtgctctcggccgccgacccgtgggtcgccgagcacggcgacctgggccgcgtcttcgtggccggggacagcgccggggccaacgcctgccaccacctcgtcattcagccgggcgccgtgcgcctcaagggcgcggtgctgatccacccctggttctggggttccgaggccgtcggcgaggagacgcgcaaccccgcgtggcgcgccatgggcgggcggctgtgggagttcgcgtgccccggctcgagcggcgtcgacgacgcgcggatgaacccgatggcgcccggcgcgccggggctggaaacgctcgcgtgcgagagggtcatggtgtgcgtcgcggagggcgacttcctcaggtggcgcggccgcgcgtacgcggaggccgtggccgcggcgaggggcggcgaggggcagggcgtcgagctgctggagacggagggggtggggcacgtcttccacctcttcaagcccgactgcgacaaagccaaggagatgttcgacaggatagtcgccttcgttaacgcgccgtgatgctcgtgtggatgtgcccgcttattatcaggccggcagctttgtgtgtcgcgggggcgccacctactgaaataaatggattgcgataaatgatgaaataaatttggttgg

SEQ ID NO: 28416 - protein, 328 aa, Triticum aestivum
NRKIDPSHSQIREQQLLASEHGVQHRTRRQRGGARLRPRPRLQERPRRAPPGGSASGGRPRSRHRRRVQGRPARRLLRPPLPAPGRVHGHRQVPCHRLRPRGRLRGRVRRVPQRPPLPQQPHRRLPCPRRLRRVPPRPGAPAPRGLRGLRRCPHVGALGRRPVGRRARRPGPRLRGRGQRRGQRLPPPRHSAGRRAPQGRGADPPLVLGFRGRRRGDAQPRVARHGRAAVGVRVPRLERRRRRADEPDGARRAGAGNARVREGHGVRRGGRLPQVARPRVRGGRGRGEGRRGAGRRAAGDGGGGARLPPLQARLRQSQGDVRQDSRLR

SEQ ID NO: 28417 - protein, 311 aa, Triticum aestivum
MASNTAPDDNEVAHDYGLVRVYKSGRVERPLVAPPAAAGLDPATGVESKDVQLGDYSARLYLPPAASTATDKFPVIVYVHGGGFVAESVASPNGHRFLNSLTAACPALAVSVEYRLAPEHPLPAAYEDCVAALTWVLSAADPWVAEHGDLGRVFVAGDSAGANACHHLVIQPGAVRLKGAVLIHPWFWGSEAVGEETRNPAWRAMGGRLWEFACPGSSGVDDARMNPMAPGAPGLETLACERVMVCVAEGDFLRWRGRAYAEAVAAARGGEGQGVELLETEGVGHVFHLFKPDCDKAKEMFDRIVAFVNAP

SEQ ID NO: 28418 - DNA, 1460 bp, Triticum aestivum
aggtatcgtgcacttcactcgcttggcatttcgtcacgtctcttccttcctttctcagttccccgcagccgcttcgctcgcttgccttctctcgccgtctccgcctcctcctccagtcctccgtcccacccctcgacgattcctcggcgatgggcggcgcggcggcggcgacgggcgccgccaggtggatccagcggctgagcgcggccaggatctcgacggaggcgctggagcggggccagagccgcgtcatcgacgcctccctcaccctcatccgcgagcgcgccaagctcaagggcgagctgctgcgtgctatgggcggtgtcaaagcttctgcaacactcttaggagtaccccttgggcacaactcgtctttcttgcaggggcctgcgtttgctcctcctcgcataagggaggccatttggtgtggaagcaccaactctagcacagaagaaggcaaggaattaaatgatccaagggtgctaactgatgtcggtgatgtccccatacaagagattcgtgactgtggtgttgaagatgacagattgatgcatgtaatcagcgagtctgtcaaaacagtaatggacgaagatcctcttcggccgttggtcttaggaggcgatcactcgatatcttatccagttgttagggctgtgtctgaaaagcttggcggacctgttgacattcttcatcttgacgcacatccagatatctatgactgttttgaaggcaacacttactcacacgcttcttcatttgcaagaataatggaaggaggttatgcgaggcgacttttgcaggttggacttagatcaattaccaaagaaggacgtgagcaagggaagagatttggtgtggaacagtatgagatgcgcaccttctccagagatcgggagaagcttgagaatctgaaacttggggaaggtgtgaagggggtgtatgtctccgttgacgtggactgcctcgaccccgcattcgctcctggcgtgtctcatatcgagccgggaggcctctcatttcgcgacgtgctcaacatcctccagaatctgcaaggcgatgtcgtcgccggagatgtggtggagttcaacccgcagcgcgacacggtcgacgggatgacggctatggtcgccgcgaagctggtccgggagctgagcgccaagatctcaaaatgagcagcgacagtcaggacagaggcagcagcagagaggattttcaggcacagtggtcgttgatcttagttcctgccaatcattcagttgtgccacgttttagtctgacaatcttctataaataataaaatcaggctgcaaaacgacttcgaatttggtatgtgctctgtggtatttgttggttctcctttcacatgcacgcatccaagattaagctcgtaggtgcctagtagtcgataagaacatcgtctctcacgcaaaggatatgttgaaaaatctgaaatgaatttg

SEQ ID NO: 28419 - protein, 389 aa, Triticum aestivum
VSCTSLAWHFVTSLPSFLSSPQPLRSLAFSRRLRLLLQSSVPPLDDSSAMGGAAAATGAARWIQRLSAARISTEALERGQSRVIDASLTLIRERAKLKGELLRAMGGVKASATLLGVPLGHNSSFLQGPAFAPPRIREAIWCGSTNSSTEEGKELNDPRVLTDVGDVPIQEIRDCGVEDDRLMHVISESVKTVMDEDPLRPLVLGGDHSISYPVVRAVSEKLGGPVDILHLDAHPDIYDCFEGNTYSHASSFARIMEGGYARRLLQVGLRSITKEGREQGKRFGVEQYEMRTFSRDREKLENLKLGEGVKGVYVSVDVDCLDPAFAPGVSHIEPGGLSFRDVLNILQNLQGDVVAGDVVEFNPQRDTVDGMTAMVAAKLVRELSAKISK

SEQ ID NO: 28420 - protein, 340 aa, Triticum aestivum
MGGAAAATGAARWIQRLSAARISTEALERGQSRVIDASLTLIRERAKLKGELLRAMGGVKASATLLGVPLGHNSSFLQGPAFAPPRIREAIWCGSTNSSTEEGKELNDPRVLTDVGDVPIQEIRDCGVEDDRLMHVISESVKTVMDEDPLRPLVLGGDHSISYPVVRAVSEKLGGPVDILHLDAHPDIYDCFEGNTYSHASSFARIMEGGYARRLLQVGLRSITKEGREQGKRFGVEQYEMRTFSRDREKLENLKLGEGVKGVYVSVDVDCLDPAFAPGVSHIEPGGLSFRDVLNILQNLQGDVVAGDVVEFNPQRDTVDGMTAMVAAKLVRELSAKISK

SEQ ID NO: 28421 - protein, 285 aa, Triticum aestivum
MGGVKASATLLGVPLGHNSSFLQGPAFAPPRIREAIWCGSTNSSTEEGKELNDPRVLTDVGDVPIQEIRDCGVEDDRLMHVISESVKTVMDEDPLRPLVLGGDHSISYPVVRAVSEKLGGPVDILHLDAHPDIYDCFEGNTYSHASSFARIMEGGYARRLLQVGLRSITKEGREQGKRFGVEQYEMRTFSRDREKLENLKLGEGVKGVYVSVDVDCLDPAFAPGVSHIEPGGLSFRDVLNILQNLQGDVVAGDVVEFNPQRDTVDGMTAMVAAKLVRELSAKISK

SEQ ID NO: 28422 - DNA, 818 bp, Triticum aestivum
acgacctgcttcgcactcgcgcacgaccgacaggaatcgagcctcccaggaaggcaggaaacgcaggctagggttggccgccgcccgccgcccgcgccggcgaacctccaccctccgcccaggcttttgagggattctagctgcagaagaaacctggtgggtgatatgagcggcgaggcaggcaataggaaggaggaagccaggaagacaggtttggagggcaccggactgccccttccaggtggctcccatggcagcgtgcgatgcgctggcagcgacccgcagttgagacacatgcttgattccctcaaatcctccaaggcttctgctgtgatcaactatggggcctcatggtgcggtgtttgcaatcagattcttccacccttctgcaaattcagcaacgaattcaagaatcttactttcgtctatgcccatgttgatgagtgccctgaaacaactcagaacatacgatacactccgaccttccatttctaccgggatggagaaagggtagatgagatgtttggtgcaggggaagagaggctacgggatcggttgtggttgcattcgtgatttctaggctttggcttgcagtgatgctgttttcatgtacttagttatgcactgtacctcggatttatccttttctgaaaagtcttgtttgacgtggaaaggaagggcaatgttaaactgatcagcgtgttgctagtttctctcccaggcaggcgccattatttttcatgatttactcgcaaagcattttacactctaattgaaccatgactgtaatacatcagcaactaatgctgctactgacg

SEQ ID NO: 28423 - protein, 190 aa, Triticum aestivum
TTCFALAHDRQESSLPGRQETQARVGRRPPPAPANLHPPPRLLRDSSCRRNLVGDMSGEAGNRKEEARKTGLEGTGLPLPGGSHGSVRCAGSDPQLRHMLDSLKSSKASAVINYGASWCGVCNQILPPFCKFSNEFKNLTFVYAHVDECPETTQNIRYTPTFHFYRDGERVDEMFGAGEERLRDRLWLHS

SEQ ID NO: 28424 - protein, 135 aa, Triticum aestivum
MSGEAGNRKEEARKTGLEGTGLPLPGGSHGSVRCAGSDPQLRHMLDSLKSSKASAVINYGASWCGVCNQILPPFCKFSNEFKNLTFVYAHVDECPETTQNIRYTPTFHFYRDGERVDEMFGAGEERLRDRLWLHS

SEQ ID NO: 28425 - DNA, 1632 bp, Triticum aestivum
  misc_feature (919)..(919): n is a, c, g, or t
aaaaacccagaaaccagagacagaatcccaagccccgagagaactctccggccagaacacgggagcgagcgatctccaatctcttttgcggccgccgatacagccggagaaaattactaccccacagtcacgaccgcgcagggcgacggcggccacacagcataccccgccgccacgatgccgtccgcctccagcgccgtcccatccgccgcggcgccgggcgacgagtcccaatccctcgccgccccgaagctcctgctggggaggtacgagctgggcgggctcctcggccgcggcgcgtccgccaaggtctaccgggccagggacatcctcacgggccgggacgtggccatcaagtcgttccccaacccgcgggccggcgcgcgcgagggggagggctccgccgggtccgccgccatcgagcgggaggcggccatcctcagccgcctgcgccaccgccacgtcgtgaggctccacgagattctcggcacgcgcaagaaggtccactttgtcctcgacctcgccgccggcggcgagctgttctcgctcgtcgactccgacggccgcatgacggaggacctcgcgcggcattacttccgacagctcgtgtcggccgtccggtactgccactcccgcggcgtctaccaccgcgacatcaagccggagaatttgctcctcgacggcgacggcgacctcaaggtcgccgacttcggcctcggcgccatcgcggacgagagcctccaccacaccctctgcggcaccccggcctacgtcgcgccggagatcctctcgaagcaggggtaccacccggccaaggtcgacatctggtcctgcggcgtggtgctcttcgtgctcgccgccggctacctccccttcaacgacgccagcctcatcaacatgtaccgcaagatctacgccnggccggttccggtgcccgaactgggtctcgccggcgctccgccacctgctgcgccgcatcctcgaccccaacccgtcgacgcgcatcgacacggacggcatcatggagcacccctggttccgccacggcgcgagcggcgacggcgagctggaggagctgatgcgcgggcacgaggaggaggcgtggttcaagacggagttcaaggaggacatggcgcgggacatgaccgcgttcgacatcctggccttctcgcccggctcggacctctccgggctgttcggcgccgggccgggcacggagcgggtgttcgtgggcgagcccgccgcggccgtgctggcccgggtcgaggacgccgggaagaagcaggggcaccgcgtgaggagggaagggaagggccgcgccgggccggtgtacgtggaggcggaggccggcggcattgtcgccaaggtgaccgtgttccggatcgccgacgcggtgtcggtggtggaggtcgtcaagggccacggcgcggaggccgcggcgttctggagcgactggctcgagccggccgtgaagcctcaggcagtgtgaaaaagctgccgagtgtgagccaggccaagaatgttatgtcgcttcgccgtgccgtgccgtcccggtgccggcatgccgccgccgcgggcgggcgcggagatttcttgtttcaaacttccaatggcgaattcgtttggtttttc

SEQ ID NO: 28426 - protein, 544 aa, Triticum aestivum
  misc_feature (307)..(307): Xaa can be any naturally occurring amino acid
KNPETRDRIPSPERTLRPEHGSERSPISFAAADTAGENYYPTVTTAQGDGGHTAYPAATMPSASSAVPSAAAPGDESQSLAAPKLLLGRYELGGLLGRGASAKVYRARDILTGRDVAIKSFPNPRAGAREGEGSAGSAAIEREAAILSRLRHRHVVRLHEILGTRKKVHFVLDLAAGGELFSLVDSDGRMTEDLARHYFRQLVSAVRYCHSRGVYHRDIKPENLLLDGDGDLKVADFGLGAIADESLHHTLCGTPAYVAPEILSKQGYHPAKVDIWSCGVVLFVLAAGYLPFNDASLINMYRKIYAXPVPVPELGLAGAPPPAAPHPRPQPVDAHRHGRHHGAPLVPPRRERRRRAGGADARARGGGVVQDGVQGGHGAGHDRVRHPGLLARLGPLRAVRRRAGHGAGVRGRARRGRAGPGRGRREEAGAPREEGREGPRRAGVRGGGGRRHCRQGDRVPDRRRGVGGGGRQGPRRGGRGVLERLARAGREASGSVKKLPSVSQAKNVMSLRRAVPSRCRHAAAAGGRGDFLFQTSNGEFVWFF

SEQ ID NO: 28427 - protein, 485 aa, Triticum aestivum
  misc_feature (248)..(248): Xaa can be any naturally occurring amino acid
MPSASSAVPSAAAPGDESQSLAAPKLLLGRYELGGLLGRGASAKVYRARDILTGRDVAIKSFPNPRAGAREGEGSAGSAAIEREAAILSRLRHRHVVRLHEILGTRKKVHFVLDLAAGGELFSLVDSDGRMTEDLARHYFRQLVSAVRYCHSRGVYHRDIKPENLLLDGDGDLKVADFGLGAIADESLHHTLCGTPAYVAPEILSKQGYHPAKVDIWSCGVVLFVLAAGYLPFNDASLINMYRKIYAXPVPVPELGLAGAPPPAAPHPRPQPVDAHRHGRHHGAPLVPPRRERRRRAGGADARARGGGVVQDGVQGGHGAGHDRVRHPGLLARLGPLRAVRRRAGHGAGVRGRARRGRAGPGRGRREEAGAPREEGREGPRRAGVRGGGGRRHCRQGDRVPDRRRGVGGGGRQGPRRGGRGVLERLARAGREASGSVKKLPSVSQAKNVMSLRRAVPSRCRHAAAAGGRGDFLFQTSNGEFVWFF

SEQ ID NO: 28428 - protein, 358 aa, Triticum aestivum
  misc_feature (306)..(306): Xaa can be any naturally occurring amino acid
KPRNQRQNPKPRENSPARTRERAISNLFCGRRYSRRKLLPHSHDRAGRRRPHSIPRRHDAVRLQRRPIRRGAGRRVPIPRRPEAPAGEVRAGRAPRPRRVRQGLPGQGHPHGPGRGHQVVPQPAGRRARGGGLRRVRRHRAGGGHPQPPAPPPRREAPRDSRHAQEGPLCPRPRRRRRAVLARRLRRPHDGGPRAALLPTARVGRPVLPLPRRLPPRHQAGEFAPRRRRRPQGRRLRPRRHRGREPPPHPLRHPGLRRAGDPLEAGVPPGQGRHLVLRRGALRARRRLPPLQRRQPHQHVPQDLRXAGSGARTGSRRRSATCCAASSTPTRRRASTRTASWSTPGSATARAATASWRS

SEQ ID NO: 28429 - DNA, 1249 bp, Triticum aestivum
aatttcgtcccatagaaaaaccacagccacgaatcaggggaaatccggcagcgccgcgtgtgcgaagacgagtccaaacacggaacaaagccggcgattagcggcacactgagctggcatcttgtgcttctccgtccgtccgcgtccacaccggagctaggaggagaggagggggaagaagaaggcgtcgaggaggcgatggcgacggagtcgccgttccgggcggacgtgctgaagggcaaggcggcgctggtcaccggcggcggctccggcatctgcttcgagatcgccgcccagctcgcccgccacggcgcccacgtcgccatcatgggccgccgccgcgaggtcctcgacaaggccgtcgccgccctccgctccgagggccttcgggctgttggatttcagggagatgtacgtaaccaggaggatgcagcgagagtgcttgcgtcgaccgttgagcatttcggcaagcttgacattcttgtcaacggtgcagcgggcaacttccttgcatccccggaggatctcacacccaagggattccggacagttcttgagattgacactgtgggtacatacacaatgtgctacgaagccctgaagtatctgaaaaaaggtgggccagggaggggtccctccactggtggcctcatcattaacataagcgcgacactgcattacactgcttcttggtaccaaattcatgtctccgccgctaaggcaggtgttgatagtatcacaagaacgctggctctggaatggggaacagattatgaaattagggtcaatggaattgcaccaggaccaatcggaggcactccaggtctgaggaagcttgcacctgatgaaatgggcaaggggaaaagggaaatgatgcctttatttaagttgggggagacacaggacatagcaatggccgcgctctatcttgcttccgatgctggcaaatatgtaaatgggactacgctggtggttgatggagggctttggttgagtcaccctcgccacatccccaaggaggaagtgaaggagctctcaaaggtgatcgagaagaaggttagggcctctggtgtaggtgtaccctccagcaaattgtgatgacatccttggtttatgtcactgtctcacacatgtcatgtaccaccaccctcagtatttgctgtcagcggctcagcaccaactttattgtgtacgtggatcttgtaacctgctgagaacaattggtttcaaatgagcaacttcagtattt

SEQ ID NO: 28430 - protein, 299 aa, Triticum aestivum
MATESPFRADVLKGKAALVTGGGSGICFEIAAQLARHGAHVAIMGRRREVLDKAVAALRSEGLRAVGFQGDVRNQEDAARVLASTVEHFGKLDILVNGAAGNFLASPEDLTPKGFRTVLEIDTVGTYTMCYEALKYLKKGGPGRGPSTGGLIINISATLHYTASWYQIHVSAAKAGVDSITRTLALEWGTDYEIRVNGIAPGPIGGTPGLRKLAPDEMGKGKREMMPLFKLGETQDIAMAALYLASDAGKYVNGTTLVVDGGLWLSHPRHIPKEEVKELSKVIEKKVRASGVGVPSSKL

SEQ ID NO: 28431 - protein, 256 aa, Triticum aestivum
MGRRREVLDKAVAALRSEGLRAVGFQGDVRNQEDAARVLASTVEHFGKLDILVNGAAGNFLASPEDLTPKGFRTVLEIDTVGTYTMCYEALKYLKKGGPGRGPSTGGLIINISATLHYTASWYQIHVSAAKAGVDSITRTLALEWGTDYEIRVNGIAPGPIGGTPGLRKLAPDEMGKGKREMMPLFKLGETQDIAMAALYLASDAGKYVNGTTLVVDGGLWLSHPRHIPKEEVKELSKVIEKKVRASGVGVPSSKL

SEQ ID NO: 28432 - protein, 171 aa, Triticum aestivum
MCYEALKYLKKGGPGRGPSTGGLIINISATLHYTASWYQIHVSAAKAGVDSITRTLALEWGTDYEIRVNGIAPGPIGGTPGLRKLAPDEMGKGKREMMPLFKLGETQDIAMAALYLASDAGKYVNGTTLVVDGGLWLSHPRHIPKEEVKELSKVIEKKVRASGVGVPSSKL

SEQ ID NO: 28433 - DNA, 1412 bp, Triticum aestivum
atgtacctaaccttgcaacaaagttcagttgaaaaccaccactagtctgtgcccatggcgaccttctccaacgaggagcttctgcaggcgcacaccgagctctgggacctcaccttcggctacctcaaatccatggcgctcgagtgcgccatcaagctcggcctcccaaacgccatccaccgccgcggcggcgacgccacgctgccggacttgctcgacgcagtttccgtcccggagagcaagaaggcgcacctgcctcgcctcatgaggtttctcggcgcgttcggcatcttcaccgccgacgcacccgctgcaggggagcgcgcgaatggggaggaggcgggcgccgtctacggcctcacgccggtgtcccgcctcctcgtggacgactccggcgccaacgggtcgtgcgggagcctctcgccgttcgtgctctcccagacgaccaagtaccacgtgaaggcggccatgcacctgccggagtggttcacgagcgacgacggcgcggccgcggcggagatgccgttccggacggcgcacggcgcagacctgtggggcgtcatggaccgcgaccccaagatgaaccaggtcttcaacgccggcatggggtccgacacccagctcgcgatggacttcgtcatcggcaactacggcgacgtgttcgacggggtgacctcgctggtcgacgtcggcggcgggacaggctccgcggcgagggccatagccaaggccttcccgcacgtcaagtgctccgtgctcgacctccccaacgtggtcaattccgtcccgcccgacggcgtggtcgagtacatctcaggcgacatgatgagctccattccggcgaccgatgcggtcttcctcaagtacatcatgcatgactggaacgacgaggactgcgtgaagatcctgaagcagtgcaagaaggcgatccccgaatcaggcgggaaagtgataatcgtggacatagtggtgggatctcctttgaaagccatgctggaagcccaggtctcgtttgatctgctgatgatggtgatcacgggaggcaaggagcgcgacgagcatgagtggcgcaagattttcatggacgcggggttcagccatcacaagacaagacctgttttgggatttatggccatcaccgagctgtatgcttagccctgcatgcctgattgcagcagatatctgctgtaacgtgtgtgtaagcgttggtcctgcgatgttcgtcgtggttgtgcagccccaaagtgtctttctgcagcaacgatttgttcctacgcctttaaaggctcccatatttgtatgatctgttgctagggtatatgcacttaataaactagatgacaccccgcccgttgctgcgggaattgtagcaattaaaaaattggaaattggacaaatgaaaagataattcg

SEQ ID NO: 28434 - protein, 366 aa, Triticum aestivum
MATFSNEELLQAHTELWDLTFGYLKSMALECAIKLGLPNAIHRRGGDATLPDLLDAVSVPESKKAHLPRLMRFLGAFGIFTADAPAAGERANGEEAGAVYGLTPVSRLLVDDSGANGSCGSLSPFVLSQTTKYHVKAAMHLPEWFTSDDGAAAAEMPFRTAHGADLWGVMDRDPKMNQVFNAGMGSDTQLAMDFVIGNYGDVFDGVTSLVDVGGGTGSAARAIAKAFPHVKCSVLDLPNVVNSVPPDGVVEYISGDMMSSIPATDAVFLKYIMHDWNDEDCVKILKQCKKAIPESGGKVIIVDIVVGSPLKAMLEAQVSFDLLMMVITGGKERDEHEWRKIFMDAGFSHHKTRPVLGFMAITELYA

SEQ ID NO: 28435 - protein, 340 aa, Triticum aestivum
MALECAIKLGLPNAIHRRGGDATLPDLLDAVSVPESKKAHLPRLMRFLGAFGIFTADAPAAGERANGEEAGAVYGLTPVSRLLVDDSGANGSCGSLSPFVLSQTTKYHVKAAMHLPEWFTSDDGAAAAEMPFRTAHGADLWGVMDRDPKMNQVFNAGMGSDTQLAMDFVIGNYGDVFDGVTSLVDVGGGTGSAARAIAKAFPHVKCSVLDLPNVVNSVPPDGVVEYISGDMMSSIPATDAVFLKYIMHDWNDEDCVKILKQCKKAIPESGGKVIIVDIVVGSPLKAMLEAQVSFDLLMMVITGGKERDEHEWRKIFMDAGFSHHKTRPVLGFMAITELYA

SEQ ID NO: 28436 - protein, 296 aa, Triticum aestivum
MRFLGAFGIFTADAPAAGERANGEEAGAVYGLTPVSRLLVDDSGANGSCGSLSPFVLSQTTKYHVKAAMHLPEWFTSDDGAAAAEMPFRTAHGADLWGVMDRDPKMNQVFNAGMGSDTQLAMDFVIGNYGDVFDGVTSLVDVGGGTGSAARAIAKAFPHVKCSVLDLPNVVNSVPPDGVVEYISGDMMSSIPATDAVFLKYIMHDWNDEDCVKILKQCKKAIPESGGKVIIVDIVVGSPLKAMLEAQVSFDLLMMVITGGKERDEHEWRKIFMDAGFSHHKTRPVLGFMAITELYA

SEQ ID NO: 28437 - DNA, 849 bp, Triticum aestivum
gtattcttccccgagcgagtggcgcacctctggaattgttttctgttttctcctccccacaatgtccatctccgggaacggccacctccccgccgccgccgcctccaccggcctgccggaccactcctccgcctccgcgtcagactccgaggccgagggagacgccgactacctccccatctccggcgccgcctcggacaccgacagcgaccccgaccccgatctcgcatctcaccgccgcctcgacgcggtcgacaacggcgtctccgagctggatatcgcctccgacgacgaagaaagcgacgaagaagaaggcacgggcgcgacggaggccgcggcctccttggacgacgagcgtaggcggcgcgcccagctgcccgcgggcgccgcggcccggatcgtggacgcgatgcgcggcgtggcgttccccggcgcgccgccgccctgggcgggcgccgtccccgacgagcagtggctcgagcgcctccgctccctccgcggcggccgcgactagacagagcagatgagttctcgacccacagatcactgtgagttgtgagagcttctgatccgcctttgtactgaaggaacattcctgtatcgccatagatccagtagaattgcctctcgctgcttcggaatgaaactcgtgcgcagatcatcgccgatgagatcagtgatcaacactggacgctgttcttgtgtatggattttatggaggtttggtttttttttcgaaaaaaaaaaaaaaaaaaaaaaaaaaaaaaaaaaaaaaaaaaaaaaaaaaaaaaaaagaaaaaaaaaaaaaaaaaggcttatcaataccgtcaacctcaagggggggcccgg

SEQ ID NO: 28438 - protein, 174 aa, Triticum aestivum
ILPRASGAPLELFSVFSSPQCPSPGTATSPPPPPPPACRTTPPPPRQTPRPRETPTTSPSPAPPRTPTATPTPISHLTAASTRSTTASPSWISPPTTKKATKKKARARRRPRPPWTTSVGGAPSCPRAPRPGSWTRCAAWRSPARRRPGRAPSPTSSGSSASAPSAAAATRQSR

SEQ ID NO: 28439 - protein, 170 aa, Triticum aestivum
YSSPSEWRTSGIVFCFLLPTMSISGNGHLPAAAASTGLPDHSSASASDSEAEGDADYLPISGAASDTDSDPDPDLASHRRLDAVDNGVSELDIASDDEESDEEEGTGATEAAASLDDERRRRAQLPAGAAARIVDAMRGVAFPGAPPPWAGAVPDEQWLERLRSLRGGRD

SEQ ID NO: 28440 - protein, 150 aa, Triticum aestivum
MSISGNGHLPAAAASTGLPDHSSASASDSEAEGDADYLPISGAASDTDSDPDPDLASHRRLDAVDNGVSELDIASDDEESDEEEGTGATEAAASLDDERRRRAQLPAGAAARIVDAMRGVAFPGAPPPWAGAVPDEQWLERLRSLRGGRD

SEQ ID NO: 28441 - DNA, 1287 bp, Triticum aestivum
cagcaccggagcaagactgaacaggcacaatcttcacatccagcaactgggtcctgagacagaaacggaattatcaacgtttcacttaacatctcagaataagcagattcatgatctgcatagcagactaatacttgatcacccgagaggtttttcacgacagctccacaaattgattgcttgtggtacaggaaatggtatttttgatggaaatattcaagtcaacaggtatgcgcagcaaaccgatgcagggcagcaaaccaagtgtcttctgctctcaccaaaggctgtggtgaatgtgaagccaaaccttcagatcatcgccgacgatgtcaaatgcacgcacggagctgccatcagcggggacctcgacccgaacgagctcttctacttccaggcgagaggcgtcgacgccaaaacggcgaccgacgccctgcttttctcgttcggagcccaggtgataaaccgcatcccgtttaaggccgtcgagaagaaggctctagcacagctcaaggagttgctcgccgtgtcaagacaaaacaattgatgaggccctgaggagctctttgaagtggttcagcgctttttttggtcgaggtggaaagagcagggcgggaatgcttggaagctttggcattgaacaaggtgagcgactacgactgcgtatgttggctgactgccggaggaaataccactctagtcctttttcagattctgcttattatttgtaaattacttgtttatccctgtcaagaggaagaatacatcaaagcttcttccaaatagatgtttcttctgttagtggcaaatgtagtttgtttatccctatcattgctgtcgccgactcgtcgatgttccagccggccaggcccccgaacagcaagtttgcaggtactcctccgttcctttttactctgtgtatgagattgttgtcgagtcaaactttgcagagtttgaccaaatttatataaaaaaaatatcgcctacaataccaaatatgtatactactccctccattccgaagtacttgtcgcacgtatgaatgtatctagatgtattttagttctagatacatccatttcagcgacgagtaatttggaacgaagggagtatgaaactacatttcataatgaatatgacgacattcatttggcattgtgaatgttgatattttttgtctataagtttggttaaattatagatactttagacttcggacaaaacttatatgcagactaaaaaggatcggagggagtacagtacagcgaatggaagcttgcgccacag

SEQ ID NO: 28442 - protein, 181 aa, Triticum aestivum
STGARLNRHNLHIQQLGPETETELSTFHLTSQNKQIHDLHSRLILDHPRGFSRQLHKLIACGTGNGIFDGNIQVNRYAQQTDAGQQTKCLLLSPKAVVNVKPNLQIIADDVKCTHGAAISGDLDPNELFYFQARGVDAKTATDALLFSFGAQVINRIPFKAVEKKALAQLKELLAVSRQNN

SEQ ID NO: 28443 - DNA, 625 bp, Triticum aestivum
aaaagaactcgtctctatttgctcccaaactcacccgagacctgcataccctttccccccgtcatcagccatggcgaccgcaacgaggctgctcccgacgctcctcagaaccctaaccggcacccgccacgctggcgcggcgcggggcctcgccacggagaaggcagtcggtgctgcggccgtcgttggaagccacaccgccaaatggatgcaggacacaagcaagaaatctccaatggaactcatcaatgaggtgccaccaatcaaggttgaagggcgaattgccgcatgtgaaggggataaaaaccctgcccttggccatccaattgagtacatctgccttgatctggatgcacctgctgtgtgcaaatactgcggccttcgctatgttcaagaccaccatcactaagtagagaagataccatcctttaccacatcagaatttggagttgctgcatgctcattgggttcacaatgtatgccaatgtactgtgtattgcgcttgatggcaaaatgttgtctttgactgtcatcctactttttgtcacataataatgttgcattaacttcgaattgattttctgtagctgacgtttgtcggcatttcctgaattaatgcactttc

SEQ ID NO: 28444 - protein, 135 aa, Triticum aestivum
KELVSICSQTHPRPAYPFPPSSAMATATRLLPTLLRTLTGTRHAGAARGLATEKAVGAAAVVGSHTAKWMQDTSKKSPMELINEVPPIKVEGRIAACEGDKNPALGHPIEYICLDLDAPAVCKYCGLRYVQDHHH

SEQ ID NO: 28445 - protein, 112 aa, Triticum aestivum
MATATRLLPTLLRTLTGTRHAGAARGLATEKAVGAAAVVGSHTAKWMQDTSKKSPMELINEVPPIKVEGRIAACEGDKNPALGHPIEYICLDLDAPAVCKYCGLRYVQDHHH

SEQ ID NO: 28446 - protein, 83 aa, Triticum aestivum
KRTRLYLLPNSPETCIPFPPVISHGDRNEAAPDAPQNPNRHPPRWRGAGPRHGEGSRCCGRRWKPHRQMDAGHKQEISNGTHQ

SEQ ID NO: 28447 - DNA, 1416 bp, Triticum aestivum
atttttctccaaaaccctcccggctactccccttctcgtctttttcttgtagtaccacatcgcaaaacaagagaaaaatccggaccttgcggctttcccccttgctcggctgctaaccggattcgcgtctcaggctcgggatccgggcgttccgtgcgatgggcggcggcggcggcggcggcggcggcggcgcggaggaggagctgacggcgcaggagacggcgctctacgaccgccagatccgcgtctggggcgtcgatgcccagaagaggctaagtaaggcgcatgtgcttgtgtgcggcgtcaacggtactactattgagttctgcaagaacattgttctagcaggagttggcagtttatcattgatggacgatcacatggtcacagaggatgatctcaattcaaacttcctaattcctcatgatgagagtgtgtatggtggtaaatcacgggcagaggtttgctgcgagtccttaaaagatttcaatccaatggtccgagttgctgttgcaaaaggtaacccatcactaattgatggaacattcattgacatgttcgacattattgtagtcagctgcgcatctcttaaaacaaagttgtttattaatgacaactgccggaagagaagcaagcatattgccttctactctgtagagtgcaaggattcttgtggtgaaatatttgttgatctgcaggaccatagctatcttcagaagaagcctggaggagaacctgaacagcaggagttgaaatatcctagtctgcaggaagctatttctgtgccctggaaggatctgtccaaaagaacaactaaattgtactacgcaatgagagtcttggaaagttatgaatcatctgaagggcgcgaccctggtgagacatcactttctgatctgcctgcagttttggctcggaggaaggatatgtgtgatagaatgtctgtggacgagtctaaaattcctacgtctcttctggaacggcttctagcagctgggaaaaaggaacatcctcctgtatgtgcaatccttggtggcattcttggtcaggaggtgatcaaatcaatatcttgcaagggcgatccgatcaagaatttcttttacttcgacgatgctgatggtaaaggggccatggaggacatccccccaactcctgaagactaaatcacgtgatacctaactctcatccgacatggcttgctgataattgtacccaatcattagagtcgaacatgtgacaactctagttcagtggctgaggctggaaactcaactcagcactttagtgtttttattattgtacttagcgttcgttttagcgttggcatcatgctatggcacctgggtactgcgatgaacagaactgacattctcgtccaaagaatttcaaagctgaaggcaggcatgctattgaatg

SEQ ID NO: 28448 - protein, 334 aa, Triticum aestivum
MGGGGGGGGGGAEEELTAQETALYDRQIRVWGVDAQKRLSKAHVLVCGVNGTTIEFCKNIVLAGVGSLSLMDDHMVTEDDLNSNFLIPHDESVYGGKSRAEVCCESLKDFNPMVRVAVAKGNPSLIDGTFIDMFDIIVVSCASLKTKLFINDNCRKRSKHIAFYSVECKDSCGEIFVDLQDHSYLQKKPGGEPEQQELKYPSLQEAISVPWKDLSKRTTKLYYAMRVLESYESSEGRDPGETSLSDLPAVLARRKDMCDRMSVDESKIPTSLLERLLAAGKKEHPPVCAILGGILGQEVIKSISCKGDPIKNFFYFDDADGKGAMEDIPPTPED

SEQ ID NO: 28449 - protein, 264 aa, Triticum aestivum
MDDHMVTEDDLNSNFLIPHDESVYGGKSRAEVCCESLKDFNPMVRVAVAKGNPSLIDGTFIDMFDIIVVSCASLKTKLFINDNCRKRSKHIAFYSVECKDSCGEIFVDLQDHSYLQKKPGGEPEQQELKYPSLQEAISVPWKDLSKRTTKLYYAMRVLESYESSEGRDPGETSLSDLPAVLARRKDMCDRMSVDESKIPTSLLERLLAAGKKEHPPVCAILGGILGQEVIKSISCKGDPIKNFFYFDDADGKGAMEDIPPTPED

SEQ ID NO: 28450 - protein, 260 aa, Triticum aestivum
MVTEDDLNSNFLIPHDESVYGGKSRAEVCCESLKDFNPMVRVAVAKGNPSLIDGTFIDMFDIIVVSCASLKTKLFINDNCRKRSKHIAFYSVECKDSCGEIFVDLQDHSYLQKKPGGEPEQQELKYPSLQEAISVPWKDLSKRTTKLYYAMRVLESYESSEGRDPGETSLSDLPAVLARRKDMCDRMSVDESKIPTSLLERLLAAGKKEHPPVCAILGGILGQEVIKSISCKGDPIKNFFYFDDADGKGAMEDIPPTPED

SEQ ID NO: 28451 - DNA, 1483 bp, Triticum aestivum
atttcaaaacttccagatccacctagggtttgcgcctcttccctccgcccccatcacacaagccgcatcgagggggacgacgccgacctcggaccgtcggaagcaccatggagaagtacgagaagttggagaaggtcggggagggcacctacggcaaggtgtacaaggcgcaggacaaggcgacgggccaggtggtggcgctcaagaagacccgcctggagatggacgacgaagggatcccgcccaccgcgctccgtgagatctccctcctccgcctcctctccagctccctctacgtcgtccgcctccttgccgtcgagcaggccaccaagggcgggggcgccggcggtggagggaagcccgtcctctacctcgtcttcgagttccttgacactgacctcaagaagttcgtcgacgcctaccgccgtggacccgcccctaagccgctcccaacgcaggtcgtcaagagctttttgtatcagttatgcaaaggaattgcacactgccatggccatggtgttcttcatcgggatttaaagccccaaaatctcttggttgacaaggagaagatgatactgaaaattgcagatcttgggttaagtagagcttttactgttcctatgaaaagctacacccatgagatcgtgacgctttggtatagagctcctgaagtactgcttggagcaacacattactcaaccagtgttgatatttggtccatcggatgcatctttgccgagatggtcagaaaacaggctcttttccctggtgactctgagttacagcaactgcttcacattttcaagctgttgggaactcctaccgaggaggattggcctggagtaactgctctgagggactggcacgagtttcctcagtggaaagcacaaagattgacgcgtgcagtccctacactggaaccagaaggaattgacctgttatcgaaaatgctccagttcgacccggcgaacaggatctcagccaaagctgcgctagagcatccctatttcaacagcctcgacaagtctcagttctagctgttctagctaccgtgtgatttttctcaacttggtgtgtgtgctctgctcgccaacttgttccgccatgagatcgatgctgaaaacgcacgaaaccatgtttcatctacctacaatcagcaacggcgtgttgctggtagttggctcccatgagcgcccgtctcctagacctccagcacttgatttgccttgagaattattgactgaagatacttgttcagatcatgtaggagttttatttgctctgtacggaattgtttgatgagatgggtttgcggacaatagacatttgtgtagcataataaggtagtactggtatttgttaagaaaatgttgcttcatgacaagtgaagttatttggagctgcgaagtggtgagaggcgtgtgtccgtggaaggagctaatagttagcatttgatgtggacattgaaaaaaaaaaaaaaaaa

SEQ ID NO: 28452 - protein, 309 aa, Triticum aestivum
MEKYEKLEKVGEGTYGKVYKAQDKATGQVVALKKTRLEMDDEGIPPTALREISLLRLLSSSLYVVRLLAVEQATKGGGAGGGGKPVLYLVFEFLDTDLKKFVDAYRRGPAPKPLPTQVVKSFLYQLCKGIAHCHGHGVLHRDLKPQNLLVDKEKMILKIADLGLSRAFTVPMKSYTHEIVTLWYRAPEVLLGATHYSTSVDIWSIGCIFAEMVRKQALFPGDSELQQLLHIFKLLGTPTEEDWPGVTALRDWHEFPQWKAQRLTRAVPTLEPEGIDLLSKMLQFDPANRISAKAALEHPYFNSLDKSQF

SEQ ID NO: 28453 - protein, 271 aa, Triticum aestivum
MDDEGIPPTALREISLLRLLSSSLYVVRLLAVEQATKGGGAGGGGKPVLYLVFEFLDTDLKKFVDAYRRGPAPKPLPTQVVKSFLYQLCKGIAHCHGHGVLHRDLKPQNLLVDKEKMILKIADLGLSRAFTVPMKSYTHEIVTLWYRAPEVLLGATHYSTSVDIWSIGCIFAEMVRKQALFPGDSELQQLLHIFKLLGTPTEEDWPGVTALRDWHEFPQWKAQRLTRAVPTLEPEGIDLLSKMLQFDPANRISAKAALEHPYFNSLDKSQF

SEQ ID NO: 28454 - protein, 178 aa, Triticum aestivum
ISKLPDPPRVCASSLRPHHTSRIEGDDADLGPSEAPWRSTRSWRRSGRAPTARCTRRRTRRRARWWRSRRPAWRWTTKGSRPPRSVRSPSSASSPAPSTSSASLPSSRPPRAGAPAVEGSPSSTSSSSSLTLTSRSSSTPTAVDPPLSRSQRRSSRAFCISYAKELHTAMAMVFFIGI

SEQ ID NO: 28455 - DNA, 1152 bp, Triticum aestivum
aacgccaatatttttggtggggcgcctgcttgctgccatccaaacagcccccaaatccgcgcgcctctcacatcccagaccgctgctgagcctggccgacatggccaccgcctcgatcgccgtccgctcggccttcggtgtcgccctggccgccttgatcgcggcgcgtgccgtccggcggcgctcgctggatgcctggggcggagctgccgggttcgccgtgatggcgctccaccttgcctgcggctataggtacggtgcgctgctgctggctttcttcttcacctcgtccaaggtgaccaagatcggcgaggaccgcaagcggcgcgttgaggaggatttcaaggagggtggccagcgcaactggatccaagttcttgcgaatagtgcaatagcaactgtattggttatcctattggcgataatgactgggggtcaggatcaatgcttggactcaaatggttcaaaggttataactggtataataggtgctattattggccattattgctgctgcaatggagacacttggtcatctgaaatcggtgtgcttagtgatgaacaaccaaggcttgtcactaccctgaaggtggtcagtaaacggggacctactgtcaccaagatttctggaatgactatcctggataatgatgctgttaatgcagtgtctgtgctgctaacatcggtgattacagcttatgcctgcattgtcttcttctagaagcaagggtttggttggctttttcacctgtccctaatgcgcagtgatgtgtaatgtgaatattccaaggacagaatgactgatgtttacttcaagcaagatgaacaatgaagtgttggaaatctttggctatttgctgggcacaattgacgagcctgatgacgtttgctccaggcagctagtttggtaatagtgcaagttgggaaattctaaattgttttaagcaagaaaaggccgtggtataatgcggaattgacaattatggtttttcgaaacctatctgtgtcgaagaaagtatctagttcgctgttttagaccacaatccaacaattatccccttgccaaattatagttaagttttgtctgaagtcaaattttgtgaactctgaccaattttatattatagagaaaaatatgaacatttacaatat

SEQ ID NO: 28456 - protein, 239 aa, Triticum aestivum
TPIFLVGRLLAAIQTAPKSARLSHPRPLLSLADMATASIAVRSAFGVALAALIAARAVRRRSLDAWGGAAGFAVMALHLACGYRYGALLLAFFFTSSKVTKIGEDRKRRVEEDFKEGGQRNWIQVLANSAIATVLVILLAIMTGGQDQCLDSNGSKVITGIIGAIIGHYCCCNGDTWSSEIGVLSDEQPRLVTTLKVVSKRGPTVTKISGMTILDNDAVNAVSVLLTSVITAYACIVFF

SEQ ID NO: 28457 - protein, 206 aa, Triticum aestivum
MATASIAVRSAFGVALAALIAARAVRRRSLDAWGGAAGFAVMALHLACGYRYGALLLAFFFTSSKVTKIGEDRKRRVEEDFKEGGQRNWIQVLANSAIATVLVILLAIMTGGQDQCLDSNGSKVITGIIGAIIGHYCCCNGDTWSSEIGVLSDEQPRLVTTLKVVSKRGPTVTKISGMTILDNDAVNAVSVLLTSVITAYACIVFF

SEQ ID NO: 28458 - protein, 165 aa, Triticum aestivum
MALHLACGYRYGALLLAFFFTSSKVTKIGEDRKRRVEEDFKEGGQRNWIQVLANSAIATVLVILLAIMTGGQDQCLDSNGSKVITGIIGAIIGHYCCCNGDTWSSEIGVLSDEQPRLVTTLKVVSKRGPTVTKISGMTILDNDAVNAVSVLLTSVITAYACIVFF

SEQ ID NO: 28459 - DNA, 1469 bp, Triticum aestivum
aaaacccccgaaacccccaaacgcacggcaggccatggagctgtcgatgagcggcggcgcgctgcggaccttctcccgcttcgtcacctgcctcgcccgcatcggctccgacctcgtcttccaggcctaccccgacaagctggagctgcacacgctcaacagctcgcggtcggcgttcgcgtccgtctccctcacgcgcgacttcttcgaccacttccacctccccgccgccgccgcgccgtcgtccacgccgctccagtgcagcgtcctcctcaagtccgtcctcgctgtgctccgcacgcccacctccgcggtcgaccgcctcaacgcttctctcccaaacccccaagcgtccaagctcgagttcgtcatccactgcatcagcgggcgtaagaagacgcaccggatctcgtgcagcgccgagtccgacgtgcagactctggcgctcgaccgcaacggcttccccagccgcctcgccatacggccacgggatctcacgcgcctgctttccaatttccagtcctcgctgcaggagctcacctttattgccacccagcctgctgcacggttgcctggcgtcgatgatgccactggggggaaggcagtcgagctcctaagctacatcgacccgaccaaagatgactacgacagtaggctgcacacacaactgtggatcgatccagcagaggagttcttggagtatgagcatgctggtgatcccgtagatgtcacatttggggtgaaagaattgaaggcatttttaacattttgtgaaggatgtgaggttgatattctcctattctatcagaaggctggcgaacctgtcctgttggctccaagatttggaatcgatgatggttcaagttctaatttcgatgtaactctagttctagccactatgcttgtatcacaactaaatgatggcagtgtgcctcagcagccacctacgtcagcacatcatgcagaagaaccaagggctgccgctgctgcaccatcaccagttcccgaaaatgtctcaaaccatacaagaatatggtcagagctttcaggtgttactcccaaaagctttgaagctaacgcagaaaatcgtgcccagatggagagaaatggaagagctaacgtgctgaatgacacatcagtgcttcccaataccaatgctccctgcaagctaccagtgacagataacgcaaactatatagagcagcctgtgcaaatggatcacttggaagagcctcctgaagttgtggttgataaccctcgttcgcagcatcacccaagcaactgggtaggtgccgacgaagacgatgatgatgaagaagatgaggagctttttgtccaaacaacacctcactacatggactaaggaccgatgctgattctgaatattgcaggtgtacagatcatgtgagtgtttctactgggcatcacggagttcctggcaggggtagggtggcgagaacaattattgt

SEQ ID NO: 28460 - protein, 453 aa, Triticum aestivum
KPPKPPNARQAMELSMSGGALRTFSRFVTCLARIGSDLVFQAYPDKLELHTLNSSRSAFASVSLTRDFFDHFHLPAAAAPSSTPLQCSVLLKSVLAVLRTPTSAVDRLNASLPNPQASKLEFVIHCISGRKKTHRISCSAESDVQTLALDRNGFPSRLAIRPRDLTRLLSNFQSSLQELTFIATQPAARLPGVDDATGGKAVELLSYIDPTKDDYDSRLHTQLWIDPAEEFLEYEHAGDPVDVTFGVKELKAFLTFCEGCEVDILLFYQKAGEPVLLAPRFGIDDGSSSNFDVTLVLATMLVSQLNDGSVPQQPPTSAHHAEEPRAAAAAPSPVPENVSNHTRIWSELSGVTPKSFEANAENRAQMERNGRANVLNDTSVLPNTNAPCKLPVTDNANYIEQPVQMDHLEEPPEVVVDNPRSQHHPSNWVGADEDDDDEEDEELFVQTTPHYMD

SEQ ID NO: 28461 - protein, 442 aa, Triticum aestivum
MELSMSGGALRTFSRFVTCLARIGSDLVFQAYPDKLELHTLNSSRSAFASVSLTRDFFDHFHLPAAAAPSSTPLQCSVLLKSVLAVLRTPTSAVDRLNASLPNPQASKLEFVIHCISGRKKTHRISCSAESDVQTLALDRNGFPSRLAIRPRDLTRLLSNFQSSLQELTFIATQPAARLPGVDDATGGKAVELLSYIDPTKDDYDSRLHTQLWIDPAEEFLEYEHAGDPVDVTFGVKELKAFLTFCEGCEVDILLFYQKAGEPVLLAPRFGIDDGSSSNFDVTLVLATMLVSQLNDGSVPQQPPTSAHHAEEPRAAAAAPSPVPENVSNHTRIWSELSGVTPKSFEANAENRAQMERNGRANVLNDTSVLPNTNAPCKLPVTDNANYIEQPVQMDHLEEPPEVVVDNPRSQHHPSNWVGADEDDDDEEDEELFVQTTPHYMD

SEQ ID NO: 28462 - protein, 438 aa, Triticum aestivum
MSGGALRTFSRFVTCLARIGSDLVFQAYPDKLELHTLNSSRSAFASVSLTRDFFDHFHLPAAAAPSSTPLQCSVLLKSVLAVLRTPTSAVDRLNASLPNPQASKLEFVIHCISGRKKTHRISCSAESDVQTLALDRNGFPSRLAIRPRDLTRLLSNFQSSLQELTFIATQPAARLPGVDDATGGKAVELLSYIDPTKDDYDSRLHTQLWIDPAEEFLEYEHAGDPVDVTFGVKELKAFLTFCEGCEVDILLFYQKAGEPVLLAPRFGIDDGSSSNFDVTLVLATMLVSQLNDGSVPQQPPTSAHHAEEPRAAAAAPSPVPENVSNHTRIWSELSGVTPKSFEANAENRAQMERNGRANVLNDTSVLPNTNAPCKLPVTDNANYIEQPVQMDHLEEPPEVVVDNPRSQHHPSNWVGADEDDDDEEDEELFVQTTPHYMD

SEQ ID NO: 28463 - DNA, 1513 bp, Triticum aestivum
atagagcgagtcttcttcttcctccctgctctgaccgagatccgctccagtggactcgattagggttagggtttgcctctccgatcgtgaggcgggttgctacatctgccttgttcgtcggattccggtagaatcaaccactcgatcgacttaatttcccccgccggtgctgcctctgttttgccgaagatgctgggcggactttacggcgacctcccgccgcccacctcggcggccggcgacgacgacaagccgaccgcctccgtctggtcgagcgccaccaagatggcaccgcccaccctccgcaagccctccgcgaccttcgcccctcccacgtccctcctcaggaaccagcacccccgccccgccgccgctcccaaggccagcgccgtccaccagcagcagcagcagcagccgccgcaccccctccccctcgcctccgccgtcaccaccaccaccgcagcgtccttccaccccgccctcgtcgccgtgcagtccaccgtgctcgaggagtacgaccccgccaggcccaacgactacgaggactaccgcaaggagaagctcaagcgggccaaggacgccgagatgaagaaggagctcgaccggaggcgccgcgaggaccaggagcgggagagggagcgcgagctgagggaggccgaggcacgcctgcgggaggagcagtccagggcctcctccctcaacatatccggcgaggaagcctggaagaggagggccgccatgagcggcgctggcggcggcgctactcctcagagggtctcgtctccgccccacggcgatgccagtggcttctccatcccaggctcctcctcctctggcttgggcgtgggcgccggcggccagatgaccgctgcccagagaatgatggccaagatggggtggaaggaaggccaggggctcggcaagcaagagcagggaatcacagcgcctctggttgctaggaagactgatcggagggcaggggttattgtcgatgagagcagttccaggaggcccagatcagccaactttgaaggccagcccaccagagtagtgctgctgcgtaacatgattggtccgggcgaggttgacgacgagctggaagacgagattgcctcggagtgctccaagtttggggctgtgttgcgcgtgctgatattcgagatcacccaggcaaacttccccgcagacgaagcagtgaggatcttcgtgctgttcgagaggacagaagattcaaccaaggcgttggtcgaactggaagggcgctactttggcggacgcatagtgcacgccaccttcttcgatgagggaaggttcgagaggaacgagctcgctccgatgcccggcgaagtaccagggttcgactaaaccttcataagcagactaaagaactggacgttggtgtctcgggtgtaatttaatctagagcatgaacgctgtttttctcttttcttttgaggacagtttacggcatgttgacctattgccgttttattattgcagagttgttattgtt

SEQ ID NO: 28464 - protein, 391 aa, Triticum aestivum
MLGGLYGDLPPPTSAAGDDDKPTASVWSSATKMAPPTLRKPSATFAPPTSLLRNQHPRPAAAPKASAVHQQQQQQPPHPLPLASAVTTTTAASFHPALVAVQSTVLEEYDPARPNDYEDYRKEKLKRAKDAEMKKELDRRRREDQERERERELREAEARLREEQSRASSLNISGEEAWKRRAAMSGAGGGATPQRVSSPPHGDASGFSIPGSSSSGLGVGAGGQMTAAQRMMAKMGWKEGQGLGKQEQGITAPLVARKTDRRAGVIVDESSSRRPRSANFEGQPTRVVLLRNMIGPGEVDDELEDEIASECSKFGAVLRVLIFEITQANFPADEAVRIFVLFERTEDSTKALVELEGRYFGGRIVHATFFDEGRFERNELAPMPGEVPGFD

SEQ ID NO: 28465 - protein, 359 aa, Triticum aestivum
MAPPTLRKPSATFAPPTSLLRNQHPRPAAAPKASAVHQQQQQQPPHPLPLASAVTTTTAASFHPALVAVQSTVLEEYDPARPNDYEDYRKEKLKRAKDAEMKKELDRRRREDQERERERELREAEARLREEQSRASSLNISGEEAWKRRAAMSGAGGGATPQRVSSPPHGDASGFSIPGSSSSGLGVGAGGQMTAAQRMMAKMGWKEGQGLGKQEQGITAPLVARKTDRRAGVIVDESSSRRPRSANFEGQPTRVVLLRNMIGPGEVDDELEDEIASECSKFGAVLRVLIFEITQANFPADEAVRIFVLFERTEDSTKALVELEGRYFGGRIVHATFFDEGRFERNELAPMPGEVPGFD

SEQ ID NO: 28466 - protein, 259 aa, Triticum aestivum
MKKELDRRRREDQERERERELREAEARLREEQSRASSLNISGEEAWKRRAAMSGAGGGATPQRVSSPPHGDASGFSIPGSSSSGLGVGAGGQMTAAQRMMAKMGWKEGQGLGKQEQGITAPLVARKTDRRAGVIVDESSSRRPRSANFEGQPTRVVLLRNMIGPGEVDDELEDEIASECSKFGAVLRVLIFEITQANFPADEAVRIFVLFERTEDSTKALVELEGRYFGGRIVHATFFDEGRFERNELAPMPGEVPGFD

SEQ ID NO: 28467 - DNA, 1166 bp, Triticum aestivum
aagttttcaaccaagtgagcggtaggtgggcggcggctgcacgcggccgctctgttgttccttccttcctcatcctcttttccccgccttgtcgcccgtccacgccgtggagagaccgcagaccagagccgttcgcaccgccattgcagcttgcccaggcaggtgctcgtgcgctcctgctcgcccgcggcccctgcccctccccctccccagcgatggcgacggcgttctcaaccaagcagcccctgcgggtcgctacgcctgcaagcaaatggcgtccaaggttgccactggttaaagtgcaatattcgtccaacaaacaagctagtgcttccatttcattgacgtccagtgcggaggatgcggagagaaacgagcccatagtcaaaatgtgcggcatcacatctgccagagatgcagaattcgccgcaaaggctggagctaaacttatcgggatgattctttggcctaagtccaaacgatctgtccaactgtcagaagcgaaggaaatatccagagtagcaaagtcatatggggctgaagctgttggtgtgtttgtcgatgatgatgaagagaccatcttaagagtgtctgattcatgcgaccttgaacttatccagcttcatggagatagttctcgagcactagttcctgctcttgccaagaacaaccggattgtatatgttcttaatgctgacgcggatggaaaacttatcaattctcctcctagtgaagaatatgacgttgactggtttttggtggacagtgcagagggtggaagtggcaaaggattcaactgggagaatttccgaatgccatcggtgaaaagcaagaacggctggctgttagcaggaggacttcatgcagacaatgtttgtcaagccgctaccgctctaaaaccaaatggtgtggatgttagcagcggaatatgctctcctgacggtataagcaaggacccgaagagaatatcatccttcatgagaagcgtacagtccttaagttcccgatgaggtctctatttagactccccaggcttattatagcttcttgcttcagtttgtgaagacatttgcaaataagctgtcctgaatgatagcagtaaataaacaactttgaagctgagttccaactatgcttgtctaatggtagcattagaccagtttctg

SEQ ID NO: 28468 - protein, 335 aa, Triticum aestivum
VFNQVSGRWAAAARGRSVVPSFLILFSPPCRPSTPWRDRRPEPFAPPLQLAQAGARALLLARGPCPSPSPAMATAFSTKQPLRVATPASKWRPRLPLVKVQYSSNKQASASISLTSSAEDAERNEPIVKMCGITSARDAEFAAKAGAKLIGMILWPKSKRSVQLSEAKEISRVAKSYGAEAVGVFVDDDEETILRVSDSCDLELIQLHGDSSRALVPALAKNNRIVYVLNADADGKLINSPPSEEYDVDWFLVDSAEGGSGKGFNWENFRMPSVKSKNGWLLAGGLHADNVCQAATALKPNGVDVSSGICSPDGISKDPKRISSFMRSVQSLSSR

SEQ ID NO: 28469 - protein, 264 aa, Triticum aestivum
MATAFSTKQPLRVATPASKWRPRLPLVKVQYSSNKQASASISLTSSAEDAERNEPIVKMCGITSARDAEFAAKAGAKLIGMILWPKSKRSVQLSEAKEISRVAKSYGAEAVGVFVDDDEETILRVSDSCDLELIQLHGDSSRALVPALAKNNRIVYVLNADADGKLINSPPSEEYDVDWFLVDSAEGGSGKGFNWENFRMPSVKSKNGWLLAGGLHADNVCQAATALKPNGVDVSSGICSPDGISKDPKRISSFMRSVQSLSSR

SEQ ID NO: 28470 - protein, 206 aa, Triticum aestivum
MCGITSARDAEFAAKAGAKLIGMILWPKSKRSVQLSEAKEISRVAKSYGAEAVGVFVDDDEETILRVSDSCDLELIQLHGDSSRALVPALAKNNRIVYVLNADADGKLINSPPSEEYDVDWFLVDSAEGGSGKGFNWENFRMPSVKSKNGWLLAGGLHADNVCQAATALKPNGVDVSSGICSPDGISKDPKRISSFMRSVQSLSSR

SEQ ID NO: 28471 - DNA, 958 bp, Triticum aestivum
aaccatttcacctcacaacacttctcatcttggagctcagcagcacagcatccaagcttcttcttcggcaagatgaacaggaagccaggcgactgggactgcaggtcgtgccagcacctcaacttcagtcgccgggacctatgccagcgctgcggcgagccacgcagtgccgctgaccgtggcagcgtcggtggcgctcttggtggtgactacgccaactttggcggccgtggcgggggtggttcctcctttggtaccggctttggtgccggctctgacgtccgcccgggcgactggtactgcacctgcggggcgcacaacttcgccagccgctccagctgcttcaagtgtgctgccttcaaggaggaagctgccgtcaatggtggcgctggtggctttgatggtgacatgtcacgctcaaggggcttcggcttcggcgctgtcggtggcatgggtggcggcatgggagccggcgcggccggtggtcgtgccagccgccctggctggaagtctggcgactggatttgcaccaggtctggatgcaacgagcacaacttcgccagcaggcaggagtgcttcaggtgcaacgcaccgagggactccggtagcgccacgccatacgaaaatttcttgcactgaggtgtaggaaggccgcggcgatgagcagaagcagcaaagggtgtccgtgtcccgcagtcgacatcatcatcataagaagaagaagaagaaagtagaatgcaaagaaatcctcctcgagtgcatgcttactagttttgtctcttcccgttttagatttggttgtcatttcccatttgggaccgtccgtctgtccgtctgatcgatgatgactagctatgtttaccgttttattatttccgttcctttcatcaagtttgcagttcgagttatgtaacccaaagacgtatgctttgcttcagaagtattattgactagtagt

SEQ ID NO: 28472 - protein, 212 aa, Triticum aestivum
NHFTSQHFSSWSSAAQHPSFFFGKMNRKPGDWDCRSCQHLNFSRRDLCQRCGEPRSAADRGSVGGALGGDYANFGGRGGGGSSFGTGFGAGSDVRPGDWYCTCGAHNFASRSSCFKCAAFKEEAAVNGGAGGFDGDMSRSRGFGFGAVGGMGGGMGAGAAGGRASRPGWKSGDWICTRSGCNEHNFASRQECFRCNAPRDSGSATPYENFLH

SEQ ID NO: 28473 - protein, 188 aa, Triticum aestivum
MNRKPGDWDCRSCQHLNFSRRDLCQRCGEPRSAADRGSVGGALGGDYANFGGRGGGGSSFGTGFGAGSDVRPGDWYCTCGAHNFASRSSCFKCAAFKEEAAVNGGAGGFDGDMSRSRGFGFGAVGGMGGGMGAGAAGGRASRPGWKSGDWICTRSGCNEHNFASRQECFRCNAPRDSGSATPYENFLH

SEQ ID NO: 28474 - DNA, 937 bp, Triticum aestivum
tccctctccctctccctctccaacgcatcgggcaacccacccccctccaaccctctcccactgattcgctcgccgcgcgcgcgcgagatccagccgcgccccccgccgagatctcccggcggatcactaggacggcgccgccgaggagctcggagccatggaggcgtcgtcctgggacgcccttcgcaagcaggcgaggaggttggaagctcagttagacgaccaaatgattgcataccgtaaattggtttctatgaaatcagatggttcagaaaatgatatcgagactgatatagaaagatcactaaagcaacttcagcaagtaaattctcaaatgcaaacctgggtatcatcaggaggctcagaagttctatctcatacattgacccgtcatatggagattttgcaagaccttacgcaggaattctatcggcttcgatctagtctcagagtgaagcaacagcatgcttctctccttgacttgagagactttgacagagcaaagtttgacgtggaagagtctggggactcagaacaagctcttcttagagaacaagctgcaatcagcaggaattctggacaggtggacactgtgatatcacaagctcaagcaacactgggcgctctcatgtcccagcgttcaacgtttggtggcatcactaccaaaataagcaacgtcagcagccggatccccacgattaaccacatcctcgcgtcgatcagaagaaagaaatcgatggacacgataattctctcgctcgtggcgtcggtctgcgcgtttcttatgttcatctactggttgtcaaagtagtaggatgtggttggccacagcgaaaaggcatcatagtgttgtaagtttggatcacagtgccggtacagataatgatatgatgattggtgtttgtacaatattgattcaatggtattacgttttcac

SEQ ID NO: 28475 - protein, 217 aa, Triticum aestivum
MEASSWDALRKQARRLEAQLDDQMIAYRKLVSMKSDGSENDIETDIERSLKQLQQVNSQMQTWVSSGGSEVLSHTLTRHMEILQDLTQEFYRLRSSLRVKQQHASLLDLRDFDRAKFDVEESGDSEQALLREQAAISRNSGQVDTVISQAQATLGALMSQRSTFGGITTKISNVSSRIPTINHILASIRRKKSMDTIILSLVASVCAFLMFIYWLSK

SEQ ID NO: 28476 - protein, 194 aa, Triticum aestivum
MIAYRKLVSMKSDGSENDIETDIERSLKQLQQVNSQMQTWVSSGGSEVLSHTLTRHMEILQDLTQEFYRLRSSLRVKQQHASLLDLRDFDRAKFDVEESGDSEQALLREQAAISRNSGQVDTVISQAQATLGALMSQRSTFGGITTKISNVSSRIPTINHILASIRRKKSMDTIILSLVASVCAFLMFIYWLSK

SEQ ID NO: 28477 - protein, 185 aa, Triticum aestivum
MKSDGSENDIETDIERSLKQLQQVNSQMQTWVSSGGSEVLSHTLTRHMEILQDLTQEFYRLRSSLRVKQQHASLLDLRDFDRAKFDVEESGDSEQALLREQAAISRNSGQVDTVISQAQATLGALMSQRSTFGGITTKISNVSSRIPTINHILASIRRKKSMDTIILSLVASVCAFLMFIYWLSK

SEQ ID NO: 28478 - DNA, 1226 bp, Triticum aestivum
atcaggcaccacccaagatcgatcatgaagccatacatgcccacggtactgagaccccctagggtggtggccatcctggccgtggtcctggcggcggcgctcgccacagccgtgaacgctcagcagtgcggctcccaggctggtggcgcgacgtgcgcaaactgtctctgctgcagcaaattcgggtactgcggcagcggcgacgcctactgcggtgccggctgtcagagccagtgcagcggctgcggccccacccctcccggccccagccccggcgggggcgtgtcgtccatcatctccagggacctcttcgagcggctccttcttcaccgcaatgactgccaagaggcccgcgggttctacacgtacgacgccttcctcgccgccgccgccgcgttcccgtcattcggcaccacggggagcacggagacgcggaagcgggaggtggcggccttcctggggcaaacttcccacgagaccactggcgggtggcccgcggcgcccgacggaccgtacgcctggggctactgcttcaagcaggagcagggctcgccgggaagctactgcgagccaaagccggagtggccgtgcgcgtcgggcaagaaatactacggtcgcggccccatccagctctcatggaactacaactatggccccgcggggcgtgccatcggggtggacctgctcaacaacccggacctggtcgccgcggacgcgacggtgtcgtttaagacggcgttatggttttggatgacggctcaggcgaacaagccgtcgtcccatgccgtgatcacaggccaatggaccccgtcgggcacggacaacgctgctggtcgggtgcctgggtacggtgtcatcaccaacataatcaacggcgggctcgagtgcggtagggggcaagatgaccgtgttgctaaccggatcgggttctacaagcgctactgcgatgtcctcggcgttggctatggtaacaacctcgactgctacaaccagaggccgtttaacagtgggctctcgatggggcttgccactgagtgacaacatactaagactgtgagcgagtcctccatgcatggatgtatgaatgtgatcacccataaataagcttgagaagtactgtttgggtaaatttcccattgttgtgtgagtatctctcgactcggtgtagaggttgagaatgttgcatctttattaaaaggactttgctacacctacgtaatttagct

SEQ ID NO: 28479 - protein, 345 aa, Triticum aestivum
IRHHPRSIMKPYMPTVLRPPRVVAILAVVLAAALATAVNAQQCGSQAGGATCANCLCCSKFGYCGSGDAYCGAGCQSQCSGCGPTPPGPSPGGGVSSIISRDLFERLLLHRNDCQEARGFYTYDAFLAAAAAFPSFGTTGSTETRKREVAAFLGQTSHETTGGWPAAPDGPYAWGYCFKQEQGSPGSYCEPKPEWPCASGKKYYGRGPIQLSWNYNYGPAGRAIGVDLLNNPDLVAADATVSFKTALWFWMTAQANKPSSHAVITGQWTPSGTDNAAGRVPGYGVITNIINGGLECGRGQDDRVANRIGFYKRYCDVLGVGYGNNLDCYNQRPFNSGLSMGLATE

SEQ ID NO: 28480 - protein, 337 aa, Triticum aestivum
MKPYMPTVLRPPRVVAILAVVLAAALATAVNAQQCGSQAGGATCANCLCCSKFGYCGSGDAYCGAGCQSQCSGCGPTPPGPSPGGGVSSIISRDLFERLLLHRNDCQEARGFYTYDAFLAAAAAFPSFGTTGSTETRKREVAAFLGQTSHETTGGWPAAPDGPYAWGYCFKQEQGSPGSYCEPKPEWPCASGKKYYGRGPIQLSWNYNYGPAGRAIGVDLLNNPDLVAADATVSFKTALWFWMTAQANKPSSHAVITGQWTPSGTDNAAGRVPGYGVITNIINGGLECGRGQDDRVANRIGFYKRYCDVLGVGYGNNLDCYNQRPFNSGLSMGLATE

SEQ ID NO: 28481 - protein, 333 aa, Triticum aestivum
MPTVLRPPRVVAILAVVLAAALATAVNAQQCGSQAGGATCANCLCCSKFGYCGSGDAYCGAGCQSQCSGCGPTPPGPSPGGGVSSIISRDLFERLLLHRNDCQEARGFYTYDAFLAAAAAFPSFGTTGSTETRKREVAAFLGQTSHETTGGWPAAPDGPYAWGYCFKQEQGSPGSYCEPKPEWPCASGKKYYGRGPIQLSWNYNYGPAGRAIGVDLLNNPDLVAADATVSFKTALWFWMTAQANKPSSHAVITGQWTPSGTDNAAGRVPGYGVITNIINGGLECGRGQDDRVANRIGFYKRYCDVLGVGYGNNLDCYNQRPFNSGLSMGLATE

SEQ ID NO: 28482 - DNA, 825 bp, Triticum aestivum
atagggtttcgcctgaaccgccgtcgccgtcgccgtggtcgtcgccgccatgtacaacggcatcgggctgcagacggcgcgcgggtccggcacgaatgggcacgtccagaccaacaagttcttcatccagccccggaccggcggcccgccgcccaaggcgccgctccacagccacgacgacggcgccgccgggacgcggaagccgaacaaggagatcctggagcacgaccggaggcggcaggtggagctgcggctggtcgagctgagggacaccctcgaggagcagggctacacggaaggcgagatcgaggagcgcgtcgaggaggcgcgcaagaaagccgagctggaggctgcccgcggcggcgccgggggtgcagcaccgcgtccgggcgaagggttcatgggtatgcagagccaccatgtcgcagcacgcaaggagaagaagctcgaggcgatgagggctgctcttgggctagatgctgaggttggacagaagaggaacgctcaagtagacagtggggagcttgtacctgggaaggatgggttctgaagaagaatgttggacatcgatgttcagagcaacaggagggctttcaattatggtaacaggcgtagagtaaggggaaaaaagggaatggcaacagcacaagttctaagaagggtaagcatgggtatgattcagaagatgattctgagactgaccatgatgatgagaaaagggggaaagaaacacctgaggaaatccttcttagatagagatgttgattctgagattgttcataagaaggcaactatgtaagctatgtatatctaacctgtgctttt

SEQ ID NO: 28483 - protein, 166 aa, Triticum aestivum
MYNGIGLQTARGSGTNGHVQTNKFFIQPRTGGPPPKAPLHSHDDGAAGTRKPNKEILEHDRRRQVELRLVELRDTLEEQGYTEGEIEERVEEARKKAELEAARGGAGGAAPRPGEGFMGMQSHHVAARKEKKLEAMRAALGLDAEVGQKRNAQVDSGELVPGKDGF

SEQ ID NO: 28484 - protein, 160 aa, Triticum aestivum
IGFRLNRRRRRRGRRRHVQRHRAADGARVRHEWARPDQQVLHPAPDRRPAAQGAAPQPRRRRRRDAEAEQGDPGARPEAAGGAAAGRAEGHPRGAGLHGRRDRGARRGGAQESRAGGCPRRRRGCSTASGRRVHGYAEPPCRSTQGEEARGDEGCSWARC

SEQ ID NO: 28485 - protein, 87 aa, Triticum aestivum
RVSPEPPSPSPWSSPPCTTASGCRRRAGPARMGTSRPTSSSSSPGPAARRPRRRSTATTTAPPGRGSRTRRSWSTTGGGRWSCGWSS

SEQ ID NO: 28486 - DNA, 798 bp, Triticum aestivum
cctaattcgctagctcgctctcgctcccgctgccgctctcaagctacctggcttctagctagctagggttcgtctacggaagctgaccgcgagctggctggccggagagaccgagcagctccgcgcgccgcagcgggcctggagctgcctagctagcaaagctcggtggagttcttgtgaagctagctagcggacgatcgaaagccgatcgacgatgcgcctcgtcgtcggaggtcacgtgagatgatgagcggcaacaaccagcaccagcagtcggcggcggcggcggcggcggaggaggagcaggagctagcgcggaagcacgcggccgcggtggctacgtcgcggcaatggtcgtcgcagacggagtcacggatagtgcgcgtgtcgcgcgtcttcggcggcaaggaccgccacagcaaggtgaagaccgtcaagggtctccgcgaccggcgcgtgcggctgtccgtgcagacggcgatccagctctacgacctgcaggaccggctgggccttaaccagcccagcaaggtcgtcgactggctgctcaacgcggcccgccacgagatcgacaagctgccgccgctccagttcccgccgcaccaggtcgacctcatggaccacatgatgacctcctcctccatgccactcatgccgcacgtcgatgacaagttctgccactttgcgtccacgctcgcccgagatggtggcgtcaaggccggggccgacgctgacggcggtggagctcaccacaacattgggaggttcggctaccaccggttcatggggctcaacaac

SEQ ID NO: 28487 - protein, 185 aa, Triticum aestivum
MMSGNNQHQQSAAAAAAEEEQELARKHAAAVATSRQWSSQTESRIVRVSRVFGGKDRHSKVKTVKGLRDRRVRLSVQTAIQLYDLQDRLGLNQPSKVVDWLLNAARHEIDKLPPLQFPPHQVDLMDHMMTSSSMPLMPHVDDKFCHFASTLARDGGVKAGADADGGGAHHNIGRFGYHRFMGLNN

SEQ ID NO: 28488 - protein, 184 aa, Triticum aestivum
MSGNNQHQQSAAAAAAEEEQELARKHAAAVATSRQWSSQTESRIVRVSRVFGGKDRHSKVKTVKGLRDRRVRLSVQTAIQLYDLQDRLGLNQPSKVVDWLLNAARHEIDKLPPLQFPPHQVDLMDHMMTSSSMPLMPHVDDKFCHFASTLARDGGVKAGADADGGGAHHNIGRFGYHRFMGLNN

SEQ ID NO: 28489 - DNA, 1436 bp, Triticum aestivum
tccgccgcgcacgcacacaacctccatctcttccccccttccgcagaaccctagctgtccacaagtctcttcgtcggcgatggcggcggcggagaacgccggggacgtggcggcgggggagagccgcaagctgttcgtgggtggcatcccgtcctcagcgcaggagacggagctgcggggtcactttgcccgcttcggtgcggtgcgctcaatcgtcgtgatgcgggacaaggagtcgggccacggccgcgggttcgggttcgtcgagttcgaggacgaagaagcggccgccaaggcgctcggcgatggggagaggcccaagcacttcatctgcggccgactggtggacgttaagagggcgcgtgctagacctcctcggaacttgggcgagcaacctgtgcatcaacatcagcatcagcatcagctggaacagggtccagttcagggtcaccaagacgctggggacagtaccgaggccagtagtgacagtatgagctatgcttcaaagaaggtattcattggtggtttgcgtgacaacatcacagaggaggagttcagagcttactttgaggcgtttggcactgtaacagatgttgttgtgatatacgacagcctgacaagcaggtcaaggggttttggttttgtcacctttgattccgaggaagctgtgagaaaggtgatggggcaaagctttcatgacttgaaagggacaagggtggaagcaaagatcgctatccccaaggatgctcagtattaccgtaatggccgaggtcgtggctcaagaacctttggcggaaggggtcctgttggctttgatggttcaacataccaaccgtacaataaccgacatggtttctacaatggctatatgccacaacctgttcccacacatccctactatcatggcctctattttggtatgggaggcaatccctatgcaaatgcatatccaaaccatgcagtcatggcaaatgttccaaacatggtggcaaggcgtccagtatatagcccatatcccccaatgtatcctggctatggttttgcatacagaagtggttatgcgggtgctgcaccttctgttcagtatggcgttaatggtggcagggattacatgaatgaccaagactctatggatgtacaagaacttgacagcactgctaccattgctacaaagtttgaatacatgaagctaggttcacaatgacgttctgggcaattatttctacactgatgacagcggaagtcgcaactgtgaagacatgagctgagattctttggttgacaagtacatcattggaaattatcaacttacccccattccttgtttcaactgcatgtagactgaaaacattcaagttccaactggctgttgagctcacatgccttgtaccaatgcttaaatccttttaatgtatcagaatcagaacatttgatgc

SEQ ID NO: 28490 - protein, 400 aa, Triticum aestivum
PPRTHTTSISSPLPQNPSCPQVSSSAMAAAENAGDVAAGESRKLFVGGIPSSAQETELRGHFARFGAVRSIVVMRDKESGHGRGFGFVEFEDEEAAAKALGDGERPKHFICGRLVDVKRARARPPRNLGEQPVHQHQHQHQLEQGPVQGHQDAGDSTEASSDSMSYASKKVFIGGLRDNITEEEFRAYFEAFGTVTDVVVIYDSLTSRSRGFGFVTFDSEEAVRKVMGQSFHDLKGTRVEAKIAIPKDAQYYRNGRGRGSRTFGGRGPVGFDGSTYQPYNNRHGFYNGYMPQPVPTHPYYHGLYFGMGGNPYANAYPNHAVMANVPNMVARRPVYSPYPPMYPGYGFAYRSGYAGAAPSVQYGVNGGRDYMNDQDSMDVQELDSTATIATKFEYMKLGSQ

SEQ ID NO: 28491 - protein, 374 aa, Triticum aestivum
MAAAENAGDVAAGESRKLFVGGIPSSAQETELRGHFARFGAVRSIVVMRDKESGHGRGFGFVEFEDEEAAAKALGDGERPKHFICGRLVDVKRARARPPRNLGEQPVHQHQHQHQLEQGPVQGHQDAGDSTEASSDSMSYASKKVFIGGLRDNITEEEFRAYFEAFGTVTDVVVIYDSLTSRSRGFGFVTFDSEEAVRKVMGQSFHDLKGTRVEAKIAIPKDAQYYRNGRGRGSRTFGGRGPVGFDGSTYQPYNNRHGFYNGYMPQPVPTHPYYHGLYFGMGGNPYANAYPNHAVMANVPNMVARRPVYSPYPPMYPGYGFAYRSGYAGAAPSVQYGVNGGRDYMNDQDSMDVQELDSTATIATKFEYMKLGSQ

SEQ ID NO: 28492 - protein, 327 aa, Triticum aestivum
MRDKESGHGRGFGFVEFEDEEAAAKALGDGERPKHFICGRLVDVKRARARPPRNLGEQPVHQHQHQHQLEQGPVQGHQDAGDSTEASSDSMSYASKKVFIGGLRDNITEEEFRAYFEAFGTVTDVVVIYDSLTSRSRGFGFVTFDSEEAVRKVMGQSFHDLKGTRVEAKIAIPKDAQYYRNGRGRGSRTFGGRGPVGFDGSTYQPYNNRHGFYNGYMPQPVPTHPYYHGLYFGMGGNPYANAYPNHAVMANVPNMVARRPVYSPYPPMYPGYGFAYRSGYAGAAPSVQYGVNGGRDYMNDQDSMDVQELDSTATIATKFEYMKLGSQ

SEQ ID NO: 28493 - DNA, 1096 bp, Triticum aestivum
caagaacatcctaatcgaaaaaacatcccactcctccgaccccctcgcatccctgtcggaatcgcgcatccggagctcgccgccctcgccatggcgcaaggtaccgcgccctccgcggccggcggaggcggcgggggtgttttcaccaccccggcggcggtcgcgacgactcccccgggcacaccccgcgcagcggcggcggcggcgccgccggccccctccgggcactacgcggtagagctctacttcgatcccgcgctggagaaccaggtgctcaaggcgtggaacgctctcgcgcggcggcagctcagcagccgcctcatcgacaccgcgtcccgcccgcacctcccgctgctgcatctcccggccgccgcgctccccgacccgctccgcctcgcgcccgccctccgcgcgctcgcctcccgcatcgacccgctccccctcgcgctctcctcgctcgcgtcgcccccgtcatcccttgatgcgggggtcctcttcctctcgcccacgccatcggcggcgctgctcggcctccacgcgcagctctgcgagctgctgcgcaaggacacggggctcgaggtgcccgacgggttccgcccggacaactgggtcccgcggtgcgccgtcgccgtcgatgtgccgcgtggccgtatggccgaggccttttgcgtgctccgtgagctcaagcttttgcctgtctccgggtatggtatggacattgcgctggtagaagtcgcgccggtggtcagagaggtcgtgtcgtacccgcttggtggcagcggcggtgttggagccgattgagaggtgttgttgtaatttgtacaatgtgaagaacctcctggatgggactatcatatttaacaaagggcatcataatgataacatgggcatctccttgtccagtttgcccaattggtaagaagctaagtcagaaaaagaagggcagatcatactgtatcctaccgcatatacagtagtttcttcttatttgtttaatcttttggttgataatactctgctactcagctgtagaaacttcataaactgaaactgttacctgtgttcaagtttatgtaatgaatggtcagttattgtg

SEQ ID NO: 28494 - protein, 266 aa, Triticum aestivum
QEHPNRKNIPLLRPPRIPVGIAHPELAALAMAQGTAPSAAGGGGGGVFTTPAAVATTPPGTPRAAAAAAPPAPSGHYAVELYFDPALENQVLKAWNALARRQLSSRLIDTASRPHLPLLHLPAAALPDPLRLAPALRALASRIDPLPLALSSLASPPSSLDAGVLFLSPTPSAALLGLHAQLCELLRKDTGLEVPDGFRPDNWVPRCAVAVDVPRGRMAEAFCVLRELKLLPVSGYGMDIALVEVAPVVREVVSYPLGGSGGVGAD

SEQ ID NO: 28495 - protein, 236 aa, Triticum aestivum
MAQGTAPSAAGGGGGGVFTTPAAVATTPPGTPRAAAAAAPPAPSGHYAVELYFDPALENQVLKAWNALARRQLSSRLIDTASRPHLPLLHLPAAALPDPLRLAPALRALASRIDPLPLALSSLASPPSSLDAGVLFLSPTPSAALLGLHAQLCELLRKDTGLEVPDGFRPDNWVPRCAVAVDVPRGRMAEAFCVLRELKLLPVSGYGMDIALVEVAPVVREVVSYPLGGSGGVGAD

SEQ ID NO: 28496 - DNA, 1212 bp, Triticum aestivum
gagtaggacagccccagaggaggaggatacacagccgctagctcttcccccgcggcgcccgatctcgtcgtacttggagccttggaggagactcgaaccctaatcccctcccgccgcaggagagatcccgctcagcctcggctccaatccgcgactcgactcgactcgaagctccagctccgccgccgccccccgccgctgccgatggatccgaagctggtggaggtgacgcagctgatcgaccgcttcaaggcggccttcaaggccagcaatttcgacgtctgctcgaccctcctctcgcagctcaaggtcctcctcaccaagttccccagccttcccccggtgttccagcagacgcccaacgccgtggaggagctcaagcttgcgagggaaatttatgagcaggcagttattttgagtgtgaaaatggaagaccaagatgcatttgaaagggacttctgccagctcaagccgtattacatggacacatgtggcataattcccccatcatcggaggagtacccaatcatgggggctaaccttctgaggctgttagtccagaatagaattgcggagttccacactgagctggagcttcttcccgccaaagcgctggataatgcttacatcaagcacggggttgagctcgagcagtcctttatggagggcgcatacaaccgcgtgctgagcgctcgacaaaccgcgccgcatgaaacctacatatacttcatggaccttctcgtcaaaacggttagagacgagatagctgggtgcagcgagaagggatatgattacctgtcaataaacgacgcgaagcagatgtttaagttcagctccgacaaggaactgcaacagtacatcgcagaggagcaccccgagtgggatgtcaaggacggccgggtcttgttccagaaggcgaaggagtcccagccctgcaaggagatcccggcggcgccggtcatcaaccagacccttggctacgcgagggaattggagaggattgtgtgatttgtttgcctcttttttcttcatctttggactgagtttcccatgaagaggtggattattggattgccctgtgactcggctgtactattttgttaaatcgtttgtttcacctagggtttccaaagctacacaactgtgaaatgtcggcctaaaatggcacaagaaacaatgcctgttatgttaatcaattgattgtgtaagcgg

SEQ ID NO: 28497 - protein, 267 aa, Triticum aestivum
MDPKLVEVTQLIDRFKAAFKASNFDVCSTLLSQLKVLLTKFPSLPPVFQQTPNAVEELKLAREIYEQAVILSVKMEDQDAFERDFCQLKPYYMDTCGIIPPSSEEYPIMGANLLRLLVQNRIAEFHTELELLPAKALDNAYIKHGVELEQSFMEGAYNRVLSARQTAPHETYIYFMDLLVKTVRDEIAGCSEKGYDYLSINDAKQMFKFSSDKELQQYIAEEHPEWDVKDGRVLFQKAKESQPCKEIPAAPVINQTLGYARELERIV

SEQ ID NO: 28498 - protein, 193 aa, Triticum aestivum
MEDQDAFERDFCQLKPYYMDTCGIIPPSSEEYPIMGANLLRLLVQNRIAEFHTELELLPAKALDNAYIKHGVELEQSFMEGAYNRVLSARQTAPHETYIYFMDLLVKTVRDEIAGCSEKGYDYLSINDAKQMFKFSSDKELQQYIAEEHPEWDVKDGRVLFQKAKESQPCKEIPAAPVINQTLGYARELERIV

SEQ ID NO: 28499 - protein, 175 aa, Triticum aestivum
MDTCGIIPPSSEEYPIMGANLLRLLVQNRIAEFHTELELLPAKALDNAYIKHGVELEQSFMEGAYNRVLSARQTAPHETYIYFMDLLVKTVRDEIAGCSEKGYDYLSINDAKQMFKFSSDKELQQYIAEEHPEWDVKDGRVLFQKAKESQPCKEIPAAPVINQTLGYARELERIV

SEQ ID NO: 28500 - DNA, 1201 bp, Triticum aestivum
gaaattggcgccacctccctcccgtgctcgcccctcgcctgggctctcgacccatccctgctcgaaccctaacctcagatggcgcttcccgcgtgagagaacgctgccgcggcagcagcgttgaggggggcttcgtcgtagtcagcgcgacagatgtataagcagggggcggccggaggtgcggggccggaccggaagcgcatcagcgacgcgctcgataagcacctggagaaggcggccgcgtcgccctccacgtcgagaggctcggcgggtgcccgaggcaaccacaaccgcgtcgtagtgccgtcctccatccccaagggccgctgctccgaaggggagtctgaatctgacagtgaagcatcagatgttagtggctctgatggagaagacacctcatggatttcatggtattgcaacctaagagggaatgagttcttctgtgaagtcgatgatgattacattcaagatgacttcaatctttgtgggcttagcagtcaagttccatattatgattatgctcttgatctcattttagatatcgagtcttctcatggtgatattttcacagaagaacaaaatgagctagtggaatcagctgctgagatgttgtatgggctaattcatgcgcgatacattctgaccagtaaagggttggctgctatgctggagaaatacaagaactatgactttggacgatgtccacgggtttattgctgtggccaaccatgtctaccagttggacaatcggatattcaccgatctagtacagtgaagatatactgtcctaagtgcgaagacatctactatccacggtctaaataccaaggcaatattgatggagcctactttgggacaacatttcctcacctgtttctgatgacgtacgatcacctcaagccccagaagccctcgcagcgctatgttcctcgcgtatttggcttcaagctccacaaccacaagccatgatgcggaggtgaaggaaaagataagaggccccggaagactactgtaagagtgcaatcgccagatcatgctgcccacccatattgtgtgccctgtctggtctatttaacattgaaatattggtataaaagaagacatgagacgatgttgtaacctaattccagctctactggctagtaaatctggacctctgtttccaaaaccagcagctatcgagaaatcaaagttatggtcg

SEQ ID NO: 28501 - protein, 271 aa, Triticum aestivum
MYKQGAAGGAGPDRKRISDALDKHLEKAAASPSTSRGSAGARGNHNRVVVPSSIPKGRCSEGESESDSEASDVSGSDGEDTSWISWYCNLRGNEFFCEVDDDYIQDDFNLCGLSSQVPYYDYALDLILDIESSHGDIFTEEQNELVESAAEMLYGLIHARYILTSKGLAAMLEKYKNYDFGRCPRVYCCGQPCLPVGQSDIHRSSTVKIYCPKCEDIYYPRSKYQGNIDGAYFGTTFPHLFLMTYDHLKPQKPSQRYVPRVFGFKLHNHKP

SEQ ID NO: 28502 - DNA, 1420 bp, Triticum aestivum
agtacacacctcggtttggaacttggaagtcgagacacatacacacacacatactagatacatatccatacttctgttgctcattgcatctcctagttcagcaaattgccaaactgagacatgggaattgatcgtgtcaacacggcagccactggccgcggacgcaccgtctgtgtgaccggcgccggcggtttcatcgcgtcctggctagtgaagctcctcctggagaagggctacgccgtccacggcaccgtccggaaccctgatgacgtggcaaggaatgcgcacctgagagccttggaaggggcgacggagcgactgaccctcttccaggtggacctgcttgacaaggagagcctcgtcgctgctttccaaggatgcgaaggcgtattccacaccgcatgccccgtcaccgatgacccggaaaaaatgatcgagccggcagtgaacggaacgagaaacgtgttcaacgccgcggcagaggtgggcggcatccggcgtgtggtaatgacgtcgtcgatcggctccgtgtacatggatcctcgtcgtagcatcgatggggaggccgatgagacatgttggagcgacctcgagttctgcaagaacacaaagaattggtactgctatgcgaagacggtggcggagcaggccgcatgggagctcgccaaggagaggaagcttgaccttgtggtgatcaacccgtctctagtgttgggccctctgctacagatggcggtgaacgccagtacgtggcatattgccaagtatctggacggctcggtgcagacgtatgccaacgcggcacaggcgtacgtgcacgtccaggacgtcgcggacgcgcacgcgcgtgcgtacgagacgcccgatgcgcatggccggtacctctgcgcggggcgcacgctgcaccgtgccgaggtgtgtcgcatccttgccaagttcttcccggagtaccccgtgcccacgaggtgcaaggaaggggcgggcgagatgaagaagggttgtcggttcagcagtcggaggatcatggatctcggcgtcggcatcacgccggcgagccagtgtctctacgacacggtcaccagccttcaggacaagggcatcttaccacgtcgcgacgctgatatgtcctgacaactccatggtcaccttggtcaagttagcagcatgcatgcccgcttgatgattacaaagtcatggcatttaattctttatttacttcttagttgttcaaatataaggccctgtccagagcacctccaccccacaactccactccccaagttgatggagttacagttgaaaactgtggagcagctatttcctggctccacagctcccagaatttcgtggagctggtggatttccgaacaggccctaagtgtccattgtaaaagaatatgttatgatatgatgtttatcc

SEQ ID NO: 28503 - protein, 336 aa, Triticum aestivum
MGIDRVNTAATGRGRTVCVTGAGGFIASWLVKLLLEKGYAVHGTVRNPDDVARNAHLRALEGATERLTLFQVDLLDKESLVAAFQGCEGVFHTACPVTDDPEKMIEPAVNGTRNVFNAAAEVGGIRRVVMTSSIGSVYMDPRRSIDGEADETCWSDLEFCKNTKNWYCYAKTVAEQAAWELAKERKLDLVVINPSLVLGPLLQMAVNASTWHIAKYLDGSVQTYANAAQAYVHVQDVADAHARAYETPDAHGRYLCAGRTLHRAEVCRILAKFFPEYPVPTRCKEGAGEMKKGCRFSSRRIMDLGVGITPASQCLYDTVTSLQDKGILPRRDADMS

SEQ ID NO: 28504 - protein, 233 aa, Triticum aestivum
MIEPAVNGTRNVFNAAAEVGGIRRVVMTSSIGSVYMDPRRSIDGEADETCWSDLEFCKNTKNWYCYAKTVAEQAAWELAKERKLDLVVINPSLVLGPLLQMAVNASTWHIAKYLDGSVQTYANAAQAYVHVQDVADAHARAYETPDAHGRYLCAGRTLHRAEVCRILAKFFPEYPVPTRCKEGAGEMKKGCRFSSRRIMDLGVGITPASQCLYDTVTSLQDKGILPRRDADMS

SEQ ID NO: 28505 - protein, 207 aa, Triticum aestivum
MTSSIGSVYMDPRRSIDGEADETCWSDLEFCKNTKNWYCYAKTVAEQAAWELAKERKLDLVVINPSLVLGPLLQMAVNASTWHIAKYLDGSVQTYANAAQAYVHVQDVADAHARAYETPDAHGRYLCAGRTLHRAEVCRILAKFFPEYPVPTRCKEGAGEMKKGCRFSSRRIMDLGVGITPASQCLYDTVTSLQDKGILPRRDADMS

SEQ ID NO: 28506 - DNA, 1628 bp, Triticum aestivum
  misc_feature (1422)..(1422): n is a, c, g, or t
ctcttcctcctctcgccccccgccgccgccatcccttccttatagagacagcgtgtaggcgccgggcgagcaggccaccaccgcaaccctagccagccagcccgactaacgccgccggttggagaggactagctattgctgctcgagagagagagatgtcgtcgggacggtacatggcctactcgccctccccgtccaccacgccgcactccccgcgcatctccggcctccgcgcctcctccgccgccgtcgccgaccaggagaagtaccttgcggagctgctcgcggagcgccacaagctgaacccgttcgtcccagtgctccctcatagcatacggttgctgaatcaagaaattttacgtgtttccacactattggagaacgcctcccttttaaaccaaagtggctttgaacatggtagtccactaacatcgggaggattatattcaaatggagcagcaactgatatgaatggatggacatcagcatttcaatcagaaagttcatcagcttatagttggcttggagggtctcaaggcagctcatctggactaattgtcaagaaaacaatgagggttgatattccagtagacaaatatccaacatacaacttcgttggtcgcatccttggtcccagaggaaattccttgaagcgagtggaggcaactactgactgccgtgtgcttataagaggccggggtagcattaaagatccagctcgggaggaaatgatgcgtggaaagccaggatatgaacatctgaatgaacccctacatatattggtcgaggcagagctgcctgttgaaattattgatgctcgtctgatgcaagcccgcgagatccttgaggatctgttaaggccaatgcaggacgagtctcaggacttcttcaagaagcagcagctccgggagcttgcaatgctcaatggcaccctccgtgaggaagggatgcaaagatctggttccgcatcccctttccacaacagccttggaatgaagagggccaagacaagggggtaaaaggccacgagtaccatgggagaagcaatcatctgtcctgagacggaaactgagtatgcctatgggtttgccttcgtggctaatggcgcaaaaatggtctcgcaccgctagcgtcggagcagcccgtacttgataatacatatgcctggagtcgtgttcgctgctactggagaggtttggttatggcaagactgggtgtcgactgtcgagctatatatcgggttgtgcaagaaagtggtttgtgtattgctatgagctatgactggggttttgatttatggttcttgtgcttgtatttgaacttttgaagaatgttatctggttaagttatttgggattgaaatgatgttgtaatctgttacagttatagtattgcttaataatagatggatattgtaataanaaaaaaaaaaaaaaaaaaaaaaaaaaaaaaaaaaaaaaaaaaaaaaaaaaaaaaaaaaaaaaaaaaaaaaaaaaaaaaaaaaaaaaaaaaaaaaaaaagtttttttcaacccccccaccccaaaggggggccccgaacccaattcccccaaaaaagaaacaaaaaaacccccccccctggcccgccttttaaaaacgcggaaatgg

SEQ ID NO: 28507 - protein, 287 aa, Triticum aestivum
MSSGRYMAYSPSPSTTPHSPRISGLRASSAAVADQEKYLAELLAERHKLNPFVPVLPHSIRLLNQEILRVSTLLENASLLNQSGFEHGSPLTSGGLYSNGAATDMNGWTSAFQSESSSAYSWLGGSQGSSSGLIVKKTMRVDIPVDKYPTYNFVGRILGPRGNSLKRVEATTDCRVLIRGRGSIKDPAREEMMRGKPGYEHLNEPLHILVEAELPVEIIDARLMQAREILEDLLRPMQDESQDFFKKQQLRELAMLNGTLREEGMQRSGSASPFHNSLGMKRAKTRG

SEQ ID NO: 28508 - protein, 281 aa, Triticum aestivum
MAYSPSPSTTPHSPRISGLRASSAAVADQEKYLAELLAERHKLNPFVPVLPHSIRLLNQEILRVSTLLENASLLNQSGFEHGSPLTSGGLYSNGAATDMNGWTSAFQSESSSAYSWLGGSQGSSSGLIVKKTMRVDIPVDKYPTYNFVGRILGPRGNSLKRVEATTDCRVLIRGRGSIKDPAREEMMRGKPGYEHLNEPLHILVEAELPVEIIDARLMQAREILEDLLRPMQDESQDFFKKQQLRELAMLNGTLREEGMQRSGSASPFHNSLGMKRAKTRG

SEQ ID NO: 28509 - protein, 183 aa, Triticum aestivum
MNGWTSAFQSESSSAYSWLGGSQGSSSGLIVKKTMRVDIPVDKYPTYNFVGRILGPRGNSLKRVEATTDCRVLIRGRGSIKDPAREEMMRGKPGYEHLNEPLHILVEAELPVEIIDARLMQAREILEDLLRPMQDESQDFFKKQQLRELAMLNGTLREEGMQRSGSASPFHNSLGMKRAKTRG

SEQ ID NO: 28510 - DNA, 1390 bp, Triticum aestivum
actcatcacttccacgaagaagttaacagagcaagttcatccattctcaactctcaagaaaacatcaggcggcagcagacagcggaagctagcaatggccggagatctgggtaagagcagcggcggcgccagggtgtgcgtgaccggagccaccgggttcgtcggctcctggctcgtcaggaagctcctcgacgcaggctacaccgtccacgccaccatgcgaggcaccggagacgaggagaaagtggggcggctgcggcggctggtggtccccggcggggtggcgccggagcggctggtgctgttcgaggccgacctctacgaccccgccagcttcgcgccggccatcgccgggtgccagtccgtcttcctcatcgccacgccgttcgccgacggcgccgcggaggcggccgtgggcgcggtgcgctccatcctccggcagtgcgaggagtccgggacggtgaagcgcgtcatccacaccgcgtccatgtcgacagcctcgccgctcaccgccgccgggtacaaggacttcatcgacgagtcctgctggaccccgttcgacgtggactaccctctccggagtgctgacttcgataagcacatgctgtcgaagctcctgtcagagaaggagctgctgagctacaacgacggcgaggacccggcgttcgaggtggtgaccctgcccttgggcctcgtctccggcgacacgctcctcggccgcgtcacggaggcgctggaggtggccgtgtcgccggtgtccggggacgagtcccgcttcgggttcatgaggctgctgcagacggtggcgggctcggtgccgctggtgcacgtggacgacgtctgcgcggcgctcgtcttctgcgtggcgcggtcgtaccccgtctccggccgcttcctctgcgccgccgcctacccgaacatccacgacgtcgttgactactacgccagcaagtaccctcacctcgacctcctcagagagtaagcagccatcgattctttcttcttcgcctgaaatccagccgacaagttgcatcagattgatggactggattgatgatcatgtcaggaccgaggaggtggcgagggtgcaacctgagaggaacaagctgggggagctgggtttccggtacaggtacgggatggaggagatattggacggcaatgtccagtgggcagcgaggctggggcaccttgatgaatccaagctcagcgcgcaacacaaggatatgaacccaattagtgattagtggttgtgcggcacattatacacacgattgtttgattttcttatgcgtcttgtgcgtttctgaatccatatcattggaagtacatgtactgttaaaggaaatgagaggtgcgagtgataaataaatatgcttttggtttgtcc

SEQ ID NO: 28511 - protein, 326 aa, Triticum aestivum
LITSTKKLTEQVHPFSTLKKTSGGSRQRKLAMAGDLGKSSGGARVCVTGATGFVGSWLVRKLLDAGYTVHATMRGTGDEEKVGRLRRLVVPGGVAPERLVLFEADLYDPASFAPAIAGCQSVFLIATPFADGAAEAAVGAVRSILRQCEESGTVKRVIHTASMSTASPLTAAGYKDFIDESCWTPFDVDYPLRSADFDKHMLSKLLSEKELLSYNDGEDPAFEVVTLPLGLVSGDTLLGRVTEALEVAVSPVSGDESRFGFMRLLQTVAGSVPLVHVDDVCAALVFCVARSYPVSGRFLCAAAYPNIHDVVDYYASKYPHLDLLRE

SEQ ID NO: 28512 - protein, 295 aa, Triticum aestivum
MAGDLGKSSGGARVCVTGATGFVGSWLVRKLLDAGYTVHATMRGTGDEEKVGRLRRLVVPGGVAPERLVLFEADLYDPASFAPAIAGCQSVFLIATPFADGAAEAAVGAVRSILRQCEESGTVKRVIHTASMSTASPLTAAGYKDFIDESCWTPFDVDYPLRSADFDKHMLSKLLSEKELLSYNDGEDPAFEVVTLPLGLVSGDTLLGRVTEALEVAVSPVSGDESRFGFMRLLQTVAGSVPLVHVDDVCAALVFCVARSYPVSGRFLCAAAYPNIHDVVDYYASKYPHLDLLRE

SEQ ID NO: 28513 - protein, 254 aa, Triticum aestivum
MRGTGDEEKVGRLRRLVVPGGVAPERLVLFEADLYDPASFAPAIAGCQSVFLIATPFADGAAEAAVGAVRSILRQCEESGTVKRVIHTASMSTASPLTAAGYKDFIDESCWTPFDVDYPLRSADFDKHMLSKLLSEKELLSYNDGEDPAFEVVTLPLGLVSGDTLLGRVTEALEVAVSPVSGDESRFGFMRLLQTVAGSVPLVHVDDVCAALVFCVARSYPVSGRFLCAAAYPNIHDVVDYYASKYPHLDLLRE

SEQ ID NO: 28514 - DNA, 1227 bp, Triticum aestivum
acctagaacatcctaatcgaaaagtttttgcttttatttggagcgtctcctccgtgctcagcgggctactgccctgcagcagatcccgcggccccgatgcctcctcccgccgccccgacgcctcctcccgccgagccgctgccaaattcgccagattctacctcccccacggaggaggctgaggcggatgcgggaggcacgccgtcgagggccgggccggtggggacagtaagctggggaactgggaccctcgtcggcgtattcaccgggcttctctacggcggggccaaggaggccaacgccaacgtcagcaaagatgctgaagtgatgttgaagatgggaagcaccacagacaagcgcgaacaatataggttgatgagagatgccatggagaaaaggttcattcgggttgccaaaggctcactagttggtggtgctcgccttgggatgttcactgcaactttctttggcatacagaaccttcttattgagaaccgtggggtgcatgatgtattcaatattgttggagctggctcggctaccgcagctgcttttgggcttatattgcctggttcaccaatgtggcgtgcaaggaatgtattggttggatctgctctcggtgccggaatttgctttccacttggttgggtacagttgaagctggcagagaaggccaatcttgagattgaaaattcaaaatcgccatcggatttacaaggcaatcaaagtcgtgtgggggctgctatagacagactagagaacagcctgaggaagtaacagtttgtacccatgcaaggagccaaggatctgttgtcaacacccatggctatttcgcttttgttttgttcatgtactttccataggaatgcggttacttttgaagtggtaatggcagcaagggaaactgtctcttgtatgaagataaatttggatacaaatacttacttgctggagctgggatatttctagttaaggtacctgtttgggtgtttgtgccattatgacctctatgatcagcattgtgcatagtattagtattcgtgacttctcgttagcttgacaatacctcggaaggatgctgccatctcttattttcttggaaagtttgtatcggtgatccatcacaaactatgcttgtttggtttgatgctcatgtatgctaaattttgccttggcagaattttgtcaaaaaaaaaaaaaaaaaagcttatcgataccgtcgacctc

SEQ ID NO: 28515 - protein, 226 aa, Triticum aestivum
MPPPAAPTPPPAEPLPNSPDSTSPTEEAEADAGGTPSRAGPVGTVSWGTGTLVGVFTGLLYGGAKEANANVSKDAEVMLKMGSTTDKREQYRLMRDAMEKRFIRVAKGSLVGGARLGMFTATFFGIQNLLIENRGVHDVFNIVGAGSATAAAFGLILPGSPMWRARNVLVGSALGAGICFPLGWVQLKLAEKANLEIENSKSPSDLQGNQSRVGAAIDRLENSLRK

SEQ ID NO: 28516 - protein, 149 aa, Triticum aestivum
MLKMGSTTDKREQYRLMRDAMEKRFIRVAKGSLVGGARLGMFTATFFGIQNLLIENRGVHDVFNIVGAGSATAAAFGLILPGSPMWRARNVLVGSALGAGICFPLGWVQLKLAEKANLEIENSKSPSDLQGNQSRVGAAIDRLENSLRK

SEQ ID NO: 28517 - protein, 146 aa, Triticum aestivum
MGSTTDKREQYRLMRDAMEKRFIRVAKGSLVGGARLGMFTATFFGIQNLLIENRGVHDVFNIVGAGSATAAAFGLILPGSPMWRARNVLVGSALGAGICFPLGWVQLKLAEKANLEIENSKSPSDLQGNQSRVGAAIDRLENSLRK

SEQ ID NO: 28518 - DNA, 1454 bp, Triticum aestivum
aaaaaccgtgcctttccaatcccccggatccagtctcgctcccagcacaagtcctcccacccagccgctgcccggggcggcaatccgtcgagcaccagccgcgcgcgcgctccactccgctgcgcctgcggccgccgccgtccatggcgtccgccgcgcgggctctgggcgcgctcctccacagggcctcgtcgctttcgtcctccgcctctgctctcaggagcgcctcccttgtacacaggaatagcccaactggtggcgccagcttgttccaggggcacgtggctaggcggaggatttggacgttccagccgctctgtatggggcggcgctcctgcaagatcgccgggaggaagggtgctcagaatttgaaaaagatgaagcgcaacagcaaaatcggaaaagaaatcgttgctgccatcaagaagggtggtccaagtccttcgtccaacacagctttagcagcgatactagagaaagtaagagagcttgatgtccccaaggaagttgttgagcgtaacatcaaaagagcttcagaaaagggtcaagatacttacacagaaaagatttatgaggtctatggttttggtggagtaggtatggtcgttgaggtccttacagacaaaattacaagatctattgcggatattagaaatgttgtaaaagactgtggagcaaaattggctgatcctggatctgttacattcagattcagacaagctcgagtggttaacataaaagttacagatgccgataaggaccaactactctctgttgctttggatgctggcgccgatgatgttattgaaccaaattttgatgatgaagatgactctgaagaggttctagagaggttttacaagatagttactacatctgaaaactatcctgttgtgctatcaaagctacaagaggaagggctgaaatttgaaacggataacggttatgaactgctgcctctcaatccgattgaggtggatgacgaggccatggaacttaacaaggaccttgtattgaagttgcttgaattggatgatgttgatgctgtctacacagaccagaagtgagccaatttggaacccacaggctctctcagctctcaagacgctgctcgatgactccatttgggtagggcttgttttcaacttcgtgtccattaaggatttcttatcagcactgtttgcgccgattacgaagcctgcactcgtaacatcagcttcaagtgtccaaaatgaaaattggtgaacgcagcagtttccttttgggggtacttttccccacattctgccgtctcatagttttttaccttacgtttgttgtccctgatctcttcaccttgtccgtgtctcagtgagctgctagacgctgctcatataacgaatgttgtagctgcatcttttcatgtgattgtaagcaatacaagtaaaactgacctatgcatggactttggagtc

SEQ ID NO: 28519 - protein, 354 aa, Triticum aestivum
KPCLSNPPDPVSLPAQVLPPSRCPGRQSVEHQPRARSTPLRLRPPPSMASAARALGALLHRASSLSSSASALRSASLVHRNSPTGGASLFQGHVARRRIWTFQPLCMGRRSCKIAGRKGAQNLKKMKRNSKIGKEIVAAIKKGGPSPSSNTALAAILEKVRELDVPKEVVERNIKRASEKGQDTYTEKIYEVYGFGGVGMVVEVLTDKITRSIADIRNVVKDCGAKLADPGSVTFRFRQARVVNIKVTDADKDQLLSVALDAGADDVIEPNFDDEDDSEEVLERFYKIVTTSENYPVVLSKLQEEGLKFETDNGYELLPLNPIEVDDEAMELNKDLVLKLLELDDVDAVYTDQK

SEQ ID NO: 28520 - protein, 307 aa, Triticum aestivum
MASAARALGALLHRASSLSSSASALRSASLVHRNSPTGGASLFQGHVARRRIWTFQPLCMGRRSCKIAGRKGAQNLKKMKRNSKIGKEIVAAIKKGGPSPSSNTALAAILEKVRELDVPKEVVERNIKRASEKGQDTYTEKIYEVYGFGGVGMVVEVLTDKITRSIADIRNVVKDCGAKLADPGSVTFRFRQARVVNIKVTDADKDQLLSVALDAGADDVIEPNFDDEDDSEEVLERFYKIVTTSENYPVVLSKLQEEGLKFETDNGYELLPLNPIEVDDEAMELNKDLVLKLLELDDVDAVYTDQK

SEQ ID NO: 28521 - protein, 248 aa, Triticum aestivum
MGRRSCKIAGRKGAQNLKKMKRNSKIGKEIVAAIKKGGPSPSSNTALAAILEKVRELDVPKEVVERNIKRASEKGQDTYTEKIYEVYGFGGVGMVVEVLTDKITRSIADIRNVVKDCGAKLADPGSVTFRFRQARVVNIKVTDADKDQLLSVALDAGADDVIEPNFDDEDDSEEVLERFYKIVTTSENYPVVLSKLQEEGLKFETDNGYELLPLNPIEVDDEAMELNKDLVLKLLELDDVDAVYTDQK

SEQ ID NO: 28522 - DNA, 707 bp, Triticum aestivum
ctctaaaggctcgactactcactctgcccacacccgtcaccgcagcctcgcacaattatcgccccaggtacaggtaagagggcgagagagaaggcgatgtcaatggcggaggagcagtactacgggggcccgcgcggggcgccgcacgggctgctgctggcggtggtggtggggctggtggtggcgggcccgctcttcctgggcgacggcggcgaggcggtcaccgacgccatcgccgagctgctcagccccgtgggcctgctcctcctccccgtgggcctcctcctcctcatccgccttctctcctccgagcgcggcgccgcggcgttcgccgacgtgttcgccttcggcggctcgcccgacgccgtgcaccgcgtcgggggctcccccatcggcgtggcgctcatgctgcttctcatcctcgccctcctctactaccgctccgcgctcttcggcggcggcggagacgacgacgagtaggcgcctgccagtaggtgggtagagtctgatctcggggttgttttggcagtttccgtttgatggctgggcctgggtgtaaaagtgcggtgtaaattaactggtagctactcgccgtgttggtttgctctgcgttaagggcttaaggctgaaggctctgtgctgcatgggtccatgtgcttatctatatctactagaaggggacgcgcgccttgccgcgcctttttttt

SEQ ID NO: 28523 - protein, 166 aa, Triticum aestivum
SKGSTTHSAHTRHRSLAQLSPQVQVRGRERRRCQWRRSSTTGARAGRRTGCCWRWWWGWWWRARSSWATAARRSPTPSPSCSAPWACSSSPWASSSSSAFSPPSAAPRRSPTCSPSAARPTPCTASGAPPSAWRSCCFSSSPSSTTAPRSSAAAETTTSRRLPVGG

SEQ ID NO: 28524 - protein, 127 aa, Triticum aestivum
MSMAEEQYYGGPRGAPHGLLLAVVVGLVVAGPLFLGDGGEAVTDAIAELLSPVGLLLLPVGLLLLIRLLSSERGAAAFADVFAFGGSPDAVHRVGGSPIGVALMLLLILALLYYRSALFGGGGDDDE

SEQ ID NO: 28525 - protein, 125 aa, Triticum aestivum
MAEEQYYGGPRGAPHGLLLAVVVGLVVAGPLFLGDGGEAVTDAIAELLSPVGLLLLPVGLLLLIRLLSSERGAAAFADVFAFGGSPDAVHRVGGSPIGVALMLLLILALLYYRSALFGGGGDDDE

SEQ ID NO: 28526 - DNA, 481 bp, Triticum aestivum
ctgcaggctgatggtcggccgggcatggacgctctcctcctcctcttcctgctcaaaatggaggctttccacatacaattctctcctagcccctgaatatatcagctaggttggtagattgctgctggtggataggtacgtgcgttttgtaggcattaggcggcaggcgggtgctgtgttgttgtcgtggtacagatcacgtggtggtggcggtggatgggcctcatggccgggatgctccctggcgtcgagttcgcgaggaggcgacggctccggccggcgccggaggccccgtgcgccggcgcgcggcggccggcgttgatgggcgtgttcgggcatgaccacgcccacctcggctcggcaggttttgcgaagaggagcggcgtgtgcgaggaggcgtgggcgacgcagctggacagcatcgcccgggaggccaaggagaggctggatcacaagctcaggagccagagagaatctgtgg

SEQ ID NO: 28527 - protein, 88 aa, Triticum aestivum
MGLMAGMLPGVEFARRRRLRPAPEAPCAGARRPALMGVFGHDHAHLGSAGFAKRSGVCEEAWATQLDSIAREAKERLDHKLRSQRESV

SEQ ID NO: 28528 - protein, 85 aa, Triticum aestivum
MAGMLPGVEFARRRRLRPAPEAPCAGARRPALMGVFGHDHAHLGSAGFAKRSGVCEEAWATQLDSIAREAKERLDHKLRSQRESV

SEQ ID NO: 28529 - protein, 82 aa, Triticum aestivum
MLPGVEFARRRRLRPAPEAPCAGARRPALMGVFGHDHAHLGSAGFAKRSGVCEEAWATQLDSIAREAKERLDHKLRSQRESV

SEQ ID NO: 28530 - DNA, 1376 bp, Triticum aestivum
aactcaacacgccaaggcaaagcaccagtagtcacacaagagaaaagcaagagcagcaagcagcacagagctagagaaaagaggagcgtctcatcgggaggaggagaaagaaaaagcgagcgaggatgtgtggcggagcgatcctcgccgagctcatcccgggcgcgccggcgcggcgcgccacgtccggccatggccacgtctggccgggcaagggcgccaagcagaccaaggccgccgcggccgacgacttcgaggccgcgttccgggagttcaacgaggactctgatgtggaggacgacgtcgtgatggtgatggagcggcgggaggaggtggccgagagcaagcccttcgtgttcgccgcttcgcccaagaagcagcagcaggaggaggaggaggcggcgcccgtccgccgcaggaagccggcgcagtaccggggcgtgcggcgccggccgtggggcaagtgggccgccgagatccgcgaccccgtcaagggcgtccgcgtctggctcggcaccttcccctccgccgaggccgccgcgctcgcctacgacgaagccgcgcgcgccatccgcgggcccagggccaagctcaacttctcctcctcctctgccgtcgccgccgcggccccgggagcgcgcaagcgcggccgcgccgcgccccccgctgccaagccagcgccggtcatcaccctcgtcgacgatgaggaggagcacgcgtcgtccttcgtcaagcacgaggccgaggcgagcgagggctccgagtccagcggcgccctccccgacttctcgtggcagggcatatcggcgttcgacgaggccccggcgtaccccgccccggagccggagaccgagcagctgacaaagcgggcgaggacgacggaggcggaagacaccgacgagggcatgtcggcccacccggcatcagactccgactccgacgcgctcttcgacgccctcctcttcgccgaccagttcgccttcttcaacggcggcgcctacgagtccctcgacagcctcttcagcgccgacgccgtgcagagcagcgccaccgccaccgccgtgaacgaggcggccctggggctctggaccttcgacgacgactgcctcgtcgacgagtgcagcctgtcgttctagatcttgttccgtgtgcgtccgttcatgtcatgagatgcggtggtgtaaatagagtagcttgccttgtgatgaaatccgttcgtccgtcgtcgcttcttggatcagcaagcgatgatggattctgtgtaagagtttggcatcgtcgtgaaagattttgcctacgccttcgatgcaaaagctcgacttccgtttctgaaatgttcaaaaaaaaaaaaaaaaaacggcacgagaagcttatcg

SEQ ID NO: 28531 - protein, 336 aa, Triticum aestivum
MCGGAILAELIPGAPARRATSGHGHVWPGKGAKQTKAAAADDFEAAFREFNEDSDVEDDVVMVMERREEVAESKPFVFAASPKKQQQEEEEAAPVRRRKPAQYRGVRRRPWGKWAAEIRDPVKGVRVWLGTFPSAEAAALAYDEAARAIRGPRAKLNFSSSSAVAAAAPGARKRGRAAPPAAKPAPVITLVDDEEEHASSFVKHEAEASEGSESSGALPDFSWQGISAFDEAPAYPAPEPETEQLTKRARTTEAEDTDEGMSAHPASDSDSDALFDALLFADQFAFFNGGAYESLDSLFSADAVQSSATATAVNEAALGLWTFDDDCLVDECSLSF

SEQ ID NO: 28532 - protein, 275 aa, Triticum aestivum
MVMERREEVAESKPFVFAASPKKQQQEEEEAAPVRRRKPAQYRGVRRRPWGKWAAEIRDPVKGVRVWLGTFPSAEAAALAYDEAARAIRGPRAKLNFSSSSAVAAAAPGARKRGRAAPPAAKPAPVITLVDDEEEHASSFVKHEAEASEGSESSGALPDFSWQGISAFDEAPAYPAPEPETEQLTKRARTTEAEDTDEGMSAHPASDSDSDALFDALLFADQFAFFNGGAYESLDSLFSADAVQSSATATAVNEAALGLWTFDDDCLVDECSLSF

SEQ ID NO: 28533 - protein, 273 aa, Triticum aestivum
MERREEVAESKPFVFAASPKKQQQEEEEAAPVRRRKPAQYRGVRRRPWGKWAAEIRDPVKGVRVWLGTFPSAEAAALAYDEAARAIRGPRAKLNFSSSSAVAAAAPGARKRGRAAPPAAKPAPVITLVDDEEEHASSFVKHEAEASEGSESSGALPDFSWQGISAFDEAPAYPAPEPETEQLTKRARTTEAEDTDEGMSAHPASDSDSDALFDALLFADQFAFFNGGAYESLDSLFSADAVQSSATATAVNEAALGLWTFDDDCLVDECSLSF

SEQ ID NO: 28534 - DNA, 1025 bp, Triticum aestivum
acccatcccaccacattcaagtcgaagaagctcctcgatctccatcactgcaaccagccacttgagctctgaatctttgaagctcagccagttcgccgcgaccaccgagagcctcaagtttcgccatgtcgagcgccggccagaagcagcagcagcagcagcaggcgaagaagccggcggcggcggaggacgtcgagatcaagaaggtcttctcccgcttcgacacggacggcgacggccggatctcgccgtccgagctggcggccgtgtcgcgcgccatcgcgccgccggccaccgagtccgcgcagggccgcgaggtggcgtccatgatggacgagctcgacaccgaccgcgacggctacgtggacctcggcgagttcgccgccttccacggccgcggccgcgaggagcgcgagctcgacgccgagctgcgcgacgccttcgacgtctacgacatcaacggcgacggccgcatctccgtcgccgagctcagcaaggtcctgagccgcatcggcgagggatgcagcaccgaggagtgcgagaagatgatcgcctccgtcgacgtcgacggcgacggctgcgtcggattcgaggagttcaagaagatgatgaccgccggtgacgccggcgcaccacctcaacccgaagcgatcgccgtgcctgacagcaacaaacccaagaaggagtgatacatgtgcttttgcttgtaaaaaaattgtaatccgagggagcgaattagttgtcagtccctgttggccatagtcttctggtctgaaaaaaaatgggaataaggatcaatgtgcaattgccattgtcgtgctgtacctctacgataacggttgtgtgtgcacggtagcagtactagtactagatattttctccgagtatggtcatcttgctacttcattttcacatgaaaatgaagtgccatgttgatgttgaagggtgataagcatccattatcaatgttacttgtaatcgcattcggcaataaatgtattgtcatcttatgatgtttgctattc

SEQ ID NO: 28535 - protein, 206 aa, Triticum aestivum
PIPPHSSRRSSSISITATSHLSSESLKLSQFAATTESLKFRHVERRPEAAAAAAGEEAGGGGGRRDQEGLLPLRHGRRRPDLAVRAGGRVARHRAAGHRVRAGPRGGVHDGRARHRPRRLRGPRRVRRLPRPRPRGARARRRAARRLRRLRHQRRRPHLRRRAQQGPEPHRRGMQHRGVREDDRLRRRRRRRLRRIRGVQEDDDRR

SEQ ID NO: 28536 - protein, 187 aa, Triticum aestivum; identical to SEQ ID NO: 15364

SEQ ID NO: 28537 - protein, 120 aa, Triticum aestivum; identical to SEQ ID NO: 15365

SEQ ID NO: 28538 - DNA, 1464 bp, Triticum aestivum
atagtttccttcctcttctgacttatctcacatgctctgacctcagctccaatctgagaccctagtccctcgagccgtcgccgtgccgtagctgatagcatcaccgtccgacgccccccacccgctcccaaccctcccgcctctcacgcgcgccgcccccatcgccgtccccgccgtatccactccgtccgcagtcgacgggttttgaggtggacatgcattttgcaaatgtcaggctctaatcagatggcttcggatggtaaatttggaaaaggtcctcgggagctcactggggctgttgatttaattagccgctacaggctgctgaaccatcacagtttcttttgtaagaaaccattgccactggctatctcagatacacattatcttcagaatgttgtgggtgatactgaaatccgtaaaggagaagggatggagatagatcaactcattcagaatccagatctgagggagaagaagactgcttatattcagccttttgacatggaaacactaggacacgcatttcagttgcgagaaacagcgccagtagatctgccttcggctgaaaaaggcactccaactatatcgggaaaatcaaaggttaagtccagggacaaagtgaagaagcataaaaagcacaaggagaaagacaaggacaaggaacacaagaagcacaaacatcgccataaggatcggagtaaagataaagacaaagacaaagagaaagagaaagagaaagaaaaagagaaggagaaggagaaagacaaagacaaagacaaagaaaagaaaaaagagaagagcgtgcatcatgatttgggaggtgataattccaaaaaacatcatgagaagaagaggaaacatgatggaatggaaaatttggcggctgtacgtaaccacaaaaaaacacaaaagcgcaaaattcaatgaaatgggcagtggactttgtttggcgtaagatgtgacaaattcgtttccgtgttagttctcgtaatatgactccatgttttatgctgttaatgggcgactctgaaggttttcttgtcaataccacttccgatggagttactgatggaatttcctttatcaagatgatccggttacaagggacgcgcccaatcagatcatgatacaccgtaaatcaattctgggaaaacttgaacttgtcatttggagttatttgattttttttgtgtgtgtgtgtgttagttctgtgcccattagcaattcttgagtgttgccctcctatatgccctgtcctgtaactcagacagaagaaaagggtttactgtcaaagccgcatgatgtgaccgtgtacaacaggagacgtcacgtgtagaagagaaaaattagccgtacacattccatgatccagcaaattcaatggtggtgatgaaccttaaggaactcgagcagtatgttctgtgtaccaatcatgttttcttaatcaaacaatcccagttt

SEQ ID NO: 28539 - protein, 233 aa, Triticum aestivum
MSGSNQMASDGKFGKGPRELTGAVDLISRYRLLNHHSFFCKKPLPLAISDTHYLQNVVGDTEIRKGEGMEIDQLIQNPDLREKKTAYIQPFDMETLGHAFQLRETAPVDLPSAEKGTPTISGKSKVKSRDKVKKHKKHKEKDKDKEHKKHKHRHKDRSKDKDKDKEKEKEKEKEKEKEKDKDKDKEKKKEKSVHHDLGGDNSKKHHEKKRKHDGMENLAAVRNHKKTQKRKIQ

SEQ ID NO: 28540 - protein, 227 aa, Triticum aestivum
MASDGKFGKGPRELTGAVDLISRYRLLNHHSFFCKKPLPLAISDTHYLQNVVGDTEIRKGEGMEIDQLIQNPDLREKKTAYIQPFDMETLGHAFQLRETAPVDLPSAEKGTPTISGKSKVKSRDKVKKHKKHKEKDKDKEHKKHKHRHKDRSKDKDKDKEKEKEKEKEKEKEKDKDKDKEKKKEKSVHHDLGGDNSKKHHEKKRKHDGMENLAAVRNHKKTQKRKIQ

SEQ ID NO: 28541 - protein, 165 aa, Triticum aestivum
MEIDQLIQNPDLREKKTAYIQPFDMETLGHAFQLRETAPVDLPSAEKGTPTISGKSKVKSRDKVKKHKKHKEKDKDKEHKKHKHRHKDRSKDKDKDKEKEKEKEKEKEKEKDKDKDKEKKKEKSVHHDLGGDNSKKHHEKKRKHDGMENLAAVRNHKKTQKRKIQ

SEQ ID NO: 28542 - DNA, 512 bp, Triticum aestivum
acaaccaaccaccactgctcctcctccaatcccacattcggtcgcagctcgaaccaaggagggatcgtcagccatgtccgggcgcggcaagggaggcaaggggctcggcaagggcggcgccaagcggcacaggaaggtgctgcgcgacaacatccagggcatcaccaagccggcgatccggcgcctggcgaggaggggcggcgtgaagcgcatctcggggctcatctacgaggagacccgcggcgtgctcaagatcttcctcgagaacgtcatccgcgacgccgtcacctacaccgagcacgcccgacgcaagaccgtcaccgccatggacgtcgtctacgcgctcaagcgccagggccgcaccctctacggcttcggcggctaggcttttcctcgcccccctcccctgcagatatcccaaaagcttgatggaaccgcggcttgtttagctctctatttgctctgtagttcgaactgaatcgtggaacaaagtgcttcgcatatgttgctgg

SEQ ID NO: 28543 - protein, 142 aa, Triticum aestivum
TTNHHCSSSNPTFGRSSNQGGIVSHVRARQGRQGARQGRRQAAQEGAARQHPGHHQAGDPAPGEEGRREAHLGAHLRGDPRRAQDLPRERHPRRRHLHRARPTQDRHRHGRRLRAQAPGPHPLRLRRLGFSSPPSPADIPKA

SEQ ID NO: 28544 - protein, 127 aa, Triticum aestivum
QPTTTAPPPIPHSVAARTKEGSSAMSGRGKGGKGLGKGGAKRHRKVLRDNIQGITKPAIRRLARRGGVKRISGLIYEETRGVLKIFLENVIRDAVTYTEHARRKTVTAMDVVYALKRQGRTLYGFGG

SEQ ID NO: 28545 - protein, 103 aa, Triticum aestivum; identical to SEQ ID NO: 71

SEQ ID NO: 28546 - DNA, 1062 bp, Triticum aestivum
catcacaacacaaacaggagtagtactactactccagtctccggcgagtacataccctacaggtccaacaaggttcatagacgacctgtagcgccaatatggctggcgtctccagcaatgccattgcctttgtggcactcctctccgtgctcttcacgggcgtccgttctgcggtcaactacgacaccgccgtagctagatcctacaactccggctggctccccgccaaggccacctggtacggggcgcccaacggcgccggccccgacgacaacggtggtgcttgcggcttcaagaacgtgaaccagtacccaatctcctccatgggggcatgcggtaacgagcctattttcgccggcggcgagggctgtggcatgtgctacgagattaagtgcgactactccaacaacccttcctgctccggccagccgaggaggatcgtcatcaccgacatgaactactaccccgtggccaggtaccacctcgacctcagtggcaccgcattcggctccatggccaggtacggcctcaacgaccggctccgccacgccggcatcatcgacatgcagttcaggagggtgccctgcaacttcccgggtatgaaggtgaccttccacgtccagcgtgtctccaaccccaactatctcgcggtgctcgtggagtacgcgaacgtggacgggaccgtggtgcggatggagctcatgcagaccatcaacggccgcccgacgggctactatcaggatatgcgccgctcgtggggctccatctggcggatggacaccaaccgcccgctgcaggggccattcgccatccgcatcaccagcgataccggaaagacgctggtggccaacaatgccatcccggcttattggcagccggaccatgcctactggtccaacctccagttctattgattggcttacgtgcgtacttctccgatcgatgccgagttaatcattttggtgtcatcagcatgatccctatttgtgaggatctaatggttttaagttattgccaggcactatctactttcaagcgttaacaagcgtgttaactgtcgcc

SEQ ID NO: 28547 - protein, 271 aa, Triticum aestivum
MAGVSSNAIAFVALLSVLFTGVRSAVNYDTAVARSYNSGWLPAKATWYGAPNGAGPDDNGGACGFKNVNQYPISSMGACGNEPIFAGGEGCGMCYEIKCDYSNNPSCSGQPRRIVITDMNYYPVARYHLDLSGTAFGSMARYGLNDRLRHAGIIDMQFRRVPCNFPGMKVTFHVQRVSNPNYLAVLVEYANVDGTVVRMELMQTINGRPTGYYQDMRRSWGSIWRMDTNRPLQGPFAIRITSDTGKTLVANNAIPAYWQPDHAYWSNLQFY

SEQ ID NO: 28548 - protein, 196 aa, Triticum aestivum
MGACGNEPIFAGGEGCGMCYEIKCDYSNNPSCSGQPRRIVITDMNYYPVARYHLDLSGTAFGSMARYGLNDRLRHAGIIDMQFRRVPCNFPGMKVTFHVQRVSNPNYLAVLVEYANVDGTVVRMELMQTINGRPTGYYQDMRRSWGSIWRMDTNRPLQGPFAIRITSDTGKTLVANNAIPAYWQPDHAYWSNLQFY

SEQ ID NO: 28549 - protein, 179 aa, Triticum aestivum
MCYEIKCDYSNNPSCSGQPRRIVITDMNYYPVARYHLDLSGTAFGSMARYGLNDRLRHAGIIDMQFRRVPCNFPGMKVTFHVQRVSNPNYLAVLVEYANVDGTVVRMELMQTINGRPTGYYQDMRRSWGSIWRMDTNRPLQGPFAIRITSDTGKTLVANNAIPAYWQPDHAYWSNLQFY

SEQ ID NO: 28550 - DNA, 494 bp, Triticum aestivum
actcactcatacaatagagaccagcttttgcttctttgtgaacatggagatgaggaaatcatgtggcttcttcttgttgctcctcctccttgtctttgcttcccaggtggtggtgcagacggagggaagagtgtgtgagtcacaaagccacgggttccatggtttgtgtaatagagaccacaactgtgctttggtctgcaggaacgaaggtttctccggtggcaggtgcaaaggcttccgccgccgctgcttttgcaccaggatttgttgagatctcatcaaacactactcttgccatgcaaattaataaatcatagctaggccaaataaattgcatctactctttatccatttgggagctagctaccacaaccaactcatacttggtcattggattgcttccctttggcttctgcctttgcttatctctctacctctacgtcttgttcagggtttatgtttcgtaatgattaatgaatgctgtttaattaact

SEQ ID NO: 28551 - protein, 89 aa, Triticum aestivum
LTHTIETSFCFFVNMEMRKSCGFFLLLLLLVFASQVVVQTEGRVCESQSHGFHGLCNRDHNCALVCRNEGFSGGRCKGFRRRCFCTRIC

SEQ ID NO: 28552 - protein, 75 aa, Triticum aestivum
MEMRKSCGFFLLLLLLVFASQVVVQTEGRVCESQSHGFHGLCNRDHNCALVCRNEGFSGGRCKGFRRRCFCTRIC

SEQ ID NO: 28553 - protein, 73 aa, Triticum aestivum
MRKSCGFFLLLLLLVFASQVVVQTEGRVCESQSHGFHGLCNRDHNCALVCRNEGFSGGRCKGFRRRCFCTRIC

SEQ ID NO: 28554 - DNA, 722 bp, Triticum aestivum
actcggaaaaagatctccgctttgccctgcctgcctgcgccggacggagccaccccacccaccaaagcgatccgccggaccggcgagcggcgagcggcggagcaagggagagatggcggcgacgggggaggagacggtgcgtgcgtcgcacatcctgatcaagcacgaggggtcccggcgcaaggcgtcctggaaggaccccgagggccgggtcatctccgccaccacgcgcgccgacgccgccgcgcgcctcggcgacctccgcgcccagatcctcgccggccgcggctccttcgccgacctcgccgcgcagcactccgactgctcctccgcccgccgcggcggcgacctaggcacctttgggaggaggcagatgcagaagcccttcgaggacgccacgtatgctctcaaggtgggggagatcagcgacatcatcgacaccgagagcggggttcacatcatcctgcgtaccgcataaggagaaagaagaagcccacgccgtcaccgtcacagcaccctctgatgttatctagcccttttccttcttccagggcctgcggctcttctcattctggcagccccaagcttgaatgaagaaaaatgtcttgtatcgtctcaccattttgctacggccatttgagctggttgataccatcatcacaggtcaatgtttgagcttatgatgtcttgatcgggaaatgtggaaatgtttttttttcttc

SEQ ID NO: 28555 - protein, 197 aa, Triticum aestivum
TRKKISALPCLPAPDGATPPTKAIRRTGERRAAEQGRDGGDGGGDGACVAHPDQARGVPAQGVLEGPRGPGHLRHHARRRRRAPRRPPRPDPRRPRLLRRPRRAALRLLLRPPRRRPRHLWEEADAEALRGRHVCSQGGGDQRHHRHRERGSHHPAYRIRRKKKPTPSPSQHPLMLSSPFPSSRACGSSHSGSPKLE

SEQ ID NO: 28556 - protein, 158 aa, Triticum aestivum
LGKRSPLCPACLRRTEPPHPPKRSAGPASGERRSKGEMAATGEETVRASHILIKHEGSRRKASWKDPEGRVISATTRADAAARLGDLRAQILAGRGSFADLAAQHSDCSSARRGGDLGTFGRRQMQKPFEDATYALKVGEISDIIDTESGVHIILRTA

SEQ ID NO: 28557 - protein, 121 aa, Triticum aestivum
MAATGEETVRASHILIKHEGSRRKASWKDPEGRVISATTRADAAARLGDLRAQILAGRGSFADLAAQHSDCSSARRGGDLGTFGRRQMQKPFEDATYALKVGEISDIIDTESGVHIILRTA

SEQ ID NO: 28558 - DNA, 761 bp, Triticum aestivum
acctagaacatcctaatcgaaaaccgtatcgtcccctttccttcccaccccccctccgatctccatcaaccggagccgccgtgcttcctccttccgcctgcacacgcttcgaccccggcggccgcttgcggcgcgtcgccacctacctcgcccttcgttccgctgctcaggtccccgctccccagtccagcacagggaggggggcaatggaaggaccatctgattctgacggccaagtgatcccgtccaccgcaggagaccctcacctcaacagctcggccgcgcccacggacgccgccggcagcggctcgcagcacgtggcgacgctccggaagctgctgttccggaggatgctggtcggggtgaacgacggccgctacttcctggggctgttccactgcgtcgacaagcaggggaacataatcctgcaggacgcggtggagtaccgcagcgcgcgccgctcctccccgtcggcgcccaaggaggagcggtgcctcgggctcatcctgatcccggcgtcctgccgctcctcctgccatgtcgactgcttcatcgaagagcagatggccctgctgtccctgtgcaagtgaaggatgcttctgaattttctttcttcttctggtttctcaagctgtgtaacttggatgaatctgtgcttggagagtggagacctttctgtgactgttatttgtaatcggttctgccatattggacttgccctgcatattttttgttatttcagctagtacaagcttgtatcc

SEQ ID NO: 28559 - protein, 195 aa, Triticum aestivum
LEHPNRKPYRPLSFPPPLRSPSTGAAVLPPSACTRFDPGGRLRRVATYLALRSAAQVPAPQSSTGRGAMEGPSDSDGQVIPSTAGDPHLNSSAAPTDAAGSGSQHVATLRKLLFRRMLVGVNDGRYFLGLFHCVDKQGNIILQDAVEYRSARRSSPSAPKEERCLGLILIPASCRSSCHVDCFIEEQMALLSLCK

SEQ ID NO: 28560 - protein, 127 aa, Triticum aestivum
MEGPSDSDGQVIPSTAGDPHLNSSAAPTDAAGSGSQHVATLRKLLFRRMLVGVNDGRYFLGLFHCVDKQGNIILQDAVEYRSARRSSPSAPKEERCLGLILIPASCRSSCHVDCFIEEQMALLSLCK

SEQ ID NO: 28561 - DNA, 1179 bp, Triticum aestivum
acacacagcgacctactatctcataagcctataccatccgttgagccacacccaactccgccatggcgaacccctccaatttccagatcactccccgcgccgcgttcgtggagagcaacgagctcaacttccgcagtctgtacctgttccacacttccctcggcgcaaaccagacccagtccaccgtaatagacccgaatgctagtaccggtttgggtcagacggctgttaacaactgggcgatatgtgatagccctagccccggtgccaccgtcgttgcacgtgcacatggcctgcatatctatgccggtaactggcagaacaccttcagcataacctttgaagttgaaaggtttaaggggtcaacgcttcaggtgatggggatatctgttgaggaaggtgagtgggctattgttggtggcacaggacagttcgcaatggcaaacggtgtcatatacaaaaagttccatgagcagaggagcgacggtaacatcatagaactcactgtccacgcgttctgtccagtgctgaaaggctcgccgagccttctcacaaagcttgggccatggggtggaagtggagggtcagataaagacatcgttgaggcaccaaggcgtctagagagcatcacagttagcagcggctcgattattgattcaatcaaattttcttatgttgaccaagctggccagaagcacacaagtggaccctggggaggatccggaggaaatccgaacacgatcgtactcggggcttctgagtttgtgaaggaagtttctggaacatacggcatttatgacgcagaccaacacaacataataatgtcactgaaattcatcaccaatgtgaaggcttatgggcctttcggagaagcgaatggaacccctttcaccatacctgtggaaaacaatagcagcatagtgggcttcttcgggcgtagtgggatatatctcgatgcgcttggtgtctacgtgcgcccgctctaagcaacaacagctaatgttcttattttcggcgtttgtttctcatttcaaataagaagatgggatcgttgtcctttctcatccggaagatcctatgtagccacccggacttttaggtccctttgttgtgatgaataaaaatatcagttttcttacaaaaaaaaaaaaaaaaaagcttatcgataccgtcgacctc

SEQ ID NO: 28562 - protein, 307 aa, Triticum aestivum
MANPSNFQITPRAAFVESNELNFRSLYLFHTSLGANQTQSTVIDPNASTGLGQTAVNNWAICDSPSPGATVVARAHGLHIYAGNWQNTFSITFEVERFKGSTLQVMGISVEEGEWAIVGGTGQFAMANGVIYKKFHEQRSDGNIIELTVHAFCPVLKGSPSLLTKLGPWGGSGGSDKDIVEAPRRLESITVSSGSIIDSIKFSYVDQAGQKHTSGPWGGSGGNPNTIVLGASEFVKEVSGTYGIYDADQHNIIMSLKFITNVKAYGPFGEANGTPFTIPVENNSSIVGFFGRSGIYLDALGVYVRPL

SEQ ID NO: 28563 - protein, 202 aa, Triticum aestivum
MGISVEEGEWAIVGGTGQFAMANGVIYKKFHEQRSDGNIIELTVHAFCPVLKGSPSLLTKLGPWGGSGGSDKDIVEAPRRLESITVSSGSIIDSIKFSYVDQAGQKHTSGPWGGSGGNPNTIVLGASEFVKEVSGTYGIYDADQHNIIMSLKFITNVKAYGPFGEANGTPFTIPVENNSSIVGFFGRSGIYLDALGVYVRPL

SEQ ID NO: 28564 - protein, 182 aa, Triticum aestivum
MANGVIYKKFHEQRSDGNIIELTVHAFCPVLKGSPSLLTKLGPWGGSGGSDKDIVEAPRRLESITVSSGSIIDSIKFSYVDQAGQKHTSGPWGGSGGNPNTIVLGASEFVKEVSGTYGIYDADQHNIIMSLKFITNVKAYGPFGEANGTPFTIPVENNSSIVGFFGRSGIYLDALGVYVRPL

SEQ ID NO: 28565 - DNA, 468 bp, Triticum aestivum
cctagaacatcctaatcgaaaaccatcaccaacagcagacagctgctagtagaacgaacacgcctgagcgagcaatcaaccaccgaaaatcgatcgaagaaacagagacttattagctcttgagcagcaagtagaggagagcagcgatggcgttcgtgcctgggtgcgtgcagtgcgggacgcggagcaacccgtgccggtgcaaggtcgtcgggccgacgctgggattcgttgccttcgtggtgaccggcgtggtggagtggccgctgggcgcggcggtgtacctgttccgccgccgcaagggacgccgcatcatgggacacccggccagggtcgtctacccgcgcgtcaccacggccatccccatctaatcctgaattactgatcctaatttcataaaccagtaacctggtccgtcagcttgtgttcattgctgtgattcaataaaagggcggggtgtcggtgtgc

SEQ ID NO: 28566 - protein, 74 aa, Triticum aestivum
MAFVPGCVQCGTRSNPCRCKVVGPTLGFVAFVVTGVVEWPLGAAVYLFRRRKGRRIMGHPARVVYPRVTTAIPI

SEQ ID NO: 28567 - DNA, 1102 bp, Triticum aestivum
gactaatatttttcagttgtcaccaaatttctgctctttttaagtaatttaattttatatcagattaaattaaatcccctccgttgttaacgttgtattgttttctgggatgcaggacggcggatcaaagttcttctggttctccatctgcatcatgttcatacgatgtctactgctttggaaaagtattgctggagctggtgacagggagacttggtatcagtgcatcaagtgacggtacaacaagtgattggcttgataacaccctgaggtacatcaacatttatgagaaagagctcatgagcaaaatcattgacccaaccctcattattgatgaggatcatttggaggaagtctgggcaatggcaattgtcgcgaagtcttgcttgaatcctaggtcttcgaagcggccaccaatgaaatatatcctaaaagcacttgagaatcccttgaaagtggtaagagaagataacggctctagctcggccaggttgagagcaacatcttcaaggggttcatggaatgctgcattcttcgggagttggcggcatagctcgtcagagattggtccttcaagggatgataacatgtttaaacggtcagagacaatcaaatcatctggagggagcaatggtgatcactcttcgtcccgcaggaggcaatctaaggagatcttccccgagccatctggttctcgtgacacagaggattaaggatacttcattctttctttttgcgatcctttgggttaacagaggttgctctgttgaagctctgctgccagcgtgtgattagattctttcagctgaaaagccggagggcgaattcgcctgttgccaatgacttcgcaagcagcggactgtcgccgaggcaccattttttgggggttggaatgtgaggtgagcgtatggaggtccgtgtataccctgcctggtgcactgtctggactatggcgtggagtggctctggtttctctttcttttccttttttcttcttctcctggtcatgattaaagaggaaatgtcgagctgattctttttctccttcctgctgtaattgattgtttcattgttgatcatagcaaaaatgttcgttccgtcc

SEQ ID NO: 28568 - protein, 137 aa, Triticum aestivum
MSKIIDPTLIIDEDHLEEVWAMAIVAKSCLNPRSSKRPPMKYILKALENPLKVVREDNGSSSARLRATSSRGSWNAAFFGSWRHSSSEIGPSRDDNMFKRSETIKSSGGSNGDHSSSRRRQSKEIFPEPSGSRDTED

SEQ ID NO: 28569 - protein, 116 aa, Triticum aestivum
MAIVAKSCLNPRSSKRPPMKYILKALENPLKVVREDNGSSSARLRATSSRGSWNAAFFGSWRHSSSEIGPSRDDNMFKRSETIKSSGGSNGDHSSSRRRQSKEIFPEPSGSRDTED

SEQ ID NO: 28570 - protein, 98 aa, Triticum aestivum
MKYILKALENPLKVVREDNGSSSARLRATSSRGSWNAAFFGSWRHSSSEIGPSRDDNMFKRSETIKSSGGSNGDHSSSRRRQSKEIFPEPSGSRDTED

SEQ ID NO: 28571 - DNA, 1647 bp, Triticum aestivum
agaacatcctaatcgaaaaacaagcagagtctcttggctgcacccgtcaccggtgcccccttcttcgtcagcctgcaatctccactcacctcactcccactccccctcccaccccccactcttctacacatcgaggacgaaagggtggtgagggagccgggggcctgagggggctagctgctaggcggaggaggggatggagcgagggctcgcattgctgggtctggggctggcgcttcttctgctggcgccctctcgtcgtctcgcctcggccgctccggtggaggacggcctgctcatgaatggtgatttcgagacagcaccacctggcggtttcgtcaaatcggcttcagtttccgagggcgcggcgatcccaagctggacgatcaatggaacagttgagctcatttccgcaggccagcaccagggtggcatgatccttattgttccacaaggggatcatgctgtgcggctagggaatgatgcaggcattgggcaggtggtggaggttgagaagggctcagagtacgcgatcacattcagtgccgcccggacctgcgcgcagctggagtcactgaacatctccgccgggagcgtatcacagacagtcgacttgcagacactttacagcatagaaggctgggatgcatatgccctggctttccaagcagtggatgagcaggcgagcattgagtttaggaaccctggcatggaggacgacccgacctgcgggcctatccttgacaacgtggccatcaagaagctcttctcccccgacaaagcaaaggagaacatggtgatcaatggagactttgaggaggggccatggatgtttccaaacacaagcttcggtgtcctgctcccgacgaaccttgacgagcagacatcggccttgccagggtggatgatcgagtcgaaccgcgcagtccgcttcgtcgactccgaccagtacaccgtgccccaggggaagcgcgccatcgagcttctctccggcaaggagggcatcatctcgcagatggtggagacgacccctcagaaggcgtacaccctgacgttcacgctgggctcggcaggcgactcgtgccagccgccaatggctgtcatggcattcgccggcgaccaggcccagaacttccactactcccccatgggcaacgccacgagccaggccgtgaacgtgaacttcacggcgcgcgccgagaggacacgcgttgcgctctacagcgtctactacaacacgagaagcgacgaccacagctcgctctgcgggccggtgatagacgacgtccgtgtctggggcttgaatggggctgctgggttgaaggcaagtattgcgctgcttattgccatggctagtgtcatcgttctcgtgctgttctgatctcctgaatatacgtatgtaacctcccctgcaagggcgaggaggccactagttttgttagtaagcttgaggtttctatgagattgatgagtaatgtgagcttaggctaaagctaccagtagctataaatggttgttttgttgctttcttgtgtgattcagaaagtagcaaaccatgatgggattgagtggtcactgagccaagggcttgcaatgtgagatgtaagaattgttacaagttcatctcttcaatgcattagaaagtcc

SEQ ID NO: 28572 - protein, 394 aa, Triticum aestivum
MERGLALLGLGLALLLLAPSRRLASAAPVEDGLLMNGDFETAPPGGFVKSASVSEGAAIPSWTINGTVELISAGQHQGGMILIVPQGDHAVRLGNDAGIGQVVEVEKGSEYAITFSAARTCAQLESLNISAGSVSQTVDLQTLYSIEGWDAYALAFQAVDEQASIEFRNPGMEDDPTCGPILDNVAIKKLFSPDKAKENMVINGDFEEGPWMFPNTSFGVLLPTNLDEQTSALPGWMIESNRAVRFVDSDQYTVPQGKRAIELLSGKEGIISQMVETTPQKAYTLTFTLGSAGDSCQPPMAVMAFAGDQAQNFHYSPMGNATSQAVNVNFTARAERTRVALYSVYYNTRSDDHSSLCGPVIDDVRVWGLNGAAGLKASIALLIAMASVIVLVLF

SEQ ID NO: 28573 - protein, 360 aa, Triticum aestivum
MNGDFETAPPGGFVKSASVSEGAAIPSWTINGTVELISAGQHQGGMILIVPQGDHAVRLGNDAGIGQVVEVEKGSEYAITFSAARTCAQLESLNISAGSVSQTVDLQTLYSIEGWDAYALAFQAVDEQASIEFRNPGMEDDPTCGPILDNVAIKKLFSPDKAKENMVINGDFEEGPWMFPNTSFGVLLPTNLDEQTSALPGWMIESNRAVRFVDSDQYTVPQGKRAIELLSGKEGIISQMVETTPQKAYTLTFTLGSAGDSCQPPMAVMAFAGDQAQNFHYSPMGNATSQAVNVNFTARAERTRVALYSVYYNTRSDDHSSLCGPVIDDVRVWGLNGAAGLKASIALLIAMASVIVLVLF

SEQ ID NO: 28574 - protein, 315 aa, Triticum aestivum
MILIVPQGDHAVRLGNDAGIGQVVEVEKGSEYAITFSAARTCAQLESLNISAGSVSQTVDLQTLYSIEGWDAYALAFQAVDEQASIEFRNPGMEDDPTCGPILDNVAIKKLFSPDKAKENMVINGDFEEGPWMFPNTSFGVLLPTNLDEQTSALPGWMIESNRAVRFVDSDQYTVPQGKRAIELLSGKEGIISQMVETTPQKAYTLTFTLGSAGDSCQPPMAVMAFAGDQAQNFHYSPMGNATSQAVNVNFTARAERTRVALYSVYYNTRSDDHSSLCGPVIDDVRVWGLNGAAGLKASIALLIAMASVIVLVLF

SEQ ID NO: 28575 - DNA, 755 bp, Triticum aestivum
cgaaaaacatataaagcctcccgatttcgaacaccccatcgcatcccctccccccactcctcctctccttctcccccgatccgaacccattcccgcaccctcgcccctctccagacccgccggatctcgccgccaggaccgccgtccacccgcaaccaacgcaggcgaggcgatatggccaccttcgagctgtacaggcggtccaccatcggcatgtgcctcaccgagacgctcgacgagatggtctctagcggcacactcagccccgagctcgccatccaagtgctagtccagttcgataagtctatgacggaggcactggaaaaccaagtgaagagcaaggttactgtcaagggccatctgcacacctacaggttctgcgacaacgtgtggacgttcatcctgacggacgcgcagttcaagaacgaggagaccaccgagcaggtgggcaaggtgaagatcgtggcctgcgactccaagctactcagccaataagcagcgcgcgagctgctgactcccgaggcggggctccttcgatccccgcctccgctagagaagaacccccgccgccaccacacccccatcctcataatccatgggtacatgtagaaggatctcatgctatgcgatcctagagcatcgcattgcatcgcggccacagaactttttccgatccgtgtcgtgtaatgttgtttccggaacttttgatataactggtgactggaatgagtagcagcaatcaaaactttgtttgg

SEQ ID NO: 28576 - protein, 164 aa, Triticum aestivum
RKTYKASRFRTPHRIPSPHSSSPSPPIRTHSRTLAPLQTRRISPPGPPSTRNQRRRGDMATFELYRRSTIGMCLTETLDEMVSSGTLSPELAIQVLVQFDKSMTEALENQVKSKVTVKGHLHTYRFCDNVWTFILTDAQFKNEETTEQVGKVKIVACDSKLLSQ

SEQ ID NO: 28577 - protein, 106 aa, Triticum aestivum
MATFELYRRSTIGMCLTETLDEMVSSGTLSPELAIQVLVQFDKSMTEALENQVKSKVTVKGHLHTYRFCDNVWTFILTDAQFKNEETTEQVGKVKIVACDSKLLSQ

SEQ ID NO: 28578 - protein, 95 aa, Triticum aestivum
EKHIKPPDFEHPIASPPPTPPLLLPRSEPIPAPSPLSRPAGSRRQDRRPPATNAGEAIWPPSSCTGGPPSACASPRRSTRWSLAAHSAPSSPSKC

SEQ ID NO: 28579 - DNA, 1260 bp, Triticum aestivum
actccactcaatccccaaaatggggacgctgcttccgtgtcaccctacccttaccctcctccccctcctcttcgccgccgccatcgtcggcgtgcgttgcgcgccggtgtacaggccggagtacctggtggacgggaaccagctggtaaacatgcagtaccacatgggccccgtcgtgtcaggcgcgccgaccaacctgttcctcatctggtacggccggtgggaggccccggcgcaggctgtgctccgcgacttcctcgcctccctctccgctccggcgccgttccccgccgtctccgactggtgggcccgcacgccgcggctctacacggaccaatccggcgccaatgtcaccgccacattcgccatcgccggggagcactccgacgccgggtactcccacggcgcctccctgaagcggatcgacatgcagtccatcatccgcaccgccgtggtcgcgtacccggaccctctgccgctcgacccgtacaacggcgtgtacctggtgctctcctcaccggacgtgcaggtggaggagttctgccgcgccatgtgcggcttccactacttcaccttcgcgtccgtggtcggggtcaccgtcccgtacgcgtgggtcgggaacagcggctcgcagtgcccagggaggtgtgcgtatccgttcgccgcgccggagtacggcgccagcgggcagggggtgctgcggccgccgaacggcgaccccggggtggacgggatggtgatcgtgctggggcacgagcttgcggagctggccaccaacccgctggtgaacgcgtggtacgccggtgacacgccaacggcgcccacggagatcgccgacctctgtctcggggtctacggcgacggcggtggagcaggcgggttcgtcgggaatgtctcccacgcagccgacggcagctcctacaacgtgaacggcgtcaacggtcggcggttcctggtgcagtggctctggaaccccgtcctcggcgcgtgctacggacccaactccagcaactgaagccgctcttctcttccccggatccgtggcttctctcagttgatgccattgcgctggatggcgttgcagaggcaggaatggcaagtccatggatggatgggtacgacatgccatgatatccagatactgaatgtctgaaatgtcattcagactcgatctgttccttatttgttggcccagggtttgcgataggtttatggattttgatagatctgtatctgtgaggacaagatgcaaatttttgc

SEQ ID NO: 28580 - protein, 337 aa, Triticum aestivum
LHSIPKMGTLLPCHPTLTLLPLLFAAAIVGVRCAPVYRPEYLVDGNQLVNMQYHMGPVVSGAPTNLFLIWYGRWEAPAQAVLRDFLASLSAPAPFPAVSDWWARTPRLYTDQSGANVTATFAIAGEHSDAGYSHGASLKRIDMQSIIRTAVVAYPDPLPLDPYNGVYLVLSSPDVQVEEFCRAMCGFHYFTFASVVGVTVPYAWVGNSGSQCPGRCAYPFAAPEYGASGQGVLRPPNGDPGVDGMVIVLGHELAELATNPLVNAWYAGDTPTAPTEIADLCLGVYGDGGGAGGFVGNVSHAADGSSYNVNGVNGRRFLVQWLWNPVLGACYGPNSSN

SEQ ID NO: 28581 - protein, 331 aa, Triticum aestivum
MGTLLPCHPTLTLLPLLFAAAIVGVRCAPVYRPEYLVDGNQLVNMQYHMGPVVSGAPTNLFLIWYGRWEAPAQAVLRDFLASLSAPAPFPAVSDWWARTPRLYTDQSGANVTATFAIAGEHSDAGYSHGASLKRIDMQSIIRTAVVAYPDPLPLDPYNGVYLVLSSPDVQVEEFCRAMCGFHYFTFASVVGVTVPYAWVGNSGSQCPGRCAYPFAAPEYGASGQGVLRPPNGDPGVDGMVIVLGHELAELATNPLVNAWYAGDTPTAPTEIADLCLGVYGDGGGAGGFVGNVSHAADGSSYNVNGVNGRRFLVQWLWNPVLGACYGPNSSN

SEQ ID NO: 28582 - protein, 287 aa, Triticum aestivum
MQYHMGPVVSGAPTNLFLIWYGRWEAPAQAVLRDFLASLSAPAPFPAVSDWWARTPRLYTDQSGANVTATFAIAGEHSDAGYSHGASLKRIDMQSIIRTAVVAYPDPLPLDPYNGVYLVLSSPDVQVEEFCRAMCGFHYFTFASVVGVTVPYAWVGNSGSQCPGRCAYPFAAPEYGASGQGVLRPPNGDPGVDGMVIVLGHELAELATNPLVNAWYAGDTPTAPTEIADLCLGVYGDGGGAGGFVGNVSHAADGSSYNVNGVNGRRFLVQWLWNPVLGACYGPNSSN

SEQ ID NO: 28583 - DNA, 644 bp, Triticum aestivum
ccccatcgccgcctcatcgccgccaggagttcgagttccccccgaaccgtcgccatggctgccgcaccagtcatgtgagcaggccaagtcccggcgcagaatctactgcgcttcattctcgattaaattattcgaatcgtttctccgttgtgttgtttttaacttggtgtttgtttctctactccaacgtgcgcagctccccgaaagaaaatctgcccccttcgctgacctccacctccgagccccctccactcttcgacggcaccaccaggttgtatgttgcatatcactgcccatatgcgcagcgcgcttggattgccaggaactacaagggtttgcaagacaagatcaagatagtcgggatcgatctcgcagacaggccggcttggtacaaggagaaggtttacccacagaacaaggtgccttcactggagcataacaacgaggtgaaaggagaaagcttggatttggtcaagtacattgacagcaatttcgatggcccagcattgctccccgatgattctgcaaagaagcagtttgccgaggagctgcttgtgtacatcgatgagttcaataaagcactatactcatccataacctccaagggagatgtggcagaggaaactgttgctgcgctggataaa

SEQ ID NO: 28584 - protein, 214 aa, Triticum aestivum
PSPPHRRQEFEFPPNRRHGCRTSHVSRPSPGAESTALHSRLNYSNRFSVVLFLTWCLFLYSNVRSSPKENLPPSLTSTSEPPPLFDGTTRLYVAYHCPYAQRAWIARNYKGLQDKIKIVGIDLADRPAWYKEKVYPQNKVPSLEHNNEVKGESLDLVKYIDSNFDGPALLPDDSAKKQFAEELLVYIDEFNKALYSSITSKGDVAEETVAALDK

SEQ ID NO: 28585 - protein, 145 aa, Triticum aestivum
PIAASSPPGVRVPPEPSPWLPHQSCEQAKSRRRIYCASFSIKLFESFLRCVVFNLVFVSLLQRAQLPERKSAPFADLHLRAPSTLRRHHQVVCCISLPICAARLDCQELQGFARQDQDSRDRSRRQAGLVQGEGLPTEQGAFTGA

SEQ ID NO: 28586 - DNA, 888 bp, Triticum aestivum
atatcaggttcaggttcgggttctgcagccgccgtagaaccctagcgtgtctcattaaaccctcaacctccaccttccgacttgcttccagtaattcttccctccccaccaagaaaatcacagccgagaaatagccgaccgaccgcacccttccctcccttctcccccttcctcaagacaggccggaaccaaatcgtgaagctcgatggaccacgtgggctccatggaggagaggatcgtggcggaccggatccggaagaagctggaggaggtgaacgtcgccgcccagaagcacctcgagggcgtgcaggaccatgtcaacttcactctgcagaaagagtacttcaagtgtgcacatgactgctttgataggcgacggactcaagaggggatcaccagctgtgtagagaactgtggtgtgcccgctctttctgccaacaatgttgttgagactgagatggccaagttccaggaaaggttgaatcgctcgttgatggtctgccaagataagtttgaagcagcaaagctccagaagatgaagacagacgcaaccaatgagctggagtcgtgcgtgaacaggtccatcgatgacagcatcagggtcctgccccatctggttgagcagatcaagtccaccattaacatgaagtagaggaatcagaaactttcaaattgtcccccggctcgtttttgccatcgttagctgaatctatccagagtctctagcagcactagtgtaacatgctcattactgccatgagaaccatgtctagagaagagttttttgctgagagattagtgcgtctaaatggcgccgcgataccagactaaatgttgcaaacgtagcttttgcataacatcttaaaatcttaaaatcttttttttttc

SEQ ID NO: 28587 - protein, 148 aa, Triticum aestivum
MDHVGSMEERIVADRIRKKLEEVNVAAQKHLEGVQDHVNFTLQKEYFKCAHDCFDRRRTQEGITSCVENCGVPALSANNVVETEMAKFQERLNRSLMVCQDKFEAAKLQKMKTDATNELESCVNRSIDDSIRVLPHLVEQIKSTINMK

SEQ ID NO: 28588 - protein, 142 aa, Triticum aestivum
MEERIVADRIRKKLEEVNVAAQKHLEGVQDHVNFTLQKEYFKCAHDCFDRRRTQEGITSCVENCGVPALSANNVVETEMAKFQERLNRSLMVCQDKFEAAKLQKMKTDATNELESCVNRSIDDSIRVLPHLVEQIKSTINMK

SEQ ID NO: 28589 - DNA, 1391 bp, Triticum aestivum
gcaatccgatgaaccagcaaaaccgtggacgagcaccgccggtattctgctcccgaattccacagatttccactccccgctcccaaagccccgatactttatagccggcgacagcaagcccagcaaaatcccatctcccaacccggaaatcctcccactcccgggaatgaatcagcttccccttccccttctctgagatctcagcccgagcctgcgcgccgcgacttccaccggaatccttccctcctagccgcaacatcgccggatcgattcaggcattcttggtggccggagaagcagtctttggtcctctgcttgagatcatcatcagacatgtcgctgctatcgaaattgcggctggttactgtggatgtgactggtactctgcttgcttacaaaggacggcttggtgattactactgcatggctgctaaggctgctggaaagccatgccctgattatgatcgaatgcacgaaggcttcaagcttgcatacactgagatggcaaggaaatacccatgctttggatttgcggcaaagatgccaacgattgaatggtggaggatttgtgtcaaggattcatttgttaaggctgggtatgattacgatgatgagacatttgataaagtgttcaagcgaatttattccgcctttggctcctctgcgccatactctgtttttcctgatgcacagcccttcatgagagggctgagggaaaaggggatcacagttggaatcgtcagcaatgcagagtaccggtacaaagaggtcatcttgcctgcgttagggctgaatcagggctcagagtgggacttcggggtgttctcaggcatcgtcggtgtcgagaaacctgacccaaaaatctacaagatcgcgctggagatggcggggaacgtcgcaccggaagaggcgctccacattggcgacagctaccgcaaggactacgtccctgcacggagcatcgggatgcacgcgctgctcctggaccggttcaagaccgccgacgccgagagctggaggcagtccggcgcgccggtgctccctgatctcgaagccgcacaggcatggctcaccaagaacccgaccgaggaacccgctgaggagccactaggggccgcactgctgcgcaggatggccgagaagctctgaatctcgcccctgggatggttcctgttgtgctcttgctggggagtgagggagccaaggagaagggatgtgttgtagcgatggttcactggccagtttagctagctggagctacttgaactctggtagtaggcttccagtgctgttgttgactgctgaatgtggccaagtgattcagccgtgcgacaaacatcttgcaatgacgaataattctaatcatgtttcgcataatggaggaatttaac

SEQ ID NO: 28590 - protein, 271 aa, Triticum aestivum
MSLLSKLRLVTVDVTGTLLAYKGRLGDYYCMAAKAAGKPCPDYDRMHEGFKLAYTEMARKYPCFGFAAKMPTIEWWRICVKDSFVKAGYDYDDETFDKVFKRIYSAFGSSAPYSVFPDAQPFMRGLREKGITVGIVSNAEYRYKEVILPALGLNQGSEWDFGVFSGIVGVEKPDPKIYKIALEMAGNVAPEEALHIGDSYRKDYVPARSIGMHALLLDRFKTADAESWRQSGAPVLPDLEAAQAWLTKNPTEEPAEEPLGAALLRRMAEKL

SEQ ID NO: 28591 - protein, 241 aa, Triticum aestivum
MAAKAAGKPCPDYDRMHEGFKLAYTEMARKYPCFGFAAKMPTIEWWRICVKDSFVKAGYDYDDETFDKVFKRIYSAFGSSAPYSVFPDAQPFMRGLREKGITVGIVSNAEYRYKEVILPALGLNQGSEWDFGVFSGIVGVEKPDPKIYKIALEMAGNVAPEEALHIGDSYRKDYVPARSIGMHALLLDRFKTADAESWRQSGAPVLPDLEAAQAWLTKNPTEEPAEEPLGAALLRRMAEKL

SEQ ID NO: 28592 - protein, 226 aa, Triticum aestivum
MHEGFKLAYTEMARKYPCFGFAAKMPTIEWWRICVKDSFVKAGYDYDDETFDKVFKRIYSAFGSSAPYSVFPDAQPFMRGLREKGITVGIVSNAEYRYKEVILPALGLNQGSEWDFGVFSGIVGVEKPDPKIYKIALEMAGNVAPEEALHIGDSYRKDYVPARSIGMHALLLDRFKTADAESWRQSGAPVLPDLEAAQAWLTKNPTEEPAEEPLGAALLRRMAEKL

SEQ ID NO: 28593 - DNA, 616 bp, Triticum aestivum
agtgtagggacatcgtgactgaccaccggagagagagaagaagaggctgccaaggtcgacgacggagaagaagaagaggcgatggcgtccgggtggggcatcaacgggaacaaggggcggtgctacgacttctggctggacttcagctcgtgcatgagccgctgccgccagccctccgattgcggcctcctccgcgaggactacctcgagtgcctccaccactccaaggagttccagcgcaggaacaggatctacaaggaggagcaacgtcagataagagctgctgctcgcaaggccaaggaggaagccgaaggagctcctgctgttgcagctcaccactagcatccgtttttatttgctgcaagtgcttccatgttcggctatgagcaaggcaataatttcctaaacattctaccctcccactccatgacttgttctaaaatcatgagttcgataaacaaccttggtcaacaagtttgtgcatgtttgagatattaagcgataataaacgcttgattcaaccatgaaacatgatgtttgtgcatgtttgcataccttgtagcaatttcatggcattaaaaaaaaaaaaaaaaaagcttatcgataccgtcgacct

SEQ ID NO: 28594 - protein, 127 aa, Triticum aestivum
CRDIVTDHRRERRRGCQGRRRRRRRGDGVRVGHQREQGAVLRLLAGLQLVHEPLPPALRLRPPPRGLPRVPPPLQGVPAQEQDLQGGATSDKSCCSQGQGGSRRSSCCCSSPLASVFICCKCFHVRL

SEQ ID NO: 28595 - protein, 86 aa, Triticum aestivum
MASGWGINGNKGRCYDFWLDFSSCMSRCRQPSDCGLLREDYLECLHHSKEFQRRNRIYKEEQRQIRAAARKAKEEAEGAPAVAAHH

SEQ ID NO: 28596 - DNA, 744 bp, Triticum aestivum
ctcttcccactttatccctctcgcccacctccctcctctcctctcccctcccctcctctcgtcacaccgcgccagctaaggcttcgctgtgcgctcccctcccccacgcgcattcattctcgcccgctacccctcgccgccgccgcgccatggccggcgttaggagcctcgtgctgctcctcctggtgctcgccgtcgcgctgtccgcctccgcctcgtccatcgccggcggggaccacctgcagctcggcctcctctccggcggcgctggccgcggggagtgcaggggcaccgtggccgagtgcggcggggaggacgcggagggggagctcgggtccgcgtcggccgaggcgcaccgccgcgtgctgcagggccgcggctacatcagctacggcgcgctgcacaggggcaccgtcccctgcaaccgccgcggcgccagctactacaactgccgccccggcgcccaggccaacccctaccaccgcggatgctcccgcatcacccgctgccgcggctaagcctcggatccgcgcccagagatcacgtcctctcagttcaaaaataagctgcttctcgtgctgttctttaagcggtgccactagtatactgctgctgctactattattagttaaatttctttggttgttgccgctgctgtgttggcctattgggacatttgttgccgtcgttgttgtaaagtataagagagatttgtgccttaatatcaagatatatttgttattc

SEQ ID NO: 28597 - protein, 248 aa, Triticum aestivum
LFPLYPSRPPPSSPLPSPPLVTPRQLRLRCALPSPTRIHSRPLPLAAAAPWPALGASCCSSWCSPSRCPPPPRPSPAGTTCSSASSPAALAAGSAGAPWPSAAGRTRRGSSGPRRPRRTAACCRAAATSATARCTGAPSPATAAAPATTTAAPAPRPTPTTADAPASPAAAAKPRIRAQRSRPLSSKISCFSCCSLSGATSILLLLLLLVKFLWLLPLLCWPIGTFVAVVVVKYKRDLCLNIKIYLLF

SEQ ID NO: 28598 - protein, 171 aa, Triticum aestivum
LPTLSLSPTSLLSSPLPSSRHTAPAKASLCAPLPHAHSFSPATPRRRRAMAGVRSLVLLLLVLAVALSASASSIAGGDHLQLGLLSGGAGRGECRGTVAECGGEDAEGELGSASAEAHRRVLQGRGYISYGALHRGTVPCNRRGASYYNCRPGAQANPYHRGCSRITRCRG

SEQ ID NO: 28599 - protein, 122 aa, Triticum aestivum
MAGVRSLVLLLLVLAVALSASASSIAGGDHLQLGLLSGGAGRGECRGTVAECGGEDAEGELGSASAEAHRRVLQGRGYISYGALHRGTVPCNRRGASYYNCRPGAQANPYHRGCSRITRCRG

SEQ ID NO: 28600 - DNA, 1623 bp, Triticum aestivum
acacattacatgttccattccagtgcacgtaccgcccactgcagtttctgcaaacgtttaaaaaacaaggtagtactagtaggagtatgaccagggggggacgaatctgtacgggatcgcggcgagattcacccggcgccaccctcccctccctgtaacgtcgttatacaagtgtacttatctcgggggaccctataagggaggcggctcgggcagctccaagcgccagcgaaccaaccacgaggacacggcgagatgcagcgcgccgcggcctccctcgcctcctcccgctccgcggctgcctgggcgtgctcctccacctcgcgccatgccatcgcctcctgctcggccaccgcccgccgcgacgccgtcgtgcctctccggattcgcgggcagcagcaggttcccctccactccatgtccctgtcgctgctctcgcggagacggcctgcgcggacggcaaaagcggcggctgctgcggcggaactggcaccggcgtcggacgaggtggccgcgggcggcggcattgccggcacggtgcagctcggcgccatgatcgtcgcctggtacctcctcaacatctacttcaacatctacaacaagcaggttctccaggtgctgccattgccgctcccctacaccatcaccgccttccagctcgccttcggctcgctcgtcatcttcttcatgtgggccacaaagctccaccccgtgcccaagctctccgccgcacagctggccaagatcgcgccgctggccgccgggcacatgctgggcacggtgttcaccaacatgagcctgggcaaggtagccgtctccttcacgcacaccgtcaaggcgtccgagcccttcttcaccgtgctgctctccgccttcttcctcggtgaggtgccgtcgccgctggtgctgggctcgctggtgccgatcgtcggcggcgtcgccctggcatcgctgaccgaggtctccttcaactgggtcggattctggagcgccatggcgtcgaatctgctcaaccagaccaggaatgtgctcagcaagcgcctcctcggcggcgaagaggaggagttcatggacgacataaacctcttctcggtgatcaccgtgctgtccttcctcctatccttgcctctgatgatctttgcagaaggggtcagcttctccccagcgttcctccagagcaccggcctgaacctgcaggagctgtgcgtgagggcggccctggccggcctctgcttccatggctaccagaagctgtcgtacatgatcctggcgagggtgtcgcccgtgacccactccgtggccaactgcgtcaagcgtgtggtggtcatcgtctcctccgtcctcttcttccggacgcccatctcgcctgtcaacgcactggggactggtgcggcacttgcgggagtttacctgtactccaggctcaagaaaacaaagccaaagagctcatgaagacattctgatacaggtttttgtggtacaagattaaatcgatatagttattcagagagaaaatgtattgagataggttgtacagaacttgccacggccagtagtacacttgtactacaggccacagcagcttctttcagtagtaacaggaccaaactgctggtcttgaag

SEQ ID NO: 28601 - protein, 398 aa, Triticum aestivum
MQRAAASLASSRSAAAWACSSTSRHAIASCSATARRDAVVPLRIRGQQQVPLHSMSLSLLSRRRPARTAKAAAAAAELAPASDEVAAGGGIAGTVQLGAMIVAWYLLNIYFNIYNKQVLQVLPLPLPYTITAFQLAFGSLVIFFMWATKLHPVPKLSAAQLAKIAPLAAGHMLGTVFTNMSLGKVAVSFTHTVKASEPFFTVLLSAFFLGEVPSPLVLGSLVPIVGGVALASLTEVSFNWVGFWSAMASNLLNQTRNVLSKRLLGGEEEEFMDDINLFSVITVLSFLLSLPLMIFAEGVSFSPAFLQSTGLNLQELCVRAALAGLCFHGYQKLSYMILARVSPVTHSVANCVKRVVVIVSSVLFFRTPISPVNALGTGAALAGVYLYSRLKKTKPKSS

SEQ ID NO: 28602 - protein, 344 aa, Triticum aestivum
MSLSLLSRRRPARTAKAAAAAAELAPASDEVAAGGGIAGTVQLGAMIVAWYLLNIYFNIYNKQVLQVLPLPLPYTITAFQLAFGSLVIFFMWATKLHPVPKLSAAQLAKIAPLAAGHMLGTVFTNMSLGKVAVSFTHTVKASEPFFTVLLSAFFLGEVPSPLVLGSLVPIVGGVALASLTEVSFNWVGFWSAMASNLLNQTRNVLSKRLLGGEEEEFMDDINLFSVITVLSFLLSLPLMIFAEGVSFSPAFLQSTGLNLQELCVRAALAGLCFHGYQKLSYMILARVSPVTHSVANCVKRVVVIVSSVLFFRTPISPVNALGTGAALAGVYLYSRLKKTKPKSS

SEQ ID NO: 28603 - protein, 299 aa, Triticum aestivum
MIVAWYLLNIYFNIYNKQVLQVLPLPLPYTITAFQLAFGSLVIFFMWATKLHPVPKLSAAQLAKIAPLAAGHMLGTVFTNMSLGKVAVSFTHTVKASEPFFTVLLSAFFLGEVPSPLVLGSLVPIVGGVALASLTEVSFNWVGFWSAMASNLLNQTRNVLSKRLLGGEEEEFMDDINLFSVITVLSFLLSLPLMIFAEGVSFSPAFLQSTGLNLQELCVRAALAGLCFHGYQKLSYMILARVSPVTHSVANCVKRVVVIVSSVLFFRTPISPVNALGTGAALAGVYLYSRLKKTKPKSS

SEQ ID NO: 28604 - DNA, 1173 bp, Triticum aestivum
  misc_feature (1041)..(1042): n is a, c, g, or t
actcccgtggactccctcgcgccctccctcctcctgtcgtgtcctcccacacccccgcgcggtggtcgccggaagcagcgccccacagtcggacaatcgtcagatccgccgccgccgacgccacgatgaacgacaccgatgtctccaagcagatccagcagatggtgcggttcatccgccaggaggccgaggagaaggctggcgagatctccgtctccgctgaggaggaattcaacattgagaagctgcaacttgttgaagctgagaaaaagaagatcaggcaagaatatgagcggaaagagaagcaggttgatgttcggaagaaaattgagtactctatgcagctgaatgcttctcgcatcaaagtgcttcaggcccaggatgacctggttaataaaatgaaagaggatgcaatgaaggaactcctgaatatcagcagcaaccaccatgaatacaagaatctgttaaaagaactcgttgttcagggcctgcttcggttgaaagagccagctgtactgctccgctgccgcaaagaagatcaccataatgtggaatctgtactgcattcagcaaagaatgagtatgcatcaaaagcagatgtccatgagcccgagatactagttgaccacagtgtctacctgccaccttctccgagccatggcgatgagcacggccagatttgccatggaggtgttgtgctggcttctcgagatggaaagattgtgtttgagaatacagttgatgcaaggcttgaagttgttttccgcaagaaattgccagagatccggaagcttcttgttgcggcataatgcgcacttgtattttggtgatggtacagctgtttctatgtaaaatggctgctggtttgacccccagcaggtgcaacgaactccgcccggttttgcgaacattgattgtttaaagtattccatcctcttatgtaaacactacctatttgttcattatcgtcgccgagcacaaactatttgcacgaactttgctctgaggaataataaataaagcaccgtcggattgtgttannaaaaaaaaaaaaaaaaaaaaaaaaaaaaaaaaaaaaaaaaaaaaaaaaaaaaaaaaaaaaaaccccaaaaaaaaaaaaaaaagttttttcaacccggccaccccgggggggggcccgggacccaattcccc

SEQ ID NO: 28605 - protein, 268 aa, Triticum aestivum
SRGLPRALPPPVVSSHTPARWSPEAAPHSRTIVRSAAADATMNDTDVSKQIQQMVRFIRQEAEEKAGEISVSAEEEFNIEKLQLVEAEKKKIRQEYERKEKQVDVRKKIEYSMQLNASRIKVLQAQDDLVNKMKEDAMKELLNISSNHHEYKNLLKELVVQGLLRLKEPAVLLRCRKEDHHNVESVLHSAKNEYASKADVHEPEILVDHSVYLPPSPSHGDEHGQICHGGVVLASRDGKIVFENTVDARLEVVFRKKLPEIRKLLVAA

SEQ ID NO: 28606 - protein, 227 aa, Triticum aestivum
MNDTDVSKQIQQMVRFIRQEAEEKAGEISVSAEEEFNIEKLQLVEAEKKKIRQEYERKEKQVDVRKKIEYSMQLNASRIKVLQAQDDLVNKMKEDAMKELLNISSNHHEYKNLLKELVVQGLLRLKEPAVLLRCRKEDHHNVESVLHSAKNEYASKADVHEPEILVDHSVYLPPSPSHGDEHGQICHGGVVLASRDGKIVFENTVDARLEVVFRKKLPEIRKLLVAA

SEQ ID NO: 28607 - protein, 215 aa, Triticum aestivum
MVRFIRQEAEEKAGEISVSAEEEFNIEKLQLVEAEKKKIRQEYERKEKQVDVRKKIEYSMQLNASRIKVLQAQDDLVNKMKEDAMKELLNISSNHHEYKNLLKELVVQGLLRLKEPAVLLRCRKEDHHNVESVLHSAKNEYASKADVHEPEILVDHSVYLPPSPSHGDEHGQICHGGVVLASRDGKIVFENTVDARLEVVFRKKLPEIRKLLVAA

SEQ ID NO: 28608 - DNA, 1017 bp, Triticum aestivum
acatacactcgatcgaaccaacccattcctcctactacctcggcacaaccagcccaaacagaactagcgagcagagccatggcgcccaacggagacaacaccgtggccaacgtccacagcggcatcgacagcaccaacaagacgctgctcaagagcgacgccctctacacttacatcctcgacaccaccgtgttcccccgcgagcacgagtgcatgcgcgacctgcgcctcatcaccgacaagcacccatggggttacatgcagtcgtcctcggacgaggcgcagctgctggggatgctgatcaagatggcgggcgccaagaagacgatcgaggtgggcgtgttcacgggctactcgctgctggccaccgcgctggcgctcccggaggacggcaaggtggtggccatcgacaccgaccgcgagtgctacgaggtgggtcgccccttcatcgagaaggccggcatggcgcacaaggtggacttccgcgagggcaccggcctggcgcgcctggacgagctcctcgtcgaggacgacggcgcggcgagctacgacttcgcgttcgtggacgcggacaagcccaactacgtgcgctaccacgagcagctgctgaagctggtccgcgtcggcggcactatcatctacgacaacacgctctggggcggcacggtggcgctgccggcgggcacccccatgtccgacctcgacacccgcttctccgccgccctcagggacctcaacgccaagctcgccgccgacccgcgcatcgaggtctgccagctcgccatcgccgacggagtcaccatctgccgccgcatcgtctaggcgggcgggcgtccggcccggcccggcgtgatcgtgatccgccgcgcgcctgccggcctgcgtgcgtgcgtggagtccatttccttaccagccgcttatcttaatcaattgtattattatttttccctgccagcgctggctagcgccgtgaagcatctgatggtttcaaattttcaataatatttttggcttttc

SEQ ID NO: 28609 - protein, 307 aa, Triticum aestivum
IHSIEPTHSSYYLGTTSPNRTSEQSHGAQRRQHRGQRPQRHRQHQQDAAQERRPLHLHPRHHRVPPRARVHARPAPHHRQAPMGLHAVVLGRGAAAGDADQDGGRQEDDRGGRVHGLLAAGHRAGAPGGRQGGGHRHRPRVLRGGSPLHREGRHGAQGGLPRGHRPGAPGRAPRRGRRRGELRLRVRGRGQAQLRALPRAAAEAGPRRRHYHLRQHALGRHGGAAGGHPHVRPRHPLLRRPQGPQRQARRRPAHRGLPARHRRRSHHLPPHRLGGRASGPARRDRDPPRACRPACVRGVHFLTSRLS

SEQ ID NO: 28610 - protein, 273 aa, Triticum aestivum
TYTRSNQPIPPTTSAQPAQTELASRAMAPNGDNTVANVHSGIDSTNKTLLKSDALYTYILDTTVFPREHECMRDLRLITDKHPWGYMQSSSDEAQLLGMLIKMAGAKKTIEVGVFTGYSLLATALALPEDGKVVAIDTDRECYEVGRPFIEKAGMAHKVDFREGTGLARLDELLVEDDGAASYDFAFVDADKPNYVRYHEQLLKLVRVGGTIIYDNTLWGGTVALPAGTPMSDLDTRFSAALRDLNAKLAADPRIEVCQLAIADGVTICRRIV

SEQ ID NO: 28611 - protein, 247 aa, Triticum aestivum
MAPNGDNTVANVHSGIDSTNKTLLKSDALYTYILDTTVFPREHECMRDLRLITDKHPWGYMQSSSDEAQLLGMLIKMAGAKKTIEVGVFTGYSLLATALALPEDGKVVAIDTDRECYEVGRPFIEKAGMAHKVDFREGTGLARLDELLVEDDGAASYDFAFVDADKPNYVRYHEQLLKLVRVGGTIIYDNTLWGGTVALPAGTPMSDLDTRFSAALRDLNAKLAADPRIEVCQLAIADGVTICRRIV

SEQ ID NO: 28612 - DNA, 1784 bp, Triticum aestivum
ctttttcccacgcccccaccaacccaatcctcgcgtcgcgtcccctaaaccctaacccgccgcgaggggaaagcgccggaagccatggcgacggcggcgccggggcagctcaacctcgacgactacccgtcgtggggctcccgcggcgtcgactgcttcgagaagctcgagcagatcggggagggcacatacgggcaagtgttcatggccaaggagacggagaccaaggagatcgtcgcgctcaagaagatccgcatggacaacgagcgcgagggcttccctatcacggccatccgcgagatcaaaatcctcaagaagctgcaccaccagaacgtcatccagctcaaggagatcgtcacatccccagggccggacagagacgagcaggggaagcaaatcgatggcaacaagtacaaagggagcatttacatggtctttgagtacatggaccatgacttgactgggttggctgataagcctgggatgcgcttcaccattccacagattaagtgctacatgaagcaactcctcacgggccttcactattgccatatcaatcaagttctgcatcgtgatattaaaggatctaacctcttgatagacaacgagggtaacttaaaactggctgattttggcctagcaagatcattttcgagtgatcataacgcaaacctcactaaccgtgtgatcactctgtggtacagacctccagagttgctgctaggaagcacaaaatatgggccagcggtggacatgtggtcggtgggttgtatttttgcagagcttctcaatggaaagccaatactgcctggaaagaatgagccagaccaactgaccaaaatatttgagctttgtggtacccctgacgaattgatttggccgggtgtgacaaaaatgccgtggtataataatttgaagcctccccgccaattgaagaggcatgttaaggatgcttttaaacattttgattttcatgctctggatctgctggagaggatgttaacactggacccgtcaaagaggatatctgcaaatgaagctcttgattctgaatatttctggactgatcccctaccatgtgatcctaaaagcttgccaaagtatgaggcttcacatgaatatcagaccaagaaaagacgtcaacagcagcggcaagctgatgatgctgctgcaaagcggcaaaagacgcatcattctcagcctcctcatgcccgtttgcccccaatccagcaatcaggccatcaaataaggccagcccagcctaccaacaacccgcatccaccaatggcatctgggtcaaatcatcactatggaaagccccgagggccaggagggccaaacaggtacccaccgggcgggaaccaaggtggtggagggtatccgaaccgtggagggcaaggtggcggctatggcagtggcccttacccccctcaacaaggtcgagggcctcctccgtaccctggcggtggcccaaggggtggtggcagcagcggtggctatggtggtgctccaaactttccacaagccggtccttatggtcctggcggcccaggccgggggccaaattatcccccacaagctggctctcgaaaccagcagcagcagtatggaaactggcaatagtatgtagcatctcaacaataccatgtcatgtagatttctttttctttttcgagaaggccatggcatgtaggaattgcccatgataagtggaaacctatgcactgatactttaatttaactgatgtgcctttttgctgggcttgatataattaatgtcattt

SEQ ID NO: 28613 - protein, 512 aa, Triticum aestivum
MATAAPGQLNLDDYPSWGSRGVDCFEKLEQIGEGTYGQVFMAKETETKEIVALKKIRMDNEREGFPITAIREIKILKKLHHQNVIQLKEIVTSPGPDRDEQGKQIDGNKYKGSIYMVFEYMDHDLTGLADKPGMRFTIPQIKCYMKQLLTGLHYCHINQVLHRDIKGSNLLIDNEGNLKLADFGLARSFSSDHNANLTNRVITLWYRPPELLLGSTKYGPAVDMWSVGCIFAELLNGKPILPGKNEPDQLTKIFELCGTPDELIWPGVTKMPWYNNLKPPRQLKRHVKDAFKHFDFHALDLLERMLTLDPSKRISANEALDSEYFWTDPLPCDPKSLPKYEASHEYQTKKRRQQQRQADDAAAKRQKTHHSQPPHARLPPIQQSGHQIRPAQPTNNPHPPMASGSNHHYGKPRGPGGPNRYPPGGNQGGGGYPNRGGQGGGYGSGPYPPQQGRGPPPYPGGGPRGGGSSGGYGGAPNFPQAGPYGPGGPGRGPNYPPQAGSRNQQQQYGNWQ

SEQ ID NO: 28614 - protein, 472 aa, Triticum aestivum
MAKETETKEIVALKKIRMDNEREGFPITAIREIKILKKLHHQNVIQLKEIVTSPGPDRDEQGKQIDGNKYKGSIYMVFEYMDHDLTGLADKPGMRFTIPQIKCYMKQLLTGLHYCHINQVLHRDIKGSNLLIDNEGNLKLADFGLARSFSSDHNANLTNRVITLWYRPPELLLGSTKYGPAVDMWSVGCIFAELLNGKPILPGKNEPDQLTKIFELCGTPDELIWPGVTKMPWYNNLKPPRQLKRHVKDAFKHFDFHALDLLERMLTLDPSKRISANEALDSEYFWTDPLPCDPKSLPKYEASHEYQTKKRRQQQRQADDAAAKRQKTHHSQPPHARLPPIQQSGHQIRPAQPTNNPHPPMASGSNHHYGKPRGPGGPNRYPPGGNQGGGGYPNRGGQGGGYGSGPYPPQQGRGPPPYPGGGPRGGGSSGGYGGAPNFPQAGPYGPGGPGRGPNYPPQAGSRNQQQQYGNWQ

SEQ ID NO: 28615 - protein, 455 aa, Triticum aestivum
MDNEREGFPITAIREIKILKKLHHQNVIQLKEIVTSPGPDRDEQGKQIDGNKYKGSIYMVFEYMDHDLTGLADKPGMRFTIPQIKCYMKQLLTGLHYCHINQVLHRDIKGSNLLIDNEGNLKLADFGLARSFSSDHNANLTNRVITLWYRPPELLLGSTKYGPAVDMWSVGCIFAELLNGKPILPGKNEPDQLTKIFELCGTPDELIWPGVTKMPWYNNLKPPRQLKRHVKDAFKHFDFHALDLLERMLTLDPSKRISANEALDSEYFWTDPLPCDPKSLPKYEASHEYQTKKRRQQQRQADDAAAKRQKTHHSQPPHARLPPIQQSGHQIRPAQPTNNPHPPMASGSNHHYGKPRGPGGPNRYPPGGNQGGGGYPNRGGQGGGYGSGPYPPQQGRGPPPYPGGGPRGGGSSGGYGGAPNFPQAGPYGPGGPGRGPNYPPQAGSRNQQQQYGNWQ

SEQ ID NO: 28616 - DNA, 971 bp, Triticum aestivum
cccaacaaacctctttcccctccccgcatcccaagcctcccagctccatcgccacacgctcgaacccactcctctcacgctcaagcgcacaccgcaccaaccagagcagccatggctctcaccggcggcgccaccaccgcagcgtgcatcctcgtcctcctcgcgctcgccgacgccgcgggggcggctacccgggcgccagcgccggcgccggcgccggactgcatggaggcgttgattagcctcgcagactgcctcgactatgtgacgcccagcaccaagtcggctcggccttccaaggcttgctgcacggaggtgaagaccgccgtcggcacccccgccaccgtgaagtgcctctgcgctgccatggacgccaagacaactccgataccgatcaacatgacacgggtgctcgctctccccaccgcctgcggccaatccgcctccgtcttgaacaagtgccacgctgcacatgggccgggtggtgctcctgctgaagcaccgtcaccttcagcatccagtggcggcgcgaccgcttcaccaccgaaggcgaatgtggcggcgaggtctccgggcggctccgccaccgttctcttggcaactgtggtgacttcgctgctcgccttctattacctctgagggccaacatctcagcctctctcacgtgttatgttgcacagaccttgtgactctgcgttgcgcggtgttgtaatctgagtttactttgtttatcgggatgggttattatcatgtagtgtcgtggactgaatattgagtgcgtagtaaattgcaatgtaccgtggactgggtattttgaagtcgttgccagttatgacactttatttacttttgaatgcgcaaaaaaaaaaaaaaaaaaaaaaaaaaaaaaaaaaaaaaaaaaaaaaaaaaaaaaaaccaaaaaaaaaaaaaaaaaggtttttcgatcccgccaaccccgaggggggccccgg

SEQ ID NO: 28617 - protein, 212 aa, Triticum aestivum
PNKPLSPPRIPSLPAPSPHARTHSSHAQAHTAPTRAAMALTGGATTAACILVLLALADAAGAATRAPAPAPAPDCMEALISLADCLDYVTPSTKSARPSKACCTEVKTAVGTPATVKCLCAAMDAKTTPIPINMTRVLALPTACGQSASVLNKCHAAHGPGGAPAEAPSPSASSGGATASPPKANVAARSPGGSATVLLATVVTSLLAFYYL

SEQ ID NO: 28618 - protein, 175 aa, Triticum aestivum
MALTGGATTAACILVLLALADAAGAATRAPAPAPAPDCMEALISLADCLDYVTPSTKSARPSKACCTEVKTAVGTPATVKCLCAAMDAKTTPIPINMTRVLALPTACGQSASVLNKCHAAHGPGGAPAEAPSPSASSGGATASPPKANVAARSPGGSATVLLATVVTSLLAFYYL

SEQ ID NO: 28619 - protein, 137 aa, Triticum aestivum
MEALISLADCLDYVTPSTKSARPSKACCTEVKTAVGTPATVKCLCAAMDAKTTPIPINMTRVLALPTACGQSASVLNKCHAAHGPGGAPAEAPSPSASSGGATASPPKANVAARSPGGSATVLLATVVTSLLAFYYL

SEQ ID NO: 28620 - DNA, 1065 bp, Triticum aestivum
ccccaaaccaagcagagcctacttgtctccctccgcgaatctctccctcccacgctgatctcaatctgcccgtccctccacgggcccgcgccgcctccctccctccatccccgccgcatcgccggcggcctcagcttcgcacgctccgatggtgccgagattggtctcttgctagtgctggcggctcaacctgcagaccgcggcaccgccatggaggctccgctgacggtgcagattgtcgagttcaacaccaaggtgatgcaagaggagctgaagaagctggggctcaaggtcaaccaccatgaggccaacatcacgttcctcaagtctgagatctatgctatcgaagagtcgattgctgacctgacaattaaacgtggaaagaaggttgtagcttcaagtaatggtacatcagttcaagaagctgaacagcgtacaattgaaagcatatgtaatcaggacaagacagcagcttcgcttatatgccagctcaagaaacgtcattccacacaaatatcaacaatgccaatgatgaaagatatccttggtgttgtggctaccttaggaaaaacaaatgatgataatctaagcagcctactctcagagtacttgggaatagacaatatgcttggtctcgtttgcaagacttatgatggcataaagagtcttgaaacatatggcacagaaggcaacattgataagaaaagtggtattcatggactgggtggctcaattggaaagattctgcatgggaggtttaccgtgttttgtcttgaaaacataaggccattttctggagaagttgtgattgatgatccacaaagatatcttatgctgcgtaaaccaaggttgcctaacggggagtctcctcctggttttcttggtttcgcagtaaatatgatacttatggaccaggcatacttgagttgtctcacaccccatggccatggtcttagggagactttgttttacagtttgttttctcatttacaagtttataagactacagctgatctacggcgtgctattcccttcataaatgatggtgcggtttctctagatggt

SEQ ID NO: 28621 - protein, 355 aa, Triticum aestivum
PQTKQSLLVSLRESLPPTLISICPSLHGPAPPPSLHPRRIAGGLSFARSDGAEIGLLLVLAAQPADRGTAMEAPLTVQIVEFNTKVMQEELKKLGLKVNHHEANITFLKSEIYAIEESIADLTIKRGKKVVASSNGTSVQEAEQRTIESICNQDKTAASLICQLKKRHSTQISTMPMMKDILGVVATLGKTNDDNLSSLLSEYLGIDNMLGLVCKTYDGIKSLETYGTEGNIDKKSGIHGLGGSIGKILHGRFTVFCLENIRPFSGEVVIDDPQRYLMLRKPRLPNGESPPGFLGFAVNMILMDQAYLSCLTPHGHGLRETLFYSLFSHLQVYKTTADLRRAIPFINDGAVSLDG

SEQ ID NO: 28622 - protein, 285 aa, Triticum aestivum
MEAPLTVQIVEFNTKVMQEELKKLGLKVNHHEANITFLKSEIYAIEESIADLTIKRGKKVVASSNGTSVQEAEQRTIESICNQDKTAASLICQLKKRHSTQISTMPMMKDILGVVATLGKTNDDNLSSLLSEYLGIDNMLGLVCKTYDGIKSLETYGTEGNIDKKSGIHGLGGSIGKILHGRFTVFCLENIRPFSGEVVIDDPQRYLMLRKPRLPNGESPPGFLGFAVNMILMDQAYLSCLTPHGHGLRETLFYSLFSHLQVYKTTADLRRAIPFINDGAVSLDG

SEQ ID NO: 28623 - protein, 269 aa, Triticum aestivum
MQEELKKLGLKVNHHEANITFLKSEIYAIEESIADLTIKRGKKVVASSNGTSVQEAEQRTIESICNQDKTAASLICQLKKRHSTQISTMPMMKDILGVVATLGKTNDDNLSSLLSEYLGIDNMLGLVCKTYDGIKSLETYGTEGNIDKKSGIHGLGGSIGKILHGRFTVFCLENIRPFSGEVVIDDPQRYLMLRKPRLPNGESPPGFLGFAVNMILMDQAYLSCLTPHGHGLRETLFYSLFSHLQVYKTTADLRRAIPFINDGAVSLDG

SEQ ID NO: 28624 - DNA, 633 bp, Triticum aestivum
actcagtttaccagatcaacaccaacagaaatcacttcccagcaaccaagacttcccattcgatccgatcacaagaaaatattataccctcaagcttttcgaccggcgtattttagtagttcaacagccaacaccatgagctctcggatggccggagccacgctgctgcgccacctgggcccccgcctcttcgccgccgccgagccggcgtccaggctcgccgcgagcgcgaggggcatcatgccggccgccgcgagggtcttccccgcgcggatggccagcaccgaggccgccggcccgcgtgccaagcacgaagaagccactgaaaagccccagggcgcaacagcgccggagcagaacaagaaggccgtgccgagctactggggtatcgagccgcggaagctcgtcaaggacgacggcacggagtggccgtggttctccttcaggccgtgggacacgtacaggccggacacgtccatcgacgtggccaagcaccacgagcccagggcggtggcggacaaggtggcgtacctcatcgtgcggacgctgcgcaagggcagcgacctcttcttccagcgccggcacgccagccacgcgctgctgctggagacggtggcggccgtgccgcccatg

SEQ ID NO: 28625 - protein, 211 aa, Triticum aestivum
TQFTRSTPTEITSQQPRLPIRSDHKKILYPQAFRPAYFSSSTANTMSSRMAGATLLRHLGPRLFAAAEPASRLAASARGIMPAAARVFPARMASTEAAGPRAKHEEATEKPQGATAPEQNKKAVPSYWGIEPRKLVKDDGTEWPWFSFRPWDTYRPDTSIDVAKHHEPRAVADKVAYLIVRTLRKGSDLFFQRRHASHALLLETVAAVPPM

SEQ ID NO: 28626 - protein, 166 aa, Triticum aestivum
MSSRMAGATLLRHLGPRLFAAAEPASRLAASARGIMPAAARVFPARMASTEAAGPRAKHEEATEKPQGATAPEQNKKAVPSYWGIEPRKLVKDDGTEWPWFSFRPWDTYRPDTSIDVAKHHEPRAVADKVAYLIVRTLRKGSDLFFQRRHASHALLLETVAAVPPM

SEQ ID NO: 28627 - protein, 162 aa, Triticum aestivum
MAGATLLRHLGPRLFAAAEPASRLAASARGIMPAAARVFPARMASTEAAGPRAKHEEATEKPQGATAPEQNKKAVPSYWGIEPRKLVKDDGTEWPWFSFRPWDTYRPDTSIDVAKHHEPRAVADKVAYLIVRTLRKGSDLFFQRRHASHALLLETVAAVPPM

SEQ ID NO: 28628 - DNA, 712 bp, Triticum aestivum
acctccgcctccggcccccaacctcgcctctctccatctgctccggtcctctcctccccttggcccctctcgcccccagatctccaagccgagaatcttccagaagccgtcgaggccctacacccgcagccatgtcagcgagcagcacgccggtggacgcctcgggcgagccgatcccaacgtcgtcggtgctgatggcggcgtccaagcacatcgccgtgcggtgccggccggagaacgtggccttcctcaactgcaagaagaaggaccccaacccggagaagtgcctcgagaagggccgccaggttacgcgctgcgtcttcaacctgttgaaagaacttcaccaaaagtgccccaaggagatggatgcgtatgctgggtgcatgtattactacacgaatgaatttgacttctgccgtaaggagcaggaagctttcgagggtgcgtgccctatttccgagtagcccgccctctgagagcgagttttacccccagtgatctcttgagaaataaggagaaaagccggcaaaccctccaagttgatgatctccctcccatgtttatttgtatgggtgaatagcgcgtcattgagctgctcatcccattcgctcgtctttcttcagcaattacatctctgttttgactttcgagttggatgccaaacttgactcaactgtagccctaagttgttgttgatgatgatgattcttcc

SEQ ID NO: 28629 - protein, 153 aa, Triticum aestivum
LRLRPPTSPLSICSGPLLPLAPLAPRSPSRESSRSRRGPTPAAMSASSTPVDASGEPIPTSSVLMAASKHIAVRCRPENVAFLNCKKKDPNPEKCLEKGRQVTRCVFNLLKELHQKCPKEMDAYAGCMYYYTNEFDFCRKEQEAFEGACPISE

SEQ ID NO: 28630 - protein, 133 aa, Triticum aestivum
PPPPAPNLASLHLLRSSPPLGPSRPQISKPRIFQKPSRPYTRSHVSEQHAGGRLGRADPNVVGADGGVQAHRRAVPAGERGLPQLQEEGPQPGEVPREGPPGYALRLQPVERTSPKVPQGDGCVCWVHVLLHE

SEQ ID NO: 28631 - protein, 110 aa, Triticum aestivum
MSASSTPVDASGEPIPTSSVLMAASKHIAVRCRPENVAFLNCKKKDPNPEKCLEKGRQVTRCVFNLLKELHQKCPKEMDAYAGCMYYYTNEFDFCRKEQEAFEGACPISE

SEQ ID NO: 28632 - DNA, 1054 bp, Triticum aestivum
cacatcctaaaaaaaacactcacactcactcactcacacttcgccttctttccccatccccaggcggcggcggccccctcgttcccactctcactctcacagcatccgggctccagagcggggagacgctagagcgaacgggagatgggggagacgaggagctggagctctctgctggtgcacattctggtgatcgccctctgcctcaccgccttcggcttcgccatcgccgcagagcgccgccgcagcacgggttcgatagtcacagacatcaacaactccacatattgcacttatgactccgatatttctaccggctatggtgtcggcgccttcctgtttctcctctcgggccaatcactccttatgggagttacaaagtgcatgtgctttggccaaccgctcgcacctggtggaagcagagcctggtccattatctactttgtttcttcatggatcacattcataatcgccgagtcctgcctgatcgccggggcgacaaagaacgcgtaccacaccaagtacaggcacatgatatacgcagggagctggacctgcgactcgctccggaaaggggtgttcatctcgggggcggtctttgtggtgctcaccatgaccctgaacgtgtacttctacatgtactacacgaaatcgacgcgccaggccgccaaaaagaccaacaaggccaccgccaatgtcggcatggctggctacgcatgacgagggagaagggactctggtttgatggaacttgcttgtgtgctggatttagttagatattctggagcagaacgtagtagtttctggaaaatgtagcgtgtggtatggctctctatgatcagatcagatgtgtttgttcaggcctagttctcgtcttgcctgatctacagaatatttgatgtctaagacagcggcattgtgatgctcctagatccaagttgtgagcgtgagcatgatcatatgagaggggtgaaccggatggtccactgccaacaggctaagatttattttttaaaaaaaaaaaaaaaaaaaaaaaaaaaaaaaaaaaagaaaa

SEQ ID NO: 28633 - protein, 191 aa, Triticum aestivum
MGETRSWSSLLVHILVIALCLTAFGFAIAAERRRSTGSIVTDINNSTYCTYDSDISTGYGVGAFLFLLSGQSLLMGVTKCMCFGQPLAPGGSRAWSIIYFVSSWITFIIAESCLIAGATKNAYHTKYRHMIYAGSWTCDSLRKGVFISGAVFVVLTMTLNVYFYMYYTKSTRQAAKKTNKATANVGMAGYA

SEQ ID NO: 28634 - protein, 117 aa, Triticum aestivum
MGVTKCMCFGQPLAPGGSRAWSIIYFVSSWITFIIAESCLIAGATKNAYHTKYRHMIYAGSWTCDSLRKGVFISGAVFVVLTMTLNVYFYMYYTKSTRQAAKKTNKATANVGMAGYA

SEQ ID NO: 28635 - protein, 111 aa, Triticum aestivum
MCFGQPLAPGGSRAWSIIYFVSSWITFIIAESCLIAGATKNAYHTKYRHMIYAGSWTCDSLRKGVFISGAVFVVLTMTLNVYFYMYYTKSTRQAAKKTNKATANVGMAGYA

SEQ ID NO: 28636 - DNA, 543 bp, Triticum aestivum
  misc_feature (464)..(464): n is a, c, g, or t
  misc_feature (507)..(507): n is a, c, g, or t
acctcgctcgatccgcctgcacaaccgacgctgccccgatccccaagaatccgatccagggatccacgcccatggccgccgtcaccaagaagaagaaggtcatcatcgacaccgacccagggatcgatgacgccatggccatcttcgtcgcgctgaggtcgccggagctggaggtggtgggcctcaccaccatcttcggcaacgtctacaccgccctcgccacccacaacgcgctgcacctcctggagaccgctgggaggaccgacatccccgtcgcagaggggtcccatgtaacaatcaagaaagccaccaagctgcggattgccagcttcgtccatggttcggatggcctcggcaaccagaacttccctccgccggccggcaaggcggtggagcagtccgccgccgccttccttgttgagcaggcgaatctctaccccggacaggtcaccgtcgttgccctnggccccctcaccaaccttgcgctggctgtcgagcttgcccttnttttcccaagaagattgggcagattattattctggg

SEQ ID NO: 28637 - protein, 180 aa, Triticum aestivum
  misc_feature (154)..(154): Xaa can be any naturally occurring amino acid
  misc_feature (169)..(169): Xaa can be any naturally occurring amino acid
LARSACTTDAAPIPKNPIQGSTPMAAVTKKKKVIIDTDPGIDDAMAIFVALRSPELEVVGLTTIFGNVYTALATHNALHLLETAGRTDIPVAEGSHVTIKKATKLRIASFVHGSDGLGNQNFPPPAGKAVEQSAAAFLVEQANLYPGQVTVVAXGPLTNLALAVELALXFPRRLGRLLFW

SEQ ID NO: 28638 - protein, 157 aa, Triticum aestivum
  misc_feature (131)..(131): Xaa can be any naturally occurring amino acid
  misc_feature (146)..(146): Xaa can be any naturally occurring amino acid
MAAVTKKKKVIIDTDPGIDDAMAIFVALRSPELEVVGLTTIFGNVYTALATHNALHLLETAGRTDIPVAEGSHVTIKKATKLRIASFVHGSDGLGNQNFPPPAGKAVEQSAAAFLVEQANLYPGQVTVVAXGPLTNLALAVELALXFPRRLGRLLFW

SEQ ID NO: 28639 - protein, 136 aa, Triticum aestivum
  misc_feature (110)..(110): Xaa can be any naturally occurring amino acid
  misc_feature (125)..(125): Xaa can be any naturally occurring amino acid
MAIFVALRSPELEVVGLTTIFGNVYTALATHNALHLLETAGRTDIPVAEGSHVTIKKATKLRIASFVHGSDGLGNQNFPPPAGKAVEQSAAAFLVEQANLYPGQVTVVAXGPLTNLALAVELALXFPRRLGRLLFW

SEQ ID NO: 28640 - DNA, 1532 bp, Triticum aestivum
aaagaaaggcttggcgaagaggttaacgaatcgatcttctccgagttttttgtcctcgaggaatttagcaccgctcgggattctcaggccatgatgatcggtgtcgcaggcttcagccggcacatcggccagctcttgagtaaaagcaacgggtttattgcggcgtccctgtccgcggcgagctgcgcggacgaggcggagaaggccgagggggcggggtgccgggacgacgcggcggcgctgaggctcaaatggattgccatggcggcgatactggtgtccggcgtgatgggcgtgggcctgtcgctcgtggggcggaagcggcggacggtgcagaccggcagcgctgtcttcgtggccgccaaggctttcgcggccggcgtgatcctggccacggggttcgttcacatgctgcacgacgccgagcacgcgctctccaacccctgcctcccggccgcgccctggcggcggttcccgttccccgggttcgtcgccatgctcgctgctcttgccacgctggtgctcgacgtcctggtcaccaggttctacgagaccaagcaccgtgcggaggtagctcgggtcaaggctgacgccgctgccgcactcgccgccgcgtccacctccgccagcgacgaagacatcaccgtggtcaccgtcgtcgagggtgagcacaaggtcccgctcttgcaagcccactcccattcccacgcgcagtcgcatggtcacgagctggtgcaaccacaaggacgcgagggggaggtgtcagaccacgtgcgctccgtcgtggtatcacagatactggaaatggggattgtgtcgcactcggtgatcattgggctgtcgcttggtgtgtctcggagcccctgcacaatcaggccactggtggcagcgctctcattccaccagttcttcgagggatttgccctcggtgggtgcattgcgcaggctcagtttaagaacctttcggcagttatgatggcgtccttttttgccattacaacaccaactggtatcgccgctggggccggtttgtcctcattttacaacgccaatagccccagggctctagtggtcgaaggcatcctcgactctgtgtcggccggcatactcatatacatggcgctggtggatctaatcgcagccgatttcttgggtgggaagatgacagggtcgccacggcagcaagtgatggcctatgtcgccctgttcctaggtgcgctctccatgtcatcgcttgcagtttgggcctgaaccggtttaatgagatgaaggtagcggatgacgcctacgtcccaacatactgcctgtgatacatgtacataactaatgcatgtgcctgtgttcatatgattgcatacatacatcagataacgtgcccttgtttttgatgggcatgagagaacagcgccggtggaaacgcctgagcattgcctctgtatatactagatgaatccccgtgcgttgctgcgggatattttgtgctaaaatttctaatgtggagagatacgccatgtaaagaaaaatagtgactt

SEQ ID NO: 28641 - protein, 416 aa, Triticum aestivum
KERLGEEVNESIFSEFFVLEEFSTARDSQAMMIGVAGFSRHIGQLLSKSNGFIAASLSAASCADEAEKAEGAGCRDDAAALRLKWIAMAAILVSGVMGVGLSLVGRKRRTVQTGSAVFVAAKAFAAGVILATGFVHMLHDAEHALSNPCLPAAPWRRFPFPGFVAMLAALATLVLDVLVTRFYETKHRAEVARVKADAAAALAAASTSASDEDITVVTVVEGEHKVPLLQAHSHSHAQSHGHELVQPQGREGEVSDHVRSVVVSQILEMGIVSHSVIIGLSLGVSRSPCTIRPLVAALSFHQFFEGFALGGCIAQAQFKNLSAVMMASFFAITTPTGIAAGAGLSSFYNANSPRALVVEGILDSVSAGILIYMALVDLIAADFLGGKMTGSPRQQVMAYVALFLGALSMSSLAVWA

SEQ ID NO: 28642 - protein, 386 aa, Triticum aestivum
MMIGVAGFSRHIGQLLSKSNGFIAASLSAASCADEAEKAEGAGCRDDAAALRLKWIAMAAILVSGVMGVGLSLVGRKRRTVQTGSAVFVAAKAFAAGVILATGFVHMLHDAEHALSNPCLPAAPWRRFPFPGFVAMLAALATLVLDVLVTRFYETKHRAEVARVKADAAAALAAASTSASDEDITVVTVVEGEHKVPLLQAHSHSHAQSHGHELVQPQGREGEVSDHVRSVVVSQILEMGIVSHSVIIGLSLGVSRSPCTIRPLVAALSFHQFFEGFALGGCIAQAQFKNLSAVMMASFFAITTPTGIAAGAGLSSFYNANSPRALVVEGILDSVSAGILIYMALVDLIAADFLGGKMTGSPRQQVMAYVALFLGALSMSSLAVWA

SEQ ID NO: 28643 - protein, 385 aa, Triticum aestivum
MIGVAGFSRHIGQLLSKSNGFIAASLSAASCADEAEKAEGAGCRDDAAALRLKWIAMAAILVSGVMGVGLSLVGRKRRTVQTGSAVFVAAKAFAAGVILATGFVHMLHDAEHALSNPCLPAAPWRRFPFPGFVAMLAALATLVLDVLVTRFYETKHRAEVARVKADAAAALAAASTSASDEDITVVTVVEGEHKVPLLQAHSHSHAQSHGHELVQPQGREGEVSDHVRSVVVSQILEMGIVSHSVIIGLSLGVSRSPCTIRPLVAALSFHQFFEGFALGGCIAQAQFKNLSAVMMASFFAITTPTGIAAGAGLSSFYNANSPRALVVEGILDSVSAGILIYMALVDLIAADFLGGKMTGSPRQQVMAYVALFLGALSMSSLAVWA

SEQ ID NO: 28644 - DNA, 1796 bp, Triticum aestivum
aaactgcaaaattccccaacagacgaccatgaagcttcggctgcgttccatggacgcgcgcggcggcgtcgctgagacgcaccgcgtgcagctgccggacacggccgtgctcgccgatgtgaagtccttcctcgccgccaagctctccgccgcgcagcccgtccccgccgagtccgtccgcctctccctcaaccgctcgcaggagctctgttcaccggacccctcagccaccctcgccgccctcggcctcgcatccggtgacctcctctatttcacgctctccgcagaattattatcgcagccaccgcctcctcaaacacttccccggaaccctagcccggatacagcctccatcgggcaaattgcttccggttcccaatctcctggggaggccggtggatcctcgtcaccgccgcaaaatctacacatacagcctgtctcttcgtcgctgccgcaaaatctacacatagagcctatctcttcgccgaggccgcgagccctccacgtggagcctattttgcccgtggcatctgatccgcccgatgtggtgatggcggaggccgtccacgcacccaagagcttgtcgagccttgtgattgggattctcaagcgggagatggaggcggaggatgctggatgcgcaaatggtacagttatccatcgcctagctgtgtccctgcaggcagctcttgtcgatgctggcttccttgcggagaatccgatggggtctcgccccggattgctgaaggactgggcctcgggtgcagcggcaacactgaccgtaaagtacaccctaccggagcttgtcgccatgctacctgagggtgaagaggggaagacagtggttttgaactgctcattgatgccaaattttgtgatgatatatgggtgtgtgcctggggcatgctcagaagtgcgcagattgtgcttggagttaccaaagctggcgccgctgctatatctggatagcaatgaagtgggtgcaacagaggagaaggagattcttgagctttggagggtgctgaaggatgagctgtgtcttccgctgatgatatctttgtgccaactcaacgggttgcgcttgccgccgtgcttgatggcattgccaggtgatctgaaggctaaagtcttggagtttgttcctggtgttgatcttgcaagggttcagtgcgcatgcaaggaattgcaggatcttgcagcagatgataatctttggaagatgaggcttgaactggagatgagtccttctagcaagggttctggatggagcggagattggaagcaaaggtttgtggcagcttggaaggtggacaacagtaggaggcatcacaagagaccacccagcccaaggttttcgggctatggttgggggatcggtacacgtaacccacttaacttcccagtaattggtggtgattcggaccgtctgccctttataaatcacaatatccttgggcgtagttttggaaatcagcggaggaacatctcgcccaactgcaatttcgagggtcatcgccaagggtttccttgatttaagttttcactagtatctcaagtatgcaatgcataggctgccttgtacatgtttataagttgcatgccagtgctcttatcctcgtgaacttttttgtctgtatcttagatcctatgtcttgtcgttttccggttattccttgctatgacaccaaagtacttctgctctgatctagccaacgccatgatcaattatgtaataaatagtttggacttatggtactgagagcttaactttgctctctatacatgtttcggtatct

SEQ ID NO: 28645 - protein, 509 aa, Triticum aestivum
NCKIPQQTTMKLRLRSMDARGGVAETHRVQLPDTAVLADVKSFLAAKLSAAQPVPAESVRLSLNRSQELCSPDPSATLAALGLASGDLLYFTLSAELLSQPPPPQTLPRNPSPDTASIGQIASGSQSPGEAGGSSSPPQNLHIQPVSSSLPQNLHIEPISSPRPRALHVEPILPVASDPPDVVMAEAVHAPKSLSSLVIGILKREMEAEDAGCANGTVIHRLAVSLQAALVDAGFLAENPMGSRPGLLKDWASGAAATLTVKYTLPELVAMLPEGEEGKTVVLNCSLMPNFVMIYGCVPGACSEVRRLCLELPKLAPLLYLDSNEVGATEEKEILELWRVLKDELCLPLMISLCQLNGLRLPPCLMALPGDLKAKVLEFVPGVDLARVQCACKELQDLAADDNLWKMRLELEMSPSSKGSGWSGDWKQRFVAAWKVDNSRRHHKRPPSPRFSGYGWGIGTRNPLNFPVIGGDSDRLPFINHNILGRSFGNQRRNISPNCNFEGHRQGFP

SEQ ID NO: 28646 - protein, 500 aa, Triticum aestivum
MKLRLRSMDARGGVAETHRVQLPDTAVLADVKSFLAAKLSAAQPVPAESVRLSLNRSQELCSPDPSATLAALGLASGDLLYFTLSAELLSQPPPPQTLPRNPSPDTASIGQIASGSQSPGEAGGSSSPPQNLHIQPVSSSLPQNLHIEPISSPRPRALHVEPILPVASDPPDVVMAEAVHAPKSLSSLVIGILKREMEAEDAGCANGTVIHRLAVSLQAALVDAGFLAENPMGSRPGLLKDWASGAAATLTVKYTLPELVAMLPEGEEGKTVVLNCSLMPNFVMIYGCVPGACSEVRRLCLELPKLAPLLYLDSNEVGATEEKEILELWRVLKDELCLPLMISLCQLNGLRLPPCLMALPGDLKAKVLEFVPGVDLARVQCACKELQDLAADDNLWKMRLELEMSPSSKGSGWSGDWKQRFVAAWKVDNSRRHHKRPPSPRFSGYGWGIGTRNPLNFPVIGGDSDRLPFINHNILGRSFGNQRRNISPNCNFEGHRQGFP

SEQ ID NO: 28647 - protein, 493 aa, Triticum aestivum
MDARGGVAETHRVQLPDTAVLADVKSFLAAKLSAAQPVPAESVRLSLNRSQELCSPDPSATLAALGLASGDLLYFTLSAELLSQPPPPQTLPRNPSPDTASIGQIASGSQSPGEAGGSSSPPQNLHIQPVSSSLPQNLHIEPISSPRPRALHVEPILPVASDPPDVVMAEAVHAPKSLSSLVIGILKREMEAEDAGCANGTVIHRLAVSLQAALVDAGFLAENPMGSRPGLLKDWASGAAATLTVKYTLPELVAMLPEGEEGKTVVLNCSLMPNFVMIYGCVPGACSEVRRLCLELPKLAPLLYLDSNEVGATEEKEILELWRVLKDELCLPLMISLCQLNGLRLPPCLMALPGDLKAKVLEFVPGVDLARVQCACKELQDLAADDNLWKMRLELEMSPSSKGSGWSGDWKQRFVAAWKVDNSRRHHKRPPSPRFSGYGWGIGTRNPLNFPVIGGDSDRLPFINHNILGRSFGNQRRNISPNCNFEGHRQGFP

SEQ ID NO: 28648 - DNA, 1104 bp, Triticum aestivum
attcgaccggacgaagaatattctcctgttctgcaagtgcaggtgtgtatggtatggccagtccgatcagtgcacgcaccagcccacggcatactctgtctgtttctccattatcttcagttcgatcaccacatacttcacagttagcgataagagctgcaaacccactcttcccttgtgccaaactctctcaagctcgtgccgtggtggcagcagcaatggaggtctccaagcacctttcctcttcttgttcagccaaccgccagccttccaaagaggttcttgagacatggcgcagtgctgatgcggtgtgcttcgatgtggatagcactgtatgcttggatgagggtattgatgagcttgctgatttctgtggggctgggcaggcagttgctgagtggacgacgaaggcaatgacagggaccgttccatttgaagaggctcttgctgcccggatttcgttaatcaagccatctctgtcccaagttcagtactgtttggagaagaggccacccaggatttctcctggaatcgctgatttgattaagacgttaatagctaataatactgaagtgttccttgtgtcaggaggtttccgacaaatgatcgagcctgtggcatttgagcttggcattcctactgaaaacatcatagcaaacagactgctatttggtacatccggagagtatgctggatttgataccacagaacccacttctcgaagtgggggtaaagcagtagcagtgcaacaaataagacaggatcgtggttacaagacactggttatgattggagatggagcaactgatcttgaggctcggcaacctggtggagcagacttgttcatctgttacgccggtgtccagatgagagaagcagttgcagccaaagctgactggaccgtctttgaatttcaagagctgatttctgaattgccgcagttaaatacctgacagtgattctgaatcttacagtgttcacaccgtgaaagattgtatgttctcaagcttgtgtttagctgcattactttatttcacatttccatcattcctttgatgagatgctgcttgagttggagctcaaatttaacggttttgtttctgg

SEQ ID NO: 28649 - protein, 316 aa, Triticum aestivum
STGRRIFSCSASAGVYGMASPISARTSPRHTLSVSPLSSVRSPHTSQLAIRAANPLFPCAKLSQARAVVAAAMEVSKHLSSSCSANRQPSKEVLETWRSADAVCFDVDSTVCLDEGIDELADFCGAGQAVAEWTTKAMTGTVPFEEALAARISLIKPSLSQVQYCLEKRPPRISPGIADLIKTLIANNTEVFLVSGGFRQMIEPVAFELGIPTENIIANRLLFGTSGEYAGFDTTEPTSRSGGKAVAVQQIRQDRGYKTLVMIGDGATDLEARQPGGADLFICYAGVQMREAVAAKADWTVFEFQELISELPQLNT

SEQ ID NO: 28650 - protein, 299 aa, Triticum aestivum
MASPISARTSPRHTLSVSPLSSVRSPHTSQLAIRAANPLFPCAKLSQARAVVAAAMEVSKHLSSSCSANRQPSKEVLETWRSADAVCFDVDSTVCLDEGIDELADFCGAGQAVAEWTTKAMTGTVPFEEALAARISLIKPSLSQVQYCLEKRPPRISPGIADLIKTLIANNTEVFLVSGGFRQMIEPVAFELGIPTENIIANRLLFGTSGEYAGFDTTEPTSRSGGKAVAVQQIRQDRGYKTLVMIGDGATDLEARQPGGADLFICYAGVQMREAVAAKADWTVFEFQELISELPQLNT

SEQ ID NO: 28651 - protein, 244 aa, Triticum aestivum
MEVSKHLSSSCSANRQPSKEVLETWRSADAVCFDVDSTVCLDEGIDELADFCGAGQAVAEWTTKAMTGTVPFEEALAARISLIKPSLSQVQYCLEKRPPRISPGIADLIKTLIANNTEVFLVSGGFRQMIEPVAFELGIPTENIIANRLLFGTSGEYAGFDTTEPTSRSGGKAVAVQQIRQDRGYKTLVMIGDGATDLEARQPGGADLFICYAGVQMREAVAAKADWTVFEFQELISELPQLNT

SEQ ID NO: 28652 - DNA, 1192 bp, Triticum aestivum
gtactagtactacgctcagctcggaaactacgacccacccggcagccagagggagggaaggaaagggggagaaggagacaccgcggcgggcggaggcaatggcgacggcgacggcgacggcgacgtgcctgctggcggtctgggcgctggtcgccgccggcctgttcggcacgggcctcgcccgggcgtccgtggccccggccgcggtggggaaggagcagcgcgagttcgactacttcgcgctggcgctgcagtggccaggcaccatctgctcctccacccgccactgctgcgccgtcaacggctgctgccggtcggaggcgctccacaccttcacgatccacgggctgtggccggactacgatgacgggacctggccgtcgtgctgccgccacaccagcttcgacatggacaagttaacgcctctgaagcccactctggacaaatactggccgtccctctactgttcgacctcttccacctgcttcagtggcaggggccccttctgggatcatgagtgggagaagcatggaacatgctcggcccctgttgatcatgaagaattacagtacttctcacaccgcccttgatctctactacaaatataacgttacagaaatgctgacgactggagatatcctggtctccaacggtaaagaatatgcactgagtgatgtcattgataccatcaagcatgcttttgggggctcaccgcagatcatatgcaagaagggctcagttgaagaactaaggttatgcttcaccaaggatttgaagcctcgcgattgccttactacttcggcaatgtacaagaacctatcgaagtcgaagcattgccctaaaaaaatctccctgccaacatatgatcccatcgtactcacaaattcgacactggagattgtcccagaagccagcgacaacgggttgtacttctttacatcctaagataccgagcattgctgggctatgaggaaacagatgccttcacggttctgactgcttgcaagaccgtagccacaggtgctgggcactggagatccggctaaaacgggtttctggtttgtccatactatttgtaaaggacaacattccacgtttgaacaacatggttcgattatgttctgatttgtaaaaccgctggatatcaaactcatgttactcattgcatgtatgaataatggatgttaaatgt

SEQ ID NO: 28653 - protein, 195 aa, Triticum aestivum
TSTTLSSETTTHPAARGREGKGEKETPRRAEAMATATATATCLLAVWALVAAGLFGTGLARASVAPAAVGKEQREFDYFALALQWPGTICSSTRHCCAVNGCCRSEALHTFTIHGLWPDYDDGTWPSCCRHTSFDMDKLTPLKPTLDKYWPSLYCSTSSTCFSGRGPFWDHEWEKHGTCSAPVDHEELQYFSHRP

SEQ ID NO: 28654 - protein, 163 aa, Triticum aestivum
MATATATATCLLAVWALVAAGLFGTGLARASVAPAAVGKEQREFDYFALALQWPGTICSSTRHCCAVNGCCRSEALHTFTIHGLWPDYDDGTWPSCCRHTSFDMDKLTPLKPTLDKYWPSLYCSTSSTCFSGRGPFWDHEWEKHGTCSAPVDHEELQYFSHRP

SEQ ID NO: 28655 - protein, 143 aa, Triticum aestivum
MSGRSMEHARPLLIMKNYSTSHTALDLYYKYNVTEMLTTGDILVSNGKEYALSDVIDTIKHAFGGSPQIICKKGSVEELRLCFTKDLKPRDCLTTSAMYKNLSKSKHCPKKISLPTYDPIVLTNSTLEIVPEASDNGLYFFTS

SEQ ID NO: 28656 - DNA, 700 bp, Triticum aestivum
aatcaacacaaacaagcatcgatcagcttgcagctcagttccttcaccaccacaaaatccacactccactgctatcaaacttcaagcatcacagagttcaggcaggccattcagcggcgtcatctcctccaacgcggcgagaagaacagagttgcagagagatcatggcaggtgcggcgaaggcgtcgtggatggtggcgatgagcgtgggcggcgtggaggcgctcaaagaccaggccgggctctgccgctggaactacgcgctcaggtccatccaccgggcagccaaggccagggccaacgttcgcggtggcgtcttgcagggcgcaaagcagcttccggcttcggcagcggtggcggaaaggcggcgaggggagaaggccgaggaagggctgaggacggtgatgtacctcagctgctggggtcccaattagtactagctacaaagaggtgttttctcctagctccaggctccagcctctgtttagcaacaacttggctggttaattccctgccgattgtaaatacgtactccctctgttccgaattacttgtcttgaatttgtctagatacggatgtatctagacttattttagtgctagatacctccgtatctagacaaatctaagacaagtaatttggaacggagggagtatcacgatgatgatgatgatgaaacctttccccacttcgagttct

SEQ ID NO: 28657 - protein, 194 aa, Triticum aestivum
INTNKHRSACSSVPSPPQNPHSTAIKLQASQSSGRPFSGVISSNAARRTELQRDHGRCGEGVVDGGDERGRRGGAQRPGRALPLELRAQVHPPGSQGQGQRSRWRLAGRKAASGFGSGGGKAARGEGRGRAEDGDVPQLLGSQLVLATKRCFLLAPGSSLCLATTWLVNSLPIVNTYSLCSELLVLNLSRYGCI

SEQ ID NO: 28658 - protein, 143 aa, Triticum aestivum
STQTSIDQLAAQFLHHHKIHTPLLSNFKHHRVQAGHSAASSPPTRREEQSCREIMAGAAKASWMVAMSVGGVEALKDQAGLCRWNYALRSIHRAAKARANVRGGVLQGAKQLPASAAVAERRRGEKAEEGLRTVMYLSCWGPN

SEQ ID NO: 28659 - protein, 89 aa, Triticum aestivum
MAGAAKASWMVAMSVGGVEALKDQAGLCRWNYALRSIHRAAKARANVRGGVLQGAKQLPASAAVAERRRGEKAEEGLRTVMYLSCWGPN

SEQ ID NO: 28660 - DNA, 899 bp, Triticum aestivum
cactcccctgtctgtctccaagtccaagatcacaccgcgctttcttccttccccgtcgccgatccagacgaagcgccgcacgccggttcccttcacccccgcccgccaacgtctccggccaggttggatccatggcggaaaagaaggtcgtgctgaagctggacctgcacgacgacaagcagaagcagagggctctcaaggtcgtctccactctccacggcatcgaccagatcgccgtggacatgaaggaccagaagatgacggtggtgggcaccgtcgaccccgtggacctcgtcggcaggctgcgcagcaagctcttccccacggcgcagatgctctccgtcggcccggccaaggaggagaagaaggacggcggcgccaagaaggacgacggcaagaaggatggcgacaagaaggagccgatcccggtgtacacgccgtggtacccgccgccgccgccgctgtaccacccgcacccgtactaccacaaccacagcgccgaggaggaccccagctcctgcgtcatctgctgatcggcgcgcgccgctcccttgtacattttgtagctggccgtgtgctctgctgcctgccggtcgaccatgcctgctacggtgatcgacggcgtgcaccatacttaaggccgtttaaggattttgcgccagtgatccggctgctgtgcttgtgcatctgcttagtttataaagtgcagatatggaatttattagtgtgtagtgtagaattactactagatagaactgctggagttggattttgagtgaaagttcaccgagtgctctgctctccaatgtgataacagagtagtgaaataattagattaagtgctctgctctctggtgtggaaagaaaatagtgaagcccaataaataaattgaaggtgc

SEQ ID NO: 28661 - protein, 257 aa, Triticum aestivum
TPLSVSKSKITPRFLPSPSPIQTKRRTPVPFTPARQRLRPGWIHGGKEGRAEAGPARRQAEAEGSQGRLHSPRHRPDRRGHEGPEDDGGGHRRPRGPRRQAAQQALPHGADALRRPGQGGEEGRRRQEGRRQEGWRQEGADPGVHAVVPAAAAAVPPAPVLPQPQRRGGPQLLRHLLIGARRSLVHFVAGRVLCCLPVDHACYGDRRRAPYLRPFKDFAPVIRLLCLCICLVYKVQIWNLLVCSVELLLDRTAGVGF

SEQ ID NO: 28662 - protein, 176 aa, Triticum aestivum
LPCLSPSPRSHRAFFLPRRRSRRSAARRFPSPPPANVSGQVGSMAEKKVVLKLDLHDDKQKQRALKVVSTLHGIDQIAVDMKDQKMTVVGTVDPVDLVGRLRSKLFPTAQMLSVGPAKEEKKDGGAKKDDGKKDGDKKEPIPVYTPWYPPPPPLYHPHPYYHNHSAEEDPSSCVIC

SEQ ID NO: 28663 - protein, 133 aa, Triticum aestivum
MAEKKVVLKLDLHDDKQKQRALKVVSTLHGIDQIAVDMKDQKMTVVGTVDPVDLVGRLRSKLFPTAQMLSVGPAKEEKKDGGAKKDDGKKDGDKKEPIPVYTPWYPPPPPLYHPHPYYHNHSAEEDPSSCVIC

SEQ ID NO: 28664 - DNA, 970 bp, Triticum aestivum
acagcagacggaggagagaagagaaagcgaagctcccgtgctcgcgcgacgacgacgacgacgaccccggccgcggcgacgatgagccccctccgcgccctcctcgtcctcgccgccgtcctcgcggcgtgcctcggccccgcggccgcggaccagcccggatccgtcgagggatacaccatcgccggccgcatcaagatcgacgctgcaaggggctttggtcttccagccaagacatcaaacacgaaagtgatacttaatggtggtcagaaagttacattcgccaggccagacggctactttgccttccacaacgtgcctgctgggacacatttgatagaagtctcctcacttggctacttcttttcaccagttcgagtggacatcagtgccaggaatccagggcacattcaagcagcattgactgaaaacagaagagttctaaatgagcttgttttggaacctctgaaagaagagcaatactatgagccgagggagcctttcaacattttgtcccttttgaagagccccatgggtatgatggtcggttttatggtcctaatggtcgtcgttatgcccaagatgatggagaacatagatcccgaggacataaagcaagctcaagagcaaatgaggaactcacctgttccatccttttctggcttgctagccagagcaaacagctagatgtagaacatgtggacaatacgtcgcttaagtttatgatgcgacaaacatccttgccaaactgcttcacactcgagtcatgggaggctgggataaggtggaaactcttttgcccacttttaatgtattctactgtattctaagatgtaataggtttgtaatggagaaccgtttgaaacacctggctgaactagtcatgaaatatttgatttatagctcacgtcgagtacagtgtgtcaacttgttaaccatttgaatattgaatgaatgccttggtgagtcg

SEQ ID NO: 28665 - protein, 228 aa, Triticum aestivum
TADGGEKRKRSSRARATTTTTTPAAATMSPLRALLVLAAVLAACLGPAAADQPGSVEGYTIAGRIKIDAARGFGLPAKTSNTKVILNGGQKVTFARPDGYFAFHNVPAGTHLIEVSSLGYFFSPVRVDISARNPGHIQAALTENRRVLNELVLEPLKEEQYYEPREPFNILSLLKSPMGMMVGFMVLMVVVMPKMMENIDPEDIKQAQEQMRNSPVPSFSGLLARANS

SEQ ID NO: 28666 - protein, 201 aa, Triticum aestivum
MSPLRALLVLAAVLAACLGPAAADQPGSVEGYTIAGRIKIDAARGFGLPAKTSNTKVILNGGQKVTFARPDGYFAFHNVPAGTHLIEVSSLGYFFSPVRVDISARNPGHIQAALTENRRVLNELVLEPLKEEQYYEPREPFNILSLLKSPMGMMVGFMVLMVVVMPKMMENIDPEDIKQAQEQMRNSPVPSFSGLLARANS

SEQ ID NO: 28667 - DNA, 945 bp, Triticum aestivum
gatcaggcgatcaccaccacaccacagctacatccaccgcaacccgacgcactgcccacgacggactgctgtctgtcttggcgtgcaggttccgacggcgcgtggggcatggagaagaaactgccgctggcgctggcgctggcgcagaagcacggcgccggggagcccgcgtgggcgcggccgtggcggtgggccaagacggccttcttcctcgtcgccatgctcgcctcgctgctgctcgtctgcgcgccgcccctcctcgtcgtgctcctcgacctcgccctcccgcccatgctcctctccgcgcacctccgcgccggcgccgaccccccgcaccgctccttcctcccggccgtgctcgaccaggcgcgggcgttcgagttccggtcctccctcgtcgacctgcccgccgtctccgccgcgcgagccctgctcatcctctgcgcgtacacggtgtgcgggggaggaggaggcgcgtacctgtgggtggtggcggcgagcgccgcggcgtccgtgtcgtacgtgctggccaaggcggccgccgtgctgccgcgcggcgccgcgccgcaggggaagggcgccgccgggccggagcccatgctcctgctgtccctgtcgctcgcggccgcgcacctcgccgtcgcgtaccggaccagctgccgcgagcgccgccgcttgctcgtctaccggatcgacgtggaggccgtacggctgaaaggaggccaccagacacccaaggggctcaagcagtgcagcgtctgacatggtgttctcaacttctcatccgtacttgtagtacacagtactagttggagatagtttttcttggtagccaaaattttgttaagttattatgcaaaaattgtgaggtccatcggtgcttttttgtaagtggagatactgtaaatatggaactgtcgtgcttagcttagttcggcctcccgc

SEQ ID NO: 28668 - protein, 268 aa, Triticum aestivum
SGDHHHTTATSTATRRTAHDGLLSVLACRFRRRVGHGEETAAGAGAGAEARRRGARVGAAVAVGQDGLLPRRHARLAAARLRAAPPRRAPRPRPPAHAPLRAPPRRRRPPAPLLPPGRARPGAGVRVPVLPRRPARRLRRASPAHPLRVHGVRGRRRRVPVGGGGERRGVRVVRAGQGGRRAAARRRAAGEGRRRAGAHAPAVPVARGRAPRRRVPDQLPRAPPLARLPDRRGGRTAERRPPDTQGAQAVQRLTWCSQLLIRTCSTQY

SEQ ID NO: 28669 - protein, 253 aa, Triticum aestivum
DQAITTTPQLHPPQPDALPTTDCCLSWRAGSDGAWGMEKKLPLALALAQKHGAGEPAWARPWRWAKTAFFLVAMLASLLLVCAPPLLVVLLDLALPPMLLSAHLRAGADPPHRSFLPAVLDQARAFEFRSSLVDLPAVSAARALLILCAYTVCGGGGGAYLWVVAASAAASVSYVLAKAAAVLPRGAAPQGKGAAGPEPMLLLSLSLAAAHLAVAYRTSCRERRRLLVYRIDVEAVRLKGGHQTPKGLKQCSV

SEQ ID NO: 28670 - protein, 237 aa, Triticum aestivum
IRRSPPHHSYIHRNPTHCPRRTAVCLGVQVPTARGAWRRNCRWRWRWRRSTAPGSPRGRGRGGGPRRPSSSSPCSPRCCSSARRPSSSCSSTSPSRPCSSPRTSAPAPTPRTAPSSRPCSTRRGRSSSGPPSSTCPPSPPREPCSSSARTRCAGEEEARTCGWWRRAPRRPCRTCWPRRPPCCRAAPRRRGRAPPGRSPCSCCPCRSRPRTSPSRTGPAAASAAACSSTGSTWRPYG

SEQ ID NO: 28671 - protein, 217 aa, Triticum aestivum
MEKKLPLALALAQKHGAGEPAWARPWRWAKTAFFLVAMLASLLLVCAPPLLVVLLDLALPPMLLSAHLRAGADPPHRSFLPAVLDQARAFEFRSSLVDLPAVSAARALLILCAYTVCGGGGGAYLWVVAASAAASVSYVLAKAAAVLPRGAAPQGKGAAGPEPMLLLSLSLAAAHLAVAYRTSCRERRRLLVYRIDVEAVRLKGGHQTPKGLKQCSV

SEQ ID NO: 28672 - DNA, 1335 bp, Triticum aestivum
aaaaaccgcaacccccaccccaccccaccccaccccacccaccacagcaacgagggcaagcgtgcgtcaacatcagacgactcgtcccggattgtgattcgcggaggcgtttcccggcgcccagatgagctcacggatggccggatcggtcctcctccgccgcgccggcgccggcgccagccgcctcttcgccaccaccccgtctccggcggccagggccgtcctcggtggaggtgagggcgcgtgggtgcggctgatgtccacctccgcggcctcgcaggtcaaggacgaggcggccaaggcggtcaaggcggaggcggccaaggcggtcaaggcggaggcggccaagggcgacggggagaagaaggaggtggccatcagcagctactgggggatcgagcagtcgaagaagctggtgcgcgaggacggcaccgagtggaagtggtcttgcttcaggccatgggagacgtacaccgcggacacgtcgatcgatctgaccaagcaccacgtgcccaacacgatgctcgacaagatcgcctactacaccgtcaagtccctgcgcttccccaccgacatcttcttccagaggaggtatggctgccgcgcaatgatgctggagactgttgccgcagtgccggggatggtgggcggcatgctcctccacctgcgctcgctccggcgcttcgagcagagcggcggctggatccgcgcgctgctggaggaggccgagaacgagcgcatgcacctcatgaccttcatggaggtggcgcagcccaggtggtacgagcgcgccctcgtcatcgccgtccagggcgtcttcttcaacgcctacttcttcggctacctcatctcgcccaagttcgcgcaccgcgtcgtcgggtacctcgaggaggaggccgtccactcctacacggagttcctcaaggacctcgacgacggcaagatcgacaacgtccccgccccggccatcgccatcgactactggcgcctccctgccaacgccaccctcaaggacgtggtcaccgtggtgcgcgccgacgaggctcaccaccgcgacgtcaaccacttcgcatcggacgtgtactaccagggtatgcagctgaaggccaccccggccccgatcggataccactgaggctggccgtgttctgctgaattttgcatcgctactattactactactaccaagcaaatgagtgtttcgttttgaaggcagaggaaatgagagctctttagctgtataggatgttgcaattgttgctcgtttggtaactattccgtactgagaaataagcagtgtgcttgtcagttacgtatctaggatattgttgaacc

SEQ ID NO: 28673 - protein, 336 aa, Triticum aestivum
MSSRMAGSVLLRRAGAGASRLFATTPSPAARAVLGGGEGAWVRLMSTSAASQVKDEAAKAVKAEAAKAVKAEAAKGDGEKKEVAISSYWGIEQSKKLVREDGTEWKWSCFRPWETYTADTSIDLTKHHVPNTMLDKIAYYTVKSLRFPTDIFFQRRYGCRAMMLETVAAVPGMVGGMLLHLRSLRRFEQSGGWIRALLEEAENERMHLMTFMEVAQPRWYERALVIAVQGVFFNAYFFGYLISPKFAHRVVGYLEEEAVHSYTEFLKDLDDGKIDNVPAPAIAIDYWRLPANATLKDVVTVVRADEAHHRDVNHFASDVYYQGMQLKATPAPIGYH

SEQ ID NO: 28674 - protein, 332 aa, Triticum aestivum
MAGSVLLRRAGAGASRLFATTPSPAARAVLGGGEGAWVRLMSTSAASQVKDEAAKAVKAEAAKAVKAEAAKGDGEKKEVAISSYWGIEQSKKLVREDGTEWKWSCFRPWETYTADTSIDLTKHHVPNTMLDKIAYYTVKSLRFPTDIFFQRRYGCRAMMLETVAAVPGMVGGMLLHLRSLRRFEQSGGWIRALLEEAENERMHLMTFMEVAQPRWYERALVIAVQGVFFNAYFFGYLISPKFAHRVVGYLEEEAVHSYTEFLKDLDDGKIDNVPAPAIAIDYWRLPANATLKDVVTVVRADEAHHRDVNHFASDVYYQGMQLKATPAPIGYH

SEQ ID NO: 28675 - protein, 292 aa, Triticum aestivum
MSTSAASQVKDEAAKAVKAEAAKAVKAEAAKGDGEKKEVAISSYWGIEQSKKLVREDGTEWKWSCFRPWETYTADTSIDLTKHHVPNTMLDKIAYYTVKSLRFPTDIFFQRRYGCRAMMLETVAAVPGMVGGMLLHLRSLRRFEQSGGWIRALLEEAENERMHLMTFMEVAQPRWYERALVIAVQGVFFNAYFFGYLISPKFAHRVVGYLEEEAVHSYTEFLKDLDDGKIDNVPAPAIAIDYWRLPANATLKDVVTVVRADEAHHRDVNHFASDVYYQGMQLKATPAPIGYH

SEQ ID NO: 28676 - DNA, 1250 bp, Triticum aestivum
ctcccccctccacgtctcgctagaaacgcacgcacacgcgtatagtagcagtgtagcaccaacgggcagtcgggcactagctagctccttcgagtccgatcgatcggatcggcatgacgctggatgccctgtgcgcggccggcgacgtcctcgtctacgacaccttcaacgcggcggcggccgtgagtgccgcgccggccgagagcagcctcctcttctgcgacgtcgccggagcggcatggatggcggggtctgctgccgctgaggcgccggctgtgaccatagtgccggtggaagaaggggagaaggcgcaggggaggaggaagcggcggcggcgggcgaggagctgcaagaatcgcgaggacgccgagagccagcggatgacccacattgccgtcgagcgcaaccgccgccgccagatgaacgagtacctcgccgtgctccgctccctcatgccggagtcctacgcccaccggggcgaccaagcatccattgtcggcggcgccatcgatttcgtcaaggagctcgagcagctgctgcagtccctggaggcgcagaagcgcacgctcctcgcccagccgcagcaggagcacaagccgctgcccatccgtgacgcgatgccatcgtcgagcaaaacggtcacggccgcggcgacaactacgacgagcagcggcagcggcgagggcaagcaggcgtcggcgatgcgcgaggggatgggtccgccgttcgcggggttcttcacgtacccacagtacgtgtgtcgcctcccgccgcgggacgacgccgacgaccgcgccggggcggcggacatcgaggtgacgctggtggagacgcacgccaacgtccgggtgatggcgccgcggcggccggggcagctgctcaggatggtcgccgggatggaggcgctcaggctcaccgtgctgcacctcaacgtcaccacgctcggctcgctcgcgctctactccctcagcgtcaaggtggaggaagggtgcgggccgacgacggcggacgacatcgccgcggcggtgcaccatgtgctctgcctcgtcgacgccgaggcgacgtcgcagcggctgctcgccggtgggcagcaggagattttaagttagctaggtggaccggggcaacgccggcaagcttgccgtctgaggcaggggtagtaatttgtaaagtgtagtggacctctacgaggctttggagcatggttaataagagcatgtgcagccggactttgcaaatccgcacgcctg

SEQ ID NO: 28677 - protein, 331 aa, Triticum aestivum
MTLDALCAAGDVLVYDTFNAAAAVSAAPAESSLLFCDVAGAAWMAGSAAAEAPAVTIVPVEEGEKAQGRRKRRRRARSCKNREDAESQRMTHIAVERNRRRQMNEYLAVLRSLMPESYAHRGDQASIVGGAIDFVKELEQLLQSLEAQKRTLLAQPQQEHKPLPIRDAMPSSSKTVTAAATTTTSSGSGEGKQASAMREGMGPPFAGFFTYPQYVCRLPPRDDADDRAGAADIEVTLVETHANVRVMAPRRPGQLLRMVAGMEALRLTVLHLNVTTLGSLALYSLSVKVEEGCGPTTADDIAAAVHHVLCLVDAEATSQRLLAGGQQEILS

SEQ ID NO: 28678 - protein, 288 aa, Triticum aestivum
MAGSAAAEAPAVTIVPVEEGEKAQGRRKRRRRARSCKNREDAESQRMTHIAVERNRRRQMNEYLAVLRSLMPESYAHRGDQASIVGGAIDFVKELEQLLQSLEAQKRTLLAQPQQEHKPLPIRDAMPSSSKTVTAAATTTTSSGSGEGKQASAMREGMGPPFAGFFTYPQYVCRLPPRDDADDRAGAADIEVTLVETHANVRVMAPRRPGQLLRMVAGMEALRLTVLHLNVTTLGSLALYSLSVKVEEGCGPTTADDIAAAVHHVLCLVDAEATSQRLLAGGQQEILS

SEQ ID NO: 28679 - protein, 242 aa, Triticum aestivum
MTHIAVERNRRRQMNEYLAVLRSLMPESYAHRGDQASIVGGAIDFVKELEQLLQSLEAQKRTLLAQPQQEHKPLPIRDAMPSSSKTVTAAATTTTSSGSGEGKQASAMREGMGPPFAGFFTYPQYVCRLPPRDDADDRAGAADIEVTLVETHANVRVMAPRRPGQLLRMVAGMEALRLTVLHLNVTTLGSLALYSLSVKVEEGCGPTTADDIAAAVHHVLCLVDAEATSQRLLAGGQQEILS

SEQ ID NO: 28680 - DNA, 1588 bp, Triticum aestivum
cttacactcactcctcaatccatccgtctccaccattgctcgctagctcgagctcctagctagtactgcaaagtcagccggggagttgatttggtccttcttggcttgaccgatcgtacgtgccgccaggatgccgacgccggcgcacctgagcaaggacccgcgctacttcgacttccgggcggcgcggcgggtgccggagacgcacgcgtggcccgggctgcacgaccaccccgtggtggacggcagcggcgcgggcggagggccggacgcggtgccggtggtggacatgcgcgacccgtgcgcggcggaggcggtggcgctggcggcgcaggactggggcgccttcctcctggagggccacggcgtcccgttggagctgctggcgcgcgtggaggccgcgatcgcgggcatgttcgcgctgccggcgtcggagaagatgcgcgccgtgcggcggcccggcgactcgtgcggctacgggtcgccgcccatctcctccttcttctccaagtgcatgtggtccgagggctacaccttctccccggccaacctccgctccgacctccgcaagctctggcccaaggccggccacgactaccgccacttctgcgccgtgatggaggagttccacagggagatgcgcgcgctggccgacaagctgctggagctgttcctggtggccctcgggctcaccggcgagcaggtcgccgccgtcgagtccgagcagaagatcgccgagaccatgaccgccacaatgcacctcaactggtaccccaagtgcccggacccgaagcgggcgctgggcctgatcgcgcacacggactcgggcttcttcaccttcgtgctgcagagccttgtgcccgggctgcagctgttccggcacggccccgaccggtgggtgacggtgcccgccgtgccgggggccatggtcgtcaacgtcggcgacctcttccagatcctcaccaacggccgcttccacagcgtctaccaccgcgccgtcgtcaaccgcgacagcgaccggatatcgctcggctacttcctcggcccgcccgcccacgtcaaggtggcgccgctcagggaggccctggccggcacgcccgccgcctaccgcgccgtcacgtggcccgagtacatgggcgtgcgcaagaaggccttcaccaccggcgcctccgcgctcaagatggtcgccatctccactgacaacgacgccgccaaccacacggacgacctgatctcgtcgtagatcggcgccggccatcaccggccggccaagggatcgatctacacacacaattagtgaacaaaaaaatgccagagatggtgcatggtgggctggtagcttagctgaggtagctaggaggaagagcgcgcgtgcggctgtcgttcgtgcggctgttcccgcaaaaaaaaaaaggtttcctccatatatgtctccatgcagaactgcagatgctggtggtggatgcgtccatgcagcagggaacgaactaattgtaagaaaatcaagcaaacttagttctacatctgtaattaagtatgcatgccacttggtttaattcaattcaagtgcagaaaaaattatgatggg

SEQ ID NO: 28681 - protein, 370 aa, Triticum aestivum
MPTPAHLSKDPRYFDFRAARRVPETHAWPGLHDHPVVDGSGAGGGPDAVPVVDMRDPCAAEAVALAAQDWGAFLLEGHGVPLELLARVEAAIAGMFALPASEKMRAVRRPGDSCGYGSPPISSFFSKCMWSEGYTFSPANLRSDLRKLWPKAGHDYRHFCAVMEEFHREMRALADKLLELFLVALGLTGEQVAAVESEQKIAETMTATMHLNWYPKCPDPKRALGLIAHTDSGFFTFVLQSLVPGLQLFRHGPDRWVTVPAVPGAMVVNVGDLFQILTNGRFHSVYHRAVVNRDSDRISLGYFLGPPAHVKVAPLREALAGTPAAYRAVTWPEYMGVRKKAFTTGASALKMVAISTDNDAANHTDDLISS

SEQ ID NO: 28682 - protein, 317 aa, Triticum aestivum
MRDPCAAEAVALAAQDWGAFLLEGHGVPLELLARVEAAIAGMFALPASEKMRAVRRPGDSCGYGSPPISSFFSKCMWSEGYTFSPANLRSDLRKLWPKAGHDYRHFCAVMEEFHREMRALADKLLELFLVALGLTGEQVAAVESEQKIAETMTATMHLNWYPKCPDPKRALGLIAHTDSGFFTFVLQSLVPGLQLFRHGPDRWVTVPAVPGAMVVNVGDLFQILTNGRFHSVYHRAVVNRDSDRISLGYFLGPPAHVKVAPLREALAGTPAAYRAVTWPEYMGVRKKAFTTGASALKMVAISTDNDAANHTDDLISS

SEQ ID NO: 28683 - protein, 276 aa, Triticum aestivum
MFALPASEKMRAVRRPGDSCGYGSPPISSFFSKCMWSEGYTFSPANLRSDLRKLWPKAGHDYRHFCAVMEEFHREMRALADKLLELFLVALGLTGEQVAAVESEQKIAETMTATMHLNWYPKCPDPKRALGLIAHTDSGFFTFVLQSLVPGLQLFRHGPDRWVTVPAVPGAMVVNVGDLFQILTNGRFHSVYHRAVVNRDSDRISLGYFLGPPAHVKVAPLREALAGTPAAYRAVTWPEYMGVRKKAFTTGASALKMVAISTDNDAANHTDDLISS

SEQ ID NO: 28684 - DNA, 1253 bp, Triticum aestivum
cttatctcggcgccggagcccacgaccgcttccccgctcaccaccccaaccccgaaatatcccccaattccgacgcgaccgcggaaccctagccccccggcaatcttcgctggacccggagagccgctccggcgccatggcatccccggaaggatcaaactgggtattcgactgccccctcatggacgaccttgctgccgccgacttcgccgcggcatccgcaggaggcttctactggaccccgccgatgcagccgcagatgcacactcttgcgcaggccgtctccgccaccccggctcccaatccctgtgctgaaatcaatagctctgtttcggtggactgggaccatgccaaaggacaaccgaaaaataaacgtcctaggtcagaaactggtgctcaacctagctccaaagcatgcagggagaaagtgagaagggacaagctaaacgagaggttcttggaattgggtgctgtcttggatccggggaaaacacctaaaatcgacaaatgtgctatattaaatgatgctatccgtgcggtaactgaattgcgtagtgaagcagagaagttgaaggattccaatgagtctctccaagagaagattagagagctaaaggctgagaagaatgagctacgagatgagaagcaaaagttgaaggcggagaaagagagcctggagcagcagattaagttcatgaatgcccgtcagagcctcgtaccacacccttctgtcatcccagctgctgcattcgctgccgcccaaggccaagcggcagggcacaagctgatgatgcctgtgatgagctacccaggatttcccatgtggcagttcatgccgccttcagatgttgatacctccgatgaccccaagtcatgccctccggttgcataagccagcaaaaatcatttgcctcatctatctcatggggaaggatggctaaaaagccgtccgttaaattatatcttagtcgtcagtgttactatgcagaagccgtttagtgttactatatgtagttaaatcaagaaccgaactgaagcgtcgtcgttgtatcacccgggaacatttgattatcttgtgaaaccgttgtatattgttagtaaataaataccatccgttgaagcaaatggcgcttggacgccatagcattaccgacttgttactttgttcgacatgttgcccgtgatttttgacctataacataaatatgttgtgctgcaggtcaaaataaaaataaaaatatataggttgtgct

SEQ ID NO: 28685 - protein, 296 aa, Triticum aestivum
LSRRRSPRPLPRSPPQPRNIPQFRRDRGTLAPRQSSLDPESRSGAMASPEGSNWVFDCPLMDDLAAADFAAASAGGFYWTPPMQPQMHTLAQAVSATPAPNPCAEINSSVSVDWDHAKGQPKNKRPRSETGAQPSSKACREKVRRDKLNERFLELGAVLDPGKTPKIDKCAILNDAIRAVTELRSEAEKLKDSNESLQEKIRELKAEKNELRDEKQKLKAEKESLEQQIKFMNARQSLVPHPSVIPAAAFAAAQGQAAGHKLMMPVMSYPGFPMWQFMPPSDVDTSDDPKSCPPVA

SEQ ID NO: 28686 - protein, 251 aa, Triticum aestivum
MASPEGSNWVFDCPLMDDLAAADFAAASAGGFYWTPPMQPQMHTLAQAVSATPAPNPCAEINSSVSVDWDHAKGQPKNKRPRSETGAQPSSKACREKVRRDKLNERFLELGAVLDPGKTPKIDKCAILNDAIRAVTELRSEAEKLKDSNESLQEKIRELKAEKNELRDEKQKLKAEKESLEQQIKFMNARQSLVPHPSVIPAAAFAAAQGQAAGHKLMMPVMSYPGFPMWQFMPPSDVDTSDDPKSCPPVA

SEQ ID NO: 28687 - protein, 236 aa, Triticum aestivum
MDDLAAADFAAASAGGFYWTPPMQPQMHTLAQAVSATPAPNPCAEINSSVSVDWDHAKGQPKNKRPRSETGAQPSSKACREKVRRDKLNERFLELGAVLDPGKTPKIDKCAILNDAIRAVTELRSEAEKLKDSNESLQEKIRELKAEKNELRDEKQKLKAEKESLEQQIKFMNARQSLVPHPSVIPAAAFAAAQGQAAGHKLMMPVMSYPGFPMWQFMPPSDVDTSDDPKSCPPVA

SEQ ID NO: 28688 - DNA, 1517 bp, Triticum aestivum
atggcatgcgctatatcttcctccccaaagtttgtcggaattacaaaacagcccccgtactcttcctccccacctctcgcctaccgttcgcgtcctccgcccgaggcctccacgggagcgccggagcgcacgcctgatctccccgcctcctcctcccggcaccgcggccccggctcctagcccgcctcacgatcgggggacgaggcacgagtaggagggcgagggtgcgaggagatgcagagggaccgaggcgtctcggcggccgctgggggcgccggtgagaggaagcggataggcgaggcgatggacaggtcctccccgtcgacgtcctgggggttctccggcggacgcgagagggaccggatcgccgccggcaagcagccggaggtgccccgctccggcggcggatccaccgccatgtccaagggcaagttgtccgatggagaatcggatactgacagtgaagaatcagatctcagtggttctgatggagaagatacatcgtggatttcatggttctgtagcttgcgaggcaatgagtttttctgtgaagttgatgacgattacatacaagacgatttcaatctctgtgggctaagcggtcaagttccatattatgaatatgctcttgatctgatattggatgtcgagtcttcacatggtgatatgttcacagaagagcagaatgaacttattgaatcagctgctgagatgctttatggattgattcatgttcgatatattcttacaagtaaaggattggctgcaatgttggataaatacaagaattatgactttggcagatgtccaagagtgcactgcagcggccagccatgccttccagttggccagtcggacattcctcgttctagtaatgtgaaaatttactgcccaaagtgtgaagatctctactatccgagatccaaatatcaaagcaacattgacggagcttactttgggacaacgtttcctcacttgtttctgatgacgtacccacatttgaagccccagaaaccgtcacagcagtacgtccccaaggtttttggcttcaaacttcataagccataacaagtttgaagactgaaggtgcaaaaggttcatagcagagttgtctgatatgtcacgctgcacatcacttccaagctgctcatttgtgcgcgtggcgcagtttagcacttggttcagttggttacccgtggcttggccgaaaccgacctgacctctggctgatttcccttgtcctccgttttcgctctcgcctgacgttctgatttgatccttgtggcttgtttagtgtagtagatttcttctatcctgttctttatactcattattatatttgagtttggcagttgctaaaagaaggcagttcgtaacagtgttatgtctctgctgtgtatttttcattttgttttacattaggttcctttgccaaaatgtgatggtaatggtaatctgaaacattcgatccggctattcttattcttcacctgcaactgagtttgtatggaaagttt

SEQ ID NO: 28689 - protein, 277 aa, Triticum aestivum
MQRDRGVSAAAGGAGERKRIGEAMDRSSPSTSWGFSGGRERDRIAAGKQPEVPRSGGGSTAMSKGKLSDGESDTDSEESDLSGSDGEDTSWISWFCSLRGNEFFCEVDDDYIQDDFNLCGLSGQVPYYEYALDLILDVESSHGDMFTEEQNELIESAAEMLYGLIHVRYILTSKGLAAMLDKYKNYDFGRCPRVHCSGQPCLPVGQSDIPRSSNVKIYCPKCEDLYYPRSKYQSNIDGAYFGTTFPHLFLMTYPHLKPQKPSQQYVPKVFGFKLHKP

SEQ ID NO: 28690 - protein, 254 aa, Triticum aestivum
MDRSSPSTSWGFSGGRERDRIAAGKQPEVPRSGGGSTAMSKGKLSDGESDTDSEESDLSGSDGEDTSWISWFCSLRGNEFFCEVDDDYIQDDFNLCGLSGQVPYYEYALDLILDVESSHGDMFTEEQNELIESAAEMLYGLIHVRYILTSKGLAAMLDKYKNYDFGRCPRVHCSGQPCLPVGQSDIPRSSNVKIYCPKCEDLYYPRSKYQSNIDGAYFGTTFPHLFLMTYPHLKPQKPSQQYVPKVFGFKLHKP

SEQ ID NO: 28691 - protein, 216 aa, Triticum aestivum
MSKGKLSDGESDTDSEESDLSGSDGEDTSWISWFCSLRGNEFFCEVDDDYIQDDFNLCGLSGQVPYYEYALDLILDVESSHGDMFTEEQNELIESAAEMLYGLIHVRYILTSKGLAAMLDKYKNYDFGRCPRVHCSGQPCLPVGQSDIPRSSNVKIYCPKCEDLYYPRSKYQSNIDGAYFGTTFPHLFLMTYPHLKPQKPSQQYVPKVFGFKLHKP

SEQ ID NO: 28692 - DNA, 462 bp, Triticum aestivum
  misc_feature (191)..(191): n is a, c, g, or t
  misc_feature (271)..(271): n is a, c, g, or t
  misc_feature (359)..(359): n is a, c, g, or t
  misc_feature (394)..(394): n is a, c, g, or t
  misc_feature (408)..(408): n is a, c, g, or t
  misc_feature (428)..(428): n is a, c, g, or t
cccaaaccccatccatcccttcctcctcccgagcagcctcctcgccgacgaaagtgccggagagctttccagaaggtcagggggagggatgggcgagttcgacgactactgggcgcgggcgtacaggggcgaccccgcggtgccgcactccgacccgcagcggctcatctccacctggaccggcgccttcnccctcggcgccgccgcctgcgtccaccaccacgtctccggcctcgcctccaacatcaagtcccttccccacagctggcangacatgacaatgatgctcgatcagaagcgctggaagaaaattcttgacaagaagcagcaacaagcttaagttccataaccttcaccgnttgggccacagttggaagagctttctatcttgctngttgggcatggcanaggaagttcttgcatcagtntggtattaggatagagtttttctacctcttgttt

SEQ ID NO: 28693 - protein, 112 aa, Triticum aestivum
  misc_feature (64)..(64): Xaa can be any naturally occurring amino acid
  misc_feature (90)..(90): Xaa can be any naturally occurring amino acid
PNPIHPFLLPSSLLADESAGELSRRSGGGMGEFDDYWARAYRGDPAVPHSDPQRLISTWTGAFXLGAAACVHHHVSGLASNIKSLPHSWXDMTMMLDQKRWKKILDKKQQQA

SEQ ID NO: 28694 - protein, 105 aa, Triticum aestivum
  misc_feature (64)..(64): Xaa can be any naturally occurring amino acid
  misc_feature (91)..(91): Xaa can be any naturally occurring amino acid
PKPHPSLPPPEQPPRRRKCRRAFQKVRGRDGRVRRLLGAGVQGRPRGAALRPAAAHLHLDRRLXPRRRRLRPPPRLRPRLQHQVPSPQLAXHDNDARSEALEENS

SEQ ID NO: 28695 - protein, 91 aa, Triticum aestivum
  misc_feature (63)..(63): Xaa can be any naturally occurring amino acid
  misc_feature (90)..(90): Xaa can be any naturally occurring amino acid
QTPSIPSSSRAASSPTKVPESFPEGQGEGWASSTTTGRGRTGATPRCRTPTRSGSSPPGPAPXPSAPPPASTTTSPASPPTSSPFPTAGXT

SEQ ID NO: 28696 - protein, 83 aa, Triticum aestivum
  misc_feature (35)..(35): Xaa can be any naturally occurring amino acid
  misc_feature (61)..(61): Xaa can be any naturally occurring amino acid
MGEFDDYWARAYRGDPAVPHSDPQRLISTWTGAFXLGAAACVHHHVSGLASNIKSLPHSWXDMTMMLDQKRWKKILDKKQQQA

SEQ ID NO: 28697 - DNA, 530 bp, Triticum aestivum
  misc_feature (477)..(477): n is a, c, g, or t
aagggaagttggcagaagctagagaagaattgaaactagcaaaactcttagagaagcgtcttgaagcccctcaacaagacagtgaggatggtgcacatgagttagccacagcagctgttcagcagagcaattcgatccagcagtctgccagcgtcaccactcacaccaatccgttgacctatgcccctccagcacaggaaaacaagtcggttgagcctcaaaaagcaatgtccagccgagaccgtctcagaatccaacgtgaatccctcactcacaagcgcaacgccctgaagttgaggagagaaggaaagactgcggaagcagatgcggaattcgaattggccaagtcactagagagccaactggaagagtcagatagccagggttcgaactctggaggaaagtctgaagcaagtgacgcgtttgtggaagatcttattgatcctcaaatgatgtctgccctgaaatccatcggcnggagcgcagctgacctgttcacgcaatctccgagccctcaacctttggtgaaa

SEQ ID NO: 28698 - protein, 176 aa, Triticum aestivum
  misc_feature (159)..(159): Xaa can be any naturally occurring amino acid
GKLAEAREELKLAKLLEKRLEAPQQDSEDGAHELATAAVQQSNSIQQSASVTTHTNPLTYAPPAQENKSVEPQKAMSSRDRLRIQRESLTHKRNALKLRREGKTAEADAEFELAKSLESQLEESDSQGSNSGGKSEASDAFVEDLIDPQMMSALKSIGXSAADLFTQSPSPQPLVK

SEQ ID NO: 28699 - protein, 101 aa, Triticum aestivum
  misc_feature (84)..(84): Xaa can be any naturally occurring amino acid
MSSRDRLRIQRESLTHKRNALKLRREGKTAEADAEFELAKSLESQLEESDSQGSNSGGKSEASDAFVEDLIDPQMMSALKSIGXSAADLFTQSPSPQPLVK

SEQ ID NO: 28700 - DNA, 1166 bp, Triticum aestivum
aaatacccctaccgaagcgcaaaaagaaactcgaagcacaggaacaggaagcaagctgcccccccccccctcctcatctccgactcactcacgatccgagatcaggatggccggatcgatggaactccctaccaagggcggcttcagcttcgacctgtgccgcaggaacgccatgctggagaagaatggcctcaagatgcccgggttcaggaagaccgggactaccatcgtcggcctcgtgtttgcggatggagttgttcttggcgcagacacaagggcaaccgagggtcctatagttgctgataagaactgcgagaaaattcattttatggcaccaaacatatattgctgtggtgctggaactgctgctgacacagaggctgtgacagatatggtcagctcccagctacaacttcaccgttatgctactagccgtgagtcaagagttgtaaccgctcttacactactgaagacacacctttttaactaccaaggtcatgtcagtgctgctcttgttcttggcggagtagatgtcactggaccacatctacacactgtttatccgcatggttccaccgacactcttccttttgccacgatgggttctggatcccttgctgcaatgtcagtgtttgagtcgaagtacagagaaggcctcacaagggaggagggaattgcacttgtagccgaggcaatccgtgctggtatcttcaatgacttgggaagtggcagcaacgtggatgtttgtgtgataaccaaggggaacacagagtacttgagaaaccacgagttaccaaacccaaggacttttgtcagctcgaagggatacagcttcaacaaggggcataccgaggtattgtctacaaagatcacgcagctgaagctgaagccagaggtcgctgatggtgatgcaatggaagagtgatcttgtgtgcttccgttcggacaagcagccatgctaagaatttgcgccatttcttcttttttctcagcgtgggtgctagaacagaaaattggatgtattttgttgtacttcctgaatttaatgcagacctttatgttaaactgtctctgggctcttggtgttatggtctatgaatctaaaattcatattcccgattaactatggcaaccaaaagatatgatatgtttgttaacttgatttc

SEQ ID NO: 28701 - protein, 307 aa, Triticum aestivum
NTPTEAQKETRSTGTGSKLPPPPSSSPTHSRSEIRMAGSMELPTKGGFSFDLCRRNAMLEKNGLKMPGFRKTGTTIVGLVFADGVVLGADTRATEGPIVADKNCEKIHFMAPNIYCCGAGTAADTEAVTDMVSSQLQLHRYATSRESRVVTALTLLKTHLFNYQGHVSAALVLGGVDVTGPHLHTVYPHGSTDTLPFATMGSGSLAAMSVFESKYREGLTREEGIALVAEAIRAGIFNDLGSGSNVDVCVITKGNTEYLRNHELPNPRTFVSSKGYSFNKGHTEVLSTKITQLKLKPEVADGDAMEE

SEQ ID NO: 28702 - protein, 272 aa, Triticum aestivum
MAGSMELPTKGGFSFDLCRRNAMLEKNGLKMPGFRKTGTTIVGLVFADGVVLGADTRATEGPIVADKNCEKIHFMAPNIYCCGAGTAADTEAVTDMVSSQLQLHRYATSRESRVVTALTLLKTHLFNYQGHVSAALVLGGVDVTGPHLHTVYPHGSTDTLPFATMGSGSLAAMSVFESKYREGLTREEGIALVAEAIRAGIFNDLGSGSNVDVCVITKGNTEYLRNHELPNPRTFVSSKGYSFNKGHTEVLSTKITQLKLKPEVADGDAMEE

SEQ ID NO: 28703 - protein, 268 aa, Triticum aestivum
MELPTKGGFSFDLCRRNAMLEKNGLKMPGFRKTGTTIVGLVFADGVVLGADTRATEGPIVADKNCEKIHFMAPNIYCCGAGTAADTEAVTDMVSSQLQLHRYATSRESRVVTALTLLKTHLFNYQGHVSAALVLGGVDVTGPHLHTVYPHGSTDTLPFATMGSGSLAAMSVFESKYREGLTREEGIALVAEAIRAGIFNDLGSGSNVDVCVITKGNTEYLRNHELPNPRTFVSSKGYSFNKGHTEVLSTKITQLKLKPEVADGDAMEE

SEQ ID NO: 28704 - DNA, 1634 bp, Triticum aestivum
atgtttcgtgaatacagtgaccaaactgaaccctagagccaagtttagttactgtagatgtaattttctccgatgctccagatacgcctgagcaggatcggctcgtcggactccggggccgcggcctctggcgcggcggctggggcgtccggtggcgccccggcgaagtccgccgccgcggcggctggcggtgccccggagtcggtgactgtcgcttgccccgaccacctggtcatcgcagacctcgccgtggcgaagagcctcggcgccgtcacaaactccgccatcgctgcgacgcgcgccatcggccgccgctcccgccggcccctcggcgagcgcgtccacatctgctcccgctgcgagttccccatcgccattaatggccgcctcatttcttgcgaacatgcattctgtttagcctgtgcaagaagtgattccagctgctatctttgtgatgagcgcattcagaagattcagactgtgaaaatgatggaagggatttttatctgcgctgcacctatgtgcctcaagtctttccttaagaaagcggaatttatgactcatgtacctgaagctcatgcaaatctcctccaaactaacacggagaaggaagaacgtaatgaaccagatgctcctaacatctcccgtgcttctggaggagatgctcaaaggcaatctcaaatgcctgagatatctaccgcacgtgctcctccaaggcggggtgtttcacccacttcaagttctcacatgcaagagcgtgaagaccgatctcggtatcaccagtccagggagagggagcacaccccactaaggccccctatgctaagcaaaccaccatcattccatggtcgccactatccaccaggtgatactcggtccgaaaacaacacacctcaaggatttgaccgttcttacagctgggcccatgatggtacacctggtgcaactccacttcgccaagaacctgaccatggtactcaagacaagcagcaagtgatgcctaattcacctttcatgttctctccaatgcatcctcatcagcaaaacttcatgatgcatatgaatatgaatcagcctttaatccccagctcatcattcagctaccctgtccaacaagatgggaatccgcagtacttcagtgctcctttccagatgcaactgcaagatgccggatcagatcaaggttcagcgtcggtgcctgaggggcttcagcgcccatggggcatggggttgatgggcaatccatctcagggaggtggcggcatggccttcatgccaactggtttcgggatgatgccagacagctcgatgaatccaggcatgcaaggtagggattttcaaggccaagctgatcgtggcgacggaaggggcatccaagaacagttacctatggtgatgcaaatgcagatgtcgctccccccacctccccctacacaacccccgtccgctggacagcagtctttcaacagaacttgatgagttttttgcgtgccaattttatggctgctgccaaaatcgtgctgtactgcgttgggaaattgcaattttgccaccttggcatgtaactgatgagcactcgatggcagcctatgttgtgctaaaaacgatgcaatttaatctgagttgtcatatgc

SEQ ID NO: 28705 - protein, 467 aa, Triticum aestivum
MLQIRLSRIGSSDSGAAASGAAAGASGGAPAKSAAAAAGGAPESVTVACPDHLVIADLAVAKSLGAVTNSAIAATRAIGRRSRRPLGERVHICSRCEFPIAINGRLISCEHAFCLACARSDSSCYLCDERIQKIQTVKMMEGIFICAAPMCLKSFLKKAEFMTHVPEAHANLLQTNTEKEERNEPDAPNISRASGGDAQRQSQMPEISTARAPPRRGVSPTSSSHMQEREDRSRYHQSREREHTPLRPPMLSKPPSFHGRHYPPGDTRSENNTPQGFDRSYSWAHDGTPGATPLRQEPDHGTQDKQQVMPNSPFMFSPMHPHQQNFMMHMNMNQPLIPSSSFSYPVQQDGNPQYFSAPFQMQLQDAGSDQGSASVPEGLQRPWGMGLMGNPSQGGGGMAFMPTGFGMMPDSSMNPGMQGRDFQGQADRGDGRGIQEQLPMVMQMQMSLPPPPPTQPPSAGQQSFNRT

SEQ ID NO: 28706 - protein, 329 aa, Triticum aestivum
MMEGIFICAAPMCLKSFLKKAEFMTHVPEAHANLLQTNTEKEERNEPDAPNISRASGGDAQRQSQMPEISTARAPPRRGVSPTSSSHMQEREDRSRYHQSREREHTPLRPPMLSKPPSFHGRHYPPGDTRSENNTPQGFDRSYSWAHDGTPGATPLRQEPDHGTQDKQQVMPNSPFMFSPMHPHQQNFMMHMNMNQPLIPSSSFSYPVQQDGNPQYFSAPFQMQLQDAGSDQGSASVPEGLQRPWGMGLMGNPSQGGGGMAFMPTGFGMMPDSSMNPGMQGRDFQGQADRGDGRGIQEQLPMVMQMQMSLPPPPPTQPPSAGQQSFNRT

SEQ ID NO: 28707 - protein, 328 aa, Triticum aestivum
MEGIFICAAPMCLKSFLKKAEFMTHVPEAHANLLQTNTEKEERNEPDAPNISRASGGDAQRQSQMPEISTARAPPRRGVSPTSSSHMQEREDRSRYHQSREREHTPLRPPMLSKPPSFHGRHYPPGDTRSENNTPQGFDRSYSWAHDGTPGATPLRQEPDHGTQDKQQVMPNSPFMFSPMHPHQQNFMMHMNMNQPLIPSSSFSYPVQQDGNPQYFSAPFQMQLQDAGSDQGSASVPEGLQRPWGMGLMGNPSQGGGGMAFMPTGFGMMPDSSMNPGMQGRDFQGQADRGDGRGIQEQLPMVMQMQMSLPPPPPTQPPSAGQQSFNRT

SEQ ID NO: 28708 - DNA, 2147 bp, Triticum aestivum
acaccatccaccacatcccatcccaggagattaaaaaaggacaagagctcgattcaaatccgatcctgcgttacgtatcgcgcttcttccgtccgtgtgttcgttccgaggccaggagtttgaggagatggcgggcggcggtgtcgaggacgtctacggcgaggacagggccaccgaggagcagctcatcacgccatggtcattctccgtcgcaagtgggcaccagcttctgagggacccccggcacaacaaggggctggccttctccgaggcggagcgcgacgcgcactacctccggggcctgcttcccccggccatcgtctcccaggagcaccaggagaagaagatcatgcacaacctccgcagttacaccgtccccctgcaccgctacgtcgccatgatggacctccaggagaggaacgagaggctcttctacaagctcctcatcgacaacgtcgaggagctgctccccgtcgtctacacgcccgtcgtcggcgaggcctgccagaagtacggcagcatctaccgccgcccgcaggggctctacatcagcctcaaggacaagggcaaggtgctcgaggtgctcaagaactggcctgagaggagcatccaggtcatcgtcgtcaccgacggcgagcgcattttggggctcggagatctgggttgccagggtatggggattccggttggcaaactgtctctgtacaccgccctcggaggagttcgcccatcagcttgcctgccaattacgatcgatgttggcaccaacaatgagacattgctgaacgacgagtactacatcgggctccgtcaacggcgtgctaccggcgaggaataccatgagcttcttcaagagttcatgaatgcagtgaagcagaactacggcgagaaagtcctggtccagtttgaggactttgccaaccacaatgcattcgatttgctcgcaaagtacagcaagagccatctcgtcttcaacgatgatattcagggcacagcatcagtggtcctcgcaggcctcttggcggccctgaggatgatcggtggaggccttgtggatcagacttacctcttccttggtgctggagaggctggaactggcattgcagaactcattgctcttgagatgtcgaaacacactgaactcccggtggacgactgccgcaagaagatctggctggtggactccaagggtctgcttgtcgagtctagaaaagagtctctgcagcacttcaagaagccgttcgctcatgagcacgaagaactcaagaccctgctggaggccgtccagtccatcaagccaaccgtgctgatcggaacctccggcgtcgggaagaccttcacccaggaagtgatcgaggccatggcctccttcaacgagaaacccgtcatcttctcgctgtcgaacccgacgtcccactcggagtgcacggccgaggaggcctacacctggagcaagggcacggcggtgttcgcgagcggcagcccgttcgaccccgtggagtacgaggggaagacgttcgtgcccgggcagtccaacaacgcctacgtgttccccggcttcggcctcggcgtcgtcatctccggcgccatccgcgtccacgacgacatgctcctcgccgcctcggaggcgctggcggaggaggcgacccaggagaacttcgacaaggggctcatcttcccgcccttcaccaacatccgcaagatctcggccagcatcgccgccaaggtggccgccaaggcctacgacctgggcctggccagccggctgccgcggcccgacgacctggtcaagtacgccgagagctgcatgtacaccccgctctaccgcagctacaggtgagcgtggcgggcagttttgcggccagcacggacggagtcaatcaataaaatcaatctccttcccccgtatgccaaccagctcaactcaaagcttcagcgacgcaacctaaaacataggctttctttccttctgtgtccgtctatgcgtatgtgtactcttgtgctcttctactttgctttactttgtactgtaatgtactgttaacgggagcacggcacgcacctgtctatccgtgtcgaggtgcgtcgtcgtcgtcgtcgtcgattcttttgtcagattgagttaaacgagtgtaatagtttgattg

SEQ ID NO: 28709 - protein, 570 aa, Triticum aestivum
MAGGGVEDVYGEDRATEEQLITPWSFSVASGHQLLRDPRHNKGLAFSEAERDAHYLRGLLPPAIVSQEHQEKKIMHNLRSYTVPLHRYVAMMDLQERNERLFYKLLIDNVEELLPVVYTPVVGEACQKYGSIYRRPQGLYISLKDKGKVLEVLKNWPERSIQVIVVTDGERILGLGDLGCQGMGIPVGKLSLYTALGGVRPSACLPITIDVGTNNETLLNDEYYIGLRQRRATGEEYHELLQEFMNAVKQNYGEKVLVQFEDFANHNAFDLLAKYSKSHLVFNDDIQGTASVVLAGLLAALRMIGGGLVDQTYLFLGAGEAGTGIAELIALEMSKHTELPVDDCRKKIWLVDSKGLLVESRKESLQHFKKPFAHEHEELKTLLEAVQSIKPTVLIGTSGVGKTFTQEVIEAMASFNEKPVIFSLSNPTSHSECTAEEAYTWSKGTAVFASGSPFDPVEYEGKTFVPGQSNNAYVFPGFGLGVVISGAIRVHDDMLLAASEALAEEATQENFDKGLIFPPFTNIRKISASIAAKVAAKAYDLGLASRLPRPDDLVKYAESCMYTPLYRSYR

SEQ ID NO: 28710 - protein, 496 aa, Triticum aestivum
MHNLRSYTVPLHRYVAMMDLQERNERLFYKLLIDNVEELLPVVYTPVVGEACQKYGSIYRRPQGLYISLKDKGKVLEVLKNWPERSIQVIVVTDGERILGLGDLGCQGMGIPVGKLSLYTALGGVRPSACLPITIDVGTNNETLLNDEYYIGLRQRRATGEEYHELLQEFMNAVKQNYGEKVLVQFEDFANHNAFDLLAKYSKSHLVFNDDIQGTASVVLAGLLAALRMIGGGLVDQTYLFLGAGEAGTGIAELIALEMSKHTELPVDDCRKKIWLVDSKGLLVESRKESLQHFKKPFAHEHEELKTLLEAVQSIKPTVLIGTSGVGKTFTQEVIEAMASFNEKPVIFSLSNPTSHSECTAEEAYTWSKGTAVFASGSPFDPVEYEGKTFVPGQSNNAYVFPGFGLGVVISGAIRVHDDMLLAASEALAEEATQENFDKGLIFPPFTNIRKISASIAAKVAAKAYDLGLASRLPRPDDLVKYAESCMYTPLYRSYR

SEQ ID NO: 28711 - protein, 480 aa, Triticum aestivum
MMDLQERNERLFYKLLIDNVEELLPVVYTPVVGEACQKYGSIYRRPQGLYISLKDKGKVLEVLKNWPERSIQVIVVTDGERILGLGDLGCQGMGIPVGKLSLYTALGGVRPSACLPITIDVGTNNETLLNDEYYIGLRQRRATGEEYHELLQEFMNAVKQNYGEKVLVQFEDFANHNAFDLLAKYSKSHLVFNDDIQGTASVVLAGLLAALRMIGGGLVDQTYLFLGAGEAGTGIAELIALEMSKHTELPVDDCRKKIWLVDSKGLLVESRKESLQHFKKPFAHEHEELKTLLEAVQSIKPTVLIGTSGVGKTFTQEVIEAMASFNEKPVIFSLSNPTSHSECTAEEAYTWSKGTAVFASGSPFDPVEYEGKTFVPGQSNNAYVFPGFGLGVVISGAIRVHDDMLLAASEALAEEATQENFDKGLIFPPFTNIRKISASIAAKVAAKAYDLGLASRLPRPDDLVKYAESCMYTPLYRSYR

SEQ ID NO: 28712 - DNA, 500 bp, Triticum aestivum
atttggggactttttttaacttccacacacgtgcgtggcgacccaactccactttccagcgatggcgtcgtctctgccggagaaggctggggttcccccgtggagcaggctggaagggcaggttgtgctggtgacgggcgcctcctccggcatcggccgcgatttctgcctcgacctggcgcgcgccggctgccgggtcgtcgccgccgcgcgccgcaccgaccgcctccgctccctctgcgacgagatcaacgcatccgcggacgcggccgctagccatccccgggcggtggccgtcgagctcgacgtcgccgccggagggtccgccgtcgaggcggcggtgcagagggcctgggacgccttcggcccgcatcgacgtcttgatcaacaacgctgcctccgaggaggtgttcattcctcactggattggcctgaggatgagtgggataaactcatcaagacaaaccttaccggattatggctcgtcgccaagcatgtat

SEQ ID NO: 28713 - protein, 146 aa, Triticum aestivum
MASSLPEKAGVPPWSRLEGQVVLVTGASSGIGRDFCLDLARAGCRVVAAARRTDRLRSLCDEINASADAAASHPRAVAVELDVAAGGSAVEAAVQRAWDAFGPHRRLDQQRCLRGGVHSSLDWPEDEWDKLIKTNLTGLWLVAKHV

SEQ ID NO: 28714 - protein, 91 aa, Triticum aestivum
IWGLFLTSTHVRGDPTPLSSDGVVSAGEGWGSPVEQAGRAGCAGDGRLLRHRPRFLPRPGARRLPGRRRRAPHRPPPLPLRRDQRIRGRGR

SEQ ID NO: 28715 - DNA, 1378 bp, Triticum aestivum
atcattcactcatcaaacgcgacgcacagagacagagggagagggtccgctgtacttgcatccttccctgcccccttcccctctcctccaagtccagaaatccgttcccctctcccccctccctccctctcgtctgcacccgagacgctcctctagatcagttcctcggtgcggttacctctcgccggaagccaagccaccatggtgtcgccggacgctatccgcaccgtcatcggcgtcataggcaatgcaaccgccctggtgctcttcctatccccagtgccgacgttcatccaaatctggaagaagaagacggtggagcagtactcggcggtgccgtacctggcgacgctgctcaactgcatgatgtgggtgctctacgggctcccgctggtgcacccgcacagcatgctcgtcatcaccatcaacggcaccggcatgctcatcgagctcacctacgtcgccctcttcctcaccttctccgtcggcgccgcccgccgccgagtcctcctcctgctggtcgccgaggtcgccttcgtcgccgcggtcggcgcgctcgtcctctccctcggccacaaacacgagcgcaggtccatggtcgtcggcatcctctgcgtcctattcggcaccggcatgtacgccgcgccgctttccgtcatgaaaatggtgatccagaccaagagcgtggagtacatgcccctgttcttgtccgtggcctcgctcgtcaatggcatctgatggactgcctacgccctcatcaagttaggcctctacatcaccatccccaacgggctgggcgtgatgttcgctgtggggcagatcatcctgtacggcatctactacaagtcgacgcagcagatcctggaggcccgtaagcgcaaggccgaccaggtgcccatgaccgaggtcgtcgtcgacggcaagagcggcagcgccaccaactcaggcgccgccaacggccactactagaagcaataccactactattaactcccgattgaagcgccttcataaatcaccttagctaattctcccatgaatcatgtacgtacgctgcgcgcccagggctcctgtgcactgtcgcgtcttcttgtgcgctctactacccttgaaagacctgttcttcatcttgtctcctttatgcctaccgtgcgtacggccgctactgtcaatcagacggctaaccgcgaccctggttggcgaatccgcgaccctggttggcggatcactggtgttcttggttttctggaagaactatgacagtccaaaggggacggcgtgttgagtttttcttatacatgttattatactactactgtttttgtttgtatttgttttggccgggaatactactactgttttgttgttgcagttgtcg

SEQ ID NO: 28716 - protein, 290 aa, Triticum aestivum
HSLIKRDAQRQRERVRCTCILPCPLPLSSKSRNPFPSPPSLPLVCTRDAPLDQFLGAVTSRRKPSHHGVAGRYPHRHRRHRQCNRPGALPIPSADVHPNLEEEDGGAVLGGAVPGDAAQLHDVGALRAPAGAPAQHARHHHQRHRHAHRAHLRRPLPHLLRRRRPPPSPPPAGRRGRLRRRGRRARPLPRPQTRAQVHGRRHPLRPIRHRHVRRAAFRHENGDPDQERGVHAPVLVRGLARQWHLMDCLRPHQVRPLHHHPQRAGRDVRCGADHPVRHLLQVDAADPGGP

SEQ ID NO: 28717 - protein, 178 aa, Triticum aestivum
MVSPDAIRTVIGVIGNATALVLFLSPVPTFIQIWKKKTVEQYSAVPYLATLLNCMMWVLYGLPLVHPHSMLVITINGTGMLIELTYVALFLTFSVGAARRRVLLLLVAEVAFVAAVGALVLSLGHKHERRSMVVGILCVLFGTGMYAAPLSVMKMVIQTKSVEYMPLFLSVASLVNGI

SEQ ID NO: 28718 - DNA, 1180 bp, Triticum aestivum
aatccccgaccagactcgtcgctccctgacccttcccctccaacgccgaagccctaacacgcagctccggcggctgagctcgcagtccgccccctcgcaccttcgtccccagcgcgcgcgcacccccacggccaaccacgcggcgaggcgcatcctccttcgacccccgacgaagcaggcggggagcctgacgcggccccgcgcggccttggccagatgacgaggaccagcggcgcgaacggcggcgggcagcaggggtcggggaagctcccgcgtaagcgcttctaccgggcgcgcgcgcacagcaacccgctcagcgactcgcacttcccgatcccgatagcgcccgacgacgtcgacctctcgcagcactacccgcgctacttcccggccgacaagggcgagcacggtgatggggacggggacgcggaggcgccccggatccgcttcgctgacgtcgggtgcgggtttggtgggctgctcgtcgggctctcgccgctcttccccgacaagctaatgatcggcatggagctgagggacaaggtgactgagtatgtcaaagagagggttctggctttgagagcatcaaatccaggacagtatgacaacatatccgttgtgcgcaccaattcaatgaaatacattcctaactactttggaaaggctcagctctccaaaatgttcttcctgttccctgatcctcacttcaaggagaagaaccaccggaggagggtgattagcatgcatttgctcgatgaatacgcttacgtgatggaagtgggaggaatcatatacactattactgatgtagaggagcttggtatatggatgcgcacatgtctggagaaacacccactcttccaagctgttccagaggaagagataaaagtcgatccagttgtgaagctactgtctagtgccaccgaagaaggccagaaggtcgcgaggaatggagggcagactttccaggccatcttcaggcgcatctccttgcaagaggaataagcaattttggaacttactaagctcttagcacagtgtactttcctggacttcgctagatggatttgtgccatttctatacatttttgtagcatgatttcactatgcagtagtcttacgtagcgctgctatctcaaatgtttggctctactttacaaaaaaattctggaagattgct

SEQ ID NO: 28719 - protein, 262 aa, Triticum aestivum
MTRTSGANGGGQQGSGKLPRKRFYRARAHSNPLSDSHFPIPIAPDDVDLSQHYPRYFPADKGEHGDGDGDAEAPRIRFADVGCGFGGLLVGLSPLFPDKLMIGMELRDKVTEYVKERVLALRASNPGQYDNISVVRTNSMKYIPNYFGKAQLSKMFFLFPDPHFKEKNHRRRVISMHLLDEYAYVMEVGGIIYTITDVEELGIWMRTCLEKHPLFQAVPEEEIKVDPVVKLLSSATEEGQKVARNGGQTFQAIFRRISLQEE

SEQ ID NO: 28720 - protein, 162 aa, Triticum aestivum
MIGMELRDKVTEYVKERVLALRASNPGQYDNISVVRTNSMKYIPNYFGKAQLSKMFFLFPDPHFKEKNHRRRVISMHLLDEYAYVMEVGGIIYTITDVEELGIWMRTCLEKHPLFQAVPEEEIKVDPVVKLLSSATEEGQKVARNGGQTFQAIFRRISLQEE

SEQ ID NO: 28721 - protein, 159 aa, Triticum aestivum
MELRDKVTEYVKERVLALRASNPGQYDNISVVRTNSMKYIPNYFGKAQLSKMFFLFPDPHFKEKNHRRRVISMHLLDEYAYVMEVGGIIYTITDVEELGIWMRTCLEKHPLFQAVPEEEIKVDPVVKLLSSATEEGQKVARNGGQTFQAIFRRISLQEE

SEQ ID NO: 28722 - DNA, 741 bp, Triticum aestivum
accaataccagtgctagcaaatctagctatcccaccctctctccgtgagctagcccaccaccacaaggtccacaactacagctaactcggtcgagatggctcgcactgcagctactaagctcgtgctggtcgccctggtggcggcaatgatcctcgcagcctccgacgcggccatcagctgcggccaggtgagctctgccttgaccccctgcgtcgcctatgcgaagggcagcgggaccagcccgtctggggcctgctgcagcggcgtcaggaaattggccggcttagcgcggagcaccgccgacaagcaagctacatgcaggtgcctcaagagtgttgccggagggctcaaccccaacaaggccgcaggcattccctccaagtgcggcgtcagcgtcccctacacgatcagcgcatccgtggactgctctaagatccactgatcgatttctggccgccatcatcgccgattatagttccagcgattgatgctgagtacgttgaggtctcacacacacatatatacatatacatgaataaatgctctgatatgatctccatgtgagagataggagtacgtacatcgagccagctttgcatagctggccactgttgtatctattttgtatcagcgtttgattgttcgttcactccctttgagcagacacgggagtttgttgtactttgtacgatgtacgcttatcatatatggattataaattaatctacctctattcggtt

SEQ ID NO: 28723 - protein, 115 aa, Triticum aestivum
MARTAATKLVLVALVAAMILAASDAAISCGQVSSALTPCVAYAKGSGTSPSGACCSGVRKLAGLARSTADKQATCRCLKSVAGGLNPNKAAGIPSKCGVSVPYTISASVDCSKIH

SEQ ID NO: 28724 - protein, 98 aa, Triticum aestivum
MILAASDAAISCGQVSSALTPCVAYAKGSGTSPSGACCSGVRKLAGLARSTADKQATCRCLKSVAGGLNPNKAAGIPSKCGVSVPYTISASVDCSKIH

SEQ ID NO: 28725 - DNA, 839 bp, Triticum aestivum
ctctcctcctttgcggcggcgcgacggtaggggaactccatccaacacatggccgccgccgccgccgtccgctcgaagcgcaggctcctaccccacctctaccgtctcctccactccaccgccgccccctcgctcgaccgtttcctccgccacgcgtcgccggtgccccgcgccgccgaccactccccttttctccgcctacccgccgcgcgcgtctccacgctccccaccggcctccgcgtcgtcacccagtcctacccggccgccacccgcatggcctccgtcggcgtctgggtcgacgccggcagccgcttcgagctgcccggcaccaacggcacggcgcacttcctcgagcacatggccttcaagggcacggagcgccgccccaccgcgaacgcgctcgaggtggagatcgaagacatgggcgcgcgcctcaacgcctacacctcccgcgagcagaccaccttctttgccgacgtgcagggccgcgacgtgcccgccgcgcttgacgtgctcagcgacatcctgcagcacccacgcttcccgcagcagggcatccagcgcgagcgcggcgtcatcctccgcgagatggaggaggtgcaaggaatgatggaggaggtgatatttgatcacctgcataccgcagcattccgagaccatccgctgggggacacgatattaggtcctacggagaacattaaatctatcttgaagaaagatttgcagcagtacatttcaacgcattatacctgtcctagaatggttgtatctgcttctggagctgtcgatcatgatgaggttgttgatcaagtcagaaaattgtttacaggattctctac

SEQ ID NO: 28726 - protein, 263 aa, Triticum aestivum
MAAAAAVRSKRRLLPHLYRLLHSTAAPSLDRFLRHASPVPRAADHSPFLRLPAARVSTLPTGLRVVTQSYPAATRMASVGVWVDAGSRFELPGTNGTAHFLEHMAFKGTERRPTANALEVEIEDMGARLNAYTSREQTTFFADVQGRDVPAALDVLSDILQHPRFPQQGIQRERGVILREMEEVQGMMEEVIFDHLHTAAFRDHPLGDTILGPTENIKSILKKDLQQYISTHYTCPRMVVSASGAVDHDEVVDQVRKLFTGFS

SEQ ID NO: 28727 - protein, 202 aa, Triticum aestivum
SPPLRRRDGRGTPSNTWPPPPPSARSAGSYPTSTVSSTPPPPPRSTVSSATRRRCPAPPTTPLFSAYPPRASPRSPPASASSPSPTRPPPAWPPSASGSTPAAASSCPAPTARRTSSSTWPSRARSAAPPRTRSRWRSKTWARASTPTPPASRPPSLPTCRAATCPPRLTCSATSCSTHASRSRASSASAASSSARWRRCKE

SEQ ID NO: 28728 - protein, 188 aa, Triticum aestivum
MASVGVWVDAGSRFELPGTNGTAHFLEHMAFKGTERRPTANALEVEIEDMGARLNAYTSREQTTFFADVQGRDVPAALDVLSDILQHPRFPQQGIQRERGVILREMEEVQGMMEEVIFDHLHTAAFRDHPLGDTILGPTENIKSILKKDLQQYISTHYTCPRMVVSASGAVDHDEVVDQVRKLFTGFS

SEQ ID NO: 28729 - DNA, 940 bp, Triticum aestivum
aaggctccccttcatctcaccctgctccaagcctctctgtcgcacgcatcccaccccaccccacccgaccgcgtcgagtcgagtccaatcgatggagcagcagcctgtggcggcggcggcgacggagccggaggtaccggcggggcttgggctgacggccgcggagtacgcgcagctgctgcccacggtggaggcgtaccaccggtacgccgtggggccaggccaatgctcctctctcgtggcgcagcgtatcgaggcgccgccagccgccgtctgggccatcgtccgccgcttcgactgcccccaggtgtacaagcacttcatccgcagctgcgcgctccgcccagaccccgaggccggcgacgagctccgcccgggccgcctccgcgaggtcagcgtcatctccggcctccccgccagcaccagcaccgagcgcctcgacctcctcgatgacgcgcgcagggccttcggcttcaccatcaccggcggcgagcaccgcctccgcaactaccggtccgtcaccaccgtctccgagctctccccggccgcgcccgccgagatctgcaccgtcgtcctcgagtcctacgtcgtcgacgtccccgacggcaacagcgaggaggacacgcgcctcttcgcggacaccgtcgtcaggctcaacctccagaagctcaagtccgtcgccgaggccaacgccgctgccgccgcggccacgcccgcgccgccggcagaataacggcggccggatgctgtgatactctttgctttttctcgggagggggttgcttcgaattgacgcatgcaggggtttcgaataggtgtgattcctgaggtgctgcctgtaataaaactctttccatggactcctccatcccctttcttttcctttcctttggaattctttcacctttctgtcgtgcttgcaattggaattcaactttgc

SEQ ID NO: 28730 - protein, 243 aa, Triticum aestivum
RLPFISPCSKPLCRTHPTPPHPTASSRVQSMEQQPVAAAATEPEVPAGLGLTAAEYAQLLPTVEAYHRYAVGPGQCSSLVAQRIEAPPAAVWAIVRRFDCPQVYKHFIRSCALRPDPEAGDELRPGRLREVSVISGLPASTSTERLDLLDDARRAFGFTITGGEHRLRNYRSVTTVSELSPAAPAEICTVVLESYVVDVPDGNSEEDTRLFADTVVRLNLQKLKSVAEANAAAAAATPAPPAE

SEQ ID NO: 28731 - protein, 213 aa, Triticum aestivum
MEQQPVAAAATEPEVPAGLGLTAAEYAQLLPTVEAYHRYAVGPGQCSSLVAQRIEAPPAAVWAIVRRFDCPQVYKHFIRSCALRPDPEAGDELRPGRLREVSVISGLPASTSTERLDLLDDARRAFGFTITGGEHRLRNYRSVTTVSELSPAAPAEICTVVLESYVVDVPDGNSEEDTRLFADTVVRLNLQKLKSVAEANAAAAAATPAPPAE

SEQ ID NO: 28732 - protein, 150 aa, Triticum aestivum
KAPLHLTLLQASLSHASHPTPPDRVESSPIDGAAACGGGGDGAGGTGGAWADGRGVRAAAAHGGGVPPVRRGARPMLLSRGAAYRGAASRRLGHRPPLRLPPGVQALHPQLRAPPRPRGRRRAPPGPPPRGQRHLRPPRQHQHRAPRPPR

SEQ ID NO: 28733 - DNA, 2094 bp, Triticum aestivum
cccactagcactggagtattttggtgccttgcgtgtaaaatttctggtgctcccgtcttcttgatcccctccctccatggtcaagacctcaccttggaatggggaccctcatcggaaaagtaatggtcgtccatttttacaacgaggggtggataatcttctcctccttctcctcctccctgtataaaagggcctcctcctctgcccaactcatccagagcaacacttgttgccaagacagacaccagtctgctctgccctgcctcttgaaccaaaacagagcatccaagaggaggcagagagaggtagaagaagaagtagaagatggcgctcctcctccttgtgctggtcggcgttgtggtcggcgtggtgctggcgagcagcctgctgctgcgctggaacgaggtcaggtacggcaacggcaggaggaaggatggcgatggctgcttgccgccggggacaatgggctggccgctgttcggcgagaccaccgagttcctcaagcagggccccagcttcatgaagcagaggaggctcaggtacgggaggctgttccggacgcacatcctggggtgccccacggtggtgtgcatggacccggagctcaaccgccgcatgctgctgcagggcgagtccggcggcctcgtccccggctacccgcagtccatgctcgacatcctcggccgcaacaacatcgccgccgtgcacggcccgctccaccgcctcatgcgcggcgccatgctcggcctcgtccgccccgccgcgctccgcaccagcctcctccccaagatcgacgccttcatgcgcgaccacctccatggatgggcaggcagtgtcgtcgacgtccaggccaagaccaaggagatggccttgctgtccgcactccagcagatcgccggcatcacggctggcccactctctgacgccctcaaaacagagctatgcagcctggtgctcggcaccatctcgttgccgatcaaccttccgggaaccagctactaccagggcttccaggcaaggacgaagcttgtgtccatgctagagcagatgatcgcggagcggcggtcctctggtgatgctcacgatgacatgctggatgctctcttgagaagcggcgacgatgggacccgggagaaactcactgatgagcagatcatcgacttgctcatcgccctcatctactctggatacgagacgatgtcgaccacttcgatgatggctgtcaagtacctgtcggaccacccgcgagctcttgatgaactcaggagagagcatcttgatatcaggaaggggaaatcgccggaggaagccatcagttatgaagatttgaagtccatggccttcactcgagctgtcatttctgagacactaagattagctacagtcgtcaatgggctcctgaggaaaacaactcaggatgtggaaatgaatgggtatgtcattccaaaagggtggagaatctatgtttacaccagggagataaactacgacccattcatgtatcctgacccgatgactttcaatccgtggaggtggctggagaagaacatggaatcgcacccgcacttcatgttgttcggaggaggcggccggatgtgccccggaaaggaggtgggcacggccgagatcgcgacttttctccactatttcgtgacccgatacagatggcaggaagaaggcaagaacacgatcttgaaattcccccgggtggaggctcccaacgggttacatatccgagttcaagattactgattttgcaacatacattttgcagagtttaggtagatagggcccagactgaggcgacgagagtgcgattctgcaccgacggaaagattagatcagccttgtaagaaaataggaaacataggtatagtgtaggtattataggtttagtaggcaattgacgtagaaggccacaagaggcaactatgttcttccttgtgatcaattacatatgcatgataagcatcacaaaatatatgtgatatgtctggtgacttgaatctgataagcagttatacatatatgtgtatatctggtgccttgaatcgatgataagcagcaccatatatacgagatatgaggtgactt

SEQ ID NO: 28734 - protein, 475 aa, Triticum aestivum
MALLLLVLVGVVVGVVLASSLLLRWNEVRYGNGRRKDGDGCLPPGTMGWPLFGETTEFLKQGPSFMKQRRLRYGRLFRTHILGCPTVVCMDPELNRRMLLQGESGGLVPGYPQSMLDILGRNNIAAVHGPLHRLMRGAMLGLVRPAALRTSLLPKIDAFMRDHLHGWAGSVVDVQAKTKEMALLSALQQIAGITAGPLSDALKTELCSLVLGTISLPINLPGTSYYQGFQARTKLVSMLEQMIAERRSSGDAHDDMLDALLRSGDDGTREKLTDEQIIDLLIALIYSGYETMSTTSMMAVKYLSDHPRALDELRREHLDIRKGKSPEEAISYEDLKSMAFTRAVISETLRLATVVNGLLRKTTQDVEMNGYVIPKGWRIYVYTREINYDPFMYPDPMTFNPWRWLEKNMESHPHFMLFGGGGRMCPGKEVGTAEIATFLHYFVTRYRWQEEGKNTILKFPRVEAPNGLHIRVQDY

SEQ ID NO: 28735 - protein, 429 aa, Triticum aestivum
MGWPLFGETTEFLKQGPSFMKQRRLRYGRLFRTHILGCPTVVCMDPELNRRMLLQGESGGLVPGYPQSMLDILGRNNIAAVHGPLHRLMRGAMLGLVRPAALRTSLLPKIDAFMRDHLHGWAGSVVDVQAKTKEMALLSALQQIAGITAGPLSDALKTELCSLVLGTISLPINLPGTSYYQGFQARTKLVSMLEQMIAERRSSGDAHDDMLDALLRSGDDGTREKLTDEQIIDLLIALIYSGYETMSTTSMMAVKYLSDHPRALDELRREHLDIRKGKSPEEAISYEDLKSMAFTRAVISETLRLATVVNGLLRKTTQDVEMNGYVIPKGWRIYVYTREINYDPFMYPDPMTFNPWRWLEKNMESHPHFMLFGGGGRMCPGKEVGTAEIATFLHYFVTRYRWQEEGKNTILKFPRVEAPNGLHIRVQDY

SEQ ID NO: 28736 - protein, 410 aa, Triticum aestivum
MKQRRLRYGRLFRTHILGCPTVVCMDPELNRRMLLQGESGGLVPGYPQSMLDILGRNNIAAVHGPLHRLMRGAMLGLVRPAALRTSLLPKIDAFMRDHLHGWAGSVVDVQAKTKEMALLSALQQIAGITAGPLSDALKTELCSLVLGTISLPINLPGTSYYQGFQARTKLVSMLEQMIAERRSSGDAHDDMLDALLRSGDDGTREKLTDEQIIDLLIALIYSGYETMSTTSMMAVKYLSDHPRALDELRREHLDIRKGKSPEEAISYEDLKSMAFTRAVISETLRLATVVNGLLRKTTQDVEMNGYVIPKGWRIYVYTREINYDPFMYPDPMTFNPWRWLEKNMESHPHFMLFGGGGRMCPGKEVGTAEIATFLHYFVTRYRWQEEGKNTILKFPRVEAPNGLHIRVQDY

SEQ ID NO: 28737 - DNA, 674 bp, Triticum aestivum
tttttttggttggttgatgcaaagttgcctagctacgcttgcagattaactatcaagccccatggtcgttgtcgtctacttataagcatccattgctggaccgtcagaccttcaagtagctaggagctccagttggtttgcttgctttgattggcgatgaacggtgcggcgctagacaacgtgatccggcggctgctggaggtgcggcgggggcggccggggaagcagcaagtgcagcaggtgcagctgggcgagggggagatccggcagctctgcgccgccgccaaggacgtcttcatgcgccagcccaacctgctccagctcgacgcccccatcaagatcgccggtgacatccacggtcagtacacggacctgctgcggctgtttgagctgggcggcttcccgccgcagcacaagtacctgttcctgggcgactacgtggaccgcggcaagcagagcatcgagaccatctgcctgctgctcgcctacaagctccggtacccggagcacttcttcctcctccgcggcaaccacgagtgcgcctccgtcaaccgcgtctacggcttctacgacgagtgcaagcgccgctactccgtccgtctctggcgccacttctccgactgcttcaactgcatgcccgtcgccgccctcgtcgagtcgcgcatcctctgcat

SEQ ID NO: 28738 - protein, 172 aa, Triticum aestivum
MNGAALDNVIRRLLEVRRGRPGKQQVQQVQLGEGEIRQLCAAAKDVFMRQPNLLQLDAPIKIAGDIHGQYTDLLRLFELGGFPPQHKYLFLGDYVDRGKQSIETICLLLAYKLRYPEHFFLLRGNHECASVNRVYGFYDECKRRYSVRLWRHFSDCFNCMPVAALVESRILC

SEQ ID NO: 28739 - protein, 125 aa, Triticum aestivum
MRQPNLLQLDAPIKIAGDIHGQYTDLLRLFELGGFPPQHKYLFLGDYVDRGKQSIETICLLLAYKLRYPEHFFLLRGNHECASVNRVYGFYDECKRRYSVRLWRHFSDCFNCMPVAALVESRILC

SEQ ID NO: 28740 - DNA, 1297 bp, Triticum aestivum
aacggagagaatggccggcgacgtcgcgcgcagggagctccgggcgcgcgtgggggcgatgccgtgggcggtgcggctccagctgcgcgcgctcgaggccgccgtcgacgccacgcagcgccgggacggcaccgtcaaccgcttcctcttctcgctgctcgtggaccgccaggcgcccgccaaccccgcgcgcgccgacgccgggggcgtccgctccgtggacgtcaccgtcgacgcgtccaccggcgtgcgggcccgcgtctactttacggccggggcgggggcggaggcagacgcgtcgccgcgccccgtgatcgtctacttccacggcggcggcttcacggtgttctccgcggccacccggccctacgacgagctctgccgcaccatgtgccgcgagacgggcgccgtcgtcgtgtccgtgacctaccgcctcgcgcccgagcaccgctaccccgcggcctacgacgacggggaggccgccctccggtacctcgccaccaccggcctgcccgccgaggtccccgtccgcgtcgacctctcccgctgcttcctcgccggcgacagcgccggcgccaacatcgcgcaccacgtggcccagcgctggacggcggcacccgcgacaacgcctccagccgtccacctcgccggcctcctgctcctgtcctcctacttcggcggagaggaccggaccgagtcggagcaagcgctggagggcgtggccccgatcgtgaacctccgccggtccgacttctggtggaaggcgtacttgccggagggcgccgaccgaaaccacccggccgcgcacgtgacgggcgaggccggcccggagccggagctgccggatgcgttcccgcgggcgatggtggtcgtcggcgggctcgacccgctccaggactgggggaggcggtacgccggcatgctgcgccggaagggcaaggaggtgcgcgtgatggagttcacggaggctgtacacgccttctacttcttcccggcgctgcccgagaccggcaagctcgtcgcggagatctcggcgttcgtggagagcaccgcgccgagctcgaccgcctagagaactagagacgatgattaggacaactcgtcgtggatctcgtacgtccccgtctctgctgatgttatattgttggctgatagcctatttcactgtcgaagtcgctgcgagcagccgcgtctgttaaattattacactgtggtgtataagttcgagttgccatctcgatattttctttgtgcaacatgtggcatgggtgatggggacatggcagtgatggcacct

SEQ ID NO: 28741 - protein, 359 aa, Triticum aestivum
NGENGRRRRAQGAPGARGGDAVGGAAPAARARGRRRRHAAPGRHRQPLPLLAARGPPGARQPRARRRRGRPLRGRHRRRVHRRAGPRLLYGRGGGGGRRVAAPRDRLLPRRRLHGVLRGHPALRRALPHHVPRDGRRRRVRDLPPRARAPLPRGLRRRGGRPPVPRHHRPARRGPRPRRPLPLLPRRRQRRRQHRAPRGPALDGGTRDNASSRPPRRPPAPVLLLRRRGPDRVGASAGGRGPDREPPPVRLLVEGVLAGGRRPKPPGRARDGRGRPGAGAAGCVPAGDGGRRRARPAPGLGEAVRRHAAPEGQGGARDGVHGGCTRLLLLPGAARDRQARRGDLGVRGEHRAELDRLEN

SEQ ID NO: 28742 - protein, 356 aa, Triticum aestivum
TERMAGDVARRELRARVGAMPWAVRLQLRALEAAVDATQRRDGTVNRFLFSLLVDRQAPANPARADAGGVRSVDVTVDASTGVRARVYFTAGAGAEADASPRPVIVYFHGGGFTVFSAATRPYDELCRTMCRETGAVVVSVTYRLAPEHRYPAAYDDGEAALRYLATTGLPAEVPVRVDLSRCFLAGDSAGANIAHHVAQRWTAAPATTPPAVHLAGLLLLSSYFGGEDRTESEQALEGVAPIVNLRRSDFWWKAYLPEGADRNHPAAHVTGEAGPEPELPDAFPRAMVVVGGLDPLQDWGRRYAGMLRRKGKEVRVMEFTEAVHAFYFFPALPETGKLVAEISAFVESTAPSSTA

SEQ ID NO: 28743 - protein, 353 aa, Triticum aestivum
MAGDVARRELRARVGAMPWAVRLQLRALEAAVDATQRRDGTVNRFLFSLLVDRQAPANPARADAGGVRSVDVTVDASTGVRARVYFTAGAGAEADASPRPVIVYFHGGGFTVFSAATRPYDELCRTMCRETGAVVVSVTYRLAPEHRYPAAYDDGEAALRYLATTGLPAEVPVRVDLSRCFLAGDSAGANIAHHVAQRWTAAPATTPPAVHLAGLLLLSSYFGGEDRTESEQALEGVAPIVNLRRSDFWWKAYLPEGADRNHPAAHVTGEAGPEPELPDAFPRAMVVVGGLDPLQDWGRRYAGMLRRKGKEVRVMEFTEAVHAFYFFPALPETGKLVAEISAFVESTAPSSTA

SEQ ID NO: 28744 - DNA, 1227 bp, Triticum aestivum
acttcttcttcctcccccatttccgttgtccggcgagcacctatcttatcttgggaggcggaggcggtcgcgatgatgaccatggatctgattggaggatacgggagggcggacgagcaggtggccatccaggaggcggcagcggcggggctgcgcgggatggagcacctcatcctgcagctctcccggaccggcaccagcgagaactcgccggttgggtcgtcggaggcgccggagcagcaggtagactgccgggagatcactgatatgaccgtgtccaagttcaagaaggtgatttctatcctcaaccaccgcactggccacgccaggttccggcgcgggcctgtggtggcgcagtcccagggccccgccgtgtccgagccggcgccggtgagggcatcttcgttgaggtccatgaccttggacttcaccaaggcgtcttccgggtacggaacgacgcgggcttcagcgtctcggccgcgagctcatccttcatgtcgtctgtcaccggtgacgggagcgtgtctaacggacgcgggggcgggtcctcgctgatgctcccgccgccaccttcggccagctgcgggaagccgccgctggcgtcctccgcggcatccaccggcgccggtggcgggcagaagcgcaagtgccacgaccacgcgcactccgagaacgtcgccggcggaaagtacggcgcctccggtggccgctgccactgctccaagcgcaggaagtcccgggttcggcggatgactcgcgtgccggcaatcagctcgaaggcggcggagatccccgcggacgacttctcgtggcgcaagtacgggcagaagccgatcaagggctccccctacccacgaggttactacaagtgcagcacggtgcgcgggtgcccggcgcggaagcacgtggagcgcgaccccagcgacccctccatgctcatcgtgacctacgagggcgagcaccggcacacccctgcggaccaggagcccctcgccccgctcccggagctctgaaatctctttgccattaccgtcgtcctcgccatgttaattcaacttagcttatcaccatgttcccttcgttactgctagctaccatatattattgctaataagcaagtagaatttctttttcttttggccgcatcagtttagtcgcagtaagcatgttgtaaaagagcaagtgtagttggaagctttgagctttgaagaagaaaaagtgcgtggt

SEQ ID NO: 28745 - protein, 184 aa, Triticum aestivum
TSSSSPISVVRRAPILSWEAEAVAMMTMDLIGGYGRADEQVAIQEAAAAGLRGMEHLILQLSRTGTSENSPVGSSEAPEQQVDCREITDMTVSKFKKVISILNHRTGHARFRRGPVVAQSQGPAVSEPAPVRASSLRSMTLDFTKASSGYGTTRASASRPRAHPSCRLSPVTGACLTDAGAGPR

SEQ ID NO: 28746 - protein, 172 aa, Triticum aestivum
MSSVTGDGSVSNGRGGGSSLMLPPPPSASCGKPPLASSAASTGAGGGQKRKCHDHAHSENVAGGKYGASGGRCHCSKRRKSRVRRMTRVPAISSKAAEIPADDFSWRKYGQKPIKGSPYPRGYYKCSTVRGCPARKHVERDPSDPSMLIVTYEGEHRHTPADQEPLAPLPEL

SEQ ID NO: 28747 - protein, 160 aa, Triticum aestivum
MMTMDLIGGYGRADEQVAIQEAAAAGLRGMEHLILQLSRTGTSENSPVGSSEAPEQQVDCREITDMTVSKFKKVISILNHRTGHARFRRGPVVAQSQGPAVSEPAPVRASSLRSMTLDFTKASSGYGTTRASASRPRAHPSCRLSPVTGACLTDAGAGPR

SEQ ID NO: 28748 - DNA, 1451 bp, Triticum aestivum
agtgattgggcacacccttctataaacgggacccaagggacgcagtttctcatcgccccgtccagaacctttctccttctgtcccgcaaacccccgagagatcacagcatgttcggcttcggtcaccacggccaccatggccagaacccccctgccaacgctccggccgccggcggcggcaaccagcccaccttcaagatcttctgcaaggccgacgagggctactgcctctccgtccgcgacggcaacgtcgtcctcgccccctccaacccccgcgacgagcaccagcactggttcaaggacatgcgcttcagcacccagatcaaggacgaggaaggtaaccccgccttcgccatcgtcaacaaggccactggtctcgccgtcaagcactccctcggccagtcccacccggtgaagctcgtgccattcaacccggagtacctcgacgagtccgtgatgtggacggagagcggcgacgtcggcaagggcttccgctgcattcgcatggtgaacaacatccgcctcaactttgacgccctcaacggcgacaaggaccacggcggcgtgcacgacggcaccaccgtcgtcctctgggagtgggccaagggcgacaaccagagctggaagatcctcccctggggcgaagaggcctacgccggaggcagcgccaacgccccccgcggcggctccacagagcccaccgtgcgcatcttctgcaaggccgacgacggcttcagcgccaccgttcgcaacggcgctgtggtcctcgcgcccaccaacccccgcgacgagtaccagcactggttcaaggacatgaggcacagcaaccgcatcaaggatgaggaaggctacccggccttcgccctcgtcaacaaggtgacaggcgaggccatcaagcactcccaaggcgagggccacccggtgaagctggtgccatacaacgccaactaccaggacgagtcagtgttgtggactgagagccgcgacgtgggcgccggcttccggtgcatccgcatggtgaacaacatctacctcaactttgacgctctccacggcgacaaggagcacggcggcgtgcgcgacggcacctccctcgtgctgtggaagtggtgtgagggcgacaaccagcgctggaagatcctcccctggtaaacgtgtcatgctgctgaagctgagttgatcgccaccgtgacccggagtttggtagagatcggcctgtgatctgttgccgtgtcggtagaataaaagtcgtgtgcggtcggcggtggtgatgtgtccgtgagtgtgtgtgcttagtttctgtcctgtcgttgtgtcctgctatggcgagctatccgatgtaataagcatttggcacttgtgcttgtttttcaaaccatggatccgtgatgacaacctctgtactgtggtgcaatcctttcatctatgcgaatggtctttattgcggtttt

SEQ ID NO: 28749 - protein, 383 aa, Triticum aestivum
SDWAHPSINGTQGTQFLIAPSRTFLLLSRKPPRDHSMFGFGHHGHHGQNPPANAPAAGGGNQPTFKIFCKADEGYCLSVRDGNVVLAPSNPRDEHQHWFKDMRFSTQIKDEEGNPAFAIVNKATGLAVKHSLGQSHPVKLVPFNPEYLDESVMWTESGDVGKGFRCIRMVNNIRLNFDALNGDKDHGGVHDGTTVVLWEWAKGDNQSWKILPWGEEAYAGGSANAPRGGSTEPTVRIFCKADDGFSATVRNGAVVLAPTNPRDEYQHWFKDMRHSNRIKDEEGYPAFALVNKVTGEAIKHSQGEGHPVKLVPYNANYQDESVLWTESRDVGAGFRCIRMVNNIYLNFDALHGDKEHGGVRDGTSLVLWKWCEGDNQRWKILPW

SEQ ID NO: 28750 - protein, 347 aa, Triticum aestivum
MFGFGHHGHHGQNPPANAPAAGGGNQPTFKIFCKADEGYCLSVRDGNVVLAPSNPRDEHQHWFKDMRFSTQIKDEEGNPAFAIVNKATGLAVKHSLGQSHPVKLVPFNPEYLDESVMWTESGDVGKGFRCIRMVNNIRLNFDALNGDKDHGGVHDGTTVVLWEWAKGDNQSWKILPWGEEAYAGGSANAPRGGSTEPTVRIFCKADDGFSATVRNGAVVLAPTNPRDEYQHWFKDMRHSNRIKDEEGYPAFALVNKVTGEAIKHSQGEGHPVKLVPYNANYQDESVLWTESRDVGAGFRCIRMVNNIYLNFDALHGDKEHGGVRDGTSLVLWKWCEGDNQRWKILPW

SEQ ID NO: 28751 - protein, 282 aa, Triticum aestivum
MRFSTQIKDEEGNPAFAIVNKATGLAVKHSLGQSHPVKLVPFNPEYLDESVMWTESGDVGKGFRCIRMVNNIRLNFDALNGDKDHGGVHDGTTVVLWEWAKGDNQSWKILPWGEEAYAGGSANAPRGGSTEPTVRIFCKADDGFSATVRNGAVVLAPTNPRDEYQHWFKDMRHSNRIKDEEGYPAFALVNKVTGEAIKHSQGEGHPVKLVPYNANYQDESVLWTESRDVGAGFRCIRMVNNIYLNFDALHGDKEHGGVRDGTSLVLWKWCEGDNQRWKILPW

SEQ ID NO: 28752 - DNA, 548 bp, Triticum aestivum
aaaaaaaagtggggcgaggaagaaaccgaaacactcacacagaacaccacaccccccaccccggcgacacaccacccctcccgccccaaatctcagatcagagcgccgggagatctgccatttccgggtggagggatcgagccccgcgcttctcgattaaatcctgggctctgtatcttgtgtggatggcatttgtgcctcagagactgtagctcaccaagtgttgatttgaacctgtgaagatagagatgggttctccgagaaaatccgacaagaaggccgccttagactttgcagcatggggtttcaatatcacctcatccgttgggatcatcatggtcaacaaagccctaatggctacacatggattcagttttgccacaacattaactggccttcatttattgacaacgaccttgatgactattgtgtttcggtggttaggcctgagccagccctctcacttaccgctaccagatctgattaagttcgtaatcttttcaaatttgtcgatcgttggcatgaatgtgagcttgatgtggaattct

SEQ ID NO: 28753 - protein, 100 aa, Triticum aestivum
MGSPRKSDKKAALDFAAWGFNITSSVGIIMVNKALMATHGFSFATTLTGLHLLTTTLMTIVFRWLGLSQPSHLPLPDLIKFVIFSNLSIVGMNVSLMWNS

SEQ ID NO: 28754 - protein, 79 aa, Triticum aestivum
KKKWGEEETETLTQNTTPPTPATHHPSRPKSQIRAPGDLPFPGGGIEPRASRLNPGLCILCGWHLCLRDCSSPSVDLNL

SEQ ID NO: 28755 - protein, 71 aa, Triticum aestivum
MVNKALMATHGFSFATTLTGLHLLTTTLMTIVFRWLGLSQPSHLPLPDLIKFVIFSNLSIVGMNVSLMWNS

SEQ ID NO: 28756 - DNA, 1016 bp, Triticum aestivum
attttatttcccacccctgaatcccaagcccaattcccacacgccttcggccgaaacccccgaatcaggagccccatccacgccgcggcgtctctccagctctgaggcccgaccctccatggcctcctccaaccccagctccggcgccaccgccgccgacgacctcgaccagctcctcgacagcgccctcgatgacttcaccagcctcgatctcgccgccgcccccaaaagcagcggcgaggcatcggcatcgtcgtcgtccgggagcgcgaggccggtgaagggtctggggatgtcgctgcctgaccccagggcgccaaggaggcgggcggcgaggcaacccccgccgccgccgaggggcgcgcacgcgtcggaggcgctcgagaagctgacgcgcgagacgcgggaggcggtccggggcctcgagacggccaccggggggatcgcaggcctggatgacgaggcgatgatggaggactttgtgaagcagttcgaggagttcgctggcgcgcaggatatggattctattgttgaaacaatgatgaaacaacttctttccaaggagattctttacgaacccatgaaggacattgtagagaagtacccaaaatggctggaggataacaaaagcaagataagcaaagaagaatatgagcgttacagcaatcagcttgaactcatgctgaaacttaatgaggtctatgaacatgagcctgagaatatgtctaaggtttttgagatcatgcaaaacatgcaagaatgtggtcagccccccagtgatcttgttcaagatattgttccggatctggatctgagcaagttgggacaactatctcctgagatgcttgaatcaacagaaaattgctgcataatgtgatgagcaaagcccatcttgggtgcaaattccatgtagtagcgacaatacctgtaaccactccccttttagttgaaagttcttttcgttggattatttgtaaagctctgcagatataaaacggattcagttttcttattct

SEQ ID NO: 28757 - protein, 291 aa, Triticum aestivum
FYFPPLNPKPNSHTPSAETPESGAPSTPRRLSSSEARPSMASSNPSSGATAADDLDQLLDSALDDFTSLDLAAAPKSSGEASASSSSGSARPVKGLGMSLPDPRAPRRRAARQPPPPPRGAHASEALEKLTRETREAVRGLETATGGIAGLDDEAMMEDFVKQFEEFAGAQDMDSIVETMMKQLLSKEILYEPMKDIVEKYPKWLEDNKSKISKEEYERYSNQLELMLKLNEVYEHEPENMSKVFEIMQNMQECGQPPSDLVQDIVPDLDLSKLGQLSPEMLESTENCCIM

SEQ ID NO: 28758 - protein, 252 aa, Triticum aestivum
MASSNPSSGATAADDLDQLLDSALDDFTSLDLAAAPKSSGEASASSSSGSARPVKGLGMSLPDPRAPRRRAARQPPPPPRGAHASEALEKLTRETREAVRGLETATGGIAGLDDEAMMEDFVKQFEEFAGAQDMDSIVETMMKQLLSKEILYEPMKDIVEKYPKWLEDNKSKISKEEYERYSNQLELMLKLNEVYEHEPENMSKVFEIMQNMQECGQPPSDLVQDIVPDLDLSKLGQLSPEMLESTENCCIM

SEQ ID NO: 28759 - protein, 194 aa, Triticum aestivum
MSLPDPRAPRRRAARQPPPPPRGAHASEALEKLTRETREAVRGLETATGGIAGLDDEAMMEDFVKQFEEFAGAQDMDSIVETMMKQLLSKEILYEPMKDIVEKYPKWLEDNKSKISKEEYERYSNQLELMLKLNEVYEHEPENMSKVFEIMQNMQECGQPPSDLVQDIVPDLDLSKLGQLSPEMLESTENCCIM

SEQ ID NO: 28760 - DNA, 1016 bp, Triticum aestivum
atactgaatcacacggaaccttgaggcacacccacgggagaaaatggcagacacaggagacgagctgaagctgctgggcatgtgggcgagcccgtacgtggtcagggtgcagctcgcactccgcctcaagggcgtgagctacgagtacgtcgaggaggacctcgccaacaagagcgagctcttcctccgctccaacccggttcacaagacggtcccgatcctcatccacaacggcaagcccgtctgcgagtcccaggtcatcctccagtacatcgacgaggccttcgccggcgtcggcccgcccctcctccccgccgacccctacgagcgcgccgtcgcgcgcttctgggccgcctacgtcgaggacaagctgctggcgccgtgggggaaggtgttcagggtgaccaccgacgaggagagggccgagtggacgcggcagacggcggcggccctgggtcctctggaggatggcctcagggagtgctccaaggggaaggggttcttcggcggcgactgcgtcgggtacgtcgacgtcctgctcggcagcatggtgccgtgggtgcgcgccaccgagaggctctccggcgacaagttagtcgacgccggcaaggccccgctgctggcggcatggatggaccgcattagcgagctcgacgccgccaaggcggtcttccaggacgtcgacagggtggttgagtacgccgggggaatacagacccggctttccgccgcggctgcaagcacccaataaagcggcatggcgacatggtgcgtggctgatgcaaggagaaaatagccaagtgtgcaattagctgaaattattaaactggccacgtttctgtttcctttttcccgaataatggcgtcgtttctcaggaacacataacatacaagcatgtgatattaccagtttaaaaacttgtgtggtcatcgtgacagctcctcctctgtttttaagggatatttacatttttgtccttggctttgtcacattagtggggtttgtcttttgtttt

SEQ ID NO: 28761 - protein, 235 aa, Triticum aestivum
MADTGDELKLLGMWASPYVVRVQLALRLKGVSYEYVEEDLANKSELFLRSNPVHKTVPILIHNGKPVCESQVILQYIDEAFAGVGPPLLPADPYERAVARFWAAYVEDKLLAPWGKVFRVTTDEERAEWTRQTAAALGPLEDGLRECSKGKGFFGGDCVGYVDVLLGSMVPWVRATERLSGDKLVDAGKAPLLAAWMDRISELDAAKAVFQDVDRVVEYAGGIQTRLSAAAASTQ

SEQ ID NO: 28762 - protein, 223 aa, Triticum aestivum
MWASPYVVRVQLALRLKGVSYEYVEEDLANKSELFLRSNPVHKTVPILIHNGKPVCESQVILQYIDEAFAGVGPPLLPADPYERAVARFWAAYVEDKLLAPWGKVFRVTTDEERAEWTRQTAAALGPLEDGLRECSKGKGFFGGDCVGYVDVLLGSMVPWVRATERLSGDKLVDAGKAPLLAAWMDRISELDAAKAVFQDVDRVVEYAGGIQTRLSAAAASTQ

SEQ ID NO: 28763 - DNA, 927 bp, Triticum aestivum
cccctttcttcttcccccgagagccaactcctcgccgcacccacagccggagagagagagagcgcgaagaaggcaaagcgccgccgcgaggacgaccgaggccgaggagtgatggcgtcgaggacggcgtccaaggacatcatcacgctcaagggctccgccgccatcgtcagcgagttcttcggttacgcggccaacagcatcctgtacaaccgcggggtgtacccggaggagagcttcggcaaggtgaagaagtacggcctccccatgctgctcacgcaggacaaggccgtcaagaccttcctcaccaacctcacctcccagctctcagagtggctggagggtgggaagctgcagaggattgtgctggtcatcatgagcaagggcaccggcgaggtgctcgagcgctggaacttcaacatcatcactgacggcgaggtcgtcgagaaaggggcggtgaaggagaagagcgacaaggagatcatgagggagatccaggccatcatgcggcaggtcaactcctgcatctccttcctcccctgcctcgatgagccatgcatattcgacgtgctggcctacaccgactcggacaccaccgtgcccttcacctggatggagagcgacgccaagctcatcgaaaacccgcagatggtgaagctgcactcgttcgacaccaagatccacaaggtggacacgctggtgtcgtacaaggtggacgacttggacgagcagtgacctgtgggtgtgacccagagcgtccagacatcccctgtaggcgtgaagctctgtgtgaatcgttcattcacgtctggccgtcgttatcgtactgttgcccccctgcctctaccaaaacctgtactgttatttctcaaaaaaaaaagtactgttatgttatacctgaattggatgtatcgcctgccgttttcc

SEQ ID NO: 28764 - protein, 244 aa, Triticum aestivum
PLSSSPESQLLAAPTAGERESAKKAKRRREDDRGRGVMASRTASKDIITLKGSAAIVSEFFGYAANSILYNRGVYPEESFGKVKKYGLPMLLTQDKAVKTFLTNLTSQLSEWLEGGKLQRIVLVIMSKGTGEVLERWNFNIITDGEVVEKGAVKEKSDKEIMREIQAIMRQVNSCISFLPCLDEPCIFDVLAYTDSDTTVPFTWMESDAKLIENPQMVKLHSFDTKIHKVDTLVSYKVDDLDEQ

SEQ ID NO: 28765 - protein, 207 aa, Triticum aestivum
MASRTASKDIITLKGSAAIVSEFFGYAANSILYNRGVYPEESFGKVKKYGLPMLLTQDKAVKTFLTNLTSQLSEWLEGGKLQRIVLVIMSKGTGEVLERWNFNIITDGEVVEKGAVKEKSDKEIMREIQAIMRQVNSCISFLPCLDEPCIFDVLAYTDSDTTVPFTWMESDAKLIENPQMVKLHSFDTKIHKVDTLVSYKVDDLDEQ

SEQ ID NO: 28766 - protein, 155 aa, Triticum aestivum
MLLTQDKAVKTFLTNLTSQLSEWLEGGKLQRIVLVIMSKGTGEVLERWNFNIITDGEVVEKGAVKEKSDKEIMREIQAIMRQVNSCISFLPCLDEPCIFDVLAYTDSDTTVPFTWMESDAKLIENPQMVKLHSFDTKIHKVDTLVSYKVDDLDEQ

SEQ ID NO: 28767 - DNA, 562 bp, Triticum aestivum
acgcactccgaagcagaggagaacgaaggagagacagagtgatcgagcgtacgtgaagagacacgcttgaacttgatggaagccgccgcgggtcagggagagcgcccgacgccgccgccgctgccgctgggggtgcggctccagctggcgggcctcacggccgccatcgacgccgtggagcgcagcgacggcaccgtcaaccgctgcctctactcggtgatcgaccggctgctgagcgcgcgcgccaacccgcgcccggacggctccggcgtgcgctcctacgacttcaccgtcgacgcctcccgcggcatctgggcgcgcgtcttcgcgccggtctcctcggcggtgccgctgcccgtcgtcgtctactaccacggcggtggcttcgcgctcttctccccggccatcggccccttcaacggcgtgtgccgccgcctctgcagcgacgtcggcgccgtggtcgtgtccgtcaactaccgcctcgccccggagcaccgctacccggcggcgtacgacgacggcgtcgacgcgctccgcttcctcgacgacgccggcggcgtcc

SEQ ID NO: 28768 - protein, 162 aa, Triticum aestivum
MEAAAGQGERPTPPPLPLGVRLQLAGLTAAIDAVERSDGTVNRCLYSVIDRLLSARANPRPDGSGVRSYDFTVDASRGIWARVFAPVSSAVPLPVVVYYHGGGFALFSPAIGPFNGVCRRLCSDVGAVVVSVNYRLAPEHRYPAAYDDGVDALRFLDDAGGV

SEQ ID NO: 28769 - DNA, 549 bp, Triticum aestivum
cgaaaacagtccagactacacccggtgagcgccctttccctcttccccgacctcccatcccttctccgtgcgttcgccgctgctttgccctagctgggtggcaggcggcccacgaaattcttggacagagattagtagatttcccggccccggccgggggaagataaggatagtctccttcggcgaggttggaattaggccccactgagcgcccccagccatgagttgcgggagatctgaaaacactaccagaaaatgcaggacgcgttcaacacctggtgaaacgatgtatctacatactgcagatgctaaaaagatcacccactaccaagctaatctaccaacaacaatggatcgcgatatcggcgcctaccctgtgaagcaccactttccgtctcctatagtttcttggatagaagacctttctagctttggcgatgttccttttagtcatgatactgaatacgtggatgatcaatcaacaccttcatttgggcagtcttttgcatctagcaatttgcatgacatgcaaatatcagtgagattgac

SEQ ID NO: 28770 - protein, 109 aa, Triticum aestivum
MSCGRSENTTRKCRTRSTPGETMYLHTADAKKITHYQANLPTTMDRDIGAYPVKHHFPSPIVSWIEDLSSFGDVPFSHDTEYVDDQSTPSFGQSFASSNLHDMQISVRL

SEQ ID NO: 28771 - protein, 87 aa, Triticum aestivum
MYLHTADAKKITHYQANLPTTMDRDIGAYPVKHHFPSPIVSWIEDLSSFGDVPFSHDTEYVDDQSTPSFGQSFASSNLHDMQISVRL

SEQ ID NO: 28772 - protein, 66 aa, Triticum aestivum
MDRDIGAYPVKHHFPSPIVSWIEDLSSFGDVPFSHDTEYVDDQSTPSFGQSFASSNLHDMQISVRL

SEQ ID NO: 28773 - DNA, 1400 bp, Triticum aestivum
  misc_feature (900)..(900): n is a, c, g, or t
atcgaataattaatcccgaggcgtcttgaaaaatatatcccaggatggcgatgtcgacggcgacgcggatgctggcgcgccgcgccgcccccgccctcctccgctccgccgccagccccggcctcctccgctcccccgccgccggcacaggccccagccccgccctcgcgctgccggcgctgctgcaggcgcaaggccggtggtaccgcgcatcaggaggggacccgtcaccgtcgttctacgagccgccgccgaccccggccaacctgggcctgagcatcgtcccggagaagaaggcgttcgtggtggagcgctttggcaagtacctcaagacactgtcgtcggggatccacctcctgatgcccggcgtggaccgcatcgcctacgtgcactcgctcaaggaggaggcaatccccatcccggacaactcggcaatcacaaaggacaacgtctcgatacagatcggaggagtgctatacgtcaagatcgtcgacccctacaaggcctcgtacggcgtggagaaccccatctatgctgtcatccagcttgcgcagacaaccatgaggagtgaacttggcaagattaccctcgacaagacctttgaggagagggacacgctcaacaccaacattgtgaagtcaatcaatgaggcagcagaaacttggggtttgaagtgtcttcgctacgaaatcagggacatcactcctccagatggagtcaagaaggccatggagatgcaggcagcagcagagcgcaagaaacgtgctcagatcctcgagtctgaaggtgctatgatggagaatgcaaacaaagcaaagggtgaagctgaagcgattcttgccaggtcacaggccactgctgaagggatcaggatggtctcggagtcgtttaaaactgaangcagcacagaggctggcagcttgaggattgctgaacagtacatcagagcattcagtgaactggctagaaatacgaacacgatgcttcttcccagagacgcagtcacaccggggccaatgattgctcagggccctccagatatgcacccacacgtacaagcagaaactgaccctgggaagccccagccccagccagcggggggcggtggcggcagaagaggctgatttgcccctcgggatgccatccatgagcgacctcggggcctttccgcacaagaagtaaagtagtgagtgtggaatcttgttgatgaggccctttttttttcttcttcttttctgttagggaggaatgaatagctagactggatagatagattggtagggaggcagcgcaactttgtcatgagtgaagatttactgattaggtcggtcgtttggtcggataaaacacaatactctgttggttagggacagctttgagagcaagctttttgtctgtct

SEQ ID NO: 28774 - protein, 359 aa, Triticum aestivum
  misc_feature (286)..(286): Xaa can be any naturally occurring amino acid
MAMSTATRMLARRAAPALLRSAASPGLLRSPAAGTGPSPALALPALLQAQGRWYRASGGDPSPSFYEPPPTPANLGLSIVPEKKAFVVERFGKYLKTLSSGIHLLMPGVDRIAYVHSLKEEAIPIPDNSAITKDNVSIQIGGVLYVKIVDPYKASYGVENPIYAVIQLAQTTMRSELGKITLDKTFEERDTLNTNIVKSINEAAETWGLKCLRYEIRDITPPDGVKKAMEMQAAAERKKRAQILESEGAMMENANKAKGEAEAILARSQATAEGIRMVSESFKTEXSTEAGSLRIAEQYIRAFSELARNTNTMLLPRDAVTPGPMIAQGPPDMHPHVQAETDPGKPQPQPAGGGGGRRG

SEQ ID NO: 28775 - protein, 357 aa, Triticum aestivum
  misc_feature (284)..(284): Xaa can be any naturally occurring amino acid
MSTATRMLARRAAPALLRSAASPGLLRSPAAGTGPSPALALPALLQAQGRWYRASGGDPSPSFYEPPPTPANLGLSIVPEKKAFVVERFGKYLKTLSSGIHLLMPGVDRIAYVHSLKEEAIPIPDNSAITKDNVSIQIGGVLYVKIVDPYKASYGVENPIYAVIQLAQTTMRSELGKITLDKTFEERDTLNTNIVKSINEAAETWGLKCLRYEIRDITPPDGVKKAMEMQAAAERKKRAQILESEGAMMENANKAKGEAEAILARSQATAEGIRMVSESFKTEXSTEAGSLRIAEQYIRAFSELARNTNTMLLPRDAVTPGPMIAQGPPDMHPHVQAETDPGKPQPQPAGGGGGRRG

SEQ ID NO: 28776 - protein, 351 aa, Triticum aestivum
  misc_feature (278)..(278): Xaa can be any naturally occurring amino acid
MLARRAAPALLRSAASPGLLRSPAAGTGPSPALALPALLQAQGRWYRASGGDPSPSFYEPPPTPANLGLSIVPEKKAFVVERFGKYLKTLSSGIHLLMPGVDRIAYVHSLKEEAIPIPDNSAITKDNVSIQIGGVLYVKIVDPYKASYGVENPIYAVIQLAQTTMRSELGKITLDKTFEERDTLNTNIVKSINEAAETWGLKCLRYEIRDITPPDGVKKAMEMQAAAERKKRAQILESEGAMMENANKAKGEAEAILARSQATAEGIRMVSESFKTEXSTEAGSLRIAEQYIRAFSELARNTNTMLLPRDAVTPGPMIAQGPPDMHPHVQAETDPGKPQPQPAGGGGGRRG

SEQ ID NO: 28777 - DNA, 755 bp, Triticum aestivum
ctcctctttctcggtttcctcttcagcttctctccttggttcagatcgtattttcagatcaggaaaaaaaaggagagatgaaggaggcgacggcgtcggggggcggcgcgacggcgggggcgaacgacccgaggcagccggggacggcgaggccgtacgcgccgcccaagctgtcgtcgcaggacctgcccgtcgactacgcgggcttcctcgccgtcgtcttcggcgtcgtcggcgtcatgctccactacaaggtttgctcgtggatcgccatcatcttctgcgcgcagtcgctggcaaacatgaagaacttcgagaatgacctcaagcagctctccatggctttcatgtttgctgtcatgggtttggtgacgaactatttcgggcctcgcccaggcggcacaaagcgctgatctgcataccatgcgccgtatgaagtttcctgttcaatttttggtgcctcggagccactggcatggtggtgcccacccacatttctgaatccttgagtcaggcaggtgtcaaatgtaccacctcatttgtagggaccaagacatgtatcatgatgctcagtaatctatttgcacggtacctgctcctccagttatgttttaaagatagttgaagggcctttgcctacatcaccacatcgatcaatcccctgtgagcttgtggttttgtattgttttatttatcggagtagcaatcacttccattctcatgcatgatcaagatcaaatattgttgatgtggtc

SEQ ID NO: 28778 - protein, 136 aa, Triticum aestivum
PLSRFPLQLLSLVQIVFSDQEKKGEMKEATASGGGATAGANDPRQPGTARPYAPPKLSSQDLPVDYAGFLAVVFGVVGVMLHYKVCSWIAIIFCAQSLANMKNFENDLKQLSMAFMFAVMGLVTNYFGPRPGGTKR

SEQ ID NO: 28779 - protein, 111 aa, Triticum aestivum
MKEATASGGGATAGANDPRQPGTARPYAPPKLSSQDLPVDYAGFLAVVFGVVGVMLHYKVCSWIAIIFCAQSLANMKNFENDLKQLSMAFMFAVMGLVTNYFGPRPGGTKR

SEQ ID NO: 28780 - protein, 106 aa, Triticum aestivum
SSFSVSSSASLLGSDRIFRSGKKRRDEGGDGVGGRRDGGGERPEAAGDGEAVRAAQAVVAGPARRLRGLPRRRLRRRRRHAPLQGLLVDRHHLLRAVAGKHEELRE

SEQ ID NO: 28781 - DNA, 1022 bp, Triticum aestivum
aaaaacaacagacagcgcatttcctcgaacacctagcctccctccatggccacctccgccctcgccaccctctcggccaccgccgccgccgcgggggccaggcgcgtcctcctctcgcgcggccccgcctcctccctctctttcgcctcccgccgcctcgcgcccgcggggcccctccgcgccgggcccctgccccgcgcggcgacgcgggtcctctccgcgaccgcgtccccggccgccacaaccaccatcgcggtcggcgaccggctccccgacgcgacgctctcctacttcgacgcccccgacggcgagctgaagatggtgacggtccgcgacctcaccgcgggcaagaaggtggtcctgttcgcggtcccgggcgcgttcacgcccacctgcacccagaagcacctcccggggttcgtggccagggccggggagctgcgcgccaagggggtggacaccgtggcctgcgtctccgtcaacgacgccttcgtgatgcgcgcgtggaaggagagcctcggcgtcggcgacgaggtgctgctgctgtcggacggcaacggggagctgacgcgcgccatgggcgtggagctggacctgtcggacaagccggtggggctcggcgtccggtcgcgccgctacgcgctgctggccgacgacggcgtggtcaaggtgctcaacctcgaggagggcggcgccttcaccaacagcagcgctgaggacatgctcaaggcgctctgaggcctgaaccgcgaccctctccgctcgcgccacggctatcgtcgtgacgtcgtcagctcggttcgtcctctgttttactgaaggcctttttttgcttcgtttttcctgaataataataataatcggtgcggcagcggcggcctggtctgtgtttgctgctgctgctgtcaccttgatgtgcggtggcgagtactgagtagtgcaacgtagctttgtgaagtttgtggagaactatgagtcgtggccgtgtcctggtttgcaacctggcatggcatggaatatct

SEQ ID NO: 28782 - protein, 237 aa, Triticum aestivum
KQQTAHFLEHLASLHGHLRPRHPLGHRRRRGGQARPPLARPRLLPLFRLPPPRARGAPPRRAPAPRGDAGPLRDRVPGRHNHHRGRRPAPRRDALLLRRPRRRAEDGDGPRPHRGQEGGPVRGPGRVHAHLHPEAPPGVRGQGRGAARQGGGHRGLRLRQRRLRDARVEGEPRRRRRGAAAVGRQRGADARHGRGAGPVGQAGGARRPVAPLRAAGRRRRGQGAQPRGGRRLHQQQR

SEQ ID NO: 28783 - protein, 230 aa, Triticum aestivum
MATSALATLSATAAAAGARRVLLSRGPASSLSFASRRLAPAGPLRAGPLPRAATRVLSATASPAATTTIAVGDRLPDATLSYFDAPDGELKMVTVRDLTAGKKVVLFAVPGAFTPTCTQKHLPGFVARAGELRAKGVDTVACVSVNDAFVMRAWKESLGVGDEVLLLSDGNGELTRAMGVELDLSDKPVGLGVRSRRYALLADDGVVKVLNLEEGGAFTNSSAEDMLKAL

SEQ ID NO: 28784 - protein, 139 aa, Triticum aestivum
MVTVRDLTAGKKVVLFAVPGAFTPTCTQKHLPGFVARAGELRAKGVDTVACVSVNDAFVMRAWKESLGVGDEVLLLSDGNGELTRAMGVELDLSDKPVGLGVRSRRYALLADDGVVKVLNLEEGGAFTNSSAEDMLKAL

SEQ ID NO: 28785 - DNA, 678 bp, Triticum aestivum
tagaatcactcgttccctgtccctcttcctgtgtgcggcgccgccgccgcgcacaggccacatctcctcgccctcttcctgatgtcgagtcgaggcaccagatcttcaaagcttgcctcaggaagtctcctctggccaaggatattgatctgagtgctctggccaagtacacccaagggttcagcggtgctgatatcacggaaatttgccagcgtgcttgcaaatacgccatcagggagaacatcgagaaggacatcgagagggagaggaggaggaaggacaaccctgaagccatggaggaggatgaggtggatgaggtcgctgagatcagggctgctcacttcgaggagtcgatgaagtatgcacgcaggagtgtgagcgatgccgacatccgcaagtaccaggcccttgcccagactctgcagcagtctcgtggtttcggcagcgagttccggttccctgatcagccggccgcgggccccgcctcttctgctgccgccgacccttttgcatccgctgccgcagcagctgaagatgacgacttatatagctaaattctcgttgttgtgcccttcacttacccgtgttttccttcgtatactgttatgttttgctctggtatgcaagacacggtcaaactatgtacttaaaattattattgggatgcactgatattcg

SEQ ID NO: 28786 - protein, 183 aa, Triticum aestivum
ESLVPCPSSCVRRRRRAQATSPRPLPDVESRHQIFKACLRKSPLAKDIDLSALAKYTQGFSGADITEICQRACKYAIRENIEKDIERERRRKDNPEAMEEDEVDEVAEIRAAHFEESMKYARRSVSDADIRKYQALAQTLQQSRGFGSEFRFPDQPAAGPASSAAADPFASAAAAAEDDDLYS

SEQ ID NO: 28787 - protein, 96 aa, Triticum aestivum
MPTSASTRPLPRLCSSLVVSAASSGSLISRPRAPPLLLPPTLLHPLPQQLKMTTYIAKFSLLCPSLTRVFLRILLCFALVCKTRSNYVLKIIIGMH

SEQ ID NO: 28788 - protein, 86 aa, Triticum aestivum
MEEDEVDEVAEIRAAHFEESMKYARRSVSDADIRKYQALAQTLQQSRGFGSEFRFPDQPAAGPASSAAADPFASAAAAAEDDDLYS

SEQ ID NO: 28789 - DNA, 858 bp, Triticum aestivum
acacaccggaagagagaaaccccaacgacgacgagggagagaaggaaaggatctcgtgcagctcggccatggcgaaccagggatccaagaagattgtggagaggaacaggaagcgcatggatctcctctggcgcataatcctcgtgtccaacgttatttacatagtagtgaggatggctgtaatgtactcttctttcacctggaagcattggattggcctcgtggtgacatctgctgcatactttctttcatacaagcaactcgctagtatgacaaagcccgaatattctgacgcggacaatcgtgaacttctgagttcgggttatgacttggccactggtgggctttctgaatatatagaggatgtgatatacatcacagcatttgtgcagcttacgtccattatttctggaaaattttggtggacatatctggtgataccagctttcggtggatacaagatcttttttctgttgaaaggaacattcttcggtggtggttcagagggtgaagtcgaagatgagaagtctcgaaagaagagggaaaaaatggagaaaaaggcatctagagggaagatggtgaaaaccaggacccgttgatatgacacatacataccccatgccttggaagagtaggttggtttctcatatcatagctgtccaactagagtgcaagctgttggggagtttgctaacatgaatgatatgattcatgtatcatttgatccgacagctagcacaaatgtcaactaatctttaagttatgatgaataccaccattggtatttgtatatttcctgacccttttggttatgtaaaccaacaatgaggcatggtaacccagacatgttagtgcccc

SEQ ID NO: 28790 - protein, 198 aa, Triticum aestivum
TPEERNPNDDEGEKERISCSSAMANQGSKKIVERNRKRMDLLWRIILVSNVIYIVVRMAVMYSSFTWKHWIGLVVTSAAYFLSYKQLASMTKPEYSDADNRELLSSGYDLATGGLSEYIEDVIYITAFVQLTSIISGKFWWTYLVIPAFGGYKIFFLLKGTFFGGGSEGEVEDEKSRKKREKMEKKASRGKMVKTRTR

SEQ ID NO: 28791 - protein, 176 aa, Triticum aestivum
MANQGSKKIVERNRKRMDLLWRIILVSNVIYIVVRMAVMYSSFTWKHWIGLVVTSAAYFLSYKQLASMTKPEYSDADNRELLSSGYDLATGGLSEYIEDVIYITAFVQLTSIISGKFWWTYLVIPAFGGYKIFFLLKGTFFGGGSEGEVEDEKSRKKREKMEKKASRGKMVKTRTR

SEQ ID NO: 28792 - protein, 160 aa, Triticum aestivum
MDLLWRIILVSNVIYIVVRMAVMYSSFTWKHWIGLVVTSAAYFLSYKQLASMTKPEYSDADNRELLSSGYDLATGGLSEYIEDVIYITAFVQLTSIISGKFWWTYLVIPAFGGYKIFFLLKGTFFGGGSEGEVEDEKSRKKREKMEKKASRGKMVKTRTR

SEQ ID NO: 28793 - DNA, 1382 bp, Triticum aestivum
acctagaacatcctaatcgagaaacactcgacccgactcctctgccccgcatttccaagaacacctctcccttcccttgctctgccctctccatctccatctccggctccgggaagaagaagaagaggtagccatgtctccgctcgccgaccttctcagcctcgacctgtccggctgcaccggcaagatcatcgccgagtacatatgggtcggcggcacagggatggacgtcaggagcaaagccaggacgctgcccgggcccgtggaggaccccagcaagcttccaaaatggaattttgacggctccagcaccggccaagccacgggtgacgacagcgaagtcatcctctgccctcaagccatcttcaaggacccattcaggagggggaacaacatcctggtcatctgtgactgctatgcgcctaacggagagccgattccgagcaacaagcggtacaacgcggcgaggatattcggccatcctgatgtcaaggctgaagaaccatggtatgggattgagcaagagtacacccttcttcagaaggacaccaactggcccattggctggccactagggggttaccctggtcctcagggaccttactactgcgccgcgggtgcggagaaatcttacgggcgcgacatcgtcgacgcgcactacaaggcctgcctctacgccggcatcaacatcggcggcatcaatgcagaagtcatgccaggacagtgggagttccaagtcggcccttccgtcggcatctcggccggcgacgagctctgggcggctcgctacatcctggagaggatcactgagattgccggtgtcgtcgtctccttcgaccccaaaccgatcccgggagagtggaatggtgctggtgcccacacaaactacagcaccaagtcgatgaggagcgagggtgggtacgaggtgatcaagaaggcgatccagaagctggaggcgcggcacatggagcacatcgccgcctacggggagggcaacgagcgccggctcaccggccgccacgagaccgccgacatcaacaccttcgtatggggcgtggcgaaccgcggcgcgtcggtgcgggtgggccgcgacaccgagaaggaaggcaagggctacttcgaggaccggaggccggcatccaacatggatccctacgtcgtcacctccatgatcgccgagaccaccatcctcagcaaggccggtctctccaatggcaagtagagtggctttgatgggttctgttatctgtgtgagtgcccgtggttgcgcatgtgtgtgtgtgtgtgtgtctgtgtgatctgcattgcagtgacaagactggcagggtttgaataatgatgataaagcaataacatgtaatgtgcttgtcctagctggatgt

SEQ ID NO: 28794 - protein, 362 aa, Triticum aestivum
MSPLADLLSLDLSGCTGKIIAEYIWVGGTGMDVRSKARTLPGPVEDPSKLPKWNFDGSSTGQATGDDSEVILCPQAIFKDPFRRGNNILVICDCYAPNGEPIPSNKRYNAARIFGHPDVKAEEPWYGIEQEYTLLQKDTNWPIGWPLGGYPGPQGPYYCAAGAEKSYGRDIVDAHYKACLYAGINIGGINAEVMPGQWEFQVGPSVGISAGDELWAARYILERITEIAGVVVSFDPKPIPGEWNGAGAHTNYSTKSMRSEGGYEVIKKAIQKLEARHMEHIAAYGEGNERRLTGRHETADINTFVWGVANRGASVRVGRDTEKEGKGYFEDRRPASNMDPYVVTSMIAETTILSKAGLSNGK

SEQ ID NO: 28795 - protein, 332 aa, Triticum aestivum
MDVRSKARTLPGPVEDPSKLPKWNFDGSSTGQATGDDSEVILCPQAIFKDPFRRGNNILVICDCYAPNGEPIPSNKRYNAARIFGHPDVKAEEPWYGIEQEYTLLQKDTNWPIGWPLGGYPGPQGPYYCAAGAEKSYGRDIVDAHYKACLYAGINIGGINAEVMPGQWEFQVGPSVGISAGDELWAARYILERITEIAGVVVSFDPKPIPGEWNGAGAHTNYSTKSMRSEGGYEVIKKAIQKLEARHMEHIAAYGEGNERRLTGRHETADINTFVWGVANRGASVRVGRDTEKEGKGYFEDRRPASNMDPYVVTSMIAETTILSKAGLSNGK

SEQ ID NO: 28796 - DNA, 473 bp, Triticum aestivum
  misc_feature (21)..(21): n is a, c, g, or t
  misc_feature (320)..(320): n is a, c, g, or t
acacacacacacacggcagangcagtctaaaccctgtacacgcacagcaggaagagaggccaggtagctagctagcttggtagcttggtaaccatggcgaagaaggcggcggtgatcgccacgctgctggccctgaacctgctcttcttcaccttcgccgacgcctgcggctgccactgcggatcctgccctagtccgggcggcggcggcggcggtgggggtggcggtggaggtgggagcggtggcgggggtggtggagggagcggtggaggcggatctggaggaggcggcagcggcggcggcggatctggagggggcgngcagcggcggaggtgggtcaggaggaggtggcagcggcggcggcgggtccggcggtggcggatcgggaggaggcggatcaggcgggcgcgcgcggtgccccatcgacacgctgaagctgggggtgtgcgccaacgtgctcaacgggctgatca

SEQ ID NO: 28797 - protein, 126 aa, Triticum aestivum
  misc_feature (76)..(76): Xaa can be any naturally occurring amino acid
MAKKAAVIATLLALNLLFFTFADACGCHCGSCPSPGGGGGGGGGGGGGSGGGGGGGSGGGGSGGGGSGGGGSGGGXQRRRWVRRRWQRRRRVRRWRIGRRRIRRARAVPHRHAEAGGVRQRAQRAD

SEQ ID NO: 28798 - DNA, 681 bp, Triticum aestivum
gcacacactctccgcgacaccgtaatccccggcccctccggcgattccccactctctcagccccgatccactccgccgccgcgccagctcgccatggctgccgccgacgaggcgcagggcttccgcccgctggacgaggcgtcgctggtggcctacatccgggcgaccccggcgctggccgccagcctcggcggccgcgtcgacgacctcgccgtcaaggaggtcggcgacggcaacctcaacttcgtctacatcgtctcctccgacgccggctccgtcgtcgtcaagcaggcgctgccgtacatccgctgcgtgggggactcgtggccgatgacgagggagcgggcctactttgaggcctccgcgctgcgggagcacggccgcctctgcccggaccacgtcccggaggtctaccacttcgaccgcgccatgtcgctcatcgggatgcgctacatcaagccgccccacatcatcctccgcaagggcctcatcgccggcgtcgagtaccccctcctcgccgagcacatgtccgactacatggccaagaccctcttcttcacctccctcctctacaactccaccaccgagcacaagaagcaagttgctcgctactgcgagaacgtggagatgtgcaggctcacggagctgtttaaacacaataaagttggaactggagggggg

SEQ ID NO: 28799 - protein, 227 aa, Triticum aestivum
AHTLRDTVIPGPSGDSPLSQPRSTPPPRQLAMAAADEAQGFRPLDEASLVAYIRATPALAASLGGRVDDLAVKEVGDGNLNFVYIVSSDAGSVVVKQALPYIRCVGDSWPMTRERAYFEASALREHGRLCPDHVPEVYHFDRAMSLIGMRYIKPPHIILRKGLIAGVEYPLLAEHMSDYMAKTLFFTSLLYNSTTEHKKQVARYCENVEMCRLTELFKHNKVGTGGG

SEQ ID NO: 28800 - protein, 196 aa, Triticum aestivum
MAAADEAQGFRPLDEASLVAYIRATPALAASLGGRVDDLAVKEVGDGNLNFVYIVSSDAGSVVVKQALPYIRCVGDSWPMTRERAYFEASALREHGRLCPDHVPEVYHFDRAMSLIGMRYIKPPHIILRKGLIAGVEYPLLAEHMSDYMAKTLFFTSLLYNSTTEHKKQVARYCENVEMCRLTELFKHNKVGTGGG

SEQ ID NO: 28801 - protein, 117 aa, Triticum aestivum
THSPRHRNPRPLRRFPTLSAPIHSAAAPARHGCRRRGAGLPPAGRGVAGGLHPGDPGAGRQPRRPRRRPRRQGGRRRQPQLRLHRLLRRRLRRRQAGAAVHPLRGGLVADDEGAGLL

SEQ ID NO: 28802 - DNA, 1859 bp, Triticum aestivum
attcttcttctctctccccaccgcctcccccttcctcgtcctcctctctcagtccgaagccgattacttagcagcttgccttcgtctttctctcctgcggttcctggagctacgtcttctcggcccctgccctttggttcgccgctccgctcccccccttctgccgcaaagggggacactcatggcgagtctagtagttctggcatcgctgcttgccgtaattgggctcgcgcagggggaggcgcaatgtgcgcggtacagcgggcggccgcggccacatagcgtgaccatcactgagtttggggccgtcggcgacggcctgaccgtcaatacggtgcccttccagaacgccatcttctacctgcggtcctttgccgacaagggcggcgcacagctgtacgtgcccaaggggcggtggctcaccggcagcttcaacctcaccagccacctcacccttttcctggagaaggacgctgtcatcatcggcaccgaggatgtgacacaatggccaattgtggaacctttgccatcatatggccaaggaattgatcttccgggtgcaaggcatcgcagcttaataaatgggcacaatgttaccgatgtcataattacagggaacagtggaatcgtagacggccagggtttgatatggtggaattggtttcgctcaaataaattgaactatagccggcctcatcttgtggagtttgaggattcggaagaaattgtgatttcgaacttgacatttttagattctccagcatggggtatacatcctgtgtattgcagcaatgtaacaatccgtaatgtcacaatcgagactggattggatgctccactcaccaatggaattgtcccagattcatgctcgaatatgtgcattgaggacagcagaattagcgtcggtcatgatgccatctcattaaaaagtgggtgggacaactatggcattacatttggaaggccaacctcagacattcacattagtagagtggatctgcaagcctcactgggagctgctcttgcatttggcagtgagatgtctggtgggatctcggatgttcatgttgatcaccttcatattcatggttcatccaaaggtatatccttcaggaccgcaccaggccgtggtggttatataagggatgcgatagtatcagatgtccaaatggaagacgtccatgttgcaatcgagttcaccggcgattggtcaagccatcctgatgaacattttgatttgtctgcactcccggagatcagtggaatcaccttaaaagacatggttggaaaaaacatttcgtttgcaggagttttgtcgggaatcgatggcgatcctttcaccaatatctgcctctccaatatcaatttcaccatagctgattcagcgcattctgcctcttggtcttgctccaacatttctggatactccgagtcggtatttcccgaggcttgttccgacctccacagtcaatcatcaaattcctccatctgctcatccacccttagctaccatgcccttgcgacagcgtaaatgcatatagcacccaatattcatcctttcatgtttctgtccatgtacaatctggagacatctagctctagcttcatcgccatctttcccccaaaaaaattctcttccgttataggtgcatcaaagaatcatcgggcttcgtacagtcagctttgaggctcataatacaaaattttggctggcgtccttgatgagtccagagaggtgtttccttgtacagttacatttgttcattcaatctgtaagaaattttgtccggtaggttgtcgagtccaaagagttggtttatattgctgtttattttattgccatatataaaataaacatt

SEQ ID NO: 28803 - protein, 509 aa, Triticum aestivum
FFFSLPTASPFLVLLSQSEADYLAACLRLSLLRFLELRLLGPCPLVRRSAPPLLPQRGTLMASLVVLASLLAVIGLAQGEAQCARYSGRPRPHSVTITEFGAVGDGLTVNTVPFQNAIFYLRSFADKGGAQLYVPKGRWLTGSFNLTSHLTLFLEKDAVIIGTEDVTQWPIVEPLPSYGQGIDLPGARHRSLINGHNVTDVIITGNSGIVDGQGLIWWNWFRSNKLNYSRPHLVEFEDSEEIVISNLTFLDSPAWGIHPVYCSNVTIRNVTIETGLDAPLTNGIVPDSCSNMCIEDSRISVGHDAISLKSGWDNYGITFGRPTSDIHISRVDLQASLGAALAFGSEMSGGISDVHVDHLHIHGSSKGISFRTAPGRGGYIRDAIVSDVQMEDVHVAIEFTGDWSSHPDEHFDLSALPEISGITLKDMVGKNISFAGVLSGIDGDPFTNICLSNINFTIADSAHSASWSCSNISGYSESVFPEACSDLHSQSSNSSICSSTLSYHALATA

SEQ ID NO: 28804 - protein, 449 aa, Triticum aestivum
MASLVVLASLLAVIGLAQGEAQCARYSGRPRPHSVTITEFGAVGDGLTVNTVPFQNAIFYLRSFADKGGAQLYVPKGRWLTGSFNLTSHLTLFLEKDAVIIGTEDVTQWPIVEPLPSYGQGIDLPGARHRSLINGHNVTDVIITGNSGIVDGQGLIWWNWFRSNKLNYSRPHLVEFEDSEEIVISNLTFLDSPAWGIHPVYCSNVTIRNVTIETGLDAPLTNGIVPDSCSNMCIEDSRISVGHDAISLKSGWDNYGITFGRPTSDIHISRVDLQASLGAALAFGSEMSGGISDVHVDHLHIHGSSKGISFRTAPGRGGYIRDAIVSDVQMEDVHVAIEFTGDWSSHPDEHFDLSALPEISGITLKDMVGKNISFAGVLSGIDGDPFTNICLSNINFTIADSAHSASWSCSNISGYSESVFPEACSDLHSQSSNSSICSSTLSYHALATA

SEQ ID NO: 28805 - DNA, 1008 bp, Triticum aestivum
aaccgccgccgtctgcccgtctgcacgcccatggccaccctcgcgccacgccccgacctcctcctcgtcgctctgagaaggtcccgcgctaggacgcttcgcgtccgcgccgccgccgtcccacgtgcccgccgtcctccggtgccaccgcaggcagcgcggcgcgtcttcctcggcctcggcgccgctttcgtcgaccagctcgcccgcatggcctccggtggtgccccgtcccgctcgttcgtggccgcggcgcggccaaggcagggggtctccccggtcgaagagattttgaagaatgtggagtggccggacgagttccctttcaagcccgacgacttcggccgcttcgacgagtcatcagatactgtgttctattcggctccccgttttgtcacgcacattgacgacccagcaatcagagcgctcacaaaatactactcgcaagttcttcctccaagcaacactccaggcgtggccatcctggacatgtgcagtagctgggtgagccattatccagctgggtacaagcaagagaagatcgtagggatgggtatgaatgaaaacgagctgaaaaagaatccggttttgacacagtatgttgtgcaagacctcaatttgaatccgaagcttccttttgacgataacacctttgatgttataacgaacgtggttagtgtagactacttgacaaaaccaatggatgtttttaaagagatgagacgaatacttaaaccatctggattagctatcatgagcttttcaaatcgctgcttttggacaaaagctatatccatttggacatcaactggtgatgctgaccatgcttggatagttggtgcatactaccattatgctggagggttcgagccccctgaggctgttgatatatctcccaatccaggacaaacagatccgatgtacattgtttgctctagaaagaaaactgcttaattaaatatattttgtatcggaattttgcttaaaagaccaaatactagctgacgc

SEQ ID NO: 28806 - protein, 317 aa, Triticum aestivum
NRRRLPVCTPMATLAPRPDLLLVALRRSRARTLRVRAAAVPRARRPPVPPQAARRVFLGLGAAFVDQLARMASGGAPSRSFVAAARPRQGVSPVEEILKNVEWPDEFPFKPDDFGRFDESSDTVFYSAPRFVTHIDDPAIRALTKYYSQVLPPSNTPGVAILDMCSSWVSHYPAGYKQEKIVGMGMNENELKKNPVLTQYVVQDLNLNPKLPFDDNTFDVITNVVSVDYLTKPMDVFKEMRRILKPSGLAIMSFSNRCFWTKAISIWTSTGDADHAWIVGAYYHYAGGFEPPEAVDISPNPGQTDPMYIVCSRKKTA

SEQ ID NO: 28807 - protein, 307 aa, Triticum aestivum
MATLAPRPDLLLVALRRSRARTLRVRAAAVPRARRPPVPPQAARRVFLGLGAAFVDQLARMASGGAPSRSFVAAARPRQGVSPVEEILKNVEWPDEFPFKPDDFGRFDESSDTVFYSAPRFVTHIDDPAIRALTKYYSQVLPPSNTPGVAILDMCSSWVSHYPAGYKQEKIVGMGMNENELKKNPVLTQYVVQDLNLNPKLPFDDNTFDVITNVVSVDYLTKPMDVFKEMRRILKPSGLAIMSFSNRCFWTKAISIWTSTGDADHAWIVGAYYHYAGGFEPPEAVDISPNPGQTDPMYIVCSRKKTA

SEQ ID NO: 28808 - protein, 247 aa, Triticum aestivum
MASGGAPSRSFVAAARPRQGVSPVEEILKNVEWPDEFPFKPDDFGRFDESSDTVFYSAPRFVTHIDDPAIRALTKYYSQVLPPSNTPGVAILDMCSSWVSHYPAGYKQEKIVGMGMNENELKKNPVLTQYVVQDLNLNPKLPFDDNTFDVITNVVSVDYLTKPMDVFKEMRRILKPSGLAIMSFSNRCFWTKAISIWTSTGDADHAWIVGAYYHYAGGFEPPEAVDISPNPGQTDPMYIVCSRKKTA

SEQ ID NO: 28809 - DNA, 965 bp, Triticum aestivum
aaaccatcgtcactcacgacagaaacagaaataggaagacgagagaacagaagagccagagacactaaaacgaaatggcatcctcctcttccttccttctcattgctgcacttcttgcgttggtctcatggcaggccactgcttttgatcctagcccactccaggacttttgtgtcgccgacatgaattcaccagtccgtgtcaatgggtttgtttgcaagaacccgttggaggttaatgcagatgacttcttcaaggcggccaacctcgacaagcctagggtgcccaacaaggttggatccaacgtcactttgatcaacgccatgcagattgctggactcaacaccctcggcatctcaattgcacgcatcgactatgctcccttgggtcaaaacccaccacacacgcaccctcgcgccactgagatcctcacggtgctcgaggggacactgtatgttggatttgtcacatccaaccagcccgcccccaacagaaacaagttcctctccaaggtgctcaacaaaggtgatgtgtttgtcttccccgtggggctcatccacttccaattcaaccccaacccccaccagcctgctgttgcaattgccgcgctaagcagccagaacccaggggctatcacaattgccaatgcagtgtttgggtcagacccaccaatatcagatgatgttcttgccaaggcatttcaggtggaaaagaatacaattgactatctccaggctcagttctgggagaacaaccactactaagtcagacctttgttaattagccggaagaccagtgcacaagcgaaggacatggttgagttcctagatatgcatcctaatctataaaataaatggagcatatgtcatgccattgtgtgtctgtaatcagtgaatgtatttctaccttctgaataattgacaatattgtatttatcacactaatatgatctcatttgcttcttt

SEQ ID NO: 28810 - protein, 229 aa, Triticum aestivum
MASSSSFLLIAALLALVSWQATAFDPSPLQDFCVADMNSPVRVNGFVCKNPLEVNADDFFKAANLDKPRVPNKVGSNVTLINAMQIAGLNTLGISIARIDYAPLGQNPPHTHPRATEILTVLEGTLYVGFVTSNQPAPNRNKFLSKVLNKGDVFVFPVGLIHFQFNPNPHQPAVAIAALSSQNPGAITIANAVFGSDPPISDDVLAKAFQVEKNTIDYLQAQFWENNHY

SEQ ID NO: 28811 - protein, 193 aa, Triticum aestivum
MNSPVRVNGFVCKNPLEVNADDFFKAANLDKPRVPNKVGSNVTLINAMQIAGLNTLGISIARIDYAPLGQNPPHTHPRATEILTVLEGTLYVGFVTSNQPAPNRNKFLSKVLNKGDVFVFPVGLIHFQFNPNPHQPAVAIAALSSQNPGAITIANAVFGSDPPISDDVLAKAFQVEKNTIDYLQAQFWENNHY

SEQ ID NO: 28812 - protein, 146 aa, Triticum aestivum
MQIAGLNTLGISIARIDYAPLGQNPPHTHPRATEILTVLEGTLYVGFVTSNQPAPNRNKFLSKVLNKGDVFVFPVGLIHFQFNPNPHQPAVAIAALSSQNPGAITIANAVFGSDPPISDDVLAKAFQVEKNTIDYLQAQFWENNHY

SEQ ID NO: 28813 - DNA, 1313 bp, Triticum aestivum
gaaagttggcaggcacgatctctctccacccccttggactctcctctgctcctcctctccctccccacggcgccatggagcggctcatctccaggacggcggtctccccggcccagccccggatccacctgcccggcagatcccccttcctcaccacccgccgcgccgcctccgcctccgcgggtgctgggagcgccgcgccgtggacccggctgtgcgcgcagccgccgcgcctaggtgccgcggtcgccgctgcggcgcggcatgacggtgcttcggccccggcgcccgtggaggaggtggctgcggcggcggcagctgggcctccgtggaagctgctcgggagcctgctccccaaggcttctactgctgcccttgtcctgcttatgacacttactgcaagtgccttgcactctagcattccccatcctgcctatgcatcggcgcaaccagtaatcaaatctggtggactcctctcagcagagttattgagcagcggctgggctggtttcttcgcgggccgcttacataccttatccgggcctgaccatcttgtcgcattggcaccactatcaattgggagatcaagactggagagtggactagtcggtgccctttggggctgtggtcatgatgctggacaaataatttttggcctgctcttcttgctactcaaggatcgtttgcacattgaggttctccgtatatggggaacaagagttgtaggtctgacccttcttatgataggcgcgacgggcatccgggaagcttcagaggttcaagagtcggggctaattctggagggtgtagacatgaatggcagtgagcccttgcaacaggcccctgctgttgctcccaggaagaagaaagttggcttcacaacatttgccaccggagtcatccatggcctccagccagatgcgctgctgatggtcttgcccgctcttgctctgccgtcacgctttgccggcgcggcctacctcggtatgttcttggtcgggactgtattttcgatgggtagctacactgcttttgtaggttcttgtagtgaggctctaaaggataggatacctaagataacggagaagctgacctgggctgcttcccttgtagctgtatgcttggggttagctcttttagttgggcagttctttgggttcaccctatattgattcatgtcctaggttcttgttactacttggcaacattgttttgattgttatttgttatgtttacggcagttgagctcagactacgacacggttggtattcttagactgcaacttatactatgttactacatgtttttgggg

SEQ ID NO: 28814 - protein, 389 aa, Triticum aestivum
KLAGTISLHPLGLSSAPPLPPHGAMERLISRTAVSPAQPRIHLPGRSPFLTTRRAASASAGAGSAAPWTRLCAQPPRLGAAVAAAARHDGASAPAPVEEVAAAAAAGPPWKLLGSLLPKASTAALVLLMTLTASALHSSIPHPAYASAQPVIKSGGLLSAELLSSGWAGFFAGRLHTLSGPDHLVALAPLSIGRSRLESGLVGALWGCGHDAGQIIFGLLFLLLKDRLHIEVLRIWGTRVVGLTLLMIGATGIREASEVQESGLILEGVDMNGSEPLQQAPAVAPRKKKVGFTTFATGVIHGLQPDALLMVLPALALPSRFAGAAYLGMFLVGTVFSMGSYTAFVGSCSEALKDRIPKITEKLTWAASLVAVCLGLALLVGQFFGFTLY

SEQ ID NO: 28815 - protein, 365 aa, Triticum aestivum
MERLISRTAVSPAQPRIHLPGRSPFLTTRRAASASAGAGSAAPWTRLCAQPPRLGAAVAAAARHDGASAPAPVEEVAAAAAAGPPWKLLGSLLPKASTAALVLLMTLTASALHSSIPHPAYASAQPVIKSGGLLSAELLSSGWAGFFAGRLHTLSGPDHLVALAPLSIGRSRLESGLVGALWGCGHDAGQIIFGLLFLLLKDRLHIEVLRIWGTRVVGLTLLMIGATGIREASEVQESGLILEGVDMNGSEPLQQAPAVAPRKKKVGFTTFATGVIHGLQPDALLMVLPALALPSRFAGAAYLGMFLVGTVFSMGSYTAFVGSCSEALKDRIPKITEKLTWAASLVAVCLGLALLVGQFFGFTLY

SEQ ID NO: 28816 - protein, 261 aa, Triticum aestivum
MTLTASALHSSIPHPAYASAQPVIKSGGLLSAELLSSGWAGFFAGRLHTLSGPDHLVALAPLSIGRSRLESGLVGALWGCGHDAGQIIFGLLFLLLKDRLHIEVLRIWGTRVVGLTLLMIGATGIREASEVQESGLILEGVDMNGSEPLQQAPAVAPRKKKVGFTTFATGVIHGLQPDALLMVLPALALPSRFAGAAYLGMFLVGTVFSMGSYTAFVGSCSEALKDRIPKITEKLTWAASLVAVCLGLALLVGQFFGFTLY

SEQ ID NO: 28817 - DNA, 1130 bp, Triticum aestivum
actgcacactaccacactccccactctcccacgccacgccgactagcttcctccattaccctcctcctttgcttgcccagacctcggcgaggctccggcgagagagcgagagcgaaagctcccttccgctgctgcaatggcggttcctctggtgctcatgctcttggtcgccatgttcaccggctcagatgcgatgtactgcgtgtgcaagtcggacgcgaacccggtggcgatgcagaaggccatcgactacgcgtgcggcaagggcgccgactgcacccagatcacctccagcgggccctgcttccagccctcctccgtcgtcgcccactgctcctacgcctgcaacagctactaccagaagaacgccggcatgggcgccacctgcgatttcatgggcgtcgccaccctcaccggcgccgaccccagcgccggatcctgcaagtaccccgccagcgctagcggcgtcggcactggagcaggcaccggcaccggcggcatgggaaccggcggcacagggacaggcaccggaggcatgggaaccggcaccggaaccagcaccggaacgggcacgggcgtcggcaccggcaccagcaccggcggcatggggagcatgaccccgccgggcgcgaccagctccgggatgccggggagccccttcggcggcggcgcgtacggcccgtctggcatgaaccaggactacagcgcagccgtggtcggtcgccgcgtggccgtcgcggggctcctcgtggcggcagccgcgccgctcctcctccacttcatctgatgcggtggtgaccactggttggccggcggaaaggcgcgtcggcaatgctggcgggtgcgacgccggattcggtgggcacgccccgccgcttttgtgtccggctcgctctctcgcctgcctttccggcgtctgcgtcgttttgatggttcgatcggacgtactagtagcgtagtgtctgtctgtctgtccatgagtgctagtactcttattaagctgaccaccccatgtggtgtttgtaccggtgcgggtcgtggtagagttgatgagatctggtaggggattctttcttccttctcgtagcggtgacggtgttccgagacatataattatgtgttgtcgttcc

SEQ ID NO: 28818 - protein, 216 aa, Triticum aestivum
MAVPLVLMLLVAMFTGSDAMYCVCKSDANPVAMQKAIDYACGKGADCTQITSSGPCFQPSSVVAHCSYACNSYYQKNAGMGATCDFMGVATLTGADPSAGSCKYPASASGVGTGAGTGTGGMGTGGTGTGTGGMGTGTGTSTGTGTGVGTGTSTGGMGSMTPPGATSSGMPGSPFGGGAYGPSGMNQDYSAAVVGRRVAVAGLLVAAAAPLLLHFI

SEQ ID NO: 28819 - protein, 209 aa, Triticum aestivum
MLLVAMFTGSDAMYCVCKSDANPVAMQKAIDYACGKGADCTQITSSGPCFQPSSVVAHCSYACNSYYQKNAGMGATCDFMGVATLTGADPSAGSCKYPASASGVGTGAGTGTGGMGTGGTGTGTGGMGTGTGTSTGTGTGVGTGTSTGGMGSMTPPGATSSGMPGSPFGGGAYGPSGMNQDYSAAVVGRRVAVAGLLVAAAAPLLLHFI

SEQ ID NO: 28820 - protein, 204 aa, Triticum aestivum
MFTGSDAMYCVCKSDANPVAMQKAIDYACGKGADCTQITSSGPCFQPSSVVAHCSYACNSYYQKNAGMGATCDFMGVATLTGADPSAGSCKYPASASGVGTGAGTGTGGMGTGGTGTGTGGMGTGTGTSTGTGTGVGTGTSTGGMGSMTPPGATSSGMPGSPFGGGAYGPSGMNQDYSAAVVGRRVAVAGLLVAAAAPLLLHFI

SEQ ID NO: 28821 - DNA, 1559 bp, Triticum aestivum
agcctctccccccgccgccgcccaagccgctaccctttcctcctccccgccgccgccgccgccatggccaccaccgcgcgcccgctcgtctccgtcaaggctctggacggggacatggcaaccgacgcggccggcgtcccgatgccgcacgtcatgaaggcgccgatccgccccgacgtcatcaccttcgtccacaggctcgtctcctgcaacagccgccagccctacgccgtctcccgcaaggccggtcaccagacctcggccgagtcctggggcacgggtcgcgccgtctcgcgtatcccgcgtgtcggcggtggcggtacccaccgcgccggccagggagccttcggcaacatgtgccgtggcggacgcatgttcgcgcccacccggatctggcgcaagtggcaccgtcgcgtcaacgtccgcctccgccgcgtcgccgtcgcctccgccctcgccgccaccgccgtcccggccatcgtcaccgcccgcggccaccgcatcgagtccgtccccgagttcccgctcgtcgtctccgactcggccgagggcatcgagaagaccgcccaggccatcaaggtcctcaagcagctgggcgcctacgccgacgccgagaaggccaagctgtccgtgggcatccgccccggcaagggtaagatgcgcaaccgcaggtacatcaaccgcaagggccccctcatcgtctacggcaccgagggctccaagatcgtcaaggccttccgcaacctccctggtgtggatgttgccaacgtcgagcgcctcaacttgctcgaccttgcccctggtggccaccttggccggtttgtgatctggaccgagtctgccttcaagaagctggacgaggtgtacggctcctttgaggcgtcttcctccaagaagaagggcttcgttctccccaggcccaagatgaccaatgctgaccttggccgcctcatcaactctgatgaggtccagtctgtggtgaagcccatcaacaaggaggtcaagcgcagggaggccaggaagaaccctctgaagaacgctgctgccgtcctcaagctgaacccctattttggaactgcccgcaggatggcagttcttgctgaggcagcccgtgttaaggccaggaaggagaagatcaactccaagaggaccaagctcagcgcggaggaggcatctaagatcaaggctgctgggaaggcctggtaccagaccatgatctctgacagcgactacactgagttcgacgtcttctccaagtggctcggcgtcagccagtgatcatctagttgtagtagcagtctatcgtcctaccttaagagaccctaaagtatgattttgtgtcatgttatcgtttatctggagtctgagacatcttgctgttttggtagctgtttatctcaagtgttttatctatggacgcattttgggagacatgttatatggcatgctttatcgtcgtcgagttcttagttcagattttgagtcgtgtttttcatatatactttgttatgaatgcgaaataatttttggcattgtgaagttttgtggttggcataccc

SEQ ID NO: 28822 - protein, 425 aa, Triticum aestivum
SLSPRRRPSRYPFLLPAAAAAMATTARPLVSVKALDGDMATDAAGVPMPHVMKAPIRPDVITFVHRLVSCNSRQPYAVSRKAGHQTSAESWGTGRAVSRIPRVGGGGTHRAGQGAFGNMCRGGRMFAPTRIWRKWHRRVNVRLRRVAVASALAATAVPAIVTARGHRIESVPEFPLVVSDSAEGIEKTAQAIKVLKQLGAYADAEKAKLSVGIRPGKGKMRNRRYINRKGPLIVYGTEGSKIVKAFRNLPGVDVANVERLNLLDLAPGGHLGRFVIWTESAFKKLDEVYGSFEASSSKKKGFVLPRPKMTNADLGRLINSDEVQSVVKPINKEVKRREARKNPLKNAAAVLKLNPYFGTARRMAVLAEAARVKARKEKINSKRTKLSAEEASKIKAAGKAWYQTMISDSDYTEFDVFSKWLGVSQ

SEQ ID NO: 28823 - protein, 404 aa, Triticum aestivum
MATTARPLVSVKALDGDMATDAAGVPMPHVMKAPIRPDVITFVHRLVSCNSRQPYAVSRKAGHQTSAESWGTGRAVSRIPRVGGGGTHRAGQGAFGNMCRGGRMFAPTRIWRKWHRRVNVRLRRVAVASALAATAVPAIVTARGHRIESVPEFPLVVSDSAEGIEKTAQAIKVLKQLGAYADAEKAKLSVGIRPGKGKMRNRRYINRKGPLIVYGTEGSKIVKAFRNLPGVDVANVERLNLLDLAPGGHLGRFVIWTESAFKKLDEVYGSFEASSSKKKGFVLPRPKMTNADLGRLINSDEVQSVVKPINKEVKRREARKNPLKNAAAVLKLNPYFGTARRMAVLAEAARVKARKEKINSKRTKLSAEEASKIKAAGKAWYQTMISDSDYTEFDVFSKWLGVSQ

SEQ ID NO: 28824 - protein, 387 aa, Triticum aestivum
MATDAAGVPMPHVMKAPIRPDVITFVHRLVSCNSRQPYAVSRKAGHQTSAESWGTGRAVSRIPRVGGGGTHRAGQGAFGNMCRGGRMFAPTRIWRKWHRRVNVRLRRVAVASALAATAVPAIVTARGHRIESVPEFPLVVSDSAEGIEKTAQAIKVLKQLGAYADAEKAKLSVGIRPGKGKMRNRRYINRKGPLIVYGTEGSKIVKAFRNLPGVDVANVERLNLLDLAPGGHLGRFVIWTESAFKKLDEVYGSFEASSSKKKGFVLPRPKMTNADLGRLINSDEVQSVVKPINKEVKRREARKNPLKNAAAVLKLNPYFGTARRMAVLAEAARVKARKEKINSKRTKLSAEEASKIKAAGKAWYQTMISDSDYTEFDVFSKWLGVSQ

SEQ ID NO: 28825 - DNA, 1354 bp, Triticum aestivum
agaatcatcattcctttcatttcatttcattgtgcaccaccaacccaacccagagactcctcagagtaatcgagccggccatcttgcttcgttccatggcgtctctgcttctcaagggcgtgcacaagcgtctgggcctgcccactatctccatctcctgctcctccgccgacgccaccaacatcatcgcctccaccggcaccggcgccgtcgttggcagcagcggccgggccatcgaccgccactcgccgcggctccgcgacccacaccgctcctccacctccaagccgcccagaccaagcaccagcaccaaagactcggtgtcctcagaggaccccaagcagcagcagcagcagcacggcagcaagaagaagaagaagagcaccacggctggtgctgctgcagatgggagaaggtcttcggagaagaggctggtcagcccggccacctcctccaggttcctcctcaactcctcccgcctgcagtccgacgacctcgacgtcctcgcgctgcccccgcctccgccgccgtccttcatcgacgcgttgcccgtcggcgaagggaagccgaagccgccgtccttcatcgacgcgttcccggccgacgcctccctgccggttccctctgccaaggacgcgccgccgtcgactgtgcaccaagcagagtcctcgtcgtcagggacgtcctcctctgcttcgtcgtcgtcggagatcacggccgtccaagacccggagcagcacaaggcggcggcgctggtgcggtcgtcctcgacggcggcggcgaggacgacgcaggtggtggtgctgcgcgtgtcgctgcactgcaaggggtgcgcgggcaaggtgaagaagcacatcgccaagatggagggggtgacgtcgttcgacatcgacatcccgagcaagaaggtgacggtggtcggcgacgtgacgccgctgggggtgctcaccagcgtctccaaggtgaagcccgcgcagttctggccgtcgcagccgtgccccccgcatgcctccgcttccttctgaacgcgccaacctgtgatctccgctctctctgaatcacaagaagatacggggtcgtagctggtcgagtggtcttccatggtggaccactcgcgcgctgcgcgcaggcgatcgaagtgcgtagtagaacgtcgagaaagatgggcagatgccacgcacgtagtacctccatatttctttccttttttttcttgaaagaaacggtattgaagctcctccatatctcaatgcctgtattctgaattgagatatactcatcctacagtttctgtagtacaaaatggagtaataatcagggccgtacaaaatggagtaatactcatcctacagtt

SEQ ID NO: 28826 - protein, 351 aa, Triticum aestivum
ESSFLSFHFIVHHQPNPETPQSNRAGHLASFHGVSASQGRAQASGPAHYLHLLLLRRRHQHHRLHRHRRRRWQQRPGHRPPLAAAPRPTPLLHLQAAQTKHQHQRLGVLRGPQAAAAAARQQEEEEEHHGWCCCRWEKVFGEEAGQPGHLLQVPPQLLPPAVRRPRRPRAAPASAAVLHRRVARRRREAEAAVLHRRVPGRRLPAGSLCQGRAAVDCAPSRVLVVRDVLLCFVVVGDHGRPRPGAAQGGGAGAVVLDGGGEDDAGGGAARVAALQGVRGQGEEAHRQDGGGDVVRHRHPEQEGDGGRRRDAAGGAHQRLQGEARAVLAVAAVPPACLRFLLNAPTCDLRSL

SEQ ID NO: 28827 - protein, 340 aa, Triticum aestivum
NHHSFHFISLCTTNPTQRLLRVIEPAILLRSMASLLLKGVHKRLGLPTISISCSSADATNIIASTGTGAVVGSSGRAIDRHSPRLRDPHRSSTSKPPRPSTSTKDSVSSEDPKQQQQQHGSKKKKKSTTAGAAADGRRSSEKRLVSPATSSRFLLNSSRLQSDDLDVLALPPPPPPSFIDALPVGEGKPKPPSFIDAFPADASLPVPSAKDAPPSTVHQAESSSSGTSSSASSSSEITAVQDPEQHKAAALVRSSSTAAARTTQVVVLRVSLHCKGCAGKVKKHIAKMEGVTSFDIDIPSKKVTVVGDVTPLGVLTSVSKVKPAQFWPSQPCPPHASASF

SEQ ID NO: 28828 - protein, 309 aa, Triticum aestivum
MASLLLKGVHKRLGLPTISISCSSADATNIIASTGTGAVVGSSGRAIDRHSPRLRDPHRSSTSKPPRPSTSTKDSVSSEDPKQQQQQHGSKKKKKSTTAGAAADGRRSSEKRLVSPATSSRFLLNSSRLQSDDLDVLALPPPPPPSFIDALPVGEGKPKPPSFIDAFPADASLPVPSAKDAPPSTVHQAESSSSGTSSSASSSSEITAVQDPEQHKAAALVRSSSTAAARTTQVVVLRVSLHCKGCAGKVKKHIAKMEGVTSFDIDIPSKKVTVVGDVTPLGVLTSVSKVKPAQFWPSQPCPPHASASF

SEQ ID NO: 28829 - DNA, 1043 bp, Triticum aestivum
atctctctccccttcccgtccccgcttgctcctcctgctcctgccgatcgctcatggattccaagccccaagccccgccgtcggagggcgcggcgtacccgcgcatgtccccggaggacctcgcgccgccgccgccgccggtcgtggcgcccgcgggctccaacccctacgtgctgtcctcgccctcctccggaccgcccgccaagagcaccaaggagaatctgagggagatgttcggctcggtggggaagaggttcagcgaggccgcgcgcaagaccgagggcatcgccggcgacgtctggcagcacttgaaaactgggcctagcattacggatgctgcaatggggaggatcgctcaggtatccaaggtcatatcggaagggggatacgacaagatattccagcagacgtttgagtgcttgcctgacgagaagctcaagaaggcgtacgcgtgctacctctcgacctctcatggtccgataatgggcgtcttatacgtctccaccgccaagcttgcattctgtagtgacagccccgtggcatatgtcactgaggataatcagaccgcgtcagccatttacaagatagttgtacctgtacctcacctgagatcagtcactcctaccgcaagtcaacagaaccctgcggagaggtacatccaggtcgtttctgtcgataaccatgacttctggttcatgggcttcgtgaactatgacagcgctgtgaagtgtctccaggatgctgctcgtggtggcgcctagacatcacttccccgtcgcatgtatccgttgtgatggcccatgttgatgtctatagaccattcttgtgtattttggttcaaatttctggcttaaataagcagtgcattcatgtatcagtattcagtagtgtggatacttttctggcccaagtgtgttgtaaatatcagaggaatcttaagctttgtttgctgccctcattcttgcactgcaaattatgtgtattatgagccaaagatgctcctgccagtgccttgataacttgaggttagtgcatgcttcaac

SEQ ID NO: 28830 - protein, 252 aa, Triticum aestivum
LSPLPVPACSSCSCRSLMDSKPQAPPSEGAAYPRMSPEDLAPPPPPVVAPAGSNPYVLSSPSSGPPAKSTKENLREMFGSVGKRFSEAARKTEGIAGDVWQHLKTGPSITDAAMGRIAQVSKVISEGGYDKIFQQTFECLPDEKLKKAYACYLSTSHGPIMGVLYVSTAKLAFCSDSPVAYVTEDNQTASAIYKIVVPVPHLRSVTPTASQQNPAERYIQVVSVDNHDFWFMGFVNYDSAVKCLQDAARGGA

SEQ ID NO: 28831 - protein, 235 aa, Triticum aestivum
MDSKPQAPPSEGAAYPRMSPEDLAPPPPPVVAPAGSNPYVLSSPSSGPPAKSTKENLREMFGSVGKRFSEAARKTEGIAGDVWQHLKTGPSITDAAMGRIAQVSKVISEGGYDKIFQQTFECLPDEKLKKAYACYLSTSHGPIMGVLYVSTAKLAFCSDSPVAYVTEDNQTASAIYKIVVPVPHLRSVTPTASQQNPAERYIQVVSVDNHDFWFMGFVNYDSAVKCLQDAARGGA

SEQ ID NO: 28832 - protein, 218 aa, Triticum aestivum
MSPEDLAPPPPPVVAPAGSNPYVLSSPSSGPPAKSTKENLREMFGSVGKRFSEAARKTEGIAGDVWQHLKTGPSITDAAMGRIAQVSKVISEGGYDKIFQQTFECLPDEKLKKAYACYLSTSHGPIMGVLYVSTAKLAFCSDSPVAYVTEDNQTASAIYKIVVPVPHLRSVTPTASQQNPAERYIQVVSVDNHDFWFMGFVNYDSAVKCLQDAARGGA

SEQ ID NO: 28833 - DNA, 1811 bp, Triticum aestivum
atttctgccaaagtggaaccggggaggcagcgagactgggactggtgcgtagtggaggagctgatttctccaagcgggcagtggcaatggcgtgctacgccgctctcctgcaccagccgcccgcctcgccgtccccgtgcacctcaggccgcgccggctcctgccgtgtccgtccgcccccactcctccagcgccgagcccttcccctgtctgtgcgcgctcggatctccccccgctgctcctacgccgcagccggagaaagcgccggagcgggcgccggggaacagcccgcggcggcgctccggagagtgctggggacgccgggcgcccaccaggcgcccgcttgctacgacgcgctcagcgcccgcctcgtcgagcgcgcggggttcagggcctgcttcacgagcggcttctcaatatctgctgcaaggcttggattaccagatgttggtctcatctcctatggtgaaatgatagatcaagggcgtttaatcactgaagcagtatcgatacctgtcattggtgatgctgataatggttatggaaactgtatgaatgtcaagaggacagtgaaaggatttattaatgctggttttgctggaattattcttgaagatcaggtgtcaccaaaagcatgtggacatacacaaggaaggaaagttgtctcaagagaggaagcgattatgcacataaaagccgctgtagatgccaggaaggagagtggctctgacattgttattgtggcaaggacagattctcgtcaagctttgtctcttgatgaagcgttgtggagagcacgagcttttgctgatgctggagcagatgttctatttattgatgcccttgcctcaagggaagagatgatggcgttttgtgcagtttcacctggagttccaaaaatggccaacatgttagaaggtggtggtaaaactcctatattgagccctcttgaacttgaagaaattggttacaaaatcatagcctacccattatctctaattggggtatcaatgcgtgcaatggaggatgctcttgttgctataaaaggtggccgcatacctcctccaagtagcttgccatcatttgaggagatcaaggatacgctagggtttaaccgttattatgaagaggaaaagcgatacgttgcatcaccagctcaatcatccttttggagtgttataggtaattatgattatacaagtgaagctagcagttcaggagacaccaagtccaggactgagaaatcacaagaacctattattgacatactgccacagctctatgatcctggttccgctggaggcagaggtccttcaggtgggatgtggtcccgcacacttcgattgaagattacaggaagagatggggtccagaaaattgatgccaggatacctgctggattcttagaagggatgacaaaagttattccaggcctggctggaactaatatcatggaaaggcttcggaacgcgcctatggattcggacaacccccagaacgggcagatactgcttgattttgaggacggcaggggagataggatccaggttttcatcgcgtgagcgtgttgttcgttgttgtcgtcccggcatccgatactcagacgagcgtcatgttccgtttgagtagtataagcaaatggctgttacttggtagtagttggtaggcccttgctgcctacatccagttatgtaaactccgcatcatactgcatgcatccagaactagtcttcctgtaaccttcctcgtctcatggatgcggaagttaaattcgaataaaacaagttatggaaaaggtattcctctatgcg

SEQ ID NO: 28834 - protein, 519 aa, Triticum aestivum
FCQSGTGEAARLGLVRSGGADFSKRAVAMACYAALLHQPPASPSPCTSGRAGSCRVRPPPLLQRRALPLSVRARISPRCSYAAAGESAGAGAGEQPAAALRRVLGTPGAHQAPACYDALSARLVERAGFRACFTSGFSISAARLGLPDVGLISYGEMIDQGRLITEAVSIPVIGDADNGYGNCMNVKRTVKGFINAGFAGIILEDQVSPKACGHTQGRKVVSREEAIMHIKAAVDARKESGSDIVIVARTDSRQALSLDEALWRARAFADAGADVLFIDALASREEMMAFCAVSPGVPKMANMLEGGGKTPILSPLELEEIGYKIIAYPLSLIGVSMRAMEDALVAIKGGRIPPPSSLPSFEEIKDTLGFNRYYEEEKRYVASPAQSSFWSVIGNYDYTSEASSSGDTKSRTEKSQEPIIDILPQLYDPGSAGGRGPSGGMWSRTLRLKITGRDGVQKIDARIPAGFLEGMTKVIPGLAGTNIMERLRNAPMDSDNPQNGQILLDFEDGRGDRIQVFIA

SEQ ID NO: 28835 - protein, 491 aa, Triticum aestivum
MACYAALLHQPPASPSPCTSGRAGSCRVRPPPLLQRRALPLSVRARISPRCSYAAAGESAGAGAGEQPAAALRRVLGTPGAHQAPACYDALSARLVERAGFRACFTSGFSISAARLGLPDVGLISYGEMIDQGRLITEAVSIPVIGDADNGYGNCMNVKRTVKGFINAGFAGIILEDQVSPKACGHTQGRKVVSREEAIMHIKAAVDARKESGSDIVIVARTDSRQALSLDEALWRARAFADAGADVLFIDALASREEMMAFCAVSPGVPKMANMLEGGGKTPILSPLELEEIGYKIIAYPLSLIGVSMRAMEDALVAIKGGRIPPPSSLPSFEEIKDTLGFNRYYEEEKRYVASPAQSSFWSVIGNYDYTSEASSSGDTKSRTEKSQEPIIDILPQLYDPGSAGGRGPSGGMWSRTLRLKITGRDGVQKIDARIPAGFLEGMTKVIPGLAGTNIMERLRNAPMDSDNPQNGQILLDFEDGRGDRIQVFIA

SEQ ID NO: 28836 - protein, 363 aa, Triticum aestivum
MIDQGRLITEAVSIPVIGDADNGYGNCMNVKRTVKGFINAGFAGIILEDQVSPKACGHTQGRKVVSREEAIMHIKAAVDARKESGSDIVIVARTDSRQALSLDEALWRARAFADAGADVLFIDALASREEMMAFCAVSPGVPKMANMLEGGGKTPILSPLELEEIGYKIIAYPLSLIGVSMRAMEDALVAIKGGRIPPPSSLPSFEEIKDTLGFNRYYEEEKRYVASPAQSSFWSVIGNYDYTSEASSSGDTKSRTEKSQEPIIDILPQLYDPGSAGGRGPSGGMWSRTLRLKITGRDGVQKIDARIPAGFLEGMTKVIPGLAGTNIMERLRNAPMDSDNPQNGQILLDFEDGRGDRIQVFIA

SEQ ID NO: 28837 - DNA, 1092 bp, Triticum aestivum
ggacgaccccgacgcgccaccacctgctcctcccggcggctgcctgctcgactcgattccccaaccgcagcagggtcaacgacagaacctatcgcgcgatgggcttgggactgagattgccgttcttcctactcctcttgctgctggtcagcctgggagccgcacaaggccggagcacagtttttcttgatatccaggaggaggctcgaggctctggtcaaatcatcaaggatcaactaactttgagcaaaattcccgtgcgtgttgagaggggcagcccactatgcccagcttgtgagaagtttacagaggaagctcttagctatcttagtcagaaacaatcacaagataagatgatggaggtccttcatgaagcttgttctcagacattctcgttggaaaagaagtgtgttgagtttgtggactcctatgcaactctcttatttgccaagatcgctgagatcaagccagaagagttctgcaaacgaaatggcctctgcagggacaatgctcttctgtctggtgtgagaagtgagagcacatgcgtgttttgccaccacctcatggatgaagttttgtccaaactgaaggatcctgatgctgagtttgagataattcaaattctcctcaaggagtgcaagaagatcgaaggtcatgaacagcagtgcaaacgactggtcctgcaatacatccctctcatcctggtgaacggagagaagttcctcgagaagaacgatatatgtaccattgtccaagcgtgcgatgctggcaaaaagacaatggtcgggccattctccgaggagggtttgttgcgtgatgcatgaaggtagaaagaccacaccaggctgcgtaaacccagacgaaacattatgcactagttcttccttgttgtacataggtgtccaaaaattcgtctggcttttgccttgtactgctgctcctgcattctgtggatgctttgtattataaagggagcggcatgacaaacagtttattatgtcaacttgaagccgtgttgtacttattacttcgtcagtgtttaatttgtaatgacatttgaacaactgtagatactaaatcgagtttcagtcg

SEQ ID NO: 28838 - protein, 273 aa, Triticum aestivum
TTPTRHHLLLPAAACSTRFPNRSRVNDRTYRAMGLGLRLPFFLLLLLLVSLGAAQGRSTVFLDIQEEARGSGQIIKDQLTLSKIPVRVERGSPLCPACEKFTEEALSYLSQKQSQDKMMEVLHEACSQTFSLEKKCVEFVDSYATLLFAKIAEIKPEEFCKRNGLCRDNALLSGVRSESTCVFCHHLMDEVLSKLKDPDAEFEIIQILLKECKKIEGHEQQCKRLVLQYIPLILVNGEKFLEKNDICTIVQACDAGKKTMVGPFSEEGLLRDA

SEQ ID NO: 28839 - protein, 241 aa, Triticum aestivum
MGLGLRLPFFLLLLLLVSLGAAQGRSTVFLDIQEEARGSGQIIKDQLTLSKIPVRVERGSPLCPACEKFTEEALSYLSQKQSQDKMMEVLHEACSQTFSLEKKCVEFVDSYATLLFAKIAEIKPEEFCKRNGLCRDNALLSGVRSESTCVFCHHLMDEVLSKLKDPDAEFEIIQILLKECKKIEGHEQQCKRLVLQYIPLILVNGEKFLEKNDICTIVQACDAGKKTMVGPFSEEGLLRDA

SEQ ID NO: 28840 - protein, 156 aa, Triticum aestivum
MMEVLHEACSQTFSLEKKCVEFVDSYATLLFAKIAEIKPEEFCKRNGLCRDNALLSGVRSESTCVFCHHLMDEVLSKLKDPDAEFEIIQILLKECKKIEGHEQQCKRLVLQYIPLILVNGEKFLEKNDICTIVQACDAGKKTMVGPFSEEGLLRDA

SEQ ID NO: 28841 - DNA, 1549 bp, Triticum aestivum
ctggtgtctccgacctgctccgtctccgcctccgcctccggcatcggcacggtgtcctaaggcgacgagatcgccgtgagatccagagccgccgcctgcgccgcagacgaatccactagcgcgtcactgccttccggccccccttcccgctgcaaagatggggaggataccgtctctgaagaacttcaatgcgttcccgcacgccgaagaccacctgctgaagaagacttactcgggtgctatagtgacgattctcgggctaattgttatggttacacttttcgcgcatgagctcacgttttaccttacaacctatacgatgcatcagatgtctgtagatctgaaacgaggagaaactctaccaattcatataaatgtatcatttccttctttaccatgtgaagtcttgagtgtggatgcaatcgacatgtccggcaaacatgaggttgacttgcatacaaatatttggaagcttcgtttggataagtatggccatatcattggtactgagtacttgtctgatctagttgaaaaggagcatggaactcatgatcatgaccatggccatgagcatgatgtagaaaagaagcctgagcacaccttcaacgaagatgcagataaaatgattaagagtgtcaaacttgcaatggaaaatggtgaaggatgccgagtgtatggtgctttggacgtgcagagggttgctggcaacttccatatatcggtgcatggtttaaatatttttgttgcaaatcagatttttgatgggtcaagccatgtcaatgttagccatgttatccatcgactgtcctttggtccagaataccctggaattcataatccacttgatgatacttcaaggatactgcacgacacaagtgggacattcaaatactatatcaaggttgttccaaccgagtacagatacctctcaaagggagtgttgccaacaaatcagttttccgtgacagagtattttgttcccattcgcccaactgataggtcctggccagccgtttacttcctgtatgatctctcaccaatcacagtcaccatcagagaagaaagacgtaacttcctacatttcataactcgcctttgtgcagttcttgggggtacatttgcaatgacaggaatgcttgaccggtggatgtacaggatcatcgagtctatctcgagctcaaaacctagaagtgggatgcggtaaccgggcatcccatgccgaaggaggctactagccagcctggtgaccagtcaagtcagtcgtcgacgatgttgttgtctcaaccaagtgatcaaagcacggtcacccccctgcgggctttcatgttttgtccagtccatgcatctataacttaaaagatatggttttagtcttatgattaatcatgttagattggcactagtggcaagtatacagttttgttatgaatgatgcaacgggaggcgccaacgatgtcatgtagcttgtacttaccatggaaaaaagcatatcctcagtatgacagtatgacaaatagcattaaatcaactttgaaagggaattaaaagc

SEQ ID NO: 28842 - protein, 348 aa, Triticum aestivum
MGRIPSLKNFNAFPHAEDHLLKKTYSGAIVTILGLIVMVTLFAHELTFYLTTYTMHQMSVDLKRGETLPIHINVSFPSLPCEVLSVDAIDMSGKHEVDLHTNIWKLRLDKYGHIIGTEYLSDLVEKEHGTHDHDHGHEHDVEKKPEHTFNEDADKMIKSVKLAMENGEGCRVYGALDVQRVAGNFHISVHGLNIFVANQIFDGSSHVNVSHVIHRLSFGPEYPGIHNPLDDTSRILHDTSGTFKYYIKVVPTEYRYLSKGVLPTNQFSVTEYFVPIRPTDRSWPAVYFLYDLSPITVTIREERRNFLHFITRLCAVLGGTFAMTGMLDRWMYRIIESISSSKPRSGMR

SEQ ID NO: 28843 - protein, 311 aa, Triticum aestivum
MVTLFAHELTFYLTTYTMHQMSVDLKRGETLPIHINVSFPSLPCEVLSVDAIDMSGKHEVDLHTNIWKLRLDKYGHIIGTEYLSDLVEKEHGTHDHDHGHEHDVEKKPEHTFNEDADKMIKSVKLAMENGEGCRVYGALDVQRVAGNFHISVHGLNIFVANQIFDGSSHVNVSHVIHRLSFGPEYPGIHNPLDDTSRILHDTSGTFKYYIKVVPTEYRYLSKGVLPTNQFSVTEYFVPIRPTDRSWPAVYFLYDLSPITVTIREERRNFLHFITRLCAVLGGTFAMTGMLDRWMYRIIESISSSKPRSGMR

SEQ ID NO: 28844 - protein, 294 aa, Triticum aestivum
MHQMSVDLKRGETLPIHINVSFPSLPCEVLSVDAIDMSGKHEVDLHTNIWKLRLDKYGHIIGTEYLSDLVEKEHGTHDHDHGHEHDVEKKPEHTFNEDADKMIKSVKLAMENGEGCRVYGALDVQRVAGNFHISVHGLNIFVANQIFDGSSHVNVSHVIHRLSFGPEYPGIHNPLDDTSRILHDTSGTFKYYIKVVPTEYRYLSKGVLPTNQFSVTEYFVPIRPTDRSWPAVYFLYDLSPITVTIREERRNFLHFITRLCAVLGGTFAMTGMLDRWMYRIIESISSSKPRSGMR

SEQ ID NO: 28845 - DNA, 1454 bp, Triticum aestivum
ccaagcattgctaaaattcaagccgcttccctgtccaagttctaaccccggtaccaccgtgcccctcgccgcgatctcccgcccgatccgcatggctggaatcaggctgacgcccgaggagcctgagctgccgcagggcactccgccccgcccccagctgccgctccccgtcgccggctccggcgtcacagcgggcggcggcggcagcggtggcctggagatggcttcggacgacgagcggtcagtggcagcggactcgtggtccgtgcggagcgagtacgggagcacgctagacgatgaccagcgctacgccgacgctgccgatgtgctcgccgcggcggcggccgccgggaacttcccctccgctgcctctgattactgttctgacaaagatgaccaagatcctaatgaggaaggctcaatgttggggctacaaagttattgggatgcttcttattctgaagatctcgcaaattttcaggaacacggccatgctggagaaatatggtttggtgcagatgtaatggatactgttgccatttggacaaaaaaattgtgtgtaagctttttccaaggtggactttcatcggctaatgacaacatcaaatttgaagttgatgataaacacttgtttgactaccccgtgctcgatcttggaactggcaacggcctccttctgcaagcacttgccaagcaggggttttcagatttaacaggaactgattacagtgaaggagccattgaacttgcaagaaaccttgctgctcgtgatgggttcactactataagttttttggtcgatgatgtacttgagacaaagttagacaggaaattcaaaattattacagataaagggacattggatgccattggattgcatccagatggccgtgcaaaaagagtgatgtattgggaatctatatcaaacttggttgaaccaggtggccttgtggtcataacatcatgtaatcacacaaaggatgagcttctgcaagaagtagaagagttcggtatgcggaaatttgtaaggaggacacagacagaggtgcaggtgattcgcaccagatcttccgatacttggatcatgtccaaacgtatcctaccatcatgtttggcggagttgaggggtctcaagtgtgcaccttggctttccaacgggcgtgaaaggccagcttaagagtgtttttctctctatgttgtagctcaattttatcctcaggttgttgttgtagcctatactggcagtcctttccagtttacaaggacagagagtaagagaacacttatgaagcaatttttgtgttgtgtaaacgaacaggagggacatgatgtactgtattatttatgtaaccgtgaacttttgcctattttcatacagagtttccctgctttttccaaagagaatgcagacgttttagtgcctggtgtcttctgtggctgggcacaaaattttc

SEQ ID NO: 28846 - protein, 391 aa, Triticum aestivum
QALLKFKPLPCPSSNPGTTVPLAAISRPIRMAGIRLTPEEPELPQGTPPRPQLPLPVAGSGVTAGGGGSGGLEMASDDERSVAADSWSVRSEYGSTLDDDQRYADAADVLAAAAAAGNFPSAASDYCSDKDDQDPNEEGSMLGLQSYWDASYSEDLANFQEHGHAGEIWFGADVMDTVAIWTKKLCVSFFQGGLSSANDNIKFEVDDKHLFDYPVLDLGTGNGLLLQALAKQGFSDLTGTDYSEGAIELARNLAARDGFTTISFLVDDVLETKLDRKFKIITDKGTLDAIGLHPDGRAKRVMYWESISNLVEPGGLVVITSCNHTKDELLQEVEEFGMRKFVRRTQTEVQVIRTRSSDTWIMSKRILPSCLAELRGLKCAPWLSNGRERPA

SEQ ID NO: 28847 - protein, 361 aa, Triticum aestivum
MAGIRLTPEEPELPQGTPPRPQLPLPVAGSGVTAGGGGSGGLEMASDDERSVAADSWSVRSEYGSTLDDDQRYADAADVLAAAAAAGNFPSAASDYCSDKDDQDPNEEGSMLGLQSYWDASYSEDLANFQEHGHAGEIWFGADVMDTVAIWTKKLCVSFFQGGLSSANDNIKFEVDDKHLFDYPVLDLGTGNGLLLQALAKQGFSDLTGTDYSEGAIELARNLAARDGFTTISFLVDDVLETKLDRKFKIITDKGTLDAIGLHPDGRAKRVMYWESISNLVEPGGLVVITSCNHTKDELLQEVEEFGMRKFVRRTQTEVQVIRTRSSDTWIMSKRILPSCLAELRGLKCAPWLSNGRERPA

SEQ ID NO: 28848 - protein, 318 aa, Triticum aestivum
MASDDERSVAADSWSVRSEYGSTLDDDQRYADAADVLAAAAAAGNFPSAASDYCSDKDDQDPNEEGSMLGLQSYWDASYSEDLANFQEHGHAGEIWFGADVMDTVAIWTKKLCVSFFQGGLSSANDNIKFEVDDKHLFDYPVLDLGTGNGLLLQALAKQGFSDLTGTDYSEGAIELARNLAARDGFTTISFLVDDVLETKLDRKFKIITDKGTLDAIGLHPDGRAKRVMYWESISNLVEPGGLVVITSCNHTKDELLQEVEEFGMRKFVRRTQTEVQVIRTRSSDTWIMSKRILPSCLAELRGLKCAPWLSNGRERPA

SEQ ID NO: 28849 - DNA, 1414 bp, Triticum aestivum
cctctcccctcccctccctctcttttgcgcgctggcccctgccgtttcggacccgccacgctccggtcccccgctccgccgccgccgccgtccgtccccgtcgccccacctcctccgccccgtcagaggaagctgcggactggcatgacctaggggggccatggaagaggcagacaaggaccgcaattcctgcaagcgcctgcgggcggtgggcggcggcggcgactcggcggatgcgtggcggagtttccgggtggcgcgcgcggcggcgggcggcaaggaccggcacagcaaggtggtgacctcgcgcggcctccgcgaccgccgcatccggctctcggtgcagacggccattcagttctatgacatccaggaccgcctgggtgtcgaccagcccagcaaggccatcgagtggctcatccaagccgccgccaccgccatcgatggtctcccgtcgttggactgctccttcgccttccctgtcgcctccccagcagcagaagacaccgcggaggtcagcacctcggagaccagcaagggctccgtgctctcgctcgccaacggccctgccgacaatgacaatgccgctcaccaagccagtgcatacaacgggggcagtgccaatggcacgtttgccgggctcctgcactgctccaacgccgccgacaagccaatgcagcatcagcatcagcagcagcagccgacgcttgcctactacgccgccccgggttcgcacatcgcgcccatgtccttcgagatgattccccagctcaccttctcccaggaccagcagcactgccaccaccaccaccaccaccaccatgcctctgtctccttcgacaggagcacacttcagtccaacaccgtctccacgcctcagtggcccccgtcccagcacccgttcctgatgcagaggttctctgctgctccagccgagccttcgcctatgtttcccttctttcttggaggcaacaacgctgctgctgcggctgctcctgcggcggccaatgcgccggagcggaggctgcagctctgggacttcaaggaggaaaggaagacatagtttcttcttgggagattcggcggtgtaccaaactaccaagtcatatgatccattcagcacagcaaaacccagaaggagagaagatgcaaggcaacgaaggagtcggcgccatggagccgcgtggaatgcaatcgctttgctggatctccgaatcttctccgcgcggttttcgttttgccgttgtcatcctctgacctatgtttttgtgatcggaaaccaaatgtttttgagctgcactctgttgctgtgccctctatctttctccttacgaaaaagatgtttttttttaactttctggcgaggaacagaatttcgcgcttgcatggatgctggtggcgtgtactgagtggc

SEQ ID NO: 28850 - protein, 300 aa, Triticum aestivum
MEEADKDRNSCKRLRAVGGGGDSADAWRSFRVARAAAGGKDRHSKVVTSRGLRDRRIRLSVQTAIQFYDIQDRLGVDQPSKAIEWLIQAAATAIDGLPSLDCSFAFPVASPAAEDTAEVSTSETSKGSVLSLANGPADNDNAAHQASAYNGGSANGTFAGLLHCSNAADKPMQHQHQQQQPTLAYYAAPGSHIAPMSFEMIPQLTFSQDQQHCHHHHHHHHASVSFDRSTLQSNTVSTPQWPPSQHPFLMQRFSAAPAEPSPMFPFFLGGNNAAAAAAPAAANAPERRLQLWDFKEERKT

SEQ ID NO: 28851 - DNA, 1004 bp, Triticum aestivum
ctgtcctcgttgtcattattgatcttcgtcttggtcgccctcccttcgcctgcgctcgcgcagcagcaacccgccgctccctccggctggccgtcgtccgtcccgctcccggcgcccgcaaattcttcctcccccctcgacatggcgtcctgcccttcggtcaagaacatcctcgtgctggacgcggaggggaagcgcgtggccgtcaagtactatgccgatgactggccctccgcgtcctccaagctggctttcgagaagtcgctcttcgtgaagacccagaagaccagcgccagagcagaggctgatgtggtaatgttcgatggctacatcattgtgtacaagttcatccaagatctccatttttttgtaactggaggagatgaggagaatgagctcattttagcgtcagttcttcagggattttctgatgctgttggcattcttctcagaaacaatgtagacaaaaggaccgcacttgaaaatctggatctcatctttttgtgccttgacgaagttgttgatggagggattgttctggaaacagatggaaatgtgatagccgagaaggtgtcaggccatggattggaaggagctgggtcgttcactgagcagacgataagccaagccctagcgacagcaagagagcacttcgcgaggtctcttctgaagtagtgtgtgtaggcatctttcgggttggcgatgcgcccagcattgaactcgtgtgtttcctcttgtagcacagtgcacctagtttgcaagaaagaaagaaagagcgagaaaatgacttgaatctttgcacgtgagttcgttcgttcgtctattgttgtggtgctcgtcgacattttgtcgcagagatgtactccctccgttcgaaattacttgtcttgaaaatggatgtatctagaactaaaattccgaacggagggagtatgtgcggcctaagtgcctaactggttaccagattcccttctaaggtctgtataagaaacttgtgatggtgc

SEQ ID NO: 28852 - protein, 224 aa, Triticum aestivum
LSSLSLLIFVLVALPSPALAQQQPAAPSGWPSSVPLPAPANSSSPLDMASCPSVKNILVLDAEGKRVAVKYYADDWPSASSKLAFEKSLFVKTQKTSARAEADVVMFDGYIIVYKFIQDLHFFVTGGDEENELILASVLQGFSDAVGILLRNNVDKRTALENLDLIFLCLDEVVDGGIVLETDGNVIAEKVSGHGLEGAGSFTEQTISQALATAREHFARSLLK

SEQ ID NO: 28853 - protein, 177 aa, Triticum aestivum
MASCPSVKNILVLDAEGKRVAVKYYADDWPSASSKLAFEKSLFVKTQKTSARAEADVVMFDGYIIVYKFIQDLHFFVTGGDEENELILASVLQGFSDAVGILLRNNVDKRTALENLDLIFLCLDEVVDGGIVLETDGNVIAEKVSGHGLEGAGSFTEQTISQALATAREHFARSLLK

SEQ ID NO: 28854 - protein, 119 aa, Triticum aestivum
MFDGYIIVYKFIQDLHFFVTGGDEENELILASVLQGFSDAVGILLRNNVDKRTALENLDLIFLCLDEVVDGGIVLETDGNVIAEKVSGHGLEGAGSFTEQTISQALATAREHFARSLLK

SEQ ID NO: 28855 - DNA, 959 bp, Triticum aestivum
cagccaaacccacacccctcctccgctccgctcgctcgctctccttcccctcccccaatggcggccttcgcctccacctccccctcgccggcgatctccgcctcggcctggcgcatggactccctgcgcgccgcgctccccgcgctccgctcctccccgtcggcggccgtccggcctcgcaggcaggcggcctccgccgccccgttcctccggagctccttcgtctccacctcctccgcctcgtcctccgtctcccccgccccgatgtcctccgcggcctcggcgtccctcgccttctcgtacacctcctcgttctccgtggaatcaagctttgctcaccgactgtttggcattgatgtccgtggaaggatattggcgatgaggcacgggaagcgcattcctaggctcaacaggcctgcagatcagcggaaagcactcctgcgtgggctgaccacacagctgctgaagcacgggaggataaagactaccaagccaagggcaaaggcgatgaggaagtgggttgacaagatgatcacgatggcgaaggatggatctcttcacaagaggaggcaggccctggggtatatttatgagaagcacatagtccatgcattgtttgctgaggttccagacaggtatggggaaagaaacgggggctacacaaggatcatcccgacattcccaaggcggggagataatgcacctatggcttacatcgaacttgtctagagaatcatccattggttgcagtccatccatcgacgctgctcaagccgggtgtctgcgaatcgcctcttgaacttgtgttttcatatgttattttgtaacaacaaagtgtagatcatgtcgcggaatttctgaacaaagtgtaacagcaagatcagtgtgctatactactgaaaaaaaaaaaaaaaaaagcttatcgataccgtcgacctcgagggggggcccggtaccca

SEQ ID NO: 28856 - protein, 242 aa, Triticum aestivum
QPNPHPSSAPLARSPSPPPMAAFASTSPSPAISASAWRMDSLRAALPALRSSPSAAVRPRRQAASAAPFLRSSFVSTSSASSSVSPAPMSSAASASLAFSYTSSFSVESSFAHRLFGIDVRGRILAMRHGKRIPRLNRPADQRKALLRGLTTQLLKHGRIKTTKPRAKAMRKWVDKMITMAKDGSLHKRRQALGYIYEKHIVHALFAEVPDRYGERNGGYTRIIPTFPRRGDNAPMAYIELV

SEQ ID NO: 28857 - protein, 223 aa, Triticum aestivum
MAAFASTSPSPAISASAWRMDSLRAALPALRSSPSAAVRPRRQAASAAPFLRSSFVSTSSASSSVSPAPMSSAASASLAFSYTSSFSVESSFAHRLFGIDVRGRILAMRHGKRIPRLNRPADQRKALLRGLTTQLLKHGRIKTTKPRAKAMRKWVDKMITMAKDGSLHKRRQALGYIYEKHIVHALFAEVPDRYGERNGGYTRIIPTFPRRGDNAPMAYIELV

SEQ ID NO: 28858 - protein, 204 aa, Triticum aestivum
MDSLRAALPALRSSPSAAVRPRRQAASAAPFLRSSFVSTSSASSSVSPAPMSSAASASLAFSYTSSFSVESSFAHRLFGIDVRGRILAMRHGKRIPRLNRPADQRKALLRGLTTQLLKHGRIKTTKPRAKAMRKWVDKMITMAKDGSLHKRRQALGYIYEKHIVHALFAEVPDRYGERNGGYTRIIPTFPRRGDNAPMAYIELV

SEQ ID NO: 28859 - DNA, 1328 bp, Triticum aestivum
gtcgaggatgcaccgaataattttcacatagccggagcgcaaaagcagcaggagccgccgcgaagaagaaaagccatggccgaaggtctcctcaccgccgacgctgcccgatccctcgtcggctccgtcgacgccttcctcttcgattgcgatggtctcgtgttcatcgcccccttttcttttgctcccgccagtggattcctatccctgctcctttgaattatctatttattttttgtttcttcaggggtaatttggaaaggggacgagctcatccaaggggtccccgagacgctggagttgctgcgaaaattgggcaagaaattagtttttgtaacaaacaattctaggaagtcgagaaggcagtattcaaagaaattcaaaacacttggccttgaagttcccgaggaagagatcttcacgtcatcatttgcagcagccatgttcttgaagttaaataatttttctccagaaaagaaggtttatgttgttggtgaggatggcattttggacgagctcaagttagctggctttgaatgttttggtggtccggaggatggcaagaaaaacataatgttggaggcaaacttctactttgaccacgacaaaagtgttggagctgtcgttgttggacttgatcagtacttcaactattacaaaatgcagtaaggtatgcaagcttgtgtattcgtgagaatccaggctgccttttcatcgcgaccaaccgtgatcctactggacatatgacatccgtccaagaatggccaggagctggaactatggttgctgcagtaagttgctcggtgcagaaagagcccattgttgttggaaaaccttcaagctttttgatggacttcctattgaaaagcttcaatttggaaacgtcgagaatgtgcatggttggtgacagactagacacagacatactatttggccagaatactggttgcaagaccctccttgttctgtcaggtgtgactaccttaccagaacttcaggatgcctcaaataccatccatccagatctttacacaaactctgtgcacgatctcgtcaagttgctgcagcaataaccttggacttggtaattggcactacagatgcagctcgagccctgactacagcaccaacaataatctccgggacactttgtatgtcacctaacaaaattttacgtgaactgcgtatttgattctgttgggttatataatctattatttgggtagcttcttggtagctaccctggcctgtatttgtagaccaattcaactcaatctaagtactgccatttacaagtcaattacgcagcagcatatatttatcatggc

SEQ ID NO: 28860 - protein, 109 aa, Triticum aestivum
MTSVQEWPGAGTMVAAVSCSVQKEPIVVGKPSSFLMDFLLKSFNLETSRMCMVGDRLDTDILFGQNTGCKTLLVLSGVTTLPELQDASNTIHPDLYTNSVHDLVKLLQQ

SEQ ID NO: 28861 - protein, 97 aa, Triticum aestivum
MVAAVSCSVQKEPIVVGKPSSFLMDFLLKSFNLETSRMCMVGDRLDTDILFGQNTGCKTLLVLSGVTTLPELQDASNTIHPDLYTNSVHDLVKLLQQ

SEQ ID NO: 28862 - protein, 75 aa, Triticum aestivum
MFLKLNNFSPEKKVYVVGEDGILDELKLAGFECFGGPEDGKKNIMLEANFYFDHDKSVGAVVVGLDQYFNYYKMQ

SEQ ID NO: 28863 - DNA, 642 bp, Triticum aestivum
gaaaaccacgcgaacatcgccacgccaagggagaggagagctcggaaagcaccgccagcgccgcagccccccgcgaatccgcgcccggatctcccggcccggcggcgatggcgctctccgatctctcccgcgactcgctcctccccagcttcctctactccccgcgctccttcgccgccgccgccgccgccatggaccccaaactccgctctacgcaggaggaaccatccaacgagagaaagaaggataaaaagagcaagaagaaggagaagaagccgaagtcagcggccgaggccgaggccgaggaggtagcggcggaacaggaggaactatccaacaagagaagaaaaaaaaagaagaagaaatcagacgccgaggacgcccccatggagatcgacgtgtccgctaagaaggacaagaagaagaagaagaagcacgctgatgagtgagcgccacggagatatggcggaaatttgtggtgtaatgctgtagtatcatcatatgaaagttttggtacttgccgttcatgtagaatggaatgccacattaggattagcagcgacgaaccctacaattcgaaacttgcaagtggtgagcagtcactttaagaggccccaatgctgtgctctcatctataacatc

SEQ ID NO: 28864 - protein, 148 aa, Triticum aestivum
KPREHRHAKGEESSESTASAAAPRESAPGSPGPAAMALSDLSRDSLLPSFLYSPRSFAAAAAAMDPKLRSTQEEPSNERKKDKKSKKKEKKPKSAAEAEAEEVAAEQEELSNKRRKKKKKKSDAEDAPMEIDVSAKKDKKKKKKHADE

SEQ ID NO: 28865 - protein, 113 aa, Triticum aestivum
MALSDLSRDSLLPSFLYSPRSFAAAAAAMDPKLRSTQEEPSNERKKDKKSKKKEKKPKSAAEAEAEEVAAEQEELSNKRRKKKKKKSDAEDAPMEIDVSAKKDKKKKKKHADE

SEQ ID NO: 28866 - protein, 103 aa, Triticum aestivum
ENHANIATPRERRARKAPPAPQPPANPRPDLPARRRWRSPISPATRSSPASSTPRAPSPPPPPPWTPNSALRRRNHPTRERRIKRARRRRRSRSQRPRPRPRR

SEQ ID NO: 28867 - DNA, 1388 bp, Triticum aestivum
atgcccttaggattcactcctgcgtgcgacacgccgaagcgagcaaccaaaagcaacctgaaatgttactcttgcttgcccaactcaagtcaaccatagctagctaaaatggtgctccactcagctatagctgcctagcaagctcagttccacgtctcgatctacctctctatatttaatttgcctccaaaatccatctatatatatatcgttttcgagctaaacaacacttcatccaaacaagcaaaggcaaatacccaagcggagctgcgaatagaaggctagaagccaacaatggcgccgctcgcacccgggaggccaccagcctgcctcctaacccttctctccgtcgtcgcggccctatccctggccgcgccgggcctggcggcggggaagaccggccaggtgacggtgttctggggacggaacaaggccgaggggtccctgcgcgaggcctgcgactccggcatgtacaccatggtcaccatctctttcctcgacgtcttcggcgccaacggaaagtaccaccttgacctctccggccacgacctctccgccgtcggcgccgacatcaagcactgccagtccaagggcgtccccgtctccctctccatcggcggctacggcgcccgctactcgctcccgtccaaccgctccgcgctcgacctcttcgaccacctctgggactcctacttcggcgggtccaagccgggcgtgccccgccccttgggcgacgcgtggctcgacggcgtcgacctcttcctggagcacggcacgccggcggaccgctacgacgtgctggcgctggagctggcgaagcacaacatccgcggcggcccggggaagccgctgcacctgacggcgacggtccggtgcgggtacccgccggcggcgcacgtggggcgagcgctggcgacggggatcttcgagcgcgtccacgtgaggatctacgaggagagcgacaaggcgtgcaaccagtacggggcgtgggaggaggcgtgggacaggtggacggcggcgtacccggccacccggttcttcatcgggctcacggcggacgacaagtcgtaccagtggatacaccccaagaacgtctactacggcatcacgccggtggtgcagaagaaggagaactatggcggggtcatgctctgggaccgatacttcgacaagcagagcgactacagtagctacatcaagtactacgcctgatcggagctatacttccacaagccacgctgcatgttgcatcaccgtcgatttgattttgatgtgttgttgcatacttgcaagcgagaataaagtgaggcttgtacttggataaataattgaacagattggtcgcacagttatggtttagttatcagctccatgactctctttttttc

SEQ ID NO: 28868 - protein, 305 aa, Triticum aestivum
MAPLAPGRPPACLLTLLSVVAALSLAAPGLAAGKTGQVTVFWGRNKAEGSLREACDSGMYTMVTISFLDVFGANGKYHLDLSGHDLSAVGADIKHCQSKGVPVSLSIGGYGARYSLPSNRSALDLFDHLWDSYFGGSKPGVPRPLGDAWLDGVDLFLEHGTPADRYDVLALELAKHNIRGGPGKPLHLTATVRCGYPPAAHVGRALATGIFERVHVRIYEESDKACNQYGAWEEAWDRWTAAYPATRFFIGLTADDKSYQWIHPKNVYYGITPVVQKKENYGGVMLWDRYFDKQSDYSSYIKYYA

SEQ ID NO: 28869 - protein, 247 aa, Triticum aestivum
MYTMVTISFLDVFGANGKYHLDLSGHDLSAVGADIKHCQSKGVPVSLSIGGYGARYSLPSNRSALDLFDHLWDSYFGGSKPGVPRPLGDAWLDGVDLFLEHGTPADRYDVLALELAKHNIRGGPGKPLHLTATVRCGYPPAAHVGRALATGIFERVHVRIYEESDKACNQYGAWEEAWDRWTAAYPATRFFIGLTADDKSYQWIHPKNVYYGITPVVQKKENYGGVMLWDRYFDKQSDYSSYIKYYA

SEQ ID NO: 28870 - protein, 244 aa, Triticum aestivum
MVTISFLDVFGANGKYHLDLSGHDLSAVGADIKHCQSKGVPVSLSIGGYGARYSLPSNRSALDLFDHLWDSYFGGSKPGVPRPLGDAWLDGVDLFLEHGTPADRYDVLALELAKHNIRGGPGKPLHLTATVRCGYPPAAHVGRALATGIFERVHVRIYEESDKACNQYGAWEEAWDRWTAAYPATRFFIGLTADDKSYQWIHPKNVYYGITPVVQKKENYGGVMLWDRYFDKQSDYSSYIKYYA

SEQ ID NO: 28871 - DNA, 613 bp, Triticum aestivum
  misc_feature (577)..(579): n is a, c, g, or t
  misc_feature (581)..(581): n is a, c, g, or t
acaataaccacaaccacagccagcaagatctagtcaaagaaacacatcaatccagagcgtccaccagagtcactaacttgtccagccgcagcaatggcggtgcggtggccatcgcccgccgtggccgcgttgtggatcggcgcgagcctcctagtcctgtgcacgctcatggcgtcgtcggcgtcagcccaggcgccgccgccacaggtgcgtaaggtgcccaagggcagcaacctggtggtgatcaagccgggggtcgggaagcgcaacagcaagttcacctgcaccgacaccaagaagaagcggcccgggtgcgaggccacctgccccagccgctgccccaaagagtgcctcgtcctctgcccatcctgcatgaccttctgcctgtgtgacttctacgcgggggcgtcgtgcggcgacccgcgcttcaccggcggcgacggcaacaacttctacttccacggcaagaagaaccaggacttctgcatcctctccgacgacgacctccacatcaacgcgcacttcatcggcaaccacaaccccgcgacgagccgcgacttcacctggatccaggccnnngntgtcatgttcgcccaccaccgcctccacctcg

SEQ ID NO: 28872 - protein, 173 aa, Triticum aestivum
  misc_feature (162)..(163): Xaa can be any naturally occurring amino acid
MAVRWPSPAVAALWIGASLLVLCTLMASSASAQAPPPQVRKVPKGSNLVVIKPGVGKRNSKFTCTDTKKKRPGCEATCPSRCPKECLVLCPSCMTFCLCDFYAGASCGDPRFTGGDGNNFYFHGKKNQDFCILSDDDLHINAHFIGNHNPATSRDFTWIQAXXVMFAHHRLHL

SEQ ID NO: 28873 - protein, 148 aa, Triticum aestivum
  misc_feature (137)..(138): Xaa can be any naturally occurring amino acid
MASSASAQAPPPQVRKVPKGSNLVVIKPGVGKRNSKFTCTDTKKKRPGCEATCPSRCPKECLVLCPSCMTFCLCDFYAGASCGDPRFTGGDGNNFYFHGKKNQDFCILSDDDLHINAHFIGNHNPATSRDFTWIQAXXVMFAHHRLHL

SEQ ID NO: 28874 - DNA, 1448 bp, Triticum aestivum
agcagaggcagcggcgagagcgagagcgagcacagccgcggagacagacagacgcacgcacgcacgcacgccacgccattacaaatcgcccccagcgagccaagcaccaaaccctacccaaccaggcaaccaccgcccgccagccctcccgcggacggatcctcctgcccgccctcacctctcgccttcctctcgtctcgtctgccttttttttctctcccgccgccgcgccatggaggaggggaggagggggacgaggacggtgcgggtgcggaacatctcagatctggccggggagcgcgaggtgcgcgagttcttctccttctccggcgaaatcgaccacgtcgacatcacccctgacggggcggcggcggggaggacggcctacgtcaccttcaaggacgccaaggccctggagatcgcgctgctgctctcgggagcaacaattgtggatcgagttgtgaacataacctctgctgaagattacatctacatccctgttaatgaacagcaacttatggtgaatgaggtgacaagtacagctcctactgcagatttggaacaacctactgaggccaacgcaagccccactagcgtttatgccagcaaggctcatgatgtcatgacaactgtgatcgcaaggggttcagcaattcgacaagatgctgtgaacaaagctaaatcatttgacgagaggcatcagttgagggctaatgcgtcagctaggatcagttccttcgataggcgtgttggcctttcagagaagttaaatactgggatatcggccgtaaatgaaaaggtgaaaactgtggaccaaaggttacatgtttctgacaaaacaatggctgctttgctggttgcagagcgcaagctaaacaatacaggctctgctgtgaaaaccaacaggtatgtgtctgctggaacaagctggctaaatggtgcgttcagcaaggttgccaaggctggtcatgttgctggctcaagaacaagagaaaagttccagatagctgtgtcaaatatatcagccaaagggcctgctgtcgttgcttgagctttgttctgggactgggagctcttcttcctggggaaaatctgttggaaatcttgagcaagcaccttccattggttgtgtcatcaagctgtggcttgtaactgtgtatttctctattgattttttcttcttcttcgaggagaactttttcagggagtcttgtcagatttggtacataggggatctaaattttctttagaattttagaaccactattctttttagtgcttgtgttcaattgattataggtggtagtgacactttgcaccatgttcctggctcggtgtggtttcatgattgccattgatgtcaaatgtgtcgtgcctctactttctgcagaaattgttactcaaattgagtaatttggaacgtatgaaactgcaatgcttctttgtgt

SEQ ID NO: 28875 - protein, 349 aa, Triticum aestivum
AEAAARARASTAAETDRRTHARTPRHYKSPPASQAPNPTQPGNHRPPALPRTDPPARPHLSPSSRLVCLFFLSRRRAMEEGRRGTRTVRVRNISDLAGEREVREFFSFSGEIDHVDITPDGAAAGRTAYVTFKDAKALEIALLLSGATIVDRVVNITSAEDYIYIPVNEQQLMVNEVTSTAPTADLEQPTEANASPTSVYASKAHDVMTTVIARGSAIRQDAVNKAKSFDERHQLRANASARISSFDRRVGLSEKLNTGISAVNEKVKTVDQRLHVSDKTMAALLVAERKLNNTGSAVKTNRYVSAGTSWLNGAFSKVAKAGHVAGSRTREKFQIAVSNISAKGPAVVA

SEQ ID NO: 28876 - protein, 272 aa, Triticum aestivum
MEEGRRGTRTVRVRNISDLAGEREVREFFSFSGEIDHVDITPDGAAAGRTAYVTFKDAKALEIALLLSGATIVDRVVNITSAEDYIYIPVNEQQLMVNEVTSTAPTADLEQPTEANASPTSVYASKAHDVMTTVIARGSAIRQDAVNKAKSFDERHQLRANASARISSFDRRVGLSEKLNTGISAVNEKVKTVDQRLHVSDKTMAALLVAERKLNNTGSAVKTNRYVSAGTSWLNGAFSKVAKAGHVAGSRTREKFQIAVSNISAKGPAVVA

SEQ ID NO: 28877 - protein, 177 aa, Triticum aestivum
MVNEVTSTAPTADLEQPTEANASPTSVYASKAHDVMTTVIARGSAIRQDAVNKAKSFDERHQLRANASARISSFDRRVGLSEKLNTGISAVNEKVKTVDQRLHVSDKTMAALLVAERKLNNTGSAVKTNRYVSAGTSWLNGAFSKVAKAGHVAGSRTREKFQIAVSNISAKGPAVVA

SEQ ID NO: 28878 - DNA, 1060 bp, Triticum aestivum
gcttttaccttttaggacagaggagtaagcaagtgcagtggcagtggttggccgcagacagcagcagctcgcctccttccttccttcctcctcactcccccctatatacccgccaccctacccgtcggagggtgcgcgcagcggtggagctcggtggattgtcggggcaaatggattccagttccagggccgccctcttctgcttcctggccgtcgcctcctccctcctgcaccccgccagatctgacggggaggacaaccagctcctcaaggggatcaacagctacagagcttcactcaaggtcccggcgctcaccgagaacagcaatgccgactgcctggccgagcagctagcgaagaagttcaagggccaggagtgcaccaacaccaccggagccaacactgtccccggcaccgagccgcagttccccgactacccccagttcctcgaccgctgccacctcaacgcgtcggtaaccgaggacgggcaggtgatgccggcatgcgtgcccggactcgtggccgacgttgtgctgaccaactacaccaagtcccagtacaaccggttcctcaacgacaccaagtactccggcgtcgggatcgccaacgagggggactgggtggtcgtcgtcctcagcaccagcaccgactccggcgactactcccctgctcccccgggctccaactgggctccttcggtccagccgttcagctggatgattgtttcgctggtagggttcgtaattttgctgatgaagtgagaagataaatgttgtgttgctcatctcgcgtgctacaccgctgcaaatgagcgtgttgatcttatgcccgtgtcagtcgtttctgtatctttcagattgtcatttctactcggtccagttgacaccacagtacagtagcatatgcatgccacgaggttcgggatcaaaactttttttcttcagtattctcctttgaccacaattggcaacggctttatggatattgtggtcaggtgatgtgcattattgaaccacatctttcatctttgaacatttagctaaagccagaacttcaactt

SEQ ID NO: 28879 - protein, 252 aa, Triticum aestivum
FYLLGQRSKQVQWQWLAADSSSSPPSFLPPHSPLYTRHPTRRRVRAAVELGGLSGQMDSSSRAALFCFLAVASSLLHPARSDGEDNQLLKGINSYRASLKVPALTENSNADCLAEQLAKKFKGQECTNTTGANTVPGTEPQFPDYPQFLDRCHLNASVTEDGQVMPACVPGLVADVVLTNYTKSQYNRFLNDTKYSGVGIANEGDWVVVVLSTSTDSGDYSPAPPGSNWAPSVQPFSWMIVSLVGFVILLMK

SEQ ID NO: 28880 - protein, 196 aa, Triticum aestivum
MDSSSRAALFCFLAVASSLLHPARSDGEDNQLLKGINSYRASLKVPALTENSNADCLAEQLAKKFKGQECTNTTGANTVPGTEPQFPDYPQFLDRCHLNASVTEDGQVMPACVPGLVADVVLTNYTKSQYNRFLNDTKYSGVGIANEGDWVVVVLSTSTDSGDYSPAPPGSNWAPSVQPFSWMIVSLVGFVILLMK

SEQ ID NO: 28881 - DNA, 1188 bp, Triticum aestivum
agagcgacttcatcgccaccatggtcgcccgcgagcatgagaggagcagctgcatcacatacgactgcgtcggggacgacaccgtggacctgctcgtggagggagacctcgacgtcgtgtccgctgtggccgcccttgccgccgctcgccctgcttctgcggtgggcgtctcccaccgtgacgccctccaggcctgtgcccaccatgcccgcttatggctcgcccgcgccgacgagccgatccatcctggctcctctgttacttatgctgcggtgagggctaagctggacaggatcatggcatcagactactacacagcagctgcagttggaggagggagctatggagctgaaggtgtgcaggcacaggagagcatgactgcctcaccagaggcatcagcagtggaggagaacctagctgctgaagatcacaaggaggagaaggaagactcccatgctacggaaatttacaatgatcatcagtctgactcagcagacgtgcaaaatgtggatcgtgaagcccccgtgaaccctcccgaggaatatccctctgttcaggcagagcaggagaagtttgacatggaagagcaagatgagagggatgctgagccaaaagagcagcagttccagcaccctaggcggtctcatcagaaccagcggggaggtggtcgtggcaggaggggggcctaccccaatggccgtggcgggcgtggaggcggccgcggcatgggcggcggataccagaatgggcgtggataccagggtgggggtggcggataccagggaggcggtggcgggtaccagaatggccggggtggtggtggcggttactacaacaacaacaacgaagaagggtactaccagccgaggaacttcaacaccaggggcaggggtggtcggtctggcggcggcaactctcactacagcaaccagggaggaggcggcgcgcagggaggtggccacgcgtacgccgagagggttgaggcaaatgcttagttgttgaattattttgcttgggtggaggtcacgagagggagagagtctgggagccattttgttattatagaactaacttagcctgttattacgtcgcaatccgtcccccatctgtgagttggttttgttggtccaatccaatgactgcatatggttggtcgataaatgtggaatctttgtcgaaagtagcttc

SEQ ID NO: 28882 - protein, 330 aa, Triticum aestivum
SDFIATMVAREHERSSCITYDCVGDDTVDLLVEGDLDVVSAVAALAAARPASAVGVSHRDALQACAHHARLWLARADEPIHPGSSVTYAAVRAKLDRIMASDYYTAAAVGGGSYGAEGVQAQESMTASPEASAVEENLAAEDHKEEKEDSHATEIYNDHQSDSADVQNVDREAPVNPPEEYPSVQAEQEKFDMEEQDERDAEPKEQQFQHPRRSHQNQRGGGRGRRGAYPNGRGGRGGGRGMGGGYQNGRGYQGGGGGYQGGGGGYQNGRGGGGGYYNNNNEEGYYQPRNFNTRGRGGRSGGGNSHYSNQGGGGAQGGGHAYAERVEANA

SEQ ID NO: 28883 - protein, 324 aa, Triticum aestivum
MVAREHERSSCITYDCVGDDTVDLLVEGDLDVVSAVAALAAARPASAVGVSHRDALQACAHHARLWLARADEPIHPGSSVTYAAVRAKLDRIMASDYYTAAAVGGGSYGAEGVQAQESMTASPEASAVEENLAAEDHKEEKEDSHATEIYNDHQSDSADVQNVDREAPVNPPEEYPSVQAEQEKFDMEEQDERDAEPKEQQFQHPRRSHQNQRGGGRGRRGAYPNGRGGRGGGRGMGGGYQNGRGYQGGGGGYQGGGGGYQNGRGGGGGYYNNNNEEGYYQPRNFNTRGRGGRSGGGNSHYSNQGGGGAQGGGHAYAERVEANA

SEQ ID NO: 28884 - protein, 232 aa, Triticum aestivum
MASDYYTAAAVGGGSYGAEGVQAQESMTASPEASAVEENLAAEDHKEEKEDSHATEIYNDHQSDSADVQNVDREAPVNPPEEYPSVQAEQEKFDMEEQDERDAEPKEQQFQHPRRSHQNQRGGGRGRRGAYPNGRGGRGGGRGMGGGYQNGRGYQGGGGGYQGGGGGYQNGRGGGGGYYNNNNEEGYYQPRNFNTRGRGGRSGGGNSHYSNQGGGGAQGGGHAYAERVEANA

SEQ ID NO: 28885 - DNA, 682 bp, Triticum aestivum
ctaccaaactctctgtggtgccgaggttaatcagtgtacagcaatggctgtggcctccatggttcatgcaccgtctctcctggcagtgcagaccttccgcggacagaagaatgctgccgctaaccgctcaccgagagcggcggctttcagagtccgggcggcgaagcttcctgccggagtccgggtgccaagggcgcagcccaagctgagtgagccgttcctggggttcaccaagaccgcggaggtctggaactccagggcctgcatgatgggcctcattgggaccttcatcgtggagctgatattgcacaaaggtgttcttgagataatcggtttcgaagtggggaaaggcctcgatattccactgtagtctgctctccctccttgcctataagatgttgatgctcgggagataagagccacaagaaagcgttaccaattatgcgcaaaaaaaaaaccgttaccaatggctatgctatgcatcatagcaaatatataatggagctctgagcatttcattgtgcttgctatttttcatttttacactcgtcttaccaaagtgatcgacagagtgatcttcaacacttgacaatattctgctgagatgggtgatagtttgtaccgttaatatgaaaacttgttcgttgttttgaaaagaaaaactgaagttgtccatgttttg

SEQ ID NO: 28886 - protein, 122 aa, Triticum aestivum
YQTLCGAEVNQCTAMAVASMVHAPSLLAVQTFRGQKNAAANRSPRAAAFRVRAAKLPAGVRVPRAQPKLSEPFLGFTKTAEVWNSRACMMGLIGTFIVELILHKGVLEIIGFEVGKGLDIPL

SEQ ID NO: 28887 - protein, 108 aa, Triticum aestivum
MAVASMVHAPSLLAVQTFRGQKNAAANRSPRAAAFRVRAAKLPAGVRVPRAQPKLSEPFLGFTKTAEVWNSRACMMGLIGTFIVELILHKGVLEIIGFEVGKGLDIPL

SEQ ID NO: 28888 - protein, 103 aa, Triticum aestivum
MVHAPSLLAVQTFRGQKNAAANRSPRAAAFRVRAAKLPAGVRVPRAQPKLSEPFLGFTKTAEVWNSRACMMGLIGTFIVELILHKGVLEIIGFEVGKGLDIPL

SEQ ID NO: 28889 - DNA, 517 bp, Triticum aestivum
acaacccacacacactgctactacttgtattaacgccagtgcggccacacttggtcacatcctcgtatcgtcggcaagaaagacgagttgagtttagcagagaagagcggcttgcttgcttgcttgctttggtacgtacgtacgtcggtcagtgaagatgagcacggcggcgcggacgacggggcggcgggggttcaccatggggcgcagcgaggacgcgacgcacccggacaccatccgcgccgccatctccgagttcctcgccacggccatcttcgtcttcgccgccgagggctccatcctctccctcgggaagctctaccatgacatgagcacggcgggcgggctggtggccgtggcgctggcacacgcgctggcgctggccgtggcggtgtccgtagccgtgaacatctccggggggcacgtcaacccggccatcaccttcggcgcgctgctcggcgggcgcatcaccctcgtgcgcgccctcctctactggatcgcgcagctcctcggagcc

SEQ ID NO: 28890 - protein, 120 aa, Triticum aestivum
MSTAARTTGRRGFTMGRSEDATHPDTIRAAISEFLATAIFVFAAEGSILSLGKLYHDMSTAGGLVAVALAHALALAVAVSVAVNISGGHVNPAITFGALLGGRITLVRALLYWIAQLLGA

SEQ ID NO: 28891 - protein, 106 aa, Triticum aestivum
MGRSEDATHPDTIRAAISEFLATAIFVFAAEGSILSLGKLYHDMSTAGGLVAVALAHALALAVAVSVAVNISGGHVNPAITFGALLGGRITLVRALLYWIAQLLGA

SEQ ID NO: 28892 - protein, 63 aa, Triticum aestivum
MSTAGGLVAVALAHALALAVAVSVAVNISGGHVNPAITFGALLGGRITLVRALLYWIAQLLGA

SEQ ID NO: 28893 - DNA, 562 bp, Triticum aestivum
gctttccccttccccacccctaagccgccgtcttccttctccacctcctaccgcaacacaggacgccacaacttccagcaacggcgcggttgctcttgaatcaggctgaaaaatgatgggttcacgaggtaccagtgttgtgctctcaagagctgctcggatgaggcaaaagctgcagtctgctttggaggccagtgcactagatattgaagatgtttcttaccaacatgctgggcatgcagctgtgaaggacaatgcaaatgagacgcattttaacatcaaggtaatttcacccaagtttgaagggcagaaccttgtgaagcgtcataggatggtgtacgatctcttgaccgatgagttgaactcgggtcttcatgctatctccattgttgcgaaaactccaacagagtcgggatcatgaatgtaattttttttgacttgattaatgtttgttccagaataagttgattgcagcaatagcatgtagccccgaatcggttggtaaaacaatgttatggcatgcatatttcttcatgataaagacatattgttgccttggttg

SEQ ID NO: 28894 - protein, 102 aa, Triticum aestivum; identical to SEQ ID NO: 14604

SEQ ID NO: 28895 - protein, 101 aa, Triticum aestivum; identical to SEQ ID NO: 14605

SEQ ID NO: 28896 - protein, 86 aa, Triticum aestivum; identical to SEQ ID NO: 14606

SEQ ID NO: 28897 - DNA, 1066 bp, Triticum aestivum
atccgcccttcgtctcgcccccttcctctcaccgtcggcgccgccgccgccatccaccggagagagccgtccgacgctacccggtccaggtatactcgcctgtgcatgactgcgttggttcggctcgccgggagagcagcttcttggagcaggggcgccagcatcgcgcctccgcgtggcatcggcttattcccgcagcgcaggaccgcgttccagggtgcgaggatggagaatggcggcggcaagggcggccgcggcgcgctcatagtcctggaagggctggacaggagcggcaaatcgtcgcagtgcgcccggctgctgtcctttctgcaagggaaaggctgcgcaaccgaagggtggcgcttcccggacagagacaccagcgtcgggaagatgatctccgcctacctcgccaacgagtcgcagctcgatgatcggaccatccatttgctcttcagcgcgaatcgctgggagaaaagaagtttgatggagagcaagctacttggtggaactacactcgtcgttgaccgctactcttattctggagtggcgttttcagctgctaaaggacttgacattgggtggtgcaaggcccctgaggttggactgctagctccagatcttgtaatatatcttgatgtacaaccagagaaagcggccgaaagaggaggctatgggggtgaaagatacgaaagagttgagttccaaaagagagttgctgagcattaccattcactccgtgattcgacatggaaggtcgtcgatggttcccttcccatggagaccgtggaagaacagctaagagaactagccatgaattgcatttcagaatgccaagacaagcaacttaccaatcttccctggtagagttcccgcgatgaaatgccaaaccacataggcacatcggcaagatctctctttagtatgtgattgactgttgctctgttagatctctgaagtgtgtgattgactgttgcgattgactgctgctccgttagatctcttttaagtgtgtgattgacgactgttactctggatgagatacaggcatatcatttctttcctc

SEQ ID NO: 28898 - protein, 288 aa, Triticum aestivum
IRPSSRPLPLTVGAAAAIHRREPSDATRSRYTRLCMTALVRLAGRAASWSRGASIAPPRGIGLFPQRRTAFQGARMENGGGKGGRGALIVLEGLDRSGKSSQCARLLSFLQGKGCATEGWRFPDRDTSVGKMISAYLANESQLDDRTIHLLFSANRWEKRSLMESKLLGGTTLVVDRYSYSGVAFSAAKGLDIGWCKAPEVGLLAPDLVIYLDVQPEKAAERGGYGGERYERVEFQKRVAEHYHSLRDSTWKVVDGSLPMETVEEQLRELAMNCISECQDKQLTNLPW

SEQ ID NO: 28899 - protein, 253 aa, Triticum aestivum
MTALVRLAGRAASWSRGASIAPPRGIGLFPQRRTAFQGARMENGGGKGGRGALIVLEGLDRSGKSSQCARLLSFLQGKGCATEGWRFPDRDTSVGKMISAYLANESQLDDRTIHLLFSANRWEKRSLMESKLLGGTTLVVDRYSYSGVAFSAAKGLDIGWCKAPEVGLLAPDLVIYLDVQPEKAAERGGYGGERYERVEFQKRVAEHYHSLRDSTWKVVDGSLPMETVEEQLRELAMNCISECQDKQLTNLPW

SEQ ID NO: 28900 - protein, 213 aa, Triticum aestivum
MENGGGKGGRGALIVLEGLDRSGKSSQCARLLSFLQGKGCATEGWRFPDRDTSVGKMISAYLANESQLDDRTIHLLFSANRWEKRSLMESKLLGGTTLVVDRYSYSGVAFSAAKGLDIGWCKAPEVGLLAPDLVIYLDVQPEKAAERGGYGGERYERVEFQKRVAEHYHSLRDSTWKVVDGSLPMETVEEQLRELAMNCISECQDKQLTNLPW

SEQ ID NO: 28901 - DNA, 619 bp, Triticum aestivum
accaccccttcccatcccatcccgctctgctcagctctagtgttttctctccatccaccgatcgagtgaagctctccgtccgccggacgaaagatcgacgaccatggcgggcacggccaactgcatcgacatcatcctcgccatcatcctcccgcccctcggcgtcttcctcaagttcggctgcgggcacgagttctggatctgcctcctgctcaccttcctcgggtacatcccggggatcatctacgccatctacgccatcaccaagtaaactagctagcaagccgtcccaagtgttcggcgacacaatattttcaggatgatttgatctcttggtctagtccctccttgcttgtgtgggttcgtttaattcttttctgtgtgcgttgatgatgcgaattcctccgtggtttccgtggaccgtgtgaagagcatcatcttctttatgtatatgatatatgggagtttatatatgctccccgagtgggaatacttcttcttaaagttaggctggtcacaatgggcaagaacataagctagtaccttacacactttcctgagattatgttattatcttcatagtgtgtaagaacatctatatagtgtcatgcaacgatgg

SEQ ID NO: 28902 - protein, 106 aa, Triticum aestivum
HPFPSHPALLSSSVFSPSTDRVKLSVRRTKDRRPWRARPTASTSSSPSSSRPSASSSSSAAGTSSGSASCSPSSGTSRGSSTPSTPSPSKLASKPSQVFGDTIFSG

SEQ ID NO: 28903 - protein, 55 aa, Triticum aestivum
MAGTANCIDIILAIILPPLGVFLKFGCGHEFWICLLLTFLGYIPGIIYAIYAITK

SEQ ID NO: 28904 - DNA, 953 bp, Triticum aestivum
aatacatccccctccccccttccctcgtgctcctcttacccctctcccaattcagagctctccgtcgattccgacgcagccgccgccgactcatcctcctccacctcaccggaaggccgcctggccacgcgcccgagccgaatccctcgccctgcctcccgtgattcagacgtgtttcctggctgcgtggaaatggaaggcgttgttgtaaggagagtgatcccttcggacaacagttgcctcttcaatgcggtcggttatgtgatggagcataacaaaaataaggcttctgagctcagacaggtcatagcagcagcggttgcaagtgatcctgaaaagtacaacgaagcatttcttggaaaaccaaatgaagcgtattgtgcttggattatggaccctgagaagtggggaggtgccatagaactttcaattctgtcagaatattatgggcgtgaaattgctgcatatgacatccagacaacacgatgtgatctgtatggtcaggggaagaactacaatgagagggcaatgctcatttatgatgggttgcattacgatgctttagcaatgtctccagctgaaggggcaccagaagaatttgatcagaccatctacgttgttgaccagaaccgttccattggtccagtagaaggccttgctcttaacttagcgaaggaggcacataggaagaggagctacacagacaccgcaaactttacattgcgctgcggcgtgtgccaaattggtgtcattggtcaaaaggaagctgtggaacacgcgcaagccaccggccatgtcaatttccaagaatacaaatgaccatagaagatatactagttcttcttcttccgctgttgttgtacactcatttgttgcaattgttttcttcctgatatggtactattgcaaaatattaatttgttacagagcaaatttaataagctccagtttgg

SEQ ID NO: 28905 - protein, 272 aa, Triticum aestivum
NTSPSPLPSCSSYPSPNSELSVDSDAAAADSSSSTSPEGRLATRPSRIPRPASRDSDVFPGCVEMEGVVVRRVIPSDNSCLFNAVGYVMEHNKNKASELRQVIAAAVASDPEKYNEAFLGKPNEAYCAWIMDPEKWGGAIELSILSEYYGREIAAYDIQTTRCDLYGQGKNYNERAMLIYDGLHYDALAMSPAEGAPEEFDQTIYVVDQNRSIGPVEGLALNLAKEAHRKRSYTDTANFTLRCGVCQIGVIGQKEAVEHAQATGHVNFQEYK

SEQ ID NO: 28906 - protein, 208 aa, Triticum aestivum
MEGVVVRRVIPSDNSCLFNAVGYVMEHNKNKASELRQVIAAAVASDPEKYNEAFLGKPNEAYCAWIMDPEKWGGAIELSILSEYYGREIAAYDIQTTRCDLYGQGKNYNERAMLIYDGLHYDALAMSPAEGAPEEFDQTIYVVDQNRSIGPVEGLALNLAKEAHRKRSYTDTANFTLRCGVCQIGVIGQKEAVEHAQATGHVNFQEYK

SEQ ID NO: 28907 - protein, 184 aa, Triticum aestivum
MEHNKNKASELRQVIAAAVASDPEKYNEAFLGKPNEAYCAWIMDPEKWGGAIELSILSEYYGREIAAYDIQTTRCDLYGQGKNYNERAMLIYDGLHYDALAMSPAEGAPEEFDQTIYVVDQNRSIGPVEGLALNLAKEAHRKRSYTDTANFTLRCGVCQIGVIGQKEAVEHAQATGHVNFQEYK

SEQ ID NO: 28908 - DNA, 837 bp, Triticum aestivum
  misc_feature (88)..(88): n is a, c, g, or t
ccttcttctctcccgctgaaacctttcttcacaaaatggcctcaactacactaacaaccctctccctccgcaacctctcttatcctanaccctcctcctcttcttaccctacgcacctctccgccaacccctcctccctccaattccccaacttctcccaccgcgccaccaccacgcgccgcgcccgcgtcgtcgtcgtctccgccgtcgaggcaccggagaaaatcaccaagctcggcgacgaaatcgcgggactcacgctcgaggaagccaagaacctcgtcgacttcctccaggacaagctcggcgtctccgcggcagcattcgcccccgtagccgtcgccgcgggtgccgtcggcgccgtggcggacgctccggcggcggtggaggagaagatggagttcgacgtgttgatcgaggaggtgccgagcaacgcgagaatcgcggtgattaaggcggtgagggcgctgactaacctggcgctgaaagaggcgaaggagttgatagaagggttgccgaagaagttcaaggaagggatttcgaaggacgaagctgaagatgcgaagaagcaacttgaagaagccggtgccaaggttaccattgcttagtactgtttagcagcagcatttgttttgcttcttcttttgttgtagctgagttcactagtacactgtaatctcctttccattttgtctggagttcaatcttatttgtaatgaggaaaaaatgagttcttattttttttttaatgcctctgaggtgtttgttgaaatggaggtgaagggttttaaattgctgaattggaaattggaaacacggtacttaactacttgctgg

SEQ ID NO: 28909 - protein, 201 aa, Triticum aestivum
  misc_feature (29)..(29): Xaa can be any naturally occurring amino acid
FFSPAETFLHKMASTTLTTLSLRNLSYPXPSSSSYPTHLSANPSSLQFPNFSHRATTTRRARVVVVSAVEAPEKITKLGDEIAGLTLEEAKNLVDFLQDKLGVSAAAFAPVAVAAGAVGAVADAPAAVEEKMEFDVLIEEVPSNARIAVIKAVRALTNLALKEAKELIEGLPKKFKEGISKDEAEDAKKQLEEAGAKVTIA

SEQ ID NO: 28910 - protein, 190 aa, Triticum aestivum
  misc_feature (18)..(18): Xaa can be any naturally occurring amino acid
MASTTLTTLSLRNLSYPXPSSSSYPTHLSANPSSLQFPNFSHRATTTRRARVVVVSAVEAPEKITKLGDEIAGLTLEEAKNLVDFLQDKLGVSAAAFAPVAVAAGAVGAVADAPAAVEEKMEFDVLIEEVPSNARIAVIKAVRALTNLALKEAKELIEGLPKKFKEGISKDEAEDAKKQLEEAGAKVTIA

SEQ ID NO: 28911 - DNA, 622 bp, Triticum aestivum
atttgcggtcacgtcagtcattacttcgcaagatccgcatccaaacctgagctgtataaggtcgacgacggacaaggaaaagagatgccgttgaacaccatctgcgtacgtaagggtatggctgcttccttcttcctgagtctcgtcgtccccttggttctgcttcttctgccgctctcgcgctcggcgtcggtggtgacccatctccccggcttccatggccgccttccgttccacctggagaccgggtacgtcaacgtggacgaggagacgggaacggagctcttctactacttcgtggagtcggagaggagccccgacacggaccccgtcgtcctgtggctgacgggcgggcccggctgctctagcttgattttctacgaagttggtgaggccctcatcctccgttcctcgtctcctgtgggcgtattagctggctagaaggaagccgccatgctgtcaattactacatcagattaagataaagagtgaagttaacttctattagcctctaattcaaagctagatgagcaaatcgtccgagtttgcaaatgtgtatcaggttgtgttacaaagtttggcaccttttatccaaagttttaaatagccccatagctgggtt

SEQ ID NO: 28912 - protein, 146 aa, Triticum aestivum
ICGHVSHYFARSASKPELYKVDDGQGKEMPLNTICVRKGMAASFFLSLVVPLVLLLLPLSRSASVVTHLPGFHGRLPFHLETGYVNVDEETGTELFYYFVESERSPDTDPVVLWLTGGPGCSSLIFYEVGEALILRSSSPVGVLAG

SEQ ID NO: 28913 - protein, 118 aa, Triticum aestivum
MPLNTICVRKGMAASFFLSLVVPLVLLLLPLSRSASVVTHLPGFHGRLPFHLETGYVNVDEETGTELFYYFVESERSPDTDPVVLWLTGGPGCSSLIFYEVGEALILRSSSPVGVLAG

SEQ ID NO: 28914 - protein, 107 aa, Triticum aestivum
MAASFFLSLVVPLVLLLLPLSRSASVVTHLPGFHGRLPFHLETGYVNVDEETGTELFYYFVESERSPDTDPVVLWLTGGPGCSSLIFYEVGEALILRSSSPVGVLAG

SEQ ID NO: 28915 - DNA, 1398 bp, Triticum aestivum
agatgcaaaggtactcgcgcgccgccgacgtacttggcttcgtctacctccatcctttgtccaaatgcgtagcttcacctgcagcggcggtgagcaaggtggccgggcagccgctggagatggaggaggtggaggtggcgccgccgcgggcgcacgaggtccgcatcaggattctctgcacctcgctctgccacaccgacgtcaccttctggcgcttgaaggatttcccgggccagcatccgataatcctgggccatgaagcagccggcgtggtggagagcgtgggggagcacgtgcacgaggtggccgtcggggacacggtggtgccggtgttctcggcgcagtgcggcgactgccccgactgcctctcggaccgcagcaacatctgctccgggctccccgcccggcccggcatgccgcgcgacggcacgacccgcttctcgttcgccgccaccggcgagcccatccacaacttcatcggcgtgtccagcttcaccgagtacacggtcgtcgacgtcgcgcgcgtcgtcaggatcgggcccggcgtcccgccggagaaggcctgcctgctcagctgcggcgtctccaccggtgtcggcgcggcgtggaaggtggcggcggtggagcccgggtccagcgtcgccgtgttcgggctcggcgtcgtcgggttagcggtagcacaagggtgcaggatgcgtggggctaagcagattattggagtggatctgaacccggagaagtgggacatcggtaagaggctgggaatcaccgacttcgtcaatccgaacgatatcggggagaaggccgtgagcgaggtcatcaaggagatgaccggcggcggcgccgactactgcttcgagtgcatcgggtcgacgtcggtcatggcggaggcgttccaaagctcccggaagggctgggggaagacggtcgtgctcggcgtctccagcggcggcgcgccgatgagcatacccccgcacgacatcctcatggggaggtcggtcgtcggctcgctcttcggcgggctcaagcccaaggccgacatcccgatcctggcgcagaagtacctggacaaggagctggagttggacgagttcgtgacgcacgagatggggttccacgacatcaacgcggcgttcgagctgctcacgcaggggaagtgcctcaggtgcatcatctggatggacggggccaaggcgaacggcgtggaggccctcgataatggccgcgcgtgcaaggcgtgactgatatcgctgtcgtcctcggcaaccttgtgatcagccacgatagccactgctcgtctgtcggagcaggtcgacctgtctgcggttggtcattgggacgcgagatcgactagtttattctgatgagaacatgcgtctgattcgactgtgtcttttg

SEQ ID NO: 28916 - protein, 412 aa, Triticum aestivum
MQRYSRAADVLGFVYLHPLSKCVASPAAAVSKVAGQPLEMEEVEVAPPRAHEVRIRILCTSLCHTDVTFWRLKDFPGQHPIILGHEAAGVVESVGEHVHEVAVGDTVVPVFSAQCGDCPDCLSDRSNICSGLPARPGMPRDGTTRFSFAATGEPIHNFIGVSSFTEYTVVDVARVVRIGPGVPPEKACLLSCGVSTGVGAAWKVAAVEPGSSVAVFGLGVVGLAVAQGCRMRGAKQIIGVDLNPEKWDIGKRLGITDFVNPNDIGEKAVSEVIKEMTGGGADYCFECIGSTSVMAEAFQSSRKGWGKTVVLGVSSGGAPMSIPPHDILMGRSVVGSLFGGLKPKADIPILAQKYLDKELELDEFVTHEMGFHDINAAFELLTQGKCLRCIIWMDGAKANGVEALDNGRACKA

SEQ ID NO: 28917 - protein, 373 aa, Triticum aestivum
MEEVEVAPPRAHEVRIRILCTSLCHTDVTFWRLKDFPGQHPIILGHEAAGVVESVGEHVHEVAVGDTVVPVFSAQCGDCPDCLSDRSNICSGLPARPGMPRDGTTRFSFAATGEPIHNFIGVSSFTEYTVVDVARVVRIGPGVPPEKACLLSCGVSTGVGAAWKVAAVEPGSSVAVFGLGVVGLAVAQGCRMRGAKQIIGVDLNPEKWDIGKRLGITDFVNPNDIGEKAVSEVIKEMTGGGADYCFECIGSTSVMAEAFQSSRKGWGKTVVLGVSSGGAPMSIPPHDILMGRSVVGSLFGGLKPKADIPILAQKYLDKELELDEFVTHEMGFHDINAAFELLTQGKCLRCIIWMDGAKANGVEALDNGRACKA

SEQ ID NO: 28918 - protein, 275 aa, Triticum aestivum
MPRDGTTRFSFAATGEPIHNFIGVSSFTEYTVVDVARVVRIGPGVPPEKACLLSCGVSTGVGAAWKVAAVEPGSSVAVFGLGVVGLAVAQGCRMRGAKQIIGVDLNPEKWDIGKRLGITDFVNPNDIGEKAVSEVIKEMTGGGADYCFECIGSTSVMAEAFQSSRKGWGKTVVLGVSSGGAPMSIPPHDILMGRSVVGSLFGGLKPKADIPILAQKYLDKELELDEFVTHEMGFHDINAAFELLTQGKCLRCIIWMDGAKANGVEALDNGRACKA

SEQ ID NO: 28919 - DNA, 1441 bp, Triticum aestivum
agaattatgccgttagaatatacagtatcttcgttcttgaatgatacataacttcatactacgtactgtctgaccaccggtgtttttcttcgttgtcagcagcatcatgggtgccggcggcaggatgacagagaaggagcgggagctgctcggccgcggcggcgccagcacgaccttccagcgctcgccgacggacaagccgccgttcacgctggcccagatcaagaaggcaatcccgccacactgcttcgagcgctcggtgatcaagtccttctcctacctgggccatgacctcgtcatcgtcgcggccctactgtacgtggcgctggtctggatccccaccctcccgagcgtgctgcagctgggcgcctggccgctctactgggtcgtgcagggctgcgtcatgaccggcgtctgggtcatcgcgcacgagtgcggccaccacgctttctccgactcctcgctgctcgacgacatcgtcggcctggtgctccactcgtggctgctcgtcccctacttctcgtggaagtacagccaccgccgccaccattccaacacgggctcgctggagcgcgacgaggtgttcgtccccaagcagaaggagacgctggcgtggtacgccccctacatctacagcaaccccgtcggacgtctggggctcctcgtcgtgcagctgaccatcgggtggccgatgtacctgtcgctcaacacctgcggccgcccgtacccgcgcttcgcctgccacttcgacccctacagcccgatctacaacgaccgggagcgcgcccaggtttccatctcggacgtcggcgtgctggccgtgtccctcgccttgtccaagctcgcgtcggccttggggttctggtgggtggtgcgggtctacggcgtgccgctgctgatcgtgaacgcgtggctggtcctggtcacctacctgcagcacacccacccggcgctgccgcactacgactcgacggagtgggactggctgcgcggggcgctcgccaccatggaccgcgactacggcatcctcaaccgcgtgttccacaacatcacggacacgcacgtggcgcaccacctcttctccaccatgccgcactaccacgccatggaggccaccaaggcgatcaagcccatcctcggcgagtactaccagttcgaccccacccccgtcgccaaggccacatggcgcgaggccaaggagtgcatctacgtccggcccgaagaccgcaagggagtcttctggtacagcaacaagttctctgcgccttagtcgccggcttaggtttggccggcggtcatcgttggtgtccggtcattgacatggccgtgtgtgctgtgtgcgcgtctgtcattgcattggcgtcatctaccccgttcatgtcgtgttgttgtagaccatttcgtgtttatggcggaataactgaaacacaataaaaattac

SEQ ID NO: 28920 - protein, 387 aa, Triticum aestivum
MGAGGRMTEKERELLGRGGASTTFQRSPTDKPPFTLAQIKKAIPPHCFERSVIKSFSYLGHDLVIVAALLYVALVWIPTLPSVLQLGAWPLYWVVQGCVMTGVWVIAHECGHHAFSDSSLLDDIVGLVLHSWLLVPYFSWKYSHRRHHSNTGSLERDEVFVPKQKETLAWYAPYIYSNPVGRLGLLVVQLTIGWPMYLSLNTCGRPYPRFACHFDPYSPIYNDRERAQVSISDVGVLAVSLALSKLASALGFWWVVRVYGVPLLIVNAWLVLVTYLQHTHPALPHYDSTEWDWLRGALATMDRDYGILNRVFHNITDTHVAHHLFSTMPHYHAMEATKAIKPILGEYYQFDPTPVAKATWREAKECIYVRPEDRKGVFWYSNKFSAP

SEQ ID NO: 28921 - protein, 381 aa, Triticum aestivum
MTEKERELLGRGGASTTFQRSPTDKPPFTLAQIKKAIPPHCFERSVIKSFSYLGHDLVIVAALLYVALVWIPTLPSVLQLGAWPLYWVVQGCVMTGVWVIAHECGHHAFSDSSLLDDIVGLVLHSWLLVPYFSWKYSHRRHHSNTGSLERDEVFVPKQKETLAWYAPYIYSNPVGRLGLLVVQLTIGWPMYLSLNTCGRPYPRFACHFDPYSPIYNDRERAQVSISDVGVLAVSLALSKLASALGFWWVVRVYGVPLLIVNAWLVLVTYLQHTHPALPHYDSTEWDWLRGALATMDRDYGILNRVFHNITDTHVAHHLFSTMPHYHAMEATKAIKPILGEYYQFDPTPVAKATWREAKECIYVRPEDRKGVFWYSNKFSAP

SEQ ID NO: 28922 - protein, 288 aa, Triticum aestivum
MTGVWVIAHECGHHAFSDSSLLDDIVGLVLHSWLLVPYFSWKYSHRRHHSNTGSLERDEVFVPKQKETLAWYAPYIYSNPVGRLGLLVVQLTIGWPMYLSLNTCGRPYPRFACHFDPYSPIYNDRERAQVSISDVGVLAVSLALSKLASALGFWWVVRVYGVPLLIVNAWLVLVTYLQHTHPALPHYDSTEWDWLRGALATMDRDYGILNRVFHNITDTHVAHHLFSTMPHYHAMEATKAIKPILGEYYQFDPTPVAKATWREAKECIYVRPEDRKGVFWYSNKFSAP

SEQ ID NO: 28923 - DNA, 1132 bp, Triticum aestivum
aaacgagatcagcgtctcgtgaatcctacggcccattcccccccgatcccctcccactttttcgtgctttactccaaagcgcaaggcgccttctcgcttccgcccctctccttcctcctcgccctcctctccgcccgccgcctgctcgccgtccgatccgccgccccccgtccgtctccatgggtctgctgtccaacaggatcgggaaggagagcctgaaggcgggggatcacatctactcgtggagggccgcgtgggtctacgcgcatcacggaatatatgtgggcgatgataaggtgattcattttaccagaggaagggaccaagaagtcggaacaggaactgtcattgattttcttcttgtgagctctggccctaataggagcaccacaccatgcttagtatgcagcagcgaagaagccaccaccgccgcggagacaaatggtgtgacttcctcttgcctcagctgtttcctggcagggggtgccctctatcgtttcgagtatgacgtcaacccggcactcttccttgccaaagtgcgaggagggacctgcacgcttgccgccactgatcccggcgaggtggttgtccgacgcgccaaatacttgttgaccaatggtttcaggtgctacagcctgttcaagaacaactgcgaggactttgcgatatactgcaagactggtctgcttgtggctgagcagggcaacgtcgggctcgggcagagtgggcaggctgtgtccatcatcggcggccctcttgctgctgtggtttcaacccctttccgcctagtaaccacaaacatctatggagtggcagtgatggctgttggggtgtattgtgtcagcaggtacgcaggtgacattggcaaccgccgagacgtgctgaaactggaagtggaggacctgactgccgggctcgcaagcggccggattcgtccagcgaacatcagtcagctggcaactccggggcaagtccaggctccggcagtgaccacactcgttgctgcttagaatgcagcactgatgttgtaaaatatggagatgtatacatcaccatcactactgctatatgtaccaccggaatagttgttcaaacctgctaaaactgtgccaagagtgaaatcccatcagca

SEQ ID NO: 28924 - protein, 335 aa, Triticum aestivum
TRSASRESYGPFPPDPLPLFRALLQSARRLLASAPLLPPRPPLRPPPARRPIRRPPSVSMGLLSNRIGKESLKAGDHIYSWRAAWVYAHHGIYVGDDKVIHFTRGRDQEVGTGTVIDFLLVSSGPNRSTTPCLVCSSEEATTAAETNGVTSSCLSCFLAGGALYRFEYDVNPALFLAKVRGGTCTLAATDPGEVVVRRAKYLLTNGFRCYSLFKNNCEDFAIYCKTGLLVAEQGNVGLGQSGQAVSIIGGPLAAVVSTPFRLVTTNIYGVAVMAVGVYCVSRYAGDIGNRRDVLKLEVEDLTAGLASGRIRPANISQLATPGQVQAPAVTTLVAA

SEQ ID NO: 28925 - protein, 276 aa, Triticum aestivum
MGLLSNRIGKESLKAGDHIYSWRAAWVYAHHGIYVGDDKVIHFTRGRDQEVGTGTVIDFLLVSSGPNRSTTPCLVCSSEEATTAAETNGVTSSCLSCFLAGGALYRFEYDVNPALFLAKVRGGTCTLAATDPGEVVVRRAKYLLTNGFRCYSLFKNNCEDFAIYCKTGLLVAEQGNVGLGQSGQAVSIIGGPLAAVVSTPFRLVTTNIYGVAVMAVGVYCVSRYAGDIGNRRDVLKLEVEDLTAGLASGRIRPANISQLATPGQVQAPAVTTLVAA

SEQ ID NO: 28926 - DNA, 1426 bp, Triticum aestivum
gaacatcctaatcgaaaaaacttttagcaaaccctctccttgtcctttgcttttggtccgctttctccttccaacccttcctcctcctctcgcattccagtagaatcgtctcggttgctagggtttgatcctacccttcctggcacgatggcgcatccgcccccgcggaactgggccatggcgccgccgtaccactaccacgggacgtcgcagcaggagcaggcggcgccagccgcggaggacgagagcggagccgggtccggagggcaggaggcagagtcgaggtcactccggatccgcgaacttttcccctggatggacgaggactacctgcgcagctgcttcacccgctcgcccgagcttgtgacagcagtgataacgcggaacaaggagaccaagcaatctgagggtttcggttatcttaccttttctgaccatgccactgctgaccaaatcctccagagctacaatggccagaagatgcctaatgctgacagggatttcagcctcagctgggtccagtatgctggtcctgatgatgattgtgccatatatgttgggggattgggctttgatgttacagacttcatgctacaccacgtgttcaagaatcgctatccatcagttaagagggcaaaagttatatgggattttcttgctagacgctcaaaaggctatgggtttgttgtgtttggagatgtcaatgaacgcacacaagcaatgactgaaatgaatggagcatactgttcttctaggcctatgcgtatcggacctgctaccttcaagagtgattttcgtacacaagggacatattctgattctaaccagaacaatagcagactttttgttggtcaacttgattcatgtgtgactgatgaggatctagataaagccttcagtccttatggagagcttactgtcaagggcatcagctgtggaggctatgacaattctaaatggaagccagctgggagataatatcataacagttaactgggctcgtcctgctcctaagaagcaggatcaatggaatggtgtggaccatggacaccctcaaagctctggtccaggttatggttgctgtcccgaggatcctaacattcttggttacacaggccatcctggatatgcatatcaccaacagcagcagccacagcagaccccagtacagtgaggacgccagagcagggaacgtctcagtcgcagggtgcagcgggattcttgtgacataaaactcagaaggacttttgctggaaataactgtattagttactcaagatgcctggaacaacattttttgcggcaagtttatttctctgggaaatagttgtccgtgctgctgctgtgtttctcattatgttgtgcaccatcacacaaattccctgagatgcctggaacaactttttttttggagagaattttcagg

SEQ ID NO: 28927 - protein, 276 aa, Triticum aestivum
MAHPPPRNWAMAPPYHYHGTSQQEQAAPAAEDESGAGSGGQEAESRSLRIRELFPWMDEDYLRSCFTRSPELVTAVITRNKETKQSEGFGYLTFSDHATADQILQSYNGQKMPNADRDFSLSWVQYAGPDDDCAIYVGGLGFDVTDFMLHHVFKNRYPSVKRAKVIWDFLARRSKGYGFVVFGDVNERTQAMTEMNGAYCSSRPMRIGPATFKSDFRTQGTYSDSNQNNSRLFVGQLDSCVTDEDLDKAFSPYGELTVKGISCGGYDNSKWKPAGR

SEQ ID NO: 28928 - protein, 266 aa, Triticum aestivum
MAPPYHYHGTSQQEQAAPAAEDESGAGSGGQEAESRSLRIRELFPWMDEDYLRSCFTRSPELVTAVITRNKETKQSEGFGYLTFSDHATADQILQSYNGQKMPNADRDFSLSWVQYAGPDDDCAIYVGGLGFDVTDFMLHHVFKNRYPSVKRAKVIWDFLARRSKGYGFVVFGDVNERTQAMTEMNGAYCSSRPMRIGPATFKSDFRTQGTYSDSNQNNSRLFVGQLDSCVTDEDLDKAFSPYGELTVKGISCGGYDNSKWKPAGR

SEQ ID NO: 28929 - protein, 220 aa, Triticum aestivum
MDEDYLRSCFTRSPELVTAVITRNKETKQSEGFGYLTFSDHATADQILQSYNGQKMPNADRDFSLSWVQYAGPDDDCAIYVGGLGFDVTDFMLHHVFKNRYPSVKRAKVIWDFLARRSKGYGFVVFGDVNERTQAMTEMNGAYCSSRPMRIGPATFKSDFRTQGTYSDSNQNNSRLFVGQLDSCVTDEDLDKAFSPYGELTVKGISCGGYDNSKWKPAGR

SEQ ID NO: 28930 - DNA, 941 bp, Triticum aestivum
aagcggcgccggcggctagcgagatcgcggcggtgggtgtgatcggcgcggggcagatgggctcgggcatcgcccagctcgccgccgccgccggctgcggcgtcttcctcctcgactccgaccccgcggccctctcccgtgccgtcgcctccatctcctcctccctcggccgcctcgtctccaagggccagctctcccaggctgcgtgcgatgattccgtcaagcggataaagtgcgtctccgatgtgcaagagctgcggggcgtggatctggtgattgaggccatcgttgagtccgaagacgtcaagaagaagctgttcgtggagctggacaggatcaccaaaccttctgccattcttgcgtccaacaccagctccatttctataacccggctcgcctcagctactagccgcccctctcaggtgataggcatgcacttttttaaccctcctcctataatgaagctggttgaaataatacgaggagctgatacatccgaagaggttttctctcaaggtaaatctttctctgaaaggattgggaagaccgttatatgctcacaagattatcccggcttcatggtaaaccgcatcctaatgccgatgattaatgaagcattttgggcactttacactggggtagcaaccaaagaggacatcgacgcagggatgaagctcggcacgaatcatccaatggggcctctgcagcttgctgacttcatagggttagatgtttgcctttcagtacttagggtgctccacaacgggctaggagataacaagtacagcccttgccctcttcttgtccaatatgtcgatgccggacgacttggaaagaagcgcggactaggtgtatctcttacaggagaaactcttcatccgttaaacccaaatcatctctgtaaaaatatcagcgcggctgttgagcaaagaaatgaagtt

SEQ ID NO: 28931 - protein, 313 aa, Triticum aestivum
AAPAASEIAAVGVIGAGQMGSGIAQLAAAAGCGVFLLDSDPAALSRAVASISSSLGRLVSKGQLSQAACDDSVKRIKCVSDVQELRGVDLVIEAIVESEDVKKKLFVELDRITKPSAILASNTSSISITRLASATSRPSQVIGMHFFNPPPIMKLVEIIRGADTSEEVFSQGKSFSERIGKTVICSQDYPGFMVNRILMPMINEAFWALYTGVATKEDIDAGMKLGTNHPMGPLQLADFIGLDVCLSVLRVLHNGLGDNKYSPCPLLVQYVDAGRLGKKRGLGVSLTGETLHPLNPNHLCKNISAAVEQRNEV

SEQ ID NO: 28932 - protein, 295 aa, Triticum aestivum
MGSGIAQLAAAAGCGVFLLDSDPAALSRAVASISSSLGRLVSKGQLSQAACDDSVKRIKCVSDVQELRGVDLVIEAIVESEDVKKKLFVELDRITKPSAILASNTSSISITRLASATSRPSQVIGMHFFNPPPIMKLVEIIRGADTSEEVFSQGKSFSERIGKTVICSQDYPGFMVNRILMPMINEAFWALYTGVATKEDIDAGMKLGTNHPMGPLQLADFIGLDVCLSVLRVLHNGLGDNKYSPCPLLVQYVDAGRLGKKRGLGVSLTGETLHPLNPNHLCKNISAAVEQRNEV

SEQ ID NO: 28933 - protein, 170 aa, Triticum aestivum
MHFFNPPPIMKLVEIIRGADTSEEVFSQGKSFSERIGKTVICSQDYPGFMVNRILMPMINEAFWALYTGVATKEDIDAGMKLGTNHPMGPLQLADFIGLDVCLSVLRVLHNGLGDNKYSPCPLLVQYVDAGRLGKKRGLGVSLTGETLHPLNPNHLCKNISAAVEQRNEV

SEQ ID NO: 28934 - DNA, 1227 bp, Triticum aestivum
gtggttggatcggcttccgagtgccgcggcgtgtcggcggcgaccggccgacatgagggtggtggtgacgggcgcgacggggtacctgggcgggcgcctgtgcgcggcgctggcgggggcggggcacgacgtgcgggcgttcgtgcgccgcaccggcgacgcgtccggcctgcccgacgccgtcgagctcgcctacggcgacgtcggcgacgcggactccctcgccgcggccttcgacgggcgcgacgccgtcttccacgccgccgcctccgtcgagccatggctccccgacccctccgtcttcacggccgtcaatgtgagagggcttgagaatgtgttaacagcggccaagagaacgccgacagtaaagaagatcatatacacgtcgtcgttcttcgcacttggcccaacagatggttatgtcgcagatgagacacagatgcacaaagggaaaacattttgcacggagtatgagaaatcaaaggttcttgcagatagaatcgcattgcaggcagcagcagagggggtgccaataaccattgtctatccaggagtcatctatggtcctggaaaacttacaactggaaaccttgtttcccgcattttaattgaaaggtttaatggccgtctacctggctacattggagatgggtatgatagagaatcattttgccatgtcgacgatgttgttagtgggcacatagcagctatggagaagggcagagtgggagaaagatatctgctcaccggcgaaaacttgtcattcatgcatattttcagtatggctgctaatatcacaaacacaaaggccccgtacttccacgtaccgctctggttgattgaaatatatggatggatttcagttttcatttcccgcatcactggaaagctccctcttatcagttaccctacagtgcgtgttattagacatcaatgggcgtattcatgtgagaaagcaaaaagggaactaggctacaatccaagaaacttgactgaaggtcttgctgagatgcttttatggctcaagaacgagaaactgatcaaattttagtgttctactctgttattacttccgttacatttctcacttcatgtagaccgtcatgttttatgtactggatcattgacatgtatatactgcagtatgccactgttctgttgtatcaagttgagatgtaataatgtaatactgagtccatatattcatataaaggaagagactgtatt

SEQ ID NO: 28935 - protein, 349 aa, Triticum aestivum
WLDRLPSAAACRRRPADMRVVVTGATGYLGGRLCAALAGAGHDVRAFVRRTGDASGLPDAVELAYGDVGDADSLAAAFDGRDAVFHAAASVEPWLPDPSVFTAVNVRGLENVLTAAKRTPTVKKIIYTSSFFALGPTDGYVADETQMHKGKTFCTEYEKSKVLADRIALQAAAEGVPITIVYPGVIYGPGKLTTGNLVSRILIERFNGRLPGYIGDGYDRESFCHVDDVVSGHIAAMEKGRVGERYLLTGENLSFMHIFSMAANITNTKAPYFHVPLWLIEIYGWISVFISRITGKLPLISYPTVRVIRHQWAYSCEKAKRELGYNPRNLTEGLAEMLLWLKNEKLIKF

SEQ ID NO: 28936 - protein, 332 aa, Triticum aestivum
MRVVVTGATGYLGGRLCAALAGAGHDVRAFVRRTGDASGLPDAVELAYGDVGDADSLAAAFDGRDAVFHAAASVEPWLPDPSVFTAVNVRGLENVLTAAKRTPTVKKIIYTSSFFALGPTDGYVADETQMHKGKTFCTEYEKSKVLADRIALQAAAEGVPITIVYPGVIYGPGKLTTGNLVSRILIERFNGRLPGYIGDGYDRESFCHVDDVVSGHIAAMEKGRVGERYLLTGENLSFMHIFSMAANITNTKAPYFHVPLWLIEIYGWISVFISRITGKLPLISYPTVRVIRHQWAYSCEKAKRELGYNPRNLTEGLAEMLLWLKNEKLIKF

SEQ ID NO: 28937 - protein, 203 aa, Triticum aestivum
MHKGKTFCTEYEKSKVLADRIALQAAAEGVPITIVYPGVIYGPGKLTTGNLVSRILIERFNGRLPGYIGDGYDRESFCHVDDVVSGHIAAMEKGRVGERYLLTGENLSFMHIFSMAANITNTKAPYFHVPLWLIEIYGWISVFISRITGKLPLISYPTVRVIRHQWAYSCEKAKRELGYNPRNLTEGLAEMLLWLKNEKLIKF

SEQ ID NO: 28938 - DNA, 951 bp, Triticum aestivum
cctcctcctccttgtcaaagctagccagcaagaaccaagaagaagcagagcagctcagaaccgagcgcagagcgaagcggagccaaacgaaagaagggacctaacctaacctagccaagccagccggcgatcgaccgagagatggcgcggtggtgtcagctggcggcggtgctgctcgccgtgtcgatggcggcgtcgacgtcggtggcgcaggacgcgctgcagaccaagtgccagggggacctgcagaagctgtcggactgcatggactacgcgacggggcacgaggaaacgccgtcggccaagtgctgcgaggacacggcggacacgcagaaggcgcggcccgagtgcctctgctccatcatccagcaggtgcacagcggcagccacggcgtgcagcagctcggcctccgcttcgaccgcctcctggcccagcccgcagcctgcaagctcacctacgccaacgtctccctctgcatcaacctgctgcacctgaccccgagctcgccagactacgctctcttcgcaaatgcttccaagattactccgtccactgccgcaccggcgagagacaccgccgacggcttcaaggtttcgccgggactcggttacggcgtcgtggcagcggccgtcgtctctgctgtcttctcatccatcttctgattttcggacaagcacacgcccttttatcctctccctttcttctatctgtcatgtttgtttacataaccctgcaagttcccacacaacgacgatgctttagatggtctattatctactcacgtggtaagaggattcgttcggatgacatactgttgttttaccccagataagaagatggaaagttgagacttgtgtttcttcatgtggaagtgatggtttgcagtaatatcctcaaaaaaaaaaaaaaaaaagcttatcgataccgtcgactgtttaaacacaataaag

SEQ ID NO: 28939 - protein, 173 aa, Triticum aestivum
MARWCQLAAVLLAVSMAASTSVAQDALQTKCQGDLQKLSDCMDYATGHEETPSAKCCEDTADTQKARPECLCSIIQQVHSGSHGVQQLGLRFDRLLAQPAACKLTYANVSLCINLLHLTPSSPDYALFANASKITPSTAAPARDTADGFKVSPGLGYGVVAAAVVSAVFSSIF

SEQ ID NO: 28940 - protein, 158 aa, Triticum aestivum
MAASTSVAQDALQTKCQGDLQKLSDCMDYATGHEETPSAKCCEDTADTQKARPECLCSIIQQVHSGSHGVQQLGLRFDRLLAQPAACKLTYANVSLCINLLHLTPSSPDYALFANASKITPSTAAPARDTADGFKVSPGLGYGVVAAAVVSAVFSSIF

SEQ ID NO: 28941 - protein, 132 aa, Triticum aestivum
MDYATGHEETPSAKCCEDTADTQKARPECLCSIIQQVHSGSHGVQQLGLRFDRLLAQPAACKLTYANVSLCINLLHLTPSSPDYALFANASKITPSTAAPARDTADGFKVSPGLGYGVVAAAVVSAVFSSIF

SEQ ID NO: 28942 - DNA, 781 bp, Triticum aestivum
aacccaaaacccttcttcccccacgacccctcacccggagaaccgcaggccggcggcgaagaagaaaagtaagaaggcatggtggtccggatccggctcgcgcggttcggctgccgcaaccggcccttctaccgggtgatggccgccgacagccgctccccgcgcgacggcaagcacctcgaggtcctcggctactacaacccgctccccgggaaggatggtggcaagaggatggggctcaagttcgaccgggtcaagtactggctatctgttggggcacaaccatcagatcctgtgcagcgtatcctcttccgtgccggtgttctgccgccacctccgttgctagctatgggccggaagggtggacctcgtgacaggaaccccattcatccgatgactggccgtcccttggatcttgagggtgtctcgattgtcgatgatcccaatgctgctgaaggtgatgctgaagcacctacagaaccttcgttggaggcgtgatagattctcttctggcatattgagtggtgctgcaagacaaaagaatttgtttattgtgcttctgctaagattatgagcacatagtgtatgatcttcaacaatttcgtcatgtaactctgctttgttagcctttgctgcaccatgtgttagccagccgtctccagtctactacgccgtgtcctaatatggttccttttgaatggattatgcaatttctgcattccttttggatgctcaagttgacaaataataattcaagtaaagtgctgaactgggtgccccg

SEQ ID NO: 28943 - protein, 139 aa, Triticum aestivum
MVVRIRLARFGCRNRPFYRVMAADSRSPRDGKHLEVLGYYNPLPGKDGGKRMGLKFDRVKYWLSVGAQPSDPVQRILFRAGVLPPPPLLAMGRKGGPRDRNPIHPMTGRPLDLEGVSIVDDPNAAEGDAEAPTEPSLEA

SEQ ID NO: 28944 - protein, 123 aa, Triticum aestivum
PKTLLPPRPLTRRTAGRRRRRKVRRHGGPDPARAVRLPQPALLPGDGRRQPLPARRQAPRGPRLLQPAPREGWWQEDGAQVRPGQVLAICWGTTIRSCAAYPLPCRCSAATSVASYGPEGWTS

SEQ ID NO: 28945 - protein, 119 aa, Triticum aestivum
MAADSRSPRDGKHLEVLGYYNPLPGKDGGKRMGLKFDRVKYWLSVGAQPSDPVQRILFRAGVLPPPPLLAMGRKGGPRDRNPIHPMTGRPLDLEGVSIVDDPNAAEGDAEAPTEPSLEA

SEQ ID NO: 28946 - DNA, 956 bp, Triticum aestivum
cctaaccaaaaagtcactggctagcttattcacatctcttttcttgagacattctcttgatccacatatttacctacctctctagctagaaacaaagcttgctcggcaacaatggctgcaggtggagcttctcttattgctgctgctgttttctccgtgctgatcatgtcttccctgggggatctgatgcctttatgcagcgattgcgagacgctgtgccgtaccaactgcaccgcggaggctgaagccaattgcgccaattactgcaacgacacccaagcaacagcagggtactgcgaaggttgcatgggcgcctacttcgaccagcactgcaatcccgagtgtctcaaaaattgcagcaaccgctgcaagaagaaggtgcttccgaggcctttatgcagcgactgcgacacggtatgcagtaccaagtgcgctgaggagcttgaaaccacctgcagccaagactgcgaccccaggcgcagcggtcaggcggcctgccagcgtcagctcttcaagcggtgcaacgcagagggtacctgctgcagtagcgacggcacatgcacttgtgactgcgagaccgaagctcgaaagcagtgcgtgggcgtcagcgacaactccaataattgcgaagtttgcaagcgcagccagttcgaccaggactgtcatcccacctgtaacaccgattgcaatggcaactgcaagaagaagaaagggtgccgcgggcacgcatagggaaaacatgtaactgggggccctgcattgcgtaggaaataacatggctccttgtagtcgtgcgtagatttcgatttctgtaaacgccacgacctggttttgtgggatggcacaggaggagtatgggtggtggcgcatcacccccagcttttggccgaggatttatattctgtatttctatttatgttttctgaacaatgaatcacaatgtgaaattatggttg

SEQ ID NO: 28947 - protein, 206 aa, Triticum aestivum
MAAGGASLIAAAVFSVLIMSSLGDLMPLCSDCETLCRTNCTAEAEANCANYCNDTQATAGYCEGCMGAYFDQHCNPECLKNCSNRCKKKVLPRPLCSDCDTVCSTKCAEELETTCSQDCDPRRSGQAACQRQLFKRCNAEGTCCSSDGTCTCDCETEARKQCVGVSDNSNNCEVCKRSQFDQDCHPTCNTDCNGNCKKKKGCRGHA

SEQ ID NO: 28948 - protein, 188 aa, Triticum aestivum
MSSLGDLMPLCSDCETLCRTNCTAEAEANCANYCNDTQATAGYCEGCMGAYFDQHCNPECLKNCSNRCKKKVLPRPLCSDCDTVCSTKCAEELETTCSQDCDPRRSGQAACQRQLFKRCNAEGTCCSSDGTCTCDCETEARKQCVGVSDNSNNCEVCKRSQFDQDCHPTCNTDCNGNCKKKKGCRGHA

SEQ ID NO: 28949 - protein, 181 aa, Triticum aestivum
MPLCSDCETLCRTNCTAEAEANCANYCNDTQATAGYCEGCMGAYFDQHCNPECLKNCSNRCKKKVLPRPLCSDCDTVCSTKCAEELETTCSQDCDPRRSGQAACQRQLFKRCNAEGTCCSSDGTCTCDCETEARKQCVGVSDNSNNCEVCKRSQFDQDCHPTCNTDCNGNCKKKKGCRGHA

SEQ ID NO: 28950 - DNA, 693 bp, Triticum aestivum
aagaagactcgtcagaccccaaacgaaccccgccgtctccgggcttctactccccgcgcctcgacctcgacctcgccggcggcggcggagccagatggcgtcgacgacgttcaggcgcttcagcgtggcggcggccgccgccgcgttcatcgccctcgcggccttcggatccgcctcggcgtccaagacggccttcgtcaagtccaccgtcaaagcccacgacgtcgtcatcttctccaagtcctactgcccgtattgtaaaagggcgaaggctgtgtttaaggaacttgaactgaagaaggacccatatgtcgtcgagcttgatcagcgagaggatggtggggaaatccaggacgccttatccgacatggttggcaggcgtactgttcctcaggttttcatccgaggaaagcacttgggaggctctgatgatactgttgacgcatatgaaaatggcgagctggctaaacttctgaacatcagtgtgaaggacgatctttgaatatcattttagcgcaaatctcgtacttactgttgaggttaccaaggccttgcaatgcaaccctagattgtcattttcgcagaacctgtcactggtattcgtgttgaagtataaactgttttaaccgtactttgtggcaatccctctgttatcactgttatcgatcattgcatactgattgactgcatttc

SEQ ID NO: 28951 - protein, 166 aa, Triticum aestivum
RRLVRPQTNPAVSGLLLPAPRPRPRRRRRSQMASTTFRRFSVAAAAAAFIALAAFGSASASKTAFVKSTVKAHDVVIFSKSYCPYCKRAKAVFKELELKKDPYVVELDQREDGGEIQDALSDMVGRRTVPQVFIRGKHLGGSDDTVDAYENGELAKLLNISVKDDL

SEQ ID NO: 28952 - protein, 135 aa, Triticum aestivum
MASTTFRRFSVAAAAAAFIALAAFGSASASKTAFVKSTVKAHDVVIFSKSYCPYCKRAKAVFKELELKKDPYVVELDQREDGGEIQDALSDMVGRRTVPQVFIRGKHLGGSDDTVDAYENGELAKLLNISVKDDL

SEQ ID NO: 28953 - protein, 97 aa, Triticum aestivum
EDSSDPKRTPPSPGFYSPRLDLDLAGGGGARWRRRRSGASAWRRPPPRSSPSRPSDPPRRPRRPSSSPPSKPTTSSSSPSPTARIVKGRRLCLRNLN

SEQ ID NO: 28954 - DNA, 1236 bp, Triticum aestivum
  misc_feature (1107)..(1108): n is a, c, g, or t
acctaccccagtggccagccctatagacgacttcctgtctccttccggcggccacctccgtccatcgctctccgccgccgccgccacccggactctaaatcccttgctcctctccaccggaaaccttgaccggccgaggaggcagcacattcacaccggcggcgtgatctggtctggtctgctagattgatcgttcattcactccattgatgacgctctctgcttccccgcactccccgccgccgtctacctcccggcccccgctcctctcctggcccagctagccagccggcgcgagcgagcgagctccccgtccaccgtccagctattagccaagctccttcgaggccggcaatggcggcgcccaggcccaagtccccgctcgacccctgcggccgccaccggctgcagctcgccgtcgacgcgctccaccgccagatcagcttcctcgagggggagatcagttccattgaagggctccatgctgcctccatatgctgcaaagaggtcgatgagttcataggaaagaatgccgatccattcatcacgatttcatctgagaagggaaatgctgatcaatctcatcgcttcccaaagaagattcgaacccggtgggcgtgtttgagctgcttcccgtggatctgcggcggcgggtgctccgccgtccagctcaaggggccgagctgctgctgcggatgcccccgttgctgcgtggggagcgggggctgcggcggcggaccctcgtgtggctgctcatgctcctgcgccggttgctcctcctcttgcgcgtgccctgcctgcgccggctgcggcgccgcgtgctgcggcggtgcccctcgccctcgctgctgcctgtgttcatgaggcgccctattgagatttttcctcttctttgttcttgctgtgtgcgttgcctgtaggctcaggctcggctggtgtttttgacgggcatgatgatgatgatgtatttctggctcagttggcgctgtggatttgcctggttttacttgccacagcgatggatcccttgtgctttcgtccttgctatagtctcctatgttgtaattaaaggtttggagataactgcagaatgaacggttcttctcnnaaaaaaaaaaaaaaaaaaaaaaaaaaaaaaaaaaaaaaaaaaaaaaaaaaaaaaaaaaaaaaaaaaaaaaaacccaaaaaaaaaaaaaaaaagttttttgaatcgggggaacttggggggggggcggg

SEQ ID NO: 28955 - protein, 169 aa, Triticum aestivum
MAAPRPKSPLDPCGRHRLQLAVDALHRQISFLEGEISSIEGLHAASICCKEVDEFIGKNADPFITISSEKGNADQSHRFPKKIRTRWACLSCFPWICGGGCSAVQLKGPSCCCGCPRCCVGSGGCGGGPSCGCSCSCAGCSSSCACPACAGCGAACCGGAPRPRCCLCS

SEQ ID NO: 28956 - DNA, 1344 bp, Triticum aestivum
actaaaaaagacttggccttttctattccaagtctctcttcccccatctctgcttctcttcttctcctgcacagtccacactgttcatctcctcttcgatccccaaatcccaagctgaccaaccaagaccccgccccgcatggagtggacggccccgaagtccaccccgctctccccgccccacctcctctgggactggggcgacgccgccgcgccgggctcctccggcgaggcggcggggaggcgcgggaaggagaagcgggccaggggggagggggccggcggaggaggaggaggaggaggagggggcgtgaggtgccaggtggagggctgcggggtcgagctccgcgacgcgaaggagtaccaccggaagcaccgggtctgcgaggcccacaccaagtccccccgcgtcgtcgtcgccggccaggagcgccgcttctgccagcagtgcagccggttccatgggctgtcggagttcgaccagaagaagaggagctgccggaggcgactgtccgatcacaatgctcggcgccggaagccacagccggacgcattctcctttgcaccggcaaggctcccgtcgtcattgatgtttgatgatagacggcaaataagttttgtctggaataaagatccacttagtcatggaaggcctttcccatgttctccatgggacagcccatctgacttcaagctcccgcaagtgaaggaaataagagaagtatcaatcaatgggcaagttcattttgataaatctcatctacccaatgctgttccagcactgagtcatgacatacctgagctgctaccaatgaaaggtccggacgcatctgtaaccgcttcgaaattaggtggagcaccggatcttcagcgtgctctctctcttctgtcagctagttcttgtggattacctgatcctgtacagcaagcatcttgtctcgtccaattcactggtgctagccaaaacagccggggcccttcaccacatggaggtagccctccgtcggtgtcctgtgccgaaggacagcccatggcgccatcgcctcagtttgtccgtttcaccatggacggcgccagcagtggctatgaatccactttcttcggcgtaaaccggatgaattgatgcgcgagacacacaagcttctgtacgattttggatctacagccaggaagagcttatgcaagaactgctcctgtcaagaaaatctcactgttcatgttacctacatactcattggtcaccttgttatttttccattgtacaaccctgctgccatttgttggctcttttgaaaccattgttgatgaatctggacatgatttgtttcatgaagtgatgacttg

SEQ ID NO: 28957 - protein, 327 aa, Triticum aestivum
MEWTAPKSTPLSPPHLLWDWGDAAAPGSSGEAAGRRGKEKRARGEGAGGGGGGGGGGVRCQVEGCGVELRDAKEYHRKHRVCEAHTKSPRVVVAGQERRFCQQCSRFHGLSEFDQKKRSCRRRLSDHNARRRKPQPDAFSFAPARLPSSLMFDDRRQISFVWNKDPLSHGRPFPCSPWDSPSDFKLPQVKEIREVSINGQVHFDKSHLPNAVPALSHDIPELLPMKGPDASVTASKLGGAPDLQRALSLLSASSCGLPDPVQQASCLVQFTGASQNSRGPSPHGGSPPSVSCAEGQPMAPSPQFVRFTMDGASSGYESTFFGVNRMN

SEQ ID NO: 28958 - protein, 198 aa, Triticum aestivum
TKKDLAFSIPSLSSPISASLLLLHSPHCSSPLRSPNPKLTNQDPAPHGVDGPEVHPALPAPPPLGLGRRRRAGLLRRGGGEAREGEAGQGGGGRRRRRRRRRGREVPGGGLRGRAPRREGVPPEAPGLRGPHQVPPRRRRRPGAPLLPAVQPVPWAVGVRPEEEELPEATVRSQCSAPEATAGRILLCTGKAPVVIDV

SEQ ID NO: 28959 - protein, 177 aa, Triticum aestivum
MFDDRRQISFVWNKDPLSHGRPFPCSPWDSPSDFKLPQVKEIREVSINGQVHFDKSHLPNAVPALSHDIPELLPMKGPDASVTASKLGGAPDLQRALSLLSASSCGLPDPVQQASCLVQFTGASQNSRGPSPHGGSPPSVSCAEGQPMAPSPQFVRFTMDGASSGYESTFFGVNRMN

SEQ ID NO: 28960 - DNA, 632 bp, Triticum aestivum
acatcgcagcatctgcatcccccgtcgccttcgatccaaaccccacctccccacaacctcgaatcatcagcagcagccgctcccatggcgcccaaggcggagaagaagccggtggctacggagaagtccccggcggggaagaagcccaaggctgagaagcggccgccggcgtccaaggagggcggcgacaagaaggggaagaagaaggccaagaagagcgtggagacgtacaagatctacatcttcaaggtgctgaagcaggtgcacccggacattggcatctcctccaaggccatgtccatcatgaactccttcatcaacgacatcttcgagaagcttgccggcgagtccgccaagctggccagatacaacaagaagcccaccatcacctcccgggagatccagacctccgtccgccttgtcctccccggcgagctcgccaagcatgccgtctccgagggcaccaaggccgtcaccaagttcacctcctcctaggcgtcagtctcgtttctgaacccgttggattctgtatgtagttaggtgcaagattgtcttctgaatttgtgatcttgtgctgcttgttggtctgcagaaatgttcatgggactacttaatgatattcttgctgcttg

SEQ ID NO: 28961 - protein, 164 aa, Triticum aestivum
TSQHLHPPSPSIQTPPPHNLESSAAAAPMAPKAEKKPVATEKSPAGKKPKAEKRPPASKEGGDKKGKKKAKKSVETYKIYIFKVLKQVHPDIGISSKAMSIMNSFINDIFEKLAGESAKLARYNKKPTITSREIQTSVRLVLPGELAKHAVSEGTKAVTKFTSS

SEQ ID NO: 28962 - protein, 136 aa, Triticum aestivum
MAPKAEKKPVATEKSPAGKKPKAEKRPPASKEGGDKKGKKKAKKSVETYKIYIFKVLKQVHPDIGISSKAMSIMNSFINDIFEKLAGESAKLARYNKKPTITSREIQTSVRLVLPGELAKHAVSEGTKAVTKFTSS

SEQ ID NO: 28963 - protein, 84 aa, Triticum aestivum
HRSICIPRRLRSKPHLPTTSNHQQQPLPWRPRRRRSRWLRRSPRRGRSPRLRSGRRRPRRAATRRGRRRPRRAWRRTRSTSSRC

SEQ ID NO: 28964 - DNA, 759 bp, Triticum aestivum
ccatcaagctagcagcacggcattaaactaatttgacagcgatcccgatccgtcatcacatctcacacgagacagtcgttcgatccgtccgtggagcagccatggcgcagctgatggacaaggccaaggggttcgtggccgagaagatatcgggggtgcagaagccggaggcggacctgtcggacatgtcggtgcagcacgttggccgcgacggcgccaccctgtccggccgcctcgacgtgcgcaacccctactcgcacaccatccccatctgcgagatcagctactccctcaagagcgccggccgcgacgtggcctccgggaccatgccggacccggggtcgctggtggccagcgacaccaccagcctcgacataccggtgaaggtgccgtacgacttcctgatgagcctggtgaaggacgccggcaaggactgggacctcgactacgagatgcgcgtcggcctcaccgtcgacctccccatcgtcggcaacttcacgctgccgctcaccaaggccggcgagctcaagctccccacgctctccgacctgttctaaacttaccgccgcacccagctaagtaggttcgaccgtgccgtactagctgctgcgctctccatcgcctgtacgggtgatgggtagtactgggctgggcgagcgggacgatcgatcgctgcctagctctgtttttacttcggatcgcggtgtgggtgtgcacgacgtaataatgatgtattgcgtgttgtatttctagactttt

SEQ ID NO: 28965 - protein, 151 aa, Triticum aestivum; identical to SEQ ID NO: 14968

SEQ ID NO: 28966 - protein, 147 aa, Triticum aestivum; identical to SEQ ID NO: 14969

SEQ ID NO: 28967 - protein, 123 aa, Triticum aestivum; identical to SEQ ID NO: 14970

SEQ ID NO: 28968 - DNA, 797 bp, Triticum aestivum
catgagaagcaaaatataagaacactgattttagttgggtgttcaaatctgagctctctttcccttggggaagtactagtgcagtttccgaacatatgttatgtgcacattcagggttgcagtcaactatgggatatgaaaagcagatttcaccatattaaatggattaagagctctttgaatcctgaggagtcactccagaaaattaaaagcctgaagcagatagatgatggaaacgattatgcatccaaagttgcaaggaacttgaccagtcagctgggtggttctgatgaacttgatggctattttgctgatatctcaaatagagagaatgccaatctttcctttgggcaaggtttctataaacgatcaaaatggcttgatgctagaaaatcctctgctgttttgtcgaaggatgcacaactaaggcgtttgatgcagaggaaggccgagaatagctaccggaagatggaagagtttgtcatcaatagattgagagaaatcatgaagagcagcagatttgatttcttcattccaaaggttgcaaaaattgaaggtaggttgaaaagtggatattatgctcggcatggctttagttctctcaagaacgatattcgatctatgtgccgtgatgcattgagatataaaggccgaagtgatttgggagatatgaagcaaattgttgtgtcctttatccagttagcaaagagactcggtaacccacgattgatttctgagagagatggagcagcagcccagaaggacaattctgacacgagtcaatattcttcagacgc

SEQ ID NO: 28969 - protein, 265 aa, Triticum aestivum
HEKQNIRTLILVGCSNLSSLSLGEVLVQFPNICYVHIQGCSQLWDMKSRFHHIKWIKSSLNPEESLQKIKSLKQIDDGNDYASKVARNLTSQLGGSDELDGYFADISNRENANLSFGQGFYKRSKWLDARKSSAVLSKDAQLRRLMQRKAENSYRKMEEFVINRLREIMKSSRFDFFIPKVAKIEGRLKSGYYARHGFSSLKNDIRSMCRDALRYKGRSDLGDMKQIVVSFIQLAKRLGNPRLISERDGAAAQKDNSDTSQYSSD

SEQ ID NO: 28970 - protein, 220 aa, Triticum aestivum
MKSRFHHIKWIKSSLNPEESLQKIKSLKQIDDGNDYASKVARNLTSQLGGSDELDGYFADISNRENANLSFGQGFYKRSKWLDARKSSAVLSKDAQLRRLMQRKAENSYRKMEEFVINRLREIMKSSRFDFFIPKVAKIEGRLKSGYYARHGFSSLKNDIRSMCRDALRYKGRSDLGDMKQIVVSFIQLAKRLGNPRLISERDGAAAQKDNSDTSQYSSD

SEQ ID NO: 28971 - DNA, 656 bp, Triticum aestivum
ctccaagaaagaagaagagcaaaaccctagagattgaggcgcggctgctctagcgttcctcttcgcctccgcggcatctcgaccaccgccgccgccgccgagctcgcgagatctccggcctactccggtcatccttccccgcgaaggcgtcgcgacaatggctgccgccaaggacgtgcggagcgagctggagaaggagatgatgttcgggatggcggagaaggagatggagtaccgggtcgagcttttcaaccggcttacacatgtttgttttgagaagtgcattgagaaaaggcataaagaaggtgaactcaatatgggagagaacagttgcattgatcggtgtgcttcaaagtactggcaggtgactaacattgtcggcggaatgctcgggactcagcagaccccgatgtgagcgcactgagaagcagtagtcgctctgtagcaggacaccgtccccatgtttctcctctgtttttgttttggaatgttcgccgtttcgctaagtaaagcatgagtgaccgactaattcatatatactgttcaaaagggaaccctcagcgtgtcgcgctttccagtggtgtaccatgccactgaatcatgggcaggggcgcatgcctgtaataatttggtacagctcgatagattttgttgcc

SEQ ID NO: 28972 - protein, 85 aa, Triticum aestivum
MAAAKDVRSELEKEMMFGMAEKEMEYRVELFNRLTHVCFEKCIEKRHKEGELNMGENSCIDRCASKYWQVTNIVGGMLGTQQTPM

SEQ ID NO: 28973 - protein, 71 aa, Triticum aestivum
MMFGMAEKEMEYRVELFNRLTHVCFEKCIEKRHKEGELNMGENSCIDRCASKYWQVTNIVGGMLGTQQTPM

SEQ ID NO: 28974 - protein, 70 aa, Triticum aestivum
MFGMAEKEMEYRVELFNRLTHVCFEKCIEKRHKEGELNMGENSCIDRCASKYWQVTNIVGGMLGTQQTPM

SEQ ID NO: 28975 - DNA, 1112 bp, Triticum aestivum
tccccgtgcactcgtccctccccttccccctttctcttttcgctccggcgagggcgacggcagatctgcgccgggcctaggatggtgaacgtcaactgggagctgcagggctgctgccagcacaaccaggtcgtcttcatcgccgccgtcggcgtctccaccgtcgtcatcctcgccctgtggaggacgttcctgctcacgcctttcaagctcatcaccgtcttcctccacgagaccagccacgccctcgcctgcaagctcacctgcggagatgttgagggcatgcaggtccatgctaatgagggtggtgttacacaaactcgcggtggcatttactggataatcttgcctgctggatatctgggttcatcattttggggaatggtgttcatactttcatctacacatctcctagctacaagaattgcggctggttgcttcatacttgcattaattattgttctctttgttgccaaaaattggtttctgcgctggctctgcattggtttcatcatattcattgctgttgtctgggttatacaagaatttacaactttccatgttctgaagtatgttattctattcataggtgttatgaatagcttattttcagtttacgatatctatgatgacaccatatcccgaagagtgaattcaagtgatgctgagaaatttgctgaaatctgcccttgcccttgcaatggcgttggatggggtgttatatggggattcatctcatttatttttctctgtgcgtcgatatatcttggactggttatattgtcctgagggcttgcacctcccatatattagcattttgacctgacagcgcaggcggtgcttgttgtttgtttccattggtccggacattggctgcagcttgtattgatccatgggggacaggttgttccaaatgtatacatagggcaatgagtttatgccataattaaggttgattgaaattggataggggcggttattgatgcgattcttccttgcgtttatagctcatgtagatggcatttgatatgcacagctgatatagtattatgttgttgttgagatggtattcatggaccaactggaatttattcagcaatgcctgcagtctc

SEQ ID NO: 28976 - protein, 262 aa, Triticum aestivum
SPCTRPSPSPFLFSLRRGRRQICAGPRMVNVNWELQGCCQHNQVVFIAAVGVSTVVILALWRTFLLTPFKLITVFLHETSHALACKLTCGDVEGMQVHANEGGVTQTRGGIYWIILPAGYLGSSFWGMVFILSSTHLLATRIAAGCFILALIIVLFVAKNWFLRWLCIGFIIFIAVVWVIQEFTTFHVLKYVILFIGVMNSLFSVYDIYDDTISRRVNSSDAEKFAEICPCPCNGVGWGVIWGFISFIFLCASIYLGLVILS

SEQ ID NO: 28977 - protein, 235 aa, Triticum aestivum
MVNVNWELQGCCQHNQVVFIAAVGVSTVVILALWRTFLLTPFKLITVFLHETSHALACKLTCGDVEGMQVHANEGGVTQTRGGIYWIILPAGYLGSSFWGMVFILSSTHLLATRIAAGCFILALIIVLFVAKNWFLRWLCIGFIIFIAVVWVIQEFTTFHVLKYVILFIGVMNSLFSVYDIYDDTISRRVNSSDAEKFAEICPCPCNGVGWGVIWGFISFIFLCASIYLGLVILS

SEQ ID NO: 28978 - protein, 168 aa, Triticum aestivum
MQVHANEGGVTQTRGGIYWIILPAGYLGSSFWGMVFILSSTHLLATRIAAGCFILALIIVLFVAKNWFLRWLCIGFIIFIAVVWVIQEFTTFHVLKYVILFIGVMNSLFSVYDIYDDTISRRVNSSDAEKFAEICPCPCNGVGWGVIWGFISFIFLCASIYLGLVILS

SEQ ID NO: 28979 - DNA, 875 bp, Triticum aestivum
atacatcaactcaacaggaacggctcgtgatgatggtgaaccagttggaatggagacagaaggttttgctatatatgatgccatgatgcggatgaaaactgaggttcacacactttgtataggagctgcagctggtcatgcctgccttgtcctttcagcagggaagaaaggcaaacgctatatgtttccccatgccaaagctttgattcagcaacctcgtattccttcatatgggatgatgcaagcctctgatgttgttattcgtgcaaaagaggtcgtgcacaacaggaacaccctggtcaaacttctagcaaggcacactggaaatccaccggagaaaatagacaaggtgatgagagggccattttatatggactctttgaaagccaaggagtttggggtaattgacaagatcctttggcgcggtcaggagaagtacatgtctgacatgctctcccctgaggattgggacaaggttgctggagtcagaggccccggtggaatgtgaagttgtgcactggaactcgaatacttggttaggcctttgagctcgcagtcgcaggggctgaacgaacaatcttgcctgtcgacaggttgtcagagccgagggtacctattgtacggactatggacaagctagattagaacttggacgatcatgttagtgcgtatgttctcgggattggagctagcgagtgttttgggtggagctattgttgttggtctgctcgtttgccagtccaggttttggtactctgctcactgttggtgcatagtgtacacggtttatggacccaaaggggtggatgaggaaaacaaccgagatgaaaatgttatcagcaaaaaaaaaaaaaaaaaagcttatcgataccgtc

SEQ ID NO: 28980 - protein, 168 aa, Triticum aestivum
YINSTGTARDDGEPVGMETEGFAIYDAMMRMKTEVHTLCIGAAAGHACLVLSAGKKGKRYMFPHAKALIQQPRIPSYGMMQASDVVIRAKEVVHNRNTLVKLLARHTGNPPEKIDKVMRGPFYMDSLKAKEFGVIDKILWRGQEKYMSDMLSPEDWDKVAGVRGPGGM

SEQ ID NO: 28981 - protein, 152 aa, Triticum aestivum
METEGFAIYDAMMRMKTEVHTLCIGAAAGHACLVLSAGKKGKRYMFPHAKALIQQPRIPSYGMMQASDVVIRAKEVVHNRNTLVKLLARHTGNPPEKIDKVMRGPFYMDSLKAKEFGVIDKILWRGQEKYMSDMLSPEDWDKVAGVRGPGGM

SEQ ID NO: 28982 - protein, 141 aa, Triticum aestivum
MMRMKTEVHTLCIGAAAGHACLVLSAGKKGKRYMFPHAKALIQQPRIPSYGMMQASDVVIRAKEVVHNRNTLVKLLARHTGNPPEKIDKVMRGPFYMDSLKAKEFGVIDKILWRGQEKYMSDMLSPEDWDKVAGVRGPGGM

SEQ ID NO: 28983 - DNA, 1271 bp, Triticum aestivum
  misc_feature (1194)..(1194): n is a, c, g, or t
  misc_feature (1231)..(1231): n is a, c, g, or t
aaactactccatcgctagtaagcagaatcgatcagcaagctcgcgcacctgcgatccgtcctccattagctcctcctcttccccttgctcctccagatcaggtgcatgaccgcgcccgcgctcaggtggccggcgagacctagctaggtagggagggagggagcgatggagcagggggaggaggacggggactggatgatggagccggcggcggggaagaagggcggggtgatgatcgacaggaagaagcgcttcagcgaggagcagatcaagtcgctcgagtccatgttcgccacgcagaccaagctggagccccgccagaagctgcagctggcccgggagctcggcctgcagccgcgccaggtcgccatctggttccagaacaagcgcgcgcgctggaagtccaagcagctcgagcgccagtacgccgcgctccgcgacgactacgacgcgctcctctccagctacgaccagctcaagaaggacaagcaagcgctcgtcaaccagctggagaagctggcggagatgctgcgggagccgggcggggccaagtgcggagataatgccggcgctgccgccagggacgacgagcgcctggccgtggccggcatgagcatgaaggacgagttcgtggacgccggcggggccagcaagctctactcggcgtccgagggctgcggcggcagcggcaagctctcgctcttcggcgaggaggacgacgacgcgggcctcttcctccggccctcgctgcagctgccaaccgcgcacgacggcggcttcacggcgtcggggccggccgagtaccagcagcaatcgccgtcgtcgttcccgttccactcgagctggccgtcgtccgcggcggagcagacctgcagcagctcccaatggtgggagttcgagtccccgagcgagtagtggtcggtcaagcactcaagcaccatacaaggaatcgccgacgtgatcggccatgcaacaagatcagtgctcgtaacacagagcactaccgccgatcaatcaaatccgtggagaagacgacgcgatcgatcgatcatatgcaaccgatggtggtacggtgtcagtgtgtagtgtacatagctcgaaacccaggtctgtccagtccaggccaggccaggcagtctcctccttctcaatcagcagtcagtcagcacgccatttttcttcaccctcgtcctnttcttcaattacttgctcttgtcaattacccgccacnccgtgtaatccgtcgaaactactcacaaaaccaaacttat

SEQ ID NO: 28984 - protein, 249 aa, Triticum aestivum
MEQGEEDGDWMMEPAAGKKGGVMIDRKKRFSEEQIKSLESMFATQTKLEPRQKLQLARELGLQPRQVAIWFQNKRARWKSKQLERQYAALRDDYDALLSSYDQLKKDKQALVNQLEKLAEMLREPGGAKCGDNAGAAARDDERLAVAGMSMKDEFVDAGGASKLYSASEGCGGSGKLSLFGEEDDDAGLFLRPSLQLPTAHDGGFTASGPAEYQQQSPSSFPFHSSWPSSAAEQTCSSSQWWEFESPSE

SEQ ID NO: 28985 - protein, 239 aa, Triticum aestivum
MMEPAAGKKGGVMIDRKKRFSEEQIKSLESMFATQTKLEPRQKLQLARELGLQPRQVAIWFQNKRARWKSKQLERQYAALRDDYDALLSSYDQLKKDKQALVNQLEKLAEMLREPGGAKCGDNAGAAARDDERLAVAGMSMKDEFVDAGGASKLYSASEGCGGSGKLSLFGEEDDDAGLFLRPSLQLPTAHDGGFTASGPAEYQQQSPSSFPFHSSWPSSAAEQTCSSSQWWEFESPSE

SEQ ID NO: 28986 - protein, 238 aa, Triticum aestivum
MEPAAGKKGGVMIDRKKRFSEEQIKSLESMFATQTKLEPRQKLQLARELGLQPRQVAIWFQNKRARWKSKQLERQYAALRDDYDALLSSYDQLKKDKQALVNQLEKLAEMLREPGGAKCGDNAGAAARDDERLAVAGMSMKDEFVDAGGASKLYSASEGCGGSGKLSLFGEEDDDAGLFLRPSLQLPTAHDGGFTASGPAEYQQQSPSSFPFHSSWPSSAAEQTCSSSQWWEFESPSE

SEQ ID NO: 28987 - DNA, 1126 bp, Triticum aestivum
acagcgagcgcccttcggttcctccgcctcggcccatccacccacgtcgacgacgagctctcccctctcgtcccgtctcctccccctcgcgacgccaccgccgcgtcgccggtcgccggctcgccgccccaggtaggacgtagccagtcaccccgcccggccccgatggctgaggagctggtgctggacacggcgatccgggactgggtcctcatcccgctctccgtggtcatggtgctcatcggcgtgctccgctacttcgtgtccaagctcatgcgctccccgccgtcggcctcgccctcccccgaccccaagaccgtcaaggaggggcaggtcgtcatcagggcgaggaacctgaggaacggcgcgcagttcatcccggccaaggccttcaaggctcgcaagctttattacaccaacggggaagcaggattgcttcatgttcctaaagaggatgcccagaaggctcaggcggctatgttttcggacccaaacatggccatggatatgatgaagaagaatctctccatgatagttccacagacacttacatttgcatgggtgaacttcttcttttccggttttgttgcagccaaaatcccctttccattgactcaacgattcaggggaatgctgcaaaatgggatagacctgagtactgttgatgtgagctatgttagcagccgttcatggtacttcctcaatttatttggcttgaggggtcttttcagtctcatccttggtgaagaaaatgctactgatgatgcccaaaagatgatggcgatgggtggtggaatgggctttaatccagcaatgagcttgagcgcagagaaagacagcctcgacatcatccagcatgactgggctttaccaaagatggagcgtcatgctgaagacgtgttgaggaaactactgaagaattgatctgaacaagcaccactaggccctgcaagttttgtttttagcttgtcgtctgatcagacagttatacgttgtaattgtattattattgatattatttacgagcgctactaattacgaagccgcgagctatctttttcacctatgtactctggcaacactggtagaaaaggatgaatgtttcttaatgtatgagctgctttgg

SEQ ID NO: 28988 - protein, 307 aa, Triticum aestivum
TASALRFLRLGPSTHVDDELSPLVPSPPPRDATAASPVAGSPPQVGRSQSPRPAPMAEELVLDTAIRDWVLIPLSVVMVLIGVLRYFVSKLMRSPPSASPSPDPKTVKEGQVVIRARNLRNGAQFIPAKAFKARKLYYTNGEAGLLHVPKEDAQKAQAAMFSDPNMAMDMMKKNLSMIVPQTLTFAWVNFFFSGFVAAKIPFPLTQRFRGMLQNGIDLSTVDVSYVSSRSWYFLNLFGLRGLFSLILGEENATDDAQKMMAMGGGMGFNPAMSLSAEKDSLDIIQHDWALPKMERHAEDVLRKLLKN

SEQ ID NO: 28989 - protein, 252 aa, Triticum aestivum
MAEELVLDTAIRDWVLIPLSVVMVLIGVLRYFVSKLMRSPPSASPSPDPKTVKEGQVVIRARNLRNGAQFIPAKAFKARKLYYTNGEAGLLHVPKEDAQKAQAAMFSDPNMAMDMMKKNLSMIVPQTLTFAWVNFFFSGFVAAKIPFPLTQRFRGMLQNGIDLSTVDVSYVSSRSWYFLNLFGLRGLFSLILGEENATDDAQKMMAMGGGMGFNPAMSLSAEKDSLDIIQHDWALPKMERHAEDVLRKLLKN

SEQ ID NO: 28990 - protein, 230 aa, Triticum aestivum
MVLIGVLRYFVSKLMRSPPSASPSPDPKTVKEGQVVIRARNLRNGAQFIPAKAFKARKLYYTNGEAGLLHVPKEDAQKAQAAMFSDPNMAMDMMKKNLSMIVPQTLTFAWVNFFFSGFVAAKIPFPLTQRFRGMLQNGIDLSTVDVSYVSSRSWYFLNLFGLRGLFSLILGEENATDDAQKMMAMGGGMGFNPAMSLSAEKDSLDIIQHDWALPKMERHAEDVLRKLLKN

SEQ ID NO: 28991 - DNA, 1091 bp, Triticum aestivum
ctgttgtaccgaaacggaggagggcgtctctctgctccgtcgccgatctcgcctccgccgcgaatcccccgaaaccgcgagcagattcgcgccggactcgcgacgatttttgatgagataagcccccggccacctcggggttcgcgatgctgcggaaggcggccgtcgggttcctcgcctgcctcgtgctctacctcgccttctcctcctacccccgtagccagagggctgcatatgttcagttaccagcagttactcacagggtatacctggacgtggaaattgatggccaaaatataggtagaattgtcattggtctttatggggaagttgtgccaaagacagttgaaaattttagagccctttgtacaggtgaaaagggtgatgggcccaagggtaaacctcttcactataaaggaacaccatttcatcgaatcatcccaggtttcatgattcagggtggtgacatagttagaggtgatgggaaagcacgcgaatctatatatggaggcaccttcccagatgagaatttcagtgtgaaacatacacatccaggtgttgttgctatggcaaattctggaactgattccaacggatcccagttctacataaccacaatcaagacaggctggttggatggggagcatgtggtctttggcagggtgattcagggaatggattatgtctacgccattgaagggggcgcaggcacttacaacggcaagccgaggaagaaggtgctgatcactgactctggtgagatacccaaggagaaatggggcgaggaagcagactgagtcatagcctagtgctagaaaggggttgatgcctttccacccacccaggttcaaggcatagtgattgcaatttgggttcgttgtaccaattataccgtaggggcctcccttatagtctttctgtcaaaatgaaaacggggcgactgaaattcagtaggctgcttggcctactctgttgcctacggattttgacaccgcgcgctttcgcgaccggttttcttcgcacaccagctgtgcttcgggcagagttctgaatattgtacattgtagccagcgtatcgcatgccaaaaccc

SEQ ID NO: 28992 - protein, 216 aa, Triticum aestivum
MLRKAAVGFLACLVLYLAFSSYPRSQRAAYVQLPAVTHRVYLDVEIDGQNIGRIVIGLYGEVVPKTVENFRALCTGEKGDGPKGKPLHYKGTPFHRIIPGFMIQGGDIVRGDGKARESIYGGTFPDENFSVKHTHPGVVAMANSGTDSNGSQFYITTIKTGWLDGEHVVFGRVIQGMDYVYAIEGGAGTYNGKPRKKVLITDSGEIPKEKWGEEAD

SEQ ID NO: 28993 - protein, 115 aa, Triticum aestivum
MIQGGDIVRGDGKARESIYGGTFPDENFSVKHTHPGVVAMANSGTDSNGSQFYITTIKTGWLDGEHVVFGRVIQGMDYVYAIEGGAGTYNGKPRKKVLITDSGEIPKEKWGEEAD

SEQ ID NO: 28994 - DNA, 730 bp, Triticum aestivum
taatcgaaaaattacgccccaaccatcacacgaaccacacacccgcgcaagagggaaaagaaggccgggggcatcaaagaatccaagccaacgcgccacgtagcggcgagcaatgtaccaagccatcccctacagcagcacccggccctgggcccgcccgtcgccggcggcggaggcggccgtcgccgtcaagacggagaccacggaggcggcggcgtcccgggaggacgcagcgggggttgagagggcggtgtcggagagcccggtcgtggtggtggggaggcgggcctgctgcctcacccacgtggtgaagcggctgctgcaggggctcggggtcaaccccgccgtgcacgaggtcgccgacgaggcggcgctcgccggggtcgtgccggacggcgaggaggctgcgctcccggtggtgttcgtcggggggaagctcctcggcggcctcgatcgcctcatggccgtccacatctccggcgagctcgtgcccatcctcaagaaggccggcgccctctggctctgatcggacccttccttcctttccttagtttcctttcatcagaagacggtgccgcggtttaatcctggccgttggatcgaattttacaccgcggccgatttactctaggattttgggtttctttaatggtgtgctaaattttttctcaacaaatatattcatgagaaaaaagaaacagacaggtagcattactgtttttcgtaattt

SEQ ID NO: 28995 - protein, 137 aa, Triticum aestivum
MYQAIPYSSTRPWARPSPAAEAAVAVKTETTEAAASREDAAGVERAVSESPVVVVGRRACCLTHVVKRLLQGLGVNPAVHEVADEAALAGVVPDGEEAALPVVFVGGKLLGGLDRLMAVHISGELVPILKKAGALWL

SEQ ID NO: 28996 - protein, 102 aa, Triticum aestivum
IEKLRPNHHTNHTPAQEGKEGRGHQRIQANAPRSGEQCTKPSPTAAPGPGPARRRRRRRPSPSRRRPRRRRRPGRTQRGLRGRCRRARSWWWGGGPAASPTW

SEQ ID NO: 28997 - DNA, 1550 bp, Triticum aestivum
aagaagggaaagaatgacaccgctacccaaagcagccagccaagccaaagccaaccccagtcctagccactagccacaacgaacgaactcagacccagccagcctcgtggctccggttggactggccagtaccgttgccggacgctcctgatggggaactgcgccggcgtgcaggggaacgccgagatcaacccgaccttcagtgctcccaacacctcaggtaacaattccaagagcagcaacagcagcaatgcgactgatacaagcacttttggcaagagttcttcgtcgtcggtgccgccgactcctcggaccgagaaggagatcttgcagtcgtccaacctccgcaagttcaccttcagtgaactgagaagctccacaaggaacttccggactgacagcctgctcggggaggggggctttggctccgtcttcaaggggtggatcgacgagcgcacgtttacgccggtcaagcccggcaccgggatgatcgtcgccgtgaagaagctcaagctggacagtttccaggggcacaaagaatggctggctgaggtcaattacctggggcagctatcacaccccaatcttgtgaagctcatcgggtattgcttggaggacgagcagcggcttctcgtctacgaattcatgccgaagggtagcttggagcaccatcttttcaggagagctccacatttccagcccctctcatggagtttacggatgaaggttgctcttgaggctgccaggggacttgctttcctgcatagcgatgaagctaaagttatataccgtgatttcaagacctccaatgttcttcttgactcggaatataatgcaaaactctctgattttggcttggcaaaagatggcccgagtggcgataaaagtcatgtttctactagggtcatggggactcaaggatatgctgcccctgaatatctcgcaacaggccacttgaccacgaagagcgatgtctacacctatggtgttgttcttctagagttgctgaccgggcaacgagctctggacaagaaccgcccgcctggacagcataacctggtggagtgggcaagaccttacatcaacagcaagaggagggtcatccatgtcctggacccacgattggggtcgcaatattcgctccctgcggcgcagaaggcagcggcgcttgcgatgcagtgcctgtcaatggacgcccggtgcaggccggacatggatcaggtcgtgaccgcgctggaaaagcttccggaggtgaagaaaacatacaagtagggagggttgctgggttccatgtgtactcctttacctctctggagcatcgcctactccttgtaagcaacacttcagggagtagaaacagtgaagagaagccggacttgaggggaagactagcctttgaatctgtcaagagaatgtagaatatatatcgtcatgtgtacagctagctgttagactgttgttactttgctgtcagcctgacgcctgttttatatatttgcagtacaccggctttgtaaaacaagttgggaaacagttgtgtcttggtcttg

SEQ ID NO: 28998 - protein, 373 aa, Triticum aestivum
MGNCAGVQGNAEINPTFSAPNTSGNNSKSSNSSNATDTSTFGKSSSSSVPPTPRTEKEILQSSNLRKFTFSELRSSTRNFRTDSLLGEGGFGSVFKGWIDERTFTPVKPGTGMIVAVKKLKLDSFQGHKEWLAEVNYLGQLSHPNLVKLIGYCLEDEQRLLVYEFMPKGSLEHHLFRRAPHFQPLSWSLRMKVALEAARGLAFLHSDEAKVIYRDFKTSNVLLDSEYNAKLSDFGLAKDGPSGDKSHVSTRVMGTQGYAAPEYLATGHLTTKSDVYTYGVVLLELLTGQRALDKNRPPGQHNLVEWARPYINSKRRVIHVLDPRLGSQYSLPAAQKAAALAMQCLSMDARCRPDMDQVVTALEKLPEVKKTYK

SEQ ID NO: 28999 - protein, 261 aa, Triticum aestivum
MIVAVKKLKLDSFQGHKEWLAEVNYLGQLSHPNLVKLIGYCLEDEQRLLVYEFMPKGSLEHHLFRRAPHFQPLSWSLRMKVALEAARGLAFLHSDEAKVIYRDFKTSNVLLDSEYNAKLSDFGLAKDGPSGDKSHVSTRVMGTQGYAAPEYLATGHLTTKSDVYTYGVVLLELLTGQRALDKNRPPGQHNLVEWARPYINSKRRVIHVLDPRLGSQYSLPAAQKAAALAMQCLSMDARCRPDMDQVVTALEKLPEVKKTYK

SEQ ID NO: 29000 - protein, 208 aa, Triticum aestivum
MPKGSLEHHLFRRAPHFQPLSWSLRMKVALEAARGLAFLHSDEAKVIYRDFKTSNVLLDSEYNAKLSDFGLAKDGPSGDKSHVSTRVMGTQGYAAPEYLATGHLTTKSDVYTYGVVLLELLTGQRALDKNRPPGQHNLVEWARPYINSKRRVIHVLDPRLGSQYSLPAAQKAAALAMQCLSMDARCRPDMDQVVTALEKLPEVKKTYK

SEQ ID NO: 29001 - DNA, 936 bp, Triticum aestivum
tgtttacctgttgcaatgcattacaacacaatgatgattgggcacatttcatttgttgttcaatgtgatctaatacctgcttgggcaacaaaagggtggttgcgtactctattgagggactatcccaccctaccgttccatgcaagcatcaacaagtcatttggaaaagtaaatgaaaaaagctggacgctttggcgttgggttcattgacccaaataccgttaatgaaaagatatgggaacgtcatggaaaagaaacatagtaaaacttgctaaagtttttggtggatcaaaataccgaaccagaaatactgttttcttacatctacgggtgagtgttactatatatattgtaatacaaattctatttatgcttactagatgttagtaagtgtagttgatgagttatatatgcacatgcctgcttaattatacaaacgtgtgcgcatgcatgcagttgtcattggatcttgctagtcattgaacttgacgagggaaaagctacattattggactcaataaaggaaacaaaataaatatactacttgaacgttattgggatgctcgacagtgcatgaggcaggcgcaggggactaatttatgtggctacgtagtttgcgagaacattcgcatgaagacgtccgaaaggaagctagcggacaaaaactttcagttgctccagatgcgcgatcagctcctagaagatgaccgcatgaaagcacttcaagaggaaatagtggaatttttcctcgagcaggtcatagatcccaatggagaatactattacccgctgtaatgcctgcattgtaatggtctgcaaattgtaggagaaattttatgtaccaagttgcatgtgaatgcatgcatggtcgaattcgatgatgtgatatatatatatatatatttgatcggttctatgagaaattttttttttttt

SEQ ID NO: 29002 - protein, 73 aa, Triticum aestivum
MRQAQGTNLCGYVVCENIRMKTSERKLADKNFQLLQMRDQLLEDDRMKALQEEIVEFFLEQVIDPNGEYYYPL

SEQ ID NO: 29003 - protein, 69 aa, Triticum aestivum
CLPVAMHYNTMMIGHISFVVQCDLIPAWATKGWLRTLLRDYPTLPFHASINKSFGKVNEKSWTLWRWVH

SEQ ID NO: 29004 - protein, 64 aa, Triticum aestivum
MHYNTMMIGHISFVVQCDLIPAWATKGWLRTLLRDYPTLPFHASINKSFGKVNEKSWTLWRWVH

SEQ ID NO: 29005 - DNA, 609 bp, Triticum aestivum
tgaatggcagccccatgagggatgaagttgttgttagagatgagggaataagaagagagtataatgagcttgacacattgtggttcatggcaggttcattgtttaagcaatacccttttgatgtacctactgaggcgttcccgtttgagatcttcaagcaggcatttgttgcagtacagtcttgtgtggttcacttgcagaaggttagtttagctcgaagatttgcactagttcccttgggcccaccactgttgacgtacaagagcaactgcaaagcaatgctgactgctgttgatggttctgttcgattgctggtcgatcggccgtacaaagcaggagaaccaataattgtttggtgtgggcctcaaccaaactccaggttgcttctcaattatggttttgttgatgaagacaatccatatgatcgcatagcaatcgaggcatccctaaacactgaagatcctcaataccaagagaagagaatggtcgctcaaagaaatggaaagcttgctatccaaaaattccaagtgggactttcaattcctttttcctatttagttgagagtagaatgtgttgaatattgatatgcctcacaggtctgtgtaggc

SEQ ID NO: 29006 - protein, 191 aa, Triticum aestivum
NGSPMRDEVVVRDEGIRREYNELDTLWFMAGSLFKQYPFDVPTEAFPFEIFKQAFVAVQSCVVHLQKVSLARRFALVPLGPPLLTYKSNCKAMLTAVDGSVRLLVDRPYKAGEPIIVWCGPQPNSRLLLNYGFVDEDNPYDRIAIEASLNTEDPQYQEKRMVAQRNGKLAIQKFQVGLSIPFSYLVESRMC

SEQ ID NO: 29007 - protein, 187 aa, Triticum aestivum
MRDEVVVRDEGIRREYNELDTLWFMAGSLFKQYPFDVPTEAFPFEIFKQAFVAVQSCVVHLQKVSLARRFALVPLGPPLLTYKSNCKAMLTAVDGSVRLLVDRPYKAGEPIIVWCGPQPNSRLLLNYGFVDEDNPYDRIAIEASLNTEDPQYQEKRMVAQRNGKLAIQKFQVGLSIPFSYLVESRMC

SEQ ID NO: 29008 - protein, 163 aa, Triticum aestivum
MAGSLFKQYPFDVPTEAFPFEIFKQAFVAVQSCVVHLQKVSLARRFALVPLGPPLLTYKSNCKAMLTAVDGSVRLLVDRPYKAGEPIIVWCGPQPNSRLLLNYGFVDEDNPYDRIAIEASLNTEDPQYQEKRMVAQRNGKLAIQKFQVGLSIPFSYLVESRMC

SEQ ID NO: 29009 - DNA, 673 bp, Triticum aestivum
gaaaaaccatccgccgcccccttccttccgccaatacaacagagagatcgcaccaccggggagagagagagagagagacatgaggagcggcggcgacgtcaagtccttcttccggcagcagaaggcccactccggcgcggcggccaccaagcccaccggcggcgtctccaagaaggcggcgcaccaccaccagaagcaagcggcggcgcgcccgacgccagatcacggcggcggcgccgacgcggggagggaggacgcggaggacgcggagaggaaggccagggagttcgacatggacatgcgctacgggccctgcctcggcctcacccgcgcccagcgctggcagcgcgccgccgcgctgggcctcgccccgccgccgcacgcgctttgctccgacgaccagccgtgcatctgggagggccgcgtctagactagagcatcacccccagggccccgtcgaatcaccgatccgccactcctcgtggttctgtctactgcttcttctgtatcattgtggcctcttcagtcttcgtgttgtcttcagtcttcgtctgtacgtttgggtgcgtgctatgccttgtgatccgatgagatgctgtattaatcccagtttaaccttcggtgcatctggtgtgttgtgccaatctatatcccactacgattgattgttttg

SEQ ID NO: 29010 - protein, 144 aa, Triticum aestivum
EKPSAAPFLPPIQQRDRTTGERERERHEERRRRQVLLPAAEGPLRRGGHQAHRRRLQEGGAPPPEASGGAPDARSRRRRRRGEGGRGGRGEEGQGVRHGHALRALPRPHPRPALAARRRAGPRPAAARALLRRPAVHLGGPRLD

SEQ ID NO: 29011 - protein, 142 aa, Triticum aestivum
KNHPPPPSFRQYNREIAPPGRERERDMRSGGDVKSFFRQQKAHSGAAATKPTGGVSKKAAHHHQKQAAARPTPDHGGGADAGREDAEDAERKAREFDMDMRYGPCLGLTRAQRWQRAAALGLAPPPHALCSDDQPCIWEGRV

SEQ ID NO: 29012 - protein, 116 aa, Triticum aestivum
MRSGGDVKSFFRQQKAHSGAAATKPTGGVSKKAAHHHQKQAAARPTPDHGGGADAGREDAEDAERKAREFDMDMRYGPCLGLTRAQRWQRAAALGLAPPPHALCSDDQPCIWEGRV

SEQ ID NO: 29013 - DNA, 607 bp, Triticum aestivum
aaaatcgaataatccgtcgactgttctggagagtgagcaggatcggattgttattctattgttgtccgcggcggccatggcgttcttcgaggagacggagtcgtactacgtcccctacctccgcgcccacctgcaccaattcgcagcgtcggtctccgcggcgagctgcgaggagggggcgggcgacgacgaggagtgccgcgacgaggcggccgcgctcaggctcaagatggtggccgtcgccgccatcctcatcgccggcgcggtcggcgtcgccatcccgctcgtcggccggaggcggcgcggcgggggcggcggcggcgagggcgggtcctccggcggcgggatgttcgtgctcgccaaggcgttcgcggcgggggtcatcctcgccacggggttcgtgcacatgatgcacgacgccgaggagaagttcgccgacccgtgcctcccggccatgccgtggcgccggttccccttcccgggcttcatcgccatgctcgccgcgctgggcacgctcgtcatggagttcgtcggcacccgcttctacgagcgcaggcacggcgaggaggccgctgcagccgcgggcacagccgcgcgtgacgacacc

SEQ ID NO: 29014 - protein, 202 aa, Triticum aestivum
KSNNPSTVLESEQDRIVILLLSAAAMAFFEETESYYVPYLRAHLHQFAASVSAASCEEGAGDDEECRDEAAALRLKMVAVAAILIAGAVGVAIPLVGRRRRGGGGGGEGGSSGGGMFVLAKAFAAGVILATGFVHMMHDAEEKFADPCLPAMPWRRFPFPGFIAMLAALGTLVMEFVGTRFYERRHGEEAAAAAGTAARDDT

SEQ ID NO: 29015 - protein, 177 aa, Triticum aestivum
MAFFEETESYYVPYLRAHLHQFAASVSAASCEEGAGDDEECRDEAAALRLKMVAVAAILIAGAVGVAIPLVGRRRRGGGGGGEGGSSGGGMFVLAKAFAAGVILATGFVHMMHDAEEKFADPCLPAMPWRRFPFPGFIAMLAALGTLVMEFVGTRFYERRHGEEAAAAAGTAARDDT

SEQ ID NO: 29016 - protein, 135 aa, Triticum aestivum
NRIIRRLFWRVSRIGLLFYCCPRRPWRSSRRRSRTTSPTSAPTCTNSQRRSPRRAARRGRATTRSAATRRPRSGSRWWPSPPSSSPARSASPSRSSAGGGAAGAAAARAGPPAAGCSCSPRRSRRGSSSPRGSCT

SEQ ID NO: 29017 - DNA, 819 bp, Triticum aestivum
aaaaaaagcctccgccccaagaaatccggcgcacgctcgcccctctatcccgtcatctctttcctcccccctcggcgcagcaacagagagatggcggcggtggcgacgacgacggcggtccacgggagccaggcggccggcgcgcagaggctgctgcttctcctcgctctcgtgattgaagctgtaaacaatggagcagatatcttcactgaagaccagcaagaaattatcaagcaatttggcagaatcaaatccgagactgttcctgagaacaaggatgcagggtctgatgacgatgatgacgatgatgaagatgaggatgatgaaactggtgatgctgatgatgatgatgccgatgctggagaggacttctcgggtgaagaaggcgaggacgatgacgaggatgatgaccctgaggcgaacggcgatgatgctggcgcggggagcgatgatgatgatggtgacgacgacgatgatgatggtgaagacggcgaggatgacgatgatgatgacgaggatgaggatgaggaggacgaggaagatgaggaccagccaccggccaagaagaagaaatgatctgccttcctgctgtcagtgtttcagtccgttagtttatctgctgtctagatgttgattgagcgggtctggtacacaccgacctatgtagcttctgtgtcttggtggtttggtgtctcatagggtagaacattgaacttctaatgttgtttcctgcgttgtgcaagtagtcttaacatttcggtcttgatatgctgtgtttattggagctgtgataccattcaatctaattcttgttactcc

SEQ ID NO: 29018 - protein, 191 aa, Triticum aestivum
KKSLRPKKSGARSPLYPVISFLPPRRSNREMAAVATTTAVHGSQAAGAQRLLLLLALVIEAVNNGADIFTEDQQEIIKQFGRIKSETVPENKDAGSDDDDDDDEDEDDETGDADDDDADAGEDFSGEEGEDDDEDDDPEANGDDAGAGSDDDDGDDDDDDGEDGEDDDDDDEDEDEEDEEDEDQPPAKKKK

SEQ ID NO: 29019 - protein, 161 aa, Triticum aestivum
MAAVATTTAVHGSQAAGAQRLLLLLALVIEAVNNGADIFTEDQQEIIKQFGRIKSETVPENKDAGSDDDDDDDEDEDDETGDADDDDADAGEDFSGEEGEDDDEDDDPEANGDDAGAGSDDDDGDDDDDDGEDGEDDDDDDEDEDEEDEEDEDQPPAKKKK

SEQ ID NO: 29020 - protein, 147 aa, Triticum aestivum
MEQISSLKTSKKLSSNLAESNPRLFLRTRMQGLMTMMTMMKMRMMKLVMLMMMMPMLERTSRVKKARTMTRMMTLRRTAMMLARGAMMMMVTTTMMMVKTARMTMMMTRMRMRRTRKMRTSHRPRRRNDLPSCCQCFSPLVYLLSRC

SEQ ID NO: 29021 - DNA, 748 bp, Triticum aestivum
aatcaaaactgttcagtagtcgaatcggaagccgagaccagcatgaatccgaccaggagcggataataaatctgggccaggagcggcagatcgatccagtaatggaggcagcaaggggggatcccgacgaccccctcatcgcctcccgccgcggacgggtcggcgggtggtgggatcgtaaccaggacttcatacggagacgcgcggagacgctgaggcgacccgccgcccaggcggaggccgaggcagagcgtagcagagagccgccggcttccaagaactccatggcggggctgctcgtgccggcggcggcggaggtgcgggatctggagtgcgcggtgtgcctggaggacctggtggccggaggcaggaagctcaggaagatggactgctcccactgcttccaccagcgctgcatcttccgctggctgcacgtcagccggctctgcccgatgtgccgcttcgcgatgccctcccggcccgacggcgagcacgtcggcgacgaggtggagcgggagctcgcggctgaggaggaagacgccgctgacgaagaaaagtctgcagcagctgaagaacgttcgtccggtgagtgagtgaactgaactaatgattcatcggattagcgatgatggtaatgattttagtctgattcgaaatgcctcttctttactgtatactgtatatgaatatttgtttacccgctctttcacaggtagtgtacctctagcaaagaatgtcatttttcttt

SEQ ID NO: 29022 - protein, 196 aa, Triticum aestivum
SKLFSSRIGSRDQHESDQERIINLGQERQIDPVMEAARGDPDDPLIASRRGRVGGWWDRNQDFIRRRAETLRRPAAQAEAEAERSREPPASKNSMAGLLVPAAAEVRDLECAVCLEDLVAGGRKLRKMDCSHCFHQRCIFRWLHVSRLCPMCRFAMPSRPDGEHVGDEVERELAAEEEDAADEEKSAAAEERSSGE

SEQ ID NO: 29023 - protein, 163 aa, Triticum aestivum
MEAARGDPDDPLIASRRGRVGGWWDRNQDFIRRRAETLRRPAAQAEAEAERSREPPASKNSMAGLLVPAAAEVRDLECAVCLEDLVAGGRKLRKMDCSHCFHQRCIFRWLHVSRLCPMCRFAMPSRPDGEHVGDEVERELAAEEEDAADEEKSAAAEERSSGE

SEQ ID NO: 29024 - protein, 102 aa, Triticum aestivum
MAGLLVPAAAEVRDLECAVCLEDLVAGGRKLRKMDCSHCFHQRCIFRWLHVSRLCPMCRFAMPSRPDGEHVGDEVERELAAEEEDAADEEKSAAAEERSSGE

SEQ ID NO: 29025 - DNA, 991 bp, Triticum aestivum
gcgcagtcggttcactcccacacgagcactcgcttaccctagcttcaacgccagcgcgcacctccgcttccctttgttcgacgatggcgtccacaccgccgccggtaatcggcaaggcgggaaacctcactgtcttcatcacgcccccggccacgccgccgccagtggataccccgacctctcgttcggccgagtcgccaggatctgagttttccacccccaattccactccccgttcggtggcgtctcctgcgtccccgccgccagagcatatagccacatcgcctccgccggccaagatggtctcgccgcctccgccggtcaagacggtctccccgccactgccgccagccaagctgttccaggcctcgccagtgcaggtgcctccgccgcagttcgagaaggcagaggctaggacggatggatcggcgttcggcttcttctgggacgcggttttgcgcgtgcaagaagcgcacgcaagcttggatgagtacatttcgaattggttcgggctggatcaatccaagtaccagtgggcgctcaacgactattacgagagcaccggaaaggagatggattcgggcaaggctgccaagacaacggagcttagtggtaagatgcagaaagtgtagtgatatatatttacgcgcttgtcggtagccaagctgctatgtgtaaagttggatttggaagtgcatggaagcatgaaggtcgttgcctcttttgctacaactagcaggatcaatctgcccgtgtcaaggtatcaagtcagtcgaattaacgagtgtaagcaatttatttgcttcctaaattgtagtcctataatccttttctgtttgtatcgtggaacacattatgtttgcaatggcaagcattgatctgttagaatgtttgcttgtgcagttcatagggtgtcaattttaatctgcattatccatgtcacatttgaccgacatttgtgttgtatccgtgcaaaaaaaaaaggttatct

SEQ ID NO: 29026 - protein, 209 aa, Triticum aestivum
AVGSLPHEHSLTLASTPARTSASLCSTMASTPPPVIGKAGNLTVFITPPATPPPVDTPTSRSAESPGSEFSTPNSTPRSVASPASPPPEHIATSPPPAKMVSPPPPVKTVSPPLPPAKLFQASPVQVPPPQFEKAEARTDGSAFGFFWDAVLRVQEAHASLDEYISNWFGLDQSKYQWALNDYYESTGKEMDSGKAAKTTELSGKMQKV

SEQ ID NO: 29027 - protein, 182 aa, Triticum aestivum
MASTPPPVIGKAGNLTVFITPPATPPPVDTPTSRSAESPGSEFSTPNSTPRSVASPASPPPEHIATSPPPAKMVSPPPPVKTVSPPLPPAKLFQASPVQVPPPQFEKAEARTDGSAFGFFWDAVLRVQEAHASLDEYISNWFGLDQSKYQWALNDYYESTGKEMDSGKAAKTTELSGKMQKV

SEQ ID NO: 29028 - protein, 110 aa, Triticum aestivum
MVSPPPPVKTVSPPLPPAKLFQASPVQVPPPQFEKAEARTDGSAFGFFWDAVLRVQEAHASLDEYISNWFGLDQSKYQWALNDYYESTGKEMDSGKAAKTTELSGKMQKV

SEQ ID NO: 29029 - DNA, 861 bp, Triticum aestivum
ccgattcccatccagcgtacagactaggcgacccccgcttcccgtcccctctctcctccacacgcctctctccctctcccctcgtccgccgccgccgccgccgccaccatgggcaggggcaagttcaagggcaagccaaccggccgccgcaacttctccaccccggaggagatcgcttctggaacttctgggcgtccacgctcgtttaagaagaatgtagctgaagcagaagaggaagaggaagaagtagaagaatctgaggaggaagaatccgaagacgacggtgaagagaagaaacataaaggaactgaaggtgttattcaaatcgaaaatccaaacctggtgaaagcaaagaatataaaagccaaagaagctgatcttggaaagacaactgaactctcgaggcgtgagagagaggagattgagaaacaaaaatctcatgagcgctatatgaagcttcaggagcaagggaaaacagaacaggcgaagaaagatttggaacgtcttgctttaataaggcagcaaagagcagatgctgcaaagaaacgcgaagaggagaaagctgctaaagaacagaggaagaccgaagcgcgcaaataactgccaaggtggtggaggcatgagctaagctgagctgtgttggctggatatttatttctatgcatcttagtatatttaaaccctggtctctattccatcatctacatttccataaaaaccgtgcattgacaagtgtaaagtagtcctgtcggcgtggcttgctgtaaacttgagcttggcagggtacacatttagtgagatcagcttatgtgagatttgctttcactcaaaaattggtatggaaaataactgttgaaattt

SEQ ID NO: 29030 - protein, 163 aa, Triticum aestivum
MGRGKFKGKPTGRRNFSTPEEIASGTSGRPRSFKKNVAEAEEEEEEVEESEEEESEDDGEEKKHKGTEGVIQIENPNLVKAKNIKAKEADLGKTTELSRREREEIEKQKSHERYMKLQEQGKTEQAKKDLERLALIRQQRADAAKKREEEKAAKEQRKTEARK

SEQ ID NO: 29031 - DNA, 821 bp, Triticum aestivum
agaacatcctaatcgaaaaacaagaggaaacgagctagctagatagcatttggtacacagctacatacatatccggcacgagaggatgtcgttggtgaggttcttcgacaccctggccatggactcgtggaaccccttcggcaccatcttcggcaccacggcgtccagcggcaccgacgcctggctggccagcgacaccacggcgttcgccgacacctacatcgagacccgggagacggcggacgcctacgtcttcagcgccaggctccccgccggtgtcaccaaggaggaggtcaaggtggaggtggaggaggacggcaaggtgctggtcatcgccggcgagcggtgcctgcggagggaggccaagagcgaggcgcgccaccacatcgagcgcagcgtcgccaccttcttcggcaggttccacctccccgacgacgccgccttgggccaggtcagggccgccatggacgacgggggcgcgcagctcaccgtcactgtgcccagggtcggcgccgccgttgccgccgtgaccatgcccgagcctgccggggccatcgaggtcgtcgaggccagcccgtgctgattggctgattgcggcgtactccggtgccgactgcagacagagtgcagacatacgtgcggtaagttgccgctcgtatgatctgctcgatcgggtcctttgggtgtgattccacaaattgtggtgttcgatgtacgtaactacgtacttgagtcggtatgtggcttgctgttgtgacttgtgagtgaggtgcttgcatggttgcctgtactgttacttgttagttctcgtgttcacgctc

SEQ ID NO: 29032 - protein, 165 aa, Triticum aestivum
MSLVRFFDTLAMDSWNPFGTIFGTTASSGTDAWLASDTTAFADTYIETRETADAYVFSARLPAGVTKEEVKVEVEEDGKVLVIAGERCLRREAKSEARHHIERSVATFFGRFHLPDDAALGQVRAAMDDGGAQLTVTVPRVGAAVAAVTMPEPAGAIEVVEASPC

SEQ ID NO: 29033 - protein, 154 aa, Triticum aestivum
MDSWNPFGTIFGTTASSGTDAWLASDTTAFADTYIETRETADAYVFSARLPAGVTKEEVKVEVEEDGKVLVIAGERCLRREAKSEARHHIERSVATFFGRFHLPDDAALGQVRAAMDDGGAQLTVTVPRVGAAVAAVTMPEPAGAIEVVEASPC

SEQ ID NO: 29034 - DNA, 1540 bp, Triticum aestivum
attcccattcccattcccattccacttccatttccatttcgtcccgtccccattcattcattcgttaccagagagacgagacgacgactaccgggagcgaggggcagagttcggatctctattccggagatttttgtctagttggtggtgaaggaggatgttgagggctgtggcgaggtgctgcgggcactggccgccgggcgcggcggcggcggacggcatgctctggcagacggagctgcggccgcacgcggcgggggagttctccatggccgccgcgcaggccaacctcgtcatggaggaccaggcgcaggtgctcgcctccccctccgccacgctcgtcggcgtctacgacggccacggcggccccgacgcctcccgcttcctccgctccgccctcttcccccacgtccaacgcttcgccagggagcaggggggcgtgaccgcggaggcgatccggagggcgttcggcgcggcggaggaggacttcctgcacgaggtccgccaggcctggcccaagcgcccgcggatggccgccgtcggctcctgctgcctgctcggggccatcgcgggggacacgctctacgtcgccaacctcggcgactcccgcgccgtcctcggccgccgcgtcgtcggcggcggggtggccgtcgccgagcgcctctccaccgaccacaacgtcgcctccgaggaggtccggatggaggtctcctcgcacaacccggacgacgcgcagatcgtggtgcacaccaggggggcctggaggatcaaggggataattcaggtgtcaagatccattggtgatgtatacttgaagaaaccggagtatagcttggacccattatttcggcagatcggccctgttattgcattgaagaggcctgctcttagcgctgaaccacaaatccatgttcgcaagctcaaaccaaacgatcagtttataatatttgcctcggacggtctttgggagcatctcagcgatgatgatgctgtgcaaattgtcttcaagaacccaagaacgggtatagcaaaccgattagtgcggtccgccttgaaggaggccacgaagaagagagaggtcagtgtgcatgacctgaggacgatagagcggggcgtgcggcgccatttccacgacgacatcagcgtcgtcgtggtgtacctcgaccggcaccgcggtcgccgtcagaccagggtggtggactcgagcagcaactgcaccagcgcccccgtcgacatctactcctcctccagctccatccagtcggtgcagccacgtcaggcttaccgtgactccggttaatagaccagataagacgggactccagttagtagaccagataagacgggcagcagaagctcagactatatgatcatggtggtaaacggtggtagggttgcagatcagcaacgcagactgcaacccgcaagctgcagtggcagcgtccgaaagagatgcgcggaatgtacataagtagtgcgggcgcgtggaacttttgtcagaagagatgattttttcgtatgtaattgcagaatttgactc

SEQ ID NO: 29035 - protein, 380 aa, Triticum aestivum
MLRAVARCCGHWPPGAAAADGMLWQTELRPHAAGEFSMAAAQANLVMEDQAQVLASPSATLVGVYDGHGGPDASRFLRSALFPHVQRFAREQGGVTAEAIRRAFGAAEEDFLHEVRQAWPKRPRMAAVGSCCLLGAIAGDTLYVANLGDSRAVLGRRVVGGGVAVAERLSTDHNVASEEVRMEVSSHNPDDAQIVVHTRGAWRIKGIIQVSRSIGDVYLKKPEYSLDPLFRQIGPVIALKRPALSAEPQIHVRKLKPNDQFIIFASDGLWEHLSDDDAVQIVFKNPRTGIANRLVRSALKEATKKREVSVHDLRTIERGVRRHFHDDISVVVVYLDRHRGRRQTRVVDSSSNCTSAPVDIYSSSSSIQSVQPRQAYRDSG

SEQ ID NO: 29036 - protein, 359 aa, Triticum aestivum
MLWQTELRPHAAGEFSMAAAQANLVMEDQAQVLASPSATLVGVYDGHGGPDASRFLRSALFPHVQRFAREQGGVTAEAIRRAFGAAEEDFLHEVRQAWPKRPRMAAVGSCCLLGAIAGDTLYVANLGDSRAVLGRRVVGGGVAVAERLSTDHNVASEEVRMEVSSHNPDDAQIVVHTRGAWRIKGIIQVSRSIGDVYLKKPEYSLDPLFRQIGPVIALKRPALSAEPQIHVRKLKPNDQFIIFASDGLWEHLSDDDAVQIVFKNPRTGIANRLVRSALKEATKKREVSVHDLRTIERGVRRHFHDDISVVVVYLDRHRGRRQTRVVDSSSNCTSAPVDIYSSSSSIQSVQPRQAYRDSG

SEQ ID NO: 29037 - protein, 343 aa, Triticum aestivum
MAAAQANLVMEDQAQVLASPSATLVGVYDGHGGPDASRFLRSALFPHVQRFAREQGGVTAEAIRRAFGAAEEDFLHEVRQAWPKRPRMAAVGSCCLLGAIAGDTLYVANLGDSRAVLGRRVVGGGVAVAERLSTDHNVASEEVRMEVSSHNPDDAQIVVHTRGAWRIKGIIQVSRSIGDVYLKKPEYSLDPLFRQIGPVIALKRPALSAEPQIHVRKLKPNDQFIIFASDGLWEHLSDDDAVQIVFKNPRTGIANRLVRSALKEATKKREVSVHDLRTIERGVRRHFHDDISVVVVYLDRHRGRRQTRVVDSSSNCTSAPVDIYSSSSSIQSVQPRQAYRDSG

SEQ ID NO: 29038 - DNA, 726 bp, Triticum aestivum
  misc_feature (587)..(587): n is a, c, g, or t
  misc_feature (653)..(653): n is a, c, g, or t
  misc_feature (675)..(675): n is a, c, g, or t
  misc_feature (701)..(701): n is a, c, g, or t
aacgccatcctgtgtgacgccatcaccgagagcgcgcgcagcagccactacacacagtatggctccgccgatctccgccgacgtcgtggtggaggccgcaccggcgcctgcgtccatggccgtgctgaaccaaatggtttgcgcgggcgcgccggcgccgagcatcaccgtcgtctccaagcagctggttctgccggagggcgcgccgccggtcggagacctcaggctgtccgtctccgacatgcccatgctgtcgtgccactacattcagaaggggctcttcttcccgcccgcgggcatgccgaacgcccgcctcgtgtcgtcgctcgcgctgtcgctctcccgcgcgctcggcgtcttcccggcgctcgcgggacggctcgtcacgctccccgacgaccgcatcgtcatccggtgcgacgacggcgctgccgtcgagttctaccatgccgtggcgcccgctctgtcgctcgccgacttcctcgtgcgcgacgccgacgtgcccaccaggctgacgaaaggatctgttcccgatggaccgcaccgtcagctacgaaggccaccgccgcccgctcacgtcgtttcangtcaccgtgctcggcgacggcgctgtcttcgtcggcctcgtcgccaaccacgccgtcgtggacggnacctcattctgggcactttttnaacacgtgggcttgggctgttgccgnggcgaagccagtccagccgccggac

SEQ ID NO: 29039 - protein, 242 aa, Triticum aestivum
  misc_feature (196)..(196): Xaa can be any naturally occurring amino acid
  misc_feature (218)..(218): Xaa can be any naturally occurring amino acid
  misc_feature (225)..(225): Xaa can be any naturally occurring amino acid
  misc_feature (234)..(234): Xaa can be any naturally occurring amino acid
NAILCDAITESARSSHYTQYGSADLRRRRGGGRTGACVHGRAEPNGLRGRAGAEHHRRLQAAGSAGGRAAGRRPQAVRLRHAHAVVPLHSEGALLPARGHAERPPRVVARAVALPRARRLPGARGTARHAPRRPHRHPVRRRRCRRVLPCRGARSVARRLPRARRRRAHQADERICSRWTAPSATKATAARSRRFXSPCSATALSSSASSPTTPSWTXPHSGHFXNTWAWAVAXAKPVQPPD

SEQ ID NO: 29040 - protein, 241 aa, Triticum aestivum
  misc_feature (196)..(196): Xaa can be any naturally occurring amino acid
  misc_feature (218)..(218): Xaa can be any naturally occurring amino acid
  misc_feature (225)..(225): Xaa can be any naturally occurring amino acid
  misc_feature (234)..(234): Xaa can be any naturally occurring amino acid
TPSCVTPSPRARAAATTHSMAPPISADVVVEAAPAPASMAVLNQMVCAGAPAPSITVVSKQLVLPEGAPPVGDLRLSVSDMPMLSCHYIQKGLFFPPAGMPNARLVSSLALSLSRALGVFPALAGRLVTLPDDRIVIRCDDGAAVEFYHAVAPALSLADFLVRDADVPTRLTKGSVPDGPHRQLRRPPPPAHVVSXHRARRRRCLRRPRRQPRRRGRXLILGTFXTRGLGLLPXRSQSSRR

SEQ ID NO: 29041 - protein, 222 aa, Triticum aestivum
  misc_feature (177)..(177): Xaa can be any naturally occurring amino acid
  misc_feature (199)..(199): Xaa can be any naturally occurring amino acid
  misc_feature (206)..(206): Xaa can be any naturally occurring amino acid
  misc_feature (215)..(215): Xaa can be any naturally occurring amino acid
MAPPISADVVVEAAPAPASMAVLNQMVCAGAPAPSITVVSKQLVLPEGAPPVGDLRLSVSDMPMLSCHYIQKGLFFPPAGMPNARLVSSLALSLSRALGVFPALAGRLVTLPDDRIVIRCDDGAAVEFYHAVAPALSLADFLVRDADVPTRLTKGSVPDGPHRQLRRPPPPAHVVSXHRARRRRCLRRPRRQPRRRGRXLILGTFXTRGLGLLPXRSQSSRR

SEQ ID NO: 29042 - DNA, 730 bp, Triticum aestivum
atcccgagctagcaaagcctacaagcttagccacagaccagtaagatcgatcagtagcaatggcgccctccaagctcgccctctttctcgccctgaacctggccctccttgccgccgcccagggctgtggatcctactgcccgccggacgtccctacaccgccgatccgcccaccgcccgtcgtgccatcgaccggcgggggcagctgcccgatcaacacgctgaagctgggcgtgtgcaccgacgtgctgaacctgctgaagctcaggattggtgtgccggagaacgagcagtgctgcccgctcctgggcgggctcgccgacctcgacgctgccgtgtgcctctgcaccgccatcagggccaacattctcggcatccagctcaacgtgcccatcgacctgaccctcctcctcaaccagtgcggcaagaagtgcccctccgacttcacctgccccatctgacccatccaacaccatcgatgaatattatacaagcatttttttattcgtaactagtttgcatgtcatacgtacgcaccatacgtatattttctatgttccaattccggtactatatgttaggtgtttgcatgggctccctcgctcgtgcatgcatgcttgataagtttgtgattgatcacatgatcagtgtatctcattatggtatctaaatgcatgattcatgtatttgtaaaaggattgtatgtgtatgaggaataaatggtttgtcc

SEQ ID NO: 29043 - protein, 169 aa, Triticum aestivum
SRASKAYKLSHRPVRSISSNGALQARPLSRPEPGPPCRRPGLWILLPAGRPYTADPPTARRAIDRRGQLPDQHAEAGRVHRRAEPAEAQDWCAGERAVLPAPGRARRPRRCRVPLHRHQGQHSRHPAQRAHRPDPPPQPVRQEVPLRLHLPHLTHPTPSMNIIQAFFYS

SEQ ID NO: 29044 - protein, 133 aa, Triticum aestivum
MAPSKLALFLALNLALLAAAQGCGSYCPPDVPTPPIRPPPVVPSTGGGSCPINTLKLGVCTDVLNLLKLRIGVPENEQCCPLLGGLADLDAAVCLCTAIRANILGIQLNVPIDLTLLLNQCGKKCPSDFTCPI

SEQ ID NO: 29045 - DNA, 789 bp, Triticum aestivum
acacaagtccggcgagcttctctctgatagtcctactcctgcagccccaagtctccgtcgcagcagcatccccatggccagcctcaacaacgcttcctggtccagcggcctctgcggctgcttcgacgacgtcggcggctgctgcctgacgttcttctgcccgtgcgtcgtcttcgggaggatcgccgagatcgtcgacatgggcgccacatcttgctgtgcgagcgggacggtgtacaccgcgctggcgtcgatgacggggatgggctgcttctactcctgcggctaccgctccaggctgcgggagcagtaccggctcaaggagacgccctgcggcgactgctgcgtccactggttctgcgaggcctgcgcgctctgccaggagtaccgcgagctcaagtcccgcggcttcgacatggccctcggatggcaggccaacatggagaagatggggaagaccacggcgccgcagacgcacgcggggatgactcgctagagcatccatgcggccaccgacgatgaatccattccatggtcgtcaatgtcagcttccagctcaagatgaagaatgccaccagtgtacggcgtctacttatgtcttgtcgcgagtcggtttgtgtttgtgatcgatgtgtagtgtgcctttctgttgttgtaaatcgtcgtttcccatccgtccacctccaccatctgtgatgtttatgtggacatttgaataaaagatgtatcggtcgggtctgtctgtggaagcagagtccatcatcgccctataattatgctttgaatttt

SEQ ID NO: 29046 - protein, 164 aa, Triticum aestivum
HKSGELLSDSPTPAAPSLRRSSIPMASLNNASWSSGLCGCFDDVGGCCLTFFCPCVVFGRIAEIVDMGATSCCASGTVYTALASMTGMGCFYSCGYRSRLREQYRLKETPCGDCCVHWFCEACALCQEYRELKSRGFDMALGWQANMEKMGKTTAPQTHAGMTR

SEQ ID NO: 29047 - protein, 140 aa, Triticum aestivum
MASLNNASWSSGLCGCFDDVGGCCLTFFCPCVVFGRIAEIVDMGATSCCASGTVYTALASMTGMGCFYSCGYRSRLREQYRLKETPCGDCCVHWFCEACALCQEYRELKSRGFDMALGWQANMEKMGKTTAPQTHAGMTR

SEQ ID NO: 29048 - protein, 98 aa, Triticum aestivum
MGATSCCASGTVYTALASMTGMGCFYSCGYRSRLREQYRLKETPCGDCCVHWFCEACALCQEYRELKSRGFDMALGWQANMEKMGKTTAPQTHAGMTR

SEQ ID NO: 29049 - DNA, 1237 bp, Triticum aestivum
gttcatttgcagggggctggatcccaggggcagagttgcggtcctccatagctgacggggaagaagcatgggatctggagcaggagccctgctggcgcttgtggcagcatgtctagcgcttgccccgccctgcgctctggcttcttctcgcaagtttggtctggatattgcgcaaccaaaattactgaactccacaaatggttcatttactccaagctcacatgttgattttgacccttcaaaatcaaagcgactctcgtggcatccaagggtcttcttgtatgaaggttttctctctcacatggagtgtgaccacttagtatctatggcacatggtaagatagggtcatctgtacttgttaatgatggtgctacaaatatttcccagaacaatattgatgcaggcctcatatttcgcctggctgatagcaaagacatagttgtttcgaagattgaagataggatatcattatggagttttattccaaaagagcatggggagagcatgcagattttgaagtatggagcaaaccaaagtgaccctaacaaggaagaaactcaatcgagcagtggtgccaataggcttgtgaccattttgatgtatctttctgatatcaagcaaggtggtgaaactgttttccccagatctgagctgaaggatactcaagccaaggaagggacaccttctgaatgtgctggttatgcagtgaaacctgtcaagggcaacacagttctgctgttcaattcaaggcctgacagagtcgccgacaaggacagtcagtacgagttctgtcctgtcgtcgaagtggagaaatggcttgccataaaacatatgtatgcaagcaagattgataaatcaaaaccttcgccggcatccgaggatgatgattgcaccgatgaagatggtaactgtgtcagttgggccgctgccggcgaatgcgacaagaatcctgtgtttatgattggcagttcagactactatggcacttgcaggaagagctgccatgcgtgctagatttttttttttttgttttcgtgcattgcccttagagatgtctcttagcattttcgttgtttaatacaggcattggtgttgtaagtggaaaatgattcagcaaactgtgcaatgcccgcagataatctttactcttgtcaggaatgtagtaagtacataggtattggattggctactcttataaagttatgaaaaatgattctgacctcatcttgttctgtc

SEQ ID NO: 29050 - protein, 315 aa, Triticum aestivum
MGSGAGALLALVAACLALAPPCALASSRKFGLDIAQPKLLNSTNGSFTPSSHVDFDPSKSKRLSWHPRVFLYEGFLSHMECDHLVSMAHGKIGSSVLVNDGATNISQNNIDAGLIFRLADSKDIVVSKIEDRISLWSFIPKEHGESMQILKYGANQSDPNKEETQSSSGANRLVTILMYLSDIKQGGETVFPRSELKDTQAKEGTPSECAGYAVKPVKGNTVLLFNSRPDRVADKDSQYEFCPVVEVEKWLAIKHMYASKIDKSKPSPASEDDDCTDEDGNCVSWAAAGECDKNPVFMIGSSDYYGTCRKSCHAC

SEQ ID NO: 29051 - protein, 237 aa, Triticum aestivum
MECDHLVSMAHGKIGSSVLVNDGATNISQNNIDAGLIFRLADSKDIVVSKIEDRISLWSFIPKEHGESMQILKYGANQSDPNKEETQSSSGANRLVTILMYLSDIKQGGETVFPRSELKDTQAKEGTPSECAGYAVKPVKGNTVLLFNSRPDRVADKDSQYEFCPVVEVEKWLAIKHMYASKIDKSKPSPASEDDDCTDEDGNCVSWAAAGECDKNPVFMIGSSDYYGTCRKSCHAC

SEQ ID NO: 29052 - protein, 229 aa, Triticum aestivum
MAHGKIGSSVLVNDGATNISQNNIDAGLIFRLADSKDIVVSKIEDRISLWSFIPKEHGESMQILKYGANQSDPNKEETQSSSGANRLVTILMYLSDIKQGGETVFPRSELKDTQAKEGTPSECAGYAVKPVKGNTVLLFNSRPDRVADKDSQYEFCPVVEVEKWLAIKHMYASKIDKSKPSPASEDDDCTDEDGNCVSWAAAGECDKNPVFMIGSSDYYGTCRKSCHAC

SEQ ID NO: 29053 - DNA, 586 bp, Triticum aestivum
acttctgttcatccatttgtccaagacattcgagcttgttaagttctagtagttttatttgttgcagagttagtaccagagaaatggagccacaggaaggaaggaaagggataccatctctgctgtcctcgcagggggagtgcattgccaccaacatcacacaggttgcatcaagagaggagaacaggggaaagatgattgtgacaatgttttccagtggtgcagagaggtatctgaactcggagctctttgcgcaggttaaggaagagtgcgtcaacgtcaacatgaccttctgatgtccatatcaaggcaatgacaccgtaggggtgatccagaagtctagtgttatcttacactggcttataagaagcggaggtctcagttactcaaataccagacactgttttgttaggagacaaaacgaaatgcactagcgtgacaagtaaatactccctctgttcacaaacataagatgctctaaccttttgtgtgaatcggatgtatatagacatgtcttagtgtgtttattcacccatttcagtctgtatgtagtctatattgaaatattcaaaacatcttatattgt

SEQ ID NO: 29054 - protein, 97 aa, Triticum aestivum
FCSSICPRHSSLLSSSSFICCRVSTREMEPQEGRKGIPSLLSSQGECIATNITQVASREENRGKMIVTMFSSGAERYLNSELFAQVKEECVNVNMTF

SEQ ID NO: 29055 - protein, 70 aa, Triticum aestivum
MEPQEGRKGIPSLLSSQGECIATNITQVASREENRGKMIVTMFSSGAERYLNSELFAQVKEECVNVNMTF

SEQ ID NO: 29056 - DNA, 1481 bp, Triticum aestivum
ctccgtatgtcccatctcctcagcactgccaagccccagaacccaatctcccccgccccctgttagggttcgtgccgcctccatggcaggcgccggcatccacccgtttcaccagcagtggccgccccaagcggcggtgcccgcgcctcccgccgtcccaccgcctccccccgtaccaggcgcacccgatgccgccgcccgccccggctctgacgaggtccgcaccatcttcatcacggggctccccgtggacgtcaaggagcgggagctgcataacctgctgcgctggcttccgggattcgaggcttcccagatcaacttcaagggcgaccagcccatggggttcgcactcttctcctacgcgcaccacgccatcgccgcaaaggccgcgctgcaggatctggtcttcgatgccgagaccaagtcggcgctgcacatcgagatggccaagaagaacctattcatcaaaagaggtgtgggaactgatgcaaatgctatggaccaaagtaaacgcttgcgaactggtggagactatactcattctgcgtatgctcctcctccattccacccacccccaccagctgtttccatgtggggaactgcaggttatatggcagctcctcctccttataatccttatgctggctatcctgtgccgacggtaccaatgacttcaccttctcctgtgccaggcccaacagcatatgctcctgtgcagaacatgaaagataaccctccctgcaatacccttttcattggaaatcttggtgaaactgttgttgaagaggaattgcggggcctcttcagtgtacaacctggtttcaaacaaatgaaagtgttgcgtcaagacaggaacaccgtctgttttattgagttcgatgatgtgagcgctgcttctgctgtgcaccatactttacagggtgctattgttcctagttctggccgcggtgggatgcgaatccagttttcaaaaaatcccttcgggcgaaggaaggacttagttggtggcatggtcggcactctgaatggtgctcctgtttgaggggatgtatcttgaactttagcatgacatcttgaattatcatctgcattgttttagccaaatctgttcctgtcatgtgcgacatcagcatcttcattgggtggagtttctggggcatgatcatcatcttcattaagtggagtttctgggatatcatcatcatctgatagacattgcattgtcactattttcattgttggcggtttcaacttctttaaattagctattgtggtttgacaaggccactatgaatgtctcctaacatgcatttggcatctgtcatgaatattttgtagtgttatgtagtttttccagtgtgcagttgcaacatttcatgtggtaatggcattgccacattatgatctggacatgctgtaatagtataaccgatttatttggcttgctgacaattcagtgtcgagggatcttgggatggttc

SEQ ID NO: 29057 - protein, 346 aa, Triticum aestivum
SVCPISSALPSPRTQSPPPPVRVRAASMAGAGIHPFHQQWPPQAAVPAPPAVPPPPPVPGAPDAAARPGSDEVRTIFITGLPVDVKERELHNLLRWLPGFEASQINFKGDQPMGFALFSYAHHAIAAKAALQDLVFDAETKSALHIEMAKKNLFIKRGVGTDANAMDQSKRLRTGGDYTHSAYAPPPFHPPPPAVSMWGTAGYMAAPPPYNPYAGYPVPTVPMTSPSPVPGPTAYAPVQNMKDNPPCNTLFIGNLGETVVEEELRGLFSVQPGFKQMKVLRQDRNTVCFIEFDDVSAASAVHHTLQGAIVPSSGRGGMRIQFSKNPFGRRKDLVGGMVGTLNGAPV

SEQ ID NO: 29058 - protein, 319 aa, Triticum aestivum
MAGAGIHPFHQQWPPQAAVPAPPAVPPPPPVPGAPDAAARPGSDEVRTIFITGLPVDVKERELHNLLRWLPGFEASQINFKGDQPMGFALFSYAHHAIAAKAALQDLVFDAETKSALHIEMAKKNLFIKRGVGTDANAMDQSKRLRTGGDYTHSAYAPPPFHPPPPAVSMWGTAGYMAAPPPYNPYAGYPVPTVPMTSPSPVPGPTAYAPVQNMKDNPPCNTLFIGNLGETVVEEELRGLFSVQPGFKQMKVLRQDRNTVCFIEFDDVSAASAVHHTLQGAIVPSSGRGGMRIQFSKNPFGRRKDLVGGMVGTLNGAPV

SEQ ID NO: 29059 - protein, 234 aa, Triticum aestivum
MGFALFSYAHHAIAAKAALQDLVFDAETKSALHIEMAKKNLFIKRGVGTDANAMDQSKRLRTGGDYTHSAYAPPPFHPPPPAVSMWGTAGYMAAPPPYNPYAGYPVPTVPMTSPSPVPGPTAYAPVQNMKDNPPCNTLFIGNLGETVVEEELRGLFSVQPGFKQMKVLRQDRNTVCFIEFDDVSAASAVHHTLQGAIVPSSGRGGMRIQFSKNPFGRRKDLVGGMVGTLNGAPV

SEQ ID NO: 29060 - DNA, 890 bp, Triticum aestivum
actattaattcagaatttgtcgacaaggtgcggaaaaccgaagacagacacacgtgaaaaagaaagcgctagaaagatggcgagtggacacacaacagctgcatccgtccgcgggccccgcttcgccggcgccggccgccgcggcgccctcctcctcgcgctgctcctcgccgccgcggccgccttactcccagtagccgagccttcctgcccccgagacaattcagtcgtgaaagatataaacaaaatgcaccagagcaactatggaattggaggattctcgcatataaccgttgcgggcgcgctagctcacggcatgaaggaggtggaggtgtggctccaaacaattagtgcgggccagaggacaccgatccacagacactcgtgtgaggaggtctttgttgtcctcaaagggagaggcactctcttgctggggtcgacctcactgccgtacccgggaacgcctcaggaaattcctgtctttcagaatagcacattcacggttcctgtaaatgatccacaccaggtttggaattctgatgaacatgaagatttacaggtgcttgtgatcatatcgcgcccacctgtgaagatatttctgtatgaagattggagtatgcctcacacggcagcgaagttgaagttccccttcgtctgggatgaggactgcttagacgcacctaaagatgaactgtaggttggaatgtgctcacatggcagcgcatcggcctcggtcagcgtactgatgaagtgcggtgtacagcttgcctgcctcctaaataatgcgcatgtctgtaacatcctttctcttggaacaacattttcgtcacggattatgtacttgagagcatgaagcagccttctgcagcaagaactatttccaaattttg

SEQ ID NO: 29061 - protein, 231 aa, Triticum aestivum
LLIQNLSTRCGKPKTDTREKESARKMASGHTTAASVRGPRFAGAGRRGALLLALLLAAAAALLPVAEPSCPRDNSVVKDINKMHQSNYGIGGFSHITVAGALAHGMKEVEVWLQTISAGQRTPIHRHSCEEVFVVLKGRGTLLLGSTSLPYPGTPQEIPVFQNSTFTVPVNDPHQVWNSDEHEDLQVLVIISRPPVKIFLYEDWSMPHTAAKLKFPFVWDEDCLDAPKDEL

SEQ ID NO: 29062 - protein, 206 aa, Triticum aestivum
MASGHTTAASVRGPRFAGAGRRGALLLALLLAAAAALLPVAEPSCPRDNSVVKDINKMHQSNYGIGGFSHITVAGALAHGMKEVEVWLQTISAGQRTPIHRHSCEEVFVVLKGRGTLLLGSTSLPYPGTPQEIPVFQNSTFTVPVNDPHQVWNSDEHEDLQVLVIISRPPVKIFLYEDWSMPHTAAKLKFPFVWDEDCLDAPKDEL

SEQ ID NO: 29063 - protein, 149 aa, Triticum aestivum
MHQSNYGIGGFSHITVAGALAHGMKEVEVWLQTISAGQRTPIHRHSCEEVFVVLKGRGTLLLGSTSLPYPGTPQEIPVFQNSTFTVPVNDPHQVWNSDEHEDLQVLVIISRPPVKIFLYEDWSMPHTAAKLKFPFVWDEDCLDAPKDEL

SEQ ID NO: 29064 - DNA, 695 bp, Triticum aestivum
accattacttagaacatcctaatcgaaaaaagccctcagtctcccctatggcggccttcgcctgtgcatctaatgtgcgccgcctcctcctccaccccggcggcggagctccggcgagatccttctacgcccagccctaccaagccaaggtaggcgtggtggagttcttgaatggggtcgggaagggggtggagacgcacgccgcgaagctggaggaggccgtaggaggtgatctccagaggctgctcgagacccgcacgctacggctcaagaagctcggcgtcccctgcaagcataggaagttgattttgagttttgctcacaagtaccgccttggtctttggaagcccccggcagaagccaggaaagtgcaataaagttggtttgttttcgaagtgtccacttggagaaattcatgcttggggcatcgaatagttgtgttgtaatttggacgccgcagttagaaggttatctgataactgatgaactcttatgcacatccaaccaataactggcccacttgatggtattcttttgtaggatttctctttgttaggtttgggcatcatcactcttgttgttctgaagtcattcggctcgcgtaccttgctctccctgtgttatccctaataatatgtcaattggcctactggtgattattgtttaaacacaataaagttggaactggagggggg

SEQ ID NO: 29065 - protein, 124 aa, Triticum aestivum
HYLEHPNRKKPSVSPMAAFACASNVRRLLLHPGGGAPARSFYAQPYQAKVGVVEFLNGVGKGVETHAAKLEEAVGGDLQRLLETRTLRLKKLGVPCKHRKLILSFAHKYRLGLWKPPAEARKVQ

SEQ ID NO: 29066 - protein, 109 aa, Triticum aestivum
MAAFACASNVRRLLLHPGGGAPARSFYAQPYQAKVGVVEFLNGVGKGVETHAAKLEEAVGGDLQRLLETRTLRLKKLGVPCKHRKLILSFAHKYRLGLWKPPAEARKVQ

SEQ ID NO: 29067 - DNA, 1276 bp, Triticum aestivum
ttttttctactgctctcgccgctggaacctgacggaaaaaccctacctcgccgtcgccccatcgtcgaacttcccgatggcgtcgaggtgcgcggcgaggcttccgcacccgccgtgcgcggcgccgcagcacggttgggcgagctcgcgggtctcggcacgcccggcgcaatccggcgcgtcaagagggcgtgccgtcgcgtgcgccgtcagcttcaggccatgtatcgacattcacaaggggaaagttaaacagattgttggctctactctccgggatgcatcggatgatggcactgcactggtgacgaactttgaatcagacaagtctccagcagaatttgcaaatatttataaagaagatggacttgttggtggacatgtaataatgcttggcggagaccctgcaagccgttctgctgccctggaagcactgcatgcatatcctggtggtttgcaagttggaggtggaataaatttggagaatgcaatgtcataccttaatgaaggagcaagtcacgtgattgtaacttcttatgtgtttagtgatggcaaaatgaacattgaaaggctaacgcaacttgtcgagcttgttgggaaacaaaggcttattttggacctgagttgtcggaaaaaggatggcagatatgccattgtgactgacagatggcagaagttcagtgatgtctttgtggatgggccaacattagaacgtcttgctgcatatgcagatgagtttttggttcatggagttgatgtggagggcaaaaggttaggaattgacgaggaacttgtggaactattgggaagccattcacctatcccgacaacatatgctgggggtgtgtcaacgatggacgacctggagaggatcaagaaagcagggaaaggtcgagtcgatgtcactgtcgggagtgccctagacatattcgggggagatttgccctacgatactgttgtccgttggcacaaggagcaaaacctggttagccaacggtgaagaaatcagatgatctttttatagagcaaatgatcgaagttcagctcatgtgtgatccccacctgaccatggtcaggtcaggttatagagctttattgtttgctggacattgtagtgtgaaccgcgtagtgtgaatgtgtcttgtgtgacatgtcaaagctgaagcggaggtgtcaactcagtgtcgtagaggaccacccggtattcagatactgttcttcacattctgtttgtattgtagtactggtaatggtgaataaacaggggttgaactgc

SEQ ID NO: 29068 - protein, 332 aa, Triticum aestivum
FFYCSRRWNLTEKPYLAVAPSSNFPMASRCAARLPHPPCAAPQHGWASSRVSARPAQSGASRGRAVACAVSFRPCIDIHKGKVKQIVGSTLRDASDDGTALVTNFESDKSPAEFANIYKEDGLVGGHVIMLGGDPASRSAALEALHAYPGGLQVGGGINLENAMSYLNEGASHVIVTSYVFSDGKMNIERLTQLVELVGKQRLILDLSCRKKDGRYAIVTDRWQKFSDVFVDGPTLERLAAYADEFLVHGVDVEGKRLGIDEELVELLGSHSPIPTTYAGGVSTMDDLERIKKAGKGRVDVTVGSALDIFGGDLPYDTVVRWHKEQNLVSQR

SEQ ID NO: 29069 - protein, 307 aa, Triticum aestivum
MASRCAARLPHPPCAAPQHGWASSRVSARPAQSGASRGRAVACAVSFRPCIDIHKGKVKQIVGSTLRDASDDGTALVTNFESDKSPAEFANIYKEDGLVGGHVIMLGGDPASRSAALEALHAYPGGLQVGGGINLENAMSYLNEGASHVIVTSYVFSDGKMNIERLTQLVELVGKQRLILDLSCRKKDGRYAIVTDRWQKFSDVFVDGPTLERLAAYADEFLVHGVDVEGKRLGIDEELVELLGSHSPIPTTYAGGVSTMDDLERIKKAGKGRVDVTVGSALDIFGGDLPYDTVVRWHKEQNLVSQR

SEQ ID NO: 29070 - protein, 203 aa, Triticum aestivum
MLGGDPASRSAALEALHAYPGGLQVGGGINLENAMSYLNEGASHVIVTSYVFSDGKMNIERLTQLVELVGKQRLILDLSCRKKDGRYAIVTDRWQKFSDVFVDGPTLERLAAYADEFLVHGVDVEGKRLGIDEELVELLGSHSPIPTTYAGGVSTMDDLERIKKAGKGRVDVTVGSALDIFGGDLPYDTVVRWHKEQNLVSQR

SEQ ID NO: 29071 - DNA, 638 bp, Triticum aestivum
ctctctcgggtctagctaaaaaccctcgcaaaccaagcccctgccacttgcaacgcacacttacaccgcttgcagagctccagctcgacctctagctagcatccatggcgcagcctctcactcgccgccgtctcctccttcctccgcctctgcttctgctgatgctcctcctcgctctcgccgcccaccatcaggccgcttccgacccaccggcgacccacggcggcatgcgagccagcggcaccaggtccctgctccagcagcagccgcctcctcccaggctagactgccccaaggtgtgcgcgggccggtgcgccaacaactggaggaaggagatgtgcaacgacaagtgcaacgtctgctgccagcgctgcaactgcgtgccccccggcaccggccaggacacccgccacatctgcccctgctacgccaccatgaccaacccgcacaacggcaagctcaagtgcccctaggcatcacatcatcttcagaggcatatgctccgcctcatgcgtctcccctgccatgttctactagctagctctagtactctagcatgtactatttgatgtgatcttcagctacattccataagctcacagtgtcacactcacacatgtagtgttgagttgcattgc

SEQ ID NO: 29072 - protein, 122 aa, Triticum aestivum
MAQPLTRRRLLLPPPLLLLMLLLALAAHHQAASDPPATHGGMRASGTRSLLQQQPPPPRLDCPKVCAGRCANNWRKEMCNDKCNVCCQRCNCVPPGTGQDTRHICPCYATMTNPHNGKLKCP

SEQ ID NO: 29073 - protein, 103 aa, Triticum aestivum
MLLLALAAHHQAASDPPATHGGMRASGTRSLLQQQPPPPRLDCPKVCAGRCANNWRKEMCNDKCNVCCQRCNCVPPGTGQDTRHICPCYATMTNPHNGKLKCP

SEQ ID NO: 29074 - protein, 81 aa, Triticum aestivum
MRASGTRSLLQQQPPPPRLDCPKVCAGRCANNWRKEMCNDKCNVCCQRCNCVPPGTGQDTRHICPCYATMTNPHNGKLKCP

SEQ ID NO: 29075 - DNA, 1415 bp, Triticum aestivum
aaaacctccaccgcgactgcgcgatcgatcgtcatctcatctcggcgtaccactactccctcaaacttgcccccttctcgatatcctgccttctcgtttacgtgctcggcgtgtgtgctagctagaggtgctgaacgaccgacatcggccggctgccatggggcgtggcgacggacacgacgacgcgctgcggcggtggctgcgggaagcgggcgggtggctggtggtcgacggggccctgggcacggagctggaggcgcacggcgcggacctgcaggacgagctctggagcgcccggtgcctcgtctccgctccccacctcatccgcaaggtccatctggactacctcgacgcaggcgccaacatcataaccacggcctcctaccaggccacgctgcaggggttccagtcgcgaggcgtgtcgagggagcagggcgaggcgctgctccggcggagcgtgcagatcgcgcaggaggcgcgcgccatcttcgtggaaggccggtcgaaaggcccctacgccgcgcgcgatgagtacgacggcgtggcgtccagagcgcaccggcccgtgctcgtggcggcctccgtcgggagctacggggcgtacctcgcggacggctccgagtacaccggggactatggcagatccgtcaccaaggaagcgctcaagaacttccacaggaggcggctccaggtgctggcggacgcagggccggatctcatcgccttcgagaccatcccaaacaagctggaagcacaggcttacgctgagctgttggaggagaacgacatcaggattcccgcctggttctccttcacctccaaggacggggccaacgcggcgagcggtgaccccatcaccgagtgcgccgccgtcgccgactcctgcaggagggtggccgccgtcgggataaactgcacggctcccaggctaatccatggcctcgtcctctccattagcaaggtgacgagcaagccgatcgtggtgtaccccaacaccggggagacgtacgtggccgagaccaaggagtgggtggactcggctgctgctggtggtggtgttgcggggacggacttcgtgtcgtgcgtcggcaagtggaggcaggcaggagcttccctcgtgggagggtgctgcaggacgggcccggcgacggtgagggccatcgcgcgggcgctgcgggaggaggatgctgccgccgacgccgataccgacgatgactaccctgccgtggccgtcctgtagagcctataggccaccctttctacatcgaccgcgatgctggcgtagaggtgtatgtagatcgtcgttctcatggccctgttgtgatgtaaatcgttatcatggctctttttgttatgacgaagcttggttctttgatctttctaattttagtcgtattctccgctgtgttgctgtc

SEQ ID NO: 29076 - protein, 360 aa, Triticum aestivum
MGRGDGHDDALRRWLREAGGWLVVDGALGTELEAHGADLQDELWSARCLVSAPHLIRKVHLDYLDAGANIITTASYQATLQGFQSRGVSREQGEALLRRSVQIAQEARAIFVEGRSKGPYAARDEYDGVASRAHRPVLVAASVGSYGAYLADGSEYTGDYGRSVTKEALKNFHRRRLQVLADAGPDLIAFETIPNKLEAQAYAELLEENDIRIPAWFSFTSKDGANAASGDPITECAAVADSCRRVAAVGINCTAPRLIHGLVLSISKVTSKPIVVYPNTGETYVAETKEWVDSAAAGGGVAGTDFVSCVGKWRQAGASLVGGCCRTGPATVRAIARALREEDAAADADTDDDYPAVAVL

SEQ ID NO: 29077 - DNA, 1264 bp, Triticum aestivum
aaggattcatctcgtttacctcttctctgcaaggatccctcgagtattcccctcaagctcctcagaaatggcgaccggaagtaatagtagtagccaagagagcaagcagccaggccccgagctgcccaagcagctgccgttcgattttctcaagaaaatcaccaacgatttcggccaagaccggaagataagcggaagccccttcggcacactctacaaggggattgtgccagatgacggcagagtgattgccgtgaagaaacttcaggagaacgcgccaatgccagcagataagcagttcaacagagaggtccagaatgtgatgtccctcaagcatgagaacatagtggagcttgtcgggttctgctgcgaaacgcagaagaaactggtgcagtttgataagagatacatccaggcggacatcaccgaaagcttaatctgctatgagtatttacctaatgggagccttcaggagaatctttttgagcccaaggggtccactaaaccagaaattggttgggacgtacgcttcaaaataatcaaggggatttgccaaggcttacgttttctacacaagttggatattcccattgtccatatggatttgaagcctgagaatatactgttggatgcaaatatggtgccaaagatagcggattttgcactctcaagggtctttggccaagaacaaaccagactctgcacgcaaacagttgtcggatcatatgggtacatggctccagaatatctttacagaggtgaaatatcagcccagtcagacatatacagtttaggcctagtgataattgagatcaccactggagagcagaatcctcgcgaaaaagaccaaccatctgcaagaagttttgttgataaagtgcgtaaagaatggacgctggagaacataacatccaaatattcatcactggatcatgaaagcctccaacaagttaaaacatgcattgatatcgggtcaaactgtgttgagattgataggacaaaaagacctcgcatagaagaaattgttgactcgctcaacggactacgttcaagccaaaaagttaccgaggtctcccgtccgcctacaactggcaagaagctaatgggctccatttttggtctgaagaaatgaaacatgcacgcctgttactgctggaagattgtaactttaatttggaaataggagcctttgttgccatctcgtcctggaagcatttaagtgtaattttcttatgtgtaatatgtctttttattactattagtc

SEQ ID NO: 29078 - protein, 376 aa, Triticum aestivum
RIHLVYLFSARIPRVFPSSSSEMATGSNSSSQESKQPGPELPKQLPFDFLKKITNDFGQDRKISGSPFGTLYKGIVPDDGRVIAVKKLQENAPMPADKQFNREVQNVMSLKHENIVELVGFCCETQKKLVQFDKRYIQADITESLICYEYLPNGSLQENLFEPKGSTKPEIGWDVRFKIIKGICQGLRFLHKLDIPIVHMDLKPENILLDANMVPKIADFALSRVFGQEQTRLCTQTVVGSYGYMAPEYLYRGEISAQSDIYSLGLVIIEITTGEQNPREKDQPSARSFVDKVRKEWTLENITSKYSSLDHESLQQVKTCIDIGSNCVEIDRTKRPRIEEIVDSLNGLRSSQKVTEVSRPPTTGKKLMGSIFGLKK

SEQ ID NO: 29079 - protein, 354 aa, Triticum aestivum
MATGSNSSSQESKQPGPELPKQLPFDFLKKITNDFGQDRKISGSPFGTLYKGIVPDDGRVIAVKKLQENAPMPADKQFNREVQNVMSLKHENIVELVGFCCETQKKLVQFDKRYIQADITESLICYEYLPNGSLQENLFEPKGSTKPEIGWDVRFKIIKGICQGLRFLHKLDIPIVHMDLKPENILLDANMVPKIADFALSRVFGQEQTRLCTQTVVGSYGYMAPEYLYRGEISAQSDIYSLGLVIIEITTGEQNPREKDQPSARSFVDKVRKEWTLENITSKYSSLDHESLQQVKTCIDIGSNCVEIDRTKRPRIEEIVDSLNGLRSSQKVTEVSRPPTTGKKLMGSIFGLKK

SEQ ID NO: 29080 - protein, 283 aa, Triticum aestivum
MPADKQFNREVQNVMSLKHENIVELVGFCCETQKKLVQFDKRYIQADITESLICYEYLPNGSLQENLFEPKGSTKPEIGWDVRFKIIKGICQGLRFLHKLDIPIVHMDLKPENILLDANMVPKIADFALSRVFGQEQTRLCTQTVVGSYGYMAPEYLYRGEISAQSDIYSLGLVIIEITTGEQNPREKDQPSARSFVDKVRKEWTLENITSKYSSLDHESLQQVKTCIDIGSNCVEIDRTKRPRIEEIVDSLNGLRSSQKVTEVSRPPTTGKKLMGSIFGLKK

SEQ ID NO: 29081 - DNA, 1653 bp, Triticum aestivum
aaaaaaactctccaagcgaatcccatttccgccggtcctcccttcgccaagccatcggcgactgctgcagcacagcctcctccccctcctcatggccgacccctccttctcctcccccacggcggcctccgcaggcgacgccctccccgcgccggcggcttccgacgcgccggaggtgaccctccccgccgccgcccccgacctggacaaggagttcgggttccagcgggcggagctcggtaaggagaagctcgccgggacggtgggcttccacgagcgccacgtgttcctctgctacaagggccctgaggagtggccatcccacgtcgaggcctccgagtccgaccacctcccccgcctcctcgccgccgccatcaaggcccgcaagcccaatctgaagaagagcaccaaactgacaatttgtgaaggagaagatggcactgagtcatctcttggagacgtgttgatctttcctgatatgatccgatacagagagctgacccaccttgatgtcgacaactttgtggatgaagtactcgtgaaagatactgaatggcttcctggatctcctgaggctataaaaggttcctatgtttttgtctgctgccatggaagcagggataaaaggtgtggtgtttgcggtcctgctctgattacaaggttcaaggaagggattgaaggacaaggtcttcatggtcaggtggctgttagtgcatgctcacacgttggaggtcacaagtatgcaggaaatgtcatcatattcagtccagatgccaagggagaagtgactggtcattggtatggttatgttgctcctgatgatgtgcctgtgttactgcgtcaacatatcggacaaggagagatcgtgggccatctatggaggggccagttgggtttgtctgaagagcagcagaagaaagctctggagcttaggcgcgcgacgaatggcctgactgaggaagaatcaagcgccaaagaatcccctgaagcaaatggagccaacggtgctgcttgcaaccctgcacctgcaggtggatgctgccagggcaatggaggaggtttaacctgctgccaaagtgatctgccagcaggaaaacaggataagagcgtcccagctgagcagaaccacaagagctctacgacagagagtgacaaagaaaacggtgctgccagcaagaaggggcgcatgaagatttgccggatgcccacctggttcgagacctgggacaagtccgacacctacaccactcttgctgttgttgcttctgctgcaaccgtgttcgccgccttcaggtgctacaaggccatgaactgaaccctcaaaacaaggccaggttctttgcaccaaggacagtctaccgcagtaaaacaatccgatttgaaaataatatactgcctgtgcatatcaagataatatgcgttaggactttagaaagtacagtagctgatctggagatggcgatgaaaatctgttatgcgtaatgccctcatgtactaaaagtctaaaactcgtaagtttgaagttccccacgccttggctgcatggctgtggctgtggtgttcagcgtgatgatgatgttatgctcgtttggctggaactgggatgcttgcgttagaaaaactgtgcattgctggcatttgcttctttgaagc

SEQ ID NO: 29082 - protein, 437 aa, Triticum aestivum
KKLSKRIPFPPVLPSPSHRRLLQHSLLPLLMADPSFSSPTAASAGDALPAPAASDAPEVTLPAAAPDLDKEFGFQRAELGKEKLAGTVGFHERHVFLCYKGPEEWPSHVEASESDHLPRLLAAAIKARKPNLKKSTKLTICEGEDGTESSLGDVLIFPDMIRYRELTHLDVDNFVDEVLVKDTEWLPGSPEAIKGSYVFVCCHGSRDKRCGVCGPALITRFKEGIEGQGLHGQVAVSACSHVGGHKYAGNVIIFSPDAKGEVTGHWYGYVAPDDVPVLLRQHIGQGEIVGHLWRGQLGLSEEQQKKALELRRATNGLTEEESSAKESPEANGANGAACNPAPAGGCCQGNGGGLTCCQSDLPAGKQDKSVPAEQNHKSSTTESDKENGAASKKGRMKICRMPTWFETWDKSDTYTTLAVVASAATVFAAFRCYKAMN

SEQ ID NO: 29083 - protein, 407 aa, Triticum aestivum
MADPSFSSPTAASAGDALPAPAASDAPEVTLPAAAPDLDKEFGFQRAELGKEKLAGTVGFHERHVFLCYKGPEEWPSHVEASESDHLPRLLAAAIKARKPNLKKSTKLTICEGEDGTESSLGDVLIFPDMIRYRELTHLDVDNFVDEVLVKDTEWLPGSPEAIKGSYVFVCCHGSRDKRCGVCGPALITRFKEGIEGQGLHGQVAVSACSHVGGHKYAGNVIIFSPDAKGEVTGHWYGYVAPDDVPVLLRQHIGQGEIVGHLWRGQLGLSEEQQKKALELRRATNGLTEEESSAKESPEANGANGAACNPAPAGGCCQGNGGGLTCCQSDLPAGKQDKSVPAEQNHKSSTTESDKENGAASKKGRMKICRMPTWFETWDKSDTYTTLAVVASAATVFAAFRCYKAMN

SEQ ID NO: 29084 - protein, 278 aa, Triticum aestivum
MIRYRELTHLDVDNFVDEVLVKDTEWLPGSPEAIKGSYVFVCCHGSRDKRCGVCGPALITRFKEGIEGQGLHGQVAVSACSHVGGHKYAGNVIIFSPDAKGEVTGHWYGYVAPDDVPVLLRQHIGQGEIVGHLWRGQLGLSEEQQKKALELRRATNGLTEEESSAKESPEANGANGAACNPAPAGGCCQGNGGGLTCCQSDLPAGKQDKSVPAEQNHKSSTTESDKENGAASKKGRMKICRMPTWFETWDKSDTYTTLAVVASAATVFAAFRCYKAMN

SEQ ID NO: 29085 - DNA, 1293 bp, Triticum aestivum
tttttctcccgccctcgcaaccacctcccctcccctgtcctgccgagagtctcttctcttctcgtctctcgtcgcctcccgagtctccggcgaccacgccaactagacggccatggagcaaggcgccgactccgcggcggcgaggcggatggccagggtcgcctcccacctccgcccgcccacctcgcagatggaggaggtggccatcttgaagggctctgattgccgtgcaaaaggtgcggcaccagggttcaaggtcgcagtcctgggtgcatctggtggaattggccagccgctctcgctgctcatgaagatgaaccctcttgtttcggtgctccatttatatgatgttgtcaacacacctggtgtcacagctgacattagccacatgaacaccggtgctgtggtgcgtggcttcttgggtcagtcacaattggaaagtgctcttactggaatggatcttgtgatcattcctgctggcattcctcggaaacctgggatgacaagggatgatttgttcaacatcaatgccgggattgttcggactctttgtgagggaattgcaaaatgctgcccaaatgcgattgtgaatgtgatcagtaaccctgtaaattctaccgttccgatcgctgctgaagtatttaaaaaagctggaacatatgatcctaagcgcctattgggggtgacaacacttgatgtagtgagagccaatacctttgtgggagaggttcttggacttgaccccagagatgtcaatgttcctgttgttggtgggcatgcaggagttacgatattaccactcctttcacaggtgaatcctccctgctcgtttacctcagaagaaattagttatctcacttctcgcatacagaatggtgggacagaagtagttgaggccaaagcaggagcaggatccgcgactctttccatggcctacgcagcagccaaattcgcggacgcgtgcctgagagggctgcgcggcgacgccgggatagtggagtgctcttacatagcctgtcaggtgacggagctgcccttcttcgcgtccaaggtgcggctgggccggtcgggcgtcgaggaggtcctgccgctcggcccgctgaacgagtttgagagggcggggctggagaaggccaagggcgagctggccgagagcatccacaagggcgtcgcctttgccaacaagtgaagtgaagacaagagaagagaaatctttcgccccagcatagaaatctgagatgcctcttgcttcctgggagcaacggtcgccgtgtcattgtctcatctccctgt

SEQ ID NO: 29086 - protein, 358 aa, Triticum aestivum
MEQGADSAAARRMARVASHLRPPTSQMEEVAILKGSDCRAKGAAPGFKVAVLGASGGIGQPLSLLMKMNPLVSVLHLYDVVNTPGVTADISHMNTGAVVRGFLGQSQLESALTGMDLVIIPAGIPRKPGMTRDDLFNINAGIVRTLCEGIAKCCPNAIVNVISNPVNSTVPIAAEVFKKAGTYDPKRLLGVTTLDVVRANTFVGEVLGLDPRDVNVPVVGGHAGVTILPLLSQVNPPCSFTSEEISYLTSRIQNGGTEVVEAKAGAGSATLSMAYAAAKFADACLRGLRGDAGIVECSYIACQVTELPFFASKVRLGRSGVEEVLPLGPLNEFERAGLEKAKGELAESIHKGVAFANK

SEQ ID NO: 29087 - protein, 346 aa, Triticum aestivum
MARVASHLRPPTSQMEEVAILKGSDCRAKGAAPGFKVAVLGASGGIGQPLSLLMKMNPLVSVLHLYDVVNTPGVTADISHMNTGAVVRGFLGQSQLESALTGMDLVIIPAGIPRKPGMTRDDLFNINAGIVRTLCEGIAKCCPNAIVNVISNPVNSTVPIAAEVFKKAGTYDPKRLLGVTTLDVVRANTFVGEVLGLDPRDVNVPVVGGHAGVTILPLLSQVNPPCSFTSEEISYLTSRIQNGGTEVVEAKAGAGSATLSMAYAAAKFADACLRGLRGDAGIVECSYIACQVTELPFFASKVRLGRSGVEEVLPLGPLNEFERAGLEKAKGELAESIHKGVAFANK

SEQ ID NO: 29088 - protein, 332 aa, Triticum aestivum
MEEVAILKGSDCRAKGAAPGFKVAVLGASGGIGQPLSLLMKMNPLVSVLHLYDVVNTPGVTADISHMNTGAVVRGFLGQSQLESALTGMDLVIIPAGIPRKPGMTRDDLFNINAGIVRTLCEGIAKCCPNAIVNVISNPVNSTVPIAAEVFKKAGTYDPKRLLGVTTLDVVRANTFVGEVLGLDPRDVNVPVVGGHAGVTILPLLSQVNPPCSFTSEEISYLTSRIQNGGTEVVEAKAGAGSATLSMAYAAAKFADACLRGLRGDAGIVECSYIACQVTELPFFASKVRLGRSGVEEVLPLGPLNEFERAGLEKAKGELAESIHKGVAFANK

SEQ ID NO: 29089 - DNA, 1187 bp, Triticum aestivum
acggagcagcattgtgcgtagctttacaccaacgcacaactaactattactactccagtagtgaaggagcagaggtaggatggtgaacttggtggaggcccagaagccgctgctgcacttcctgatcagaagggccgggctccggcagcacacggtggacgtggacggcgccggcacggcgctcaccttctgggtgcccaaggacaagctccccaaggacaagtccaccgtgtgcgagatcacgcccgaagcggcggcgccggcctccaagaagaagagcaagacgaaagccaaggccccgcggccatccgtcgtcctcgtgcacggcttcgcggccgaaggcattgtcacgtggcagttccaggctggtgtgctggcgaagcactacgacgtgtacatcccggacctgctctacttcggcggctccacgtcgccgtcgacggaccggtcgccggggttccaggcggagtgcctggtggcagcgctgggcaagctgggcgtggagaagtgcacggtggtggggttcagctacggcgggatggtggccttcaagatgggcgagtcgcacccgggcctcgtccggtcgctcgtggtgtcgggctccgtcgtcgccatgaccgactccatcagcgagaccacgctggagaggatcggcgtcaagtcgtcggcggagctgctgctgccggactccgtcaaggggctcaaggcgctgctctccatcgtcgcccacaggaaactctggttcccggaacgccttcacagggactacctccaggtgatgttcaccaaccgcaaggaaagagcagagctgctggaaggtttggtggtcagcaacaaagacgccaccgtgcccgttttgccacagaaaatacttctgctctggggacacaacgacaacattttcaacatagagctcgccaggacaatgaaagagtgtacgcaggcagctcggtgaggagacgatgctgcagagcatagacaaggccgggcatctcgtgcacctggagaggccctgcgtctacaaccgccgcctcttggagttcctggcatacgtcactgctgaagcttccaaagagtgacaaattagtaggtccatcgtgtcccggagagtgcttgatttgttcacagacaactggggtcccatttgttgcagtttgattgtttggccgtgtataatatttgtgagt

SEQ ID NO: 29090 - protein, 291 aa, Triticum aestivum
MVNLVEAQKPLLHFLIRRAGLRQHTVDVDGAGTALTFWVPKDKLPKDKSTVCEITPEAAAPASKKKSKTKAKAPRPSVVLVHGFAAEGIVTWQFQAGVLAKHYDVYIPDLLYFGGSTSPSTDRSPGFQAECLVAALGKLGVEKCTVVGFSYGGMVAFKMGESHPGLVRSLVVSGSVVAMTDSISETTLERIGVKSSAELLLPDSVKGLKALLSIVAHRKLWFPERLHRDYLQVMFTNRKERAELLEGLVVSNKDATVPVLPQKILLLWGHNDNIFNIELARTMKECTQAAR

SEQ ID NO: 29091 - DNA, 553 bp, Triticum aestivum
aagcagatcgcactgaaggcagtagtgcagcagaccagttctacacttccaacgcagaaacaaaatcctccaggatcatctacagcatagggagcgaggagatggaggggagcagcagccggacgccggagataaccatcgtcccggcgcctaggccggcggcgggcggtggcggtggcggtggcgccgtcgaggcggtgaaggcggcgagcaaggagcccatcagcccgggctcgccttccccggccagcagggagcgccccggcgccgtctccctgcccgggtggaagctcgactccctctgcaaggagtccagctcgccgccggccatgatggcgcgcttcccctatttctgaagccacgcgggcatctttgccatcctttgctagtactgtagtattttccgtctggtatatgtaagtttgcagcggcagttttgttgctcgttccttccggcgatgtcatgtagaactcgtatcgtggttgtaatcgttctcgcaagagttctggcgtgcctttctggttgctttgaacttgatcatgcccgtgtttg

SEQ ID NO: 29092 - protein, 117 aa, Triticum aestivum
ADRTEGSSAADQFYTSNAETKSSRIIYSIGSEEMEGSSSRTPEITIVPAPRPAAGGGGGGGAVEAVKAASKEPISPGSPSPASRERPGAVSLPGWKLDSLCKESSSPPAMMARFPYF

SEQ ID NO: 29093 - protein, 84 aa, Triticum aestivum
MEGSSSRTPEITIVPAPRPAAGGGGGGGAVEAVKAASKEPISPGSPSPASRERPGAVSLPGWKLDSLCKESSSPPAMMARFPYF

SEQ ID NO: 29094 - DNA, 977 bp, Triticum aestivum
ctccactcccgcaacccgctgctcctctcctggtgcgccgctcgacctcctcctttctcccactcaggtgcgccgccggccggccctcttcctctctccctccctctcaggatacaagtggaacaaggcatgggtgtaggtgctactcaggcgaagcacaccctcctctcctaaggaaatcatcgagcgagcaaggcccacttctaatgctcgttgcgtcctccccgattcccacccgtctcttcttcatagcgagcaccggtggcggctggtagagaggcgagccgagaggtgcagcgggctacaagtggagagatcaagcgagcgatgggccggaggatcctcaacgacgcgctgcgcacgatggtgaacgcggagcggcgggggaaggctacggcgcaactccagcccatctccggcgtcatgatctcgttcctcaatatcatgaagcaccgaggttacataaaaaatttcgacgtattcgatccacatagggttggaaaaatcaccgtggaacttcagggaaggattaaagattgcaaagctctcacttacaggcaggacctcagagccacggaaatagaaaaatacagaactaggatgcttccaacacggcagtggggctatgttgtggtgaccaccccaaatggcgttttagatcacgaggaagcaattaggcagaatgtgggcggccaggtcctcggttacttccattgaggaggaaacacagttatcccatgccgaatcagccctgggctgcattgtttatctttctgttatgactgaggtcattttatttggacatttagagcttgctgcttttgttcatggccaacagaaaatgggattacatgtcaaaagtagtatgtctggcgacactgacataaatattgtaatccttctttgggacagatatttctgtaggcgtaatacacccatgtactttgagatacacgagtaacattctagttcgagct

SEQ ID NO: 29095 - protein, 129 aa, Triticum aestivum
MGRRILNDALRTMVNAERRGKATAQLQPISGVMISFLNIMKHRGYIKNFDVFDPHRVGKITVELQGRIKDCKALTYRQDLRATEIEKYRTRMLPTRQWGYVVVTTPNGVLDHEEAIRQNVGGQVLGYFH

SEQ ID NO: 29096 - protein, 117 aa, Triticum aestivum
MVNAERRGKATAQLQPISGVMISFLNIMKHRGYIKNFDVFDPHRVGKITVELQGRIKDCKALTYRQDLRATEIEKYRTRMLPTRQWGYVVVTTPNGVLDHEEAIRQNVGGQVLGYFH

SEQ ID NO: 29097 - protein, 97 aa, Triticum aestivum
MISFLNIMKHRGYIKNFDVFDPHRVGKITVELQGRIKDCKALTYRQDLRATEIEKYRTRMLPTRQWGYVVVTTPNGVLDHEEAIRQNVGGQVLGYFH

SEQ ID NO: 29098 - DNA, 1073 bp, Triticum aestivum
actataacatctctattacgaaaaattcatcacagcgagcaagcgcaagcagcatgcagcaagtcaaccgtctaggctcctccagctagctcgctccggcagcggcaagcaatggcgcccagcttcggccgctccatctctttcccgctcagcccggcgcgcgcctccagggcccgcgccgcggcctaccacgtccgctccgtctccctcccctgccactcccacccgctcctctcccacctcgccacccacatctccgccgtccgcgcctggatcgccgcccccagcgcgccctccacgggcctcgcccgcctcgacgcgctccacgccgcgctcgccgagctcctgctcctccccgaggcccgcgccgcgttagagagcgggtccaacaccgccgactgcctcctcgacggcttcctgaacctcgccgacgcccacggcgcgttccaggagtcgctcctcgagctccgcgcccacgccgccgaggcgcagtccgcgctccggcgccgcgacgacaacagactgtcatccgcagtccggtccctccgccgcgccgagaaggagctggcccgcctggccgcctccgtgcggcgtggcggccaagttccccacgccgtccgcgtccaccagcgccgcggaggtggaggtgtccggggtgctcgccgaggccgtggccaccgccgcgtgcgcgtctgccgccgtgttctcctccgtcgagaccgtgtccgccgccgccacctccaagaagaccaccgcggcgtcctcgctcagggccctcgtcatgcgggccaaggccgcctccgaggaggacaaggaggtggccgccctggagaggctggaggaggtcgaggcgtgcaccgccgacatcgagaccggcagcgacaaggtgttccggagcatcctgcacaccagggtcgcgctcctcaacatccagacccagacctactgctgatccaactcaatgccctagctagtgtagtagcgtagtctagtctttttttggaggatcattctgatcctgtccaaaccctcaagtgtacatacaccaatcgatcaacggattaatgcaaagc

SEQ ID NO: 29099 - protein, 291 aa, Triticum aestivum
MAPSFGRSISFPLSPARASRARAAAYHVRSVSLPCHSHPLLSHLATHISAVRAWIAAPSAPSTGLARLDALHAALAELLLLPEARAALESGSNTADCLLDGFLNLADAHGAFQESLLELRAHAAEAQSALRRRDDNRLSSAVRSLRRAEKELARLAASVRRGGQVPHAVRVHQRRGGGGVRGARRGRGHRRVRVCRRVLLRRDRVRRRHLQEDHRGVLAQGPRHAGQGRLRGGQGGGRPGEAGGGRGVHRRHRDRQRQGVPEHPAHQGRAPQHPDPDLLLIQLNALASVVA

SEQ ID NO: 29100 - DNA, 462 bp, Triticum aestivum
gcactcccgcctctcccaaatcctagggtttctcgatccacccctccctcacaccccgccgccgccgccgccgccgtcgccgtccgccgcactcccgagggtttctcgatccacccccgcccccttcgcgccccgccgccgccggcccccgcccgcccgcgaagatgttggagctgaggctggtgcaggggagcctgctgaagaaggtgctggaggcgatcaaggagctggtgacggacgccaacttcgactgctccgggacgggcttctcgctgcaggccatggactcctcccacgtcgcgctcgtcgccctgctcctccgctccgagggattcgagcactaccgctgcgaccgcaacctctccatgggcatgaacctcggcaacatggccaagatgctccgctgcgcgggcaacgacgacatcatcaccatcaaggccgacgacggctccgacaccgtca

SEQ ID NO: 29101 - protein, 153 aa, Triticum aestivum
HSRLSQILGFLDPPLPHTPPPPPPPSPSAALPRVSRSTPAPFAPRRRRPPPAREDVGAEAGAGEPAEEGAGGDQGAGDGRQLRLLRDGLLAAGHGLLPRRARRPAPPLRGIRALPLRPQPLHGHEPRQHGQDAPLRGQRRHHHHQGRRRLRHR

SEQ ID NO: 29102 - protein, 99 aa, Triticum aestivum
MLELRLVQGSLLKKVLEAIKELVTDANFDCSGTGFSLQAMDSSHVALVALLLRSEGFEHYRCDRNLSMGMNLGNMAKMLRCAGNDDIITIKADDGSDTV

SEQ ID NO: 29103 - DNA, 872 bp, Triticum aestivum
atcacctcgtcccatcccgccggcgaaggctccccaccacccaaccctagatccatacagtcgttagattagatccgagcggcggcggccgcggcgtggaagatggtgtgcatccggcaggcgacgatcgacgacctgctggcgatgcaggcgtgcaacctgatgtgcctgccggagaactaccagatgaagtactacttctaccacatgcttttcgtggccgcagctcctgttcgtcgccgaggactacggcggccgcatcgtcggctacgtgctggccaagatggaggaggacccctcggagccctgccacggccacatcacctcgctcgccgtgctccgctcccaccgcaagctcggcctcgccaccaagcttatgtcggccgcgcaggccgccatggaccaggtcttcggcgccgagtacgtgtcgctccacgtccgccgctccaaccgcgccgccttcaacctctacacctccaccctcggctaccagatccacgacatcgaggccaagtactacgccgacggcgaggacgcctacgacatgcgcaagatgctgcgccagcccgtccccaagaagcaccaccaccaccaccacgccggcggcggctgctgctcccacgacgcccctgctgccgccgcggccggctcgtcctcgacctccgcttcgccggagaagaaggccgattcatgagagaaagccatttcaagcgcaaggagctgctgaacctactggatgatatgaagcagatggtgctctacttctgtatcatgattgtagccttgtaccaatgatacagagggaacattgtactgtgatctgtaggcttgcctggtcatattggctagagtccttgtaattcttggagatt

SEQ ID NO: 29104 - protein, 230 aa, Triticum aestivum
MVCIRQATIDDLLAMQACNLMCLPENYQMKYYFYHMLFVAAAPVRRRGLRRPHRRLRAGQDGGGPLGALPRPHHLARRAPLPPQARPRHQAYVGRAGRHGPGLRRRVRVAPRPPLQPRRLQPLHLHPRLPDPRHRGQVLRRRRGRLRHAQDAAPARPQEAPPPPPRRRRLLLPRRPCCRRGRLVLDLRFAGEEGRFMRESHFKRKELLNLLDDMKQMVLYFCIMIVALYQ

SEQ ID NO: 29105 - protein, 216 aa, Triticum aestivum
MQACNLMCLPENYQMKYYFYHMLFVAAAPVRRRGLRRPHRRLRAGQDGGGPLGALPRPHHLARRAPLPPQARPRHQAYVGRAGRHGPGLRRRVRVAPRPPLQPRRLQPLHLHPRLPDPRHRGQVLRRRRGRLRHAQDAAPARPQEAPPPPPRRRRLLLPRRPCCRRGRLVLDLRFAGEEGRFMRESHFKRKELLNLLDDMKQMVLYFCIMIVALYQ

SEQ ID NO: 29106 - protein, 210 aa, Triticum aestivum
MCLPENYQMKYYFYHMLFVAAAPVRRRGLRRPHRRLRAGQDGGGPLGALPRPHHLARRAPLPPQARPRHQAYVGRAGRHGPGLRRRVRVAPRPPLQPRRLQPLHLHPRLPDPRHRGQVLRRRRGRLRHAQDAAPARPQEAPPPPPRRRRLLLPRRPCCRRGRLVLDLRFAGEEGRFMRESHFKRKELLNLLDDMKQMVLYFCIMIVALYQ

SEQ ID NO: 29107 - DNA, 685 bp, Triticum aestivum
gaacatcctaatcgaaaaatccacaccaaccggtcgcccgaatctcgagcgccacccatggcctcctccgccttgtccggcacccaccatcgcctccttctcccctgtttcctgcgccgcctcccccgaccccgctcgcgctcgtgctcccgcctccgcctcgccgcctgccacgccgacaccctcctttcctcctccggggcccaggggccgccctcccccgccgcgtgctcgtcggcatcctccgctggcgggttctctgactggctactcacgaatgggctgccgccgggcaaggtggccatcctggagcgccccgtcccgtgctctcgcgggggcaaagaccggccattacacttcgtcgctgctgggcaggacctcgaggtactgagcaagcagggttagttgttgactcggcggtgaacatgcgatcctgatgcggctttctgcttgcttgcacaggcgggggatgtggcgttcgaggtgcccatgtcgctcgttgtcacactggagcgggttctcggcgacgagtcggtcggtgagttggcctctggctctagaccggccgagttctgtcatttggtaatctaataataaatgaatttgacatttgtaatggtattacgccgaaatcgttcctgccctgagtaggttacatatgaaaataatttgtagaaatattgtt

SEQ ID NO: 29108 - protein, 134 aa, Triticum aestivum
EHPNRKIHTNRSPESRAPPMASSALSGTHHRLLLPCFLRRLPRPRSRSCSRLRLAACHADTLLSSSGAQGPPSPAACSSASSAGGFSDWLLTNGLPPGKVAILERPVPCSRGGKDRPLHFVAAGQDLEVLSKQG

SEQ ID NO: 29109 - protein, 129 aa, Triticum aestivum
NILIEKSTPTGRPNLERHPWPPPPCPAPTIASFSPVSCAASPDPARARAPASASPPATPTPSFPPPGPRGRPPPPRARRHPPLAGSLTGYSRMGCRRARWPSWSAPSRALAGAKTGHYTSSLLGRTSRY

SEQ ID NO: 29110 - protein, 115 aa, Triticum aestivum
MASSALSGTHHRLLLPCFLRRLPRPRSRSCSRLRLAACHADTLLSSSGAQGPPSPAACSSASSAGGFSDWLLTNGLPPGKVAILERPVPCSRGGKDRPLHFVAAGQDLEVLSKQG

SEQ ID NO: 29111 - DNA, 1369 bp, Triticum aestivum
tcatcggtcgccgttgcagccacgacaacacaacacagacgcaccaccaccacccactgaagttactcaagaactaattctccggccggccggaaatcgcgcgcgtcagtcaggatggcacccacggcggcggagcagcacacgaggaaggcggtgggtctggcggcgcgcgacgcctccggccacctctccccgctcgccatcacccggaggagcactggagatgacgatgtggtgatcaagattctgtactgcgggatctgccactctgacctacacagcatcaagaacgaatggaagaatgccaggtatcccatgatccctgggcacgagatcgccggcgaggtcactgaggtcggcaagaatgtaaccaagttcaaggccggtgaccgtgtgggcgtcgggtgcatggtgaactcatgccagtcttgcgagagctgcaacaagggcttcgagaaccactgcccaggcataatccccacctacaacacggtcgacctcgacggcaccatcacctatggtggctactctggcatggtggtggtgcacgagcggttcgtggtccggttcccggacaccataccactggacaagggcgcgccgttgttgtgtgctggcataaccgtgtacagccccatgaagtaccacggtctgaacgttcctgggatgcacctcggcattttgggactgggcgggctgggccatgttgcggtcaagtttggcaaggccttcgggatgaaggtgacggtgatcagctcgtcgccggggaagaaggaggaggccctcgagcagctaggcgccgatgcgttcgttgtcagcaaggatgccgaggagatgaaggctgcaatgagtaccatggatggcatcataaacacggtgtctgcaaacatccccatggctcctctcttggggctactgaaacccaacggcaagatgatcatggttggcctcccagagaagcctatggagatctccccctttgcgctggttgccatgaacaagaccctggccgggagctgcatcggcggcatgaaggacacccaggagatgttggacctcgccgccaagcatgatgtgacggcagacatcgaggtgattggagccgagtacgtgaacacggccatggagcgccttgccaaggccgacgtgaggtatcgattcgtcatcgacatcggcaacaccctcgacaaagccgccgccaccgcctccgagtgactcaggatctctgtttttgtcagcagtaacaagagagaaatttataatattgtgtgtgaaagcgtacgccagcaggtataggcgctacttgttgtactagtataatatttatattataatatttataattttattatatgtgaaggaagacgtt

SEQ ID NO: 29112 - protein, 366 aa, Triticum aestivum
MAPTAAEQHTRKAVGLAARDASGHLSPLAITRRSTGDDDVVIKILYCGICHSDLHSIKNEWKNARYPMIPGHEIAGEVTEVGKNVTKFKAGDRVGVGCMVNSCQSCESCNKGFENHCPGIIPTYNTVDLDGTITYGGYSGMVVVHERFVVRFPDTIPLDKGAPLLCAGITVYSPMKYHGLNVPGMHLGILGLGGLGHVAVKFGKAFGMKVTVISSSPGKKEEALEQLGADAFVVSKDAEEMKAAMSTMDGIINTVSANIPMAPLLGLLKPNGKMIMVGLPEKPMEISPFALVAMNKTLAGSCIGGMKDTQEMLDLAAKHDVTADIEVIGAEYVNTAMERLAKADVRYRFVIDIGNTLDKAAATASE

SEQ ID NO: 29113 - protein, 299 aa, Triticum aestivum
MIPGHEIAGEVTEVGKNVTKFKAGDRVGVGCMVNSCQSCESCNKGFENHCPGIIPTYNTVDLDGTITYGGYSGMVVVHERFVVRFPDTIPLDKGAPLLCAGITVYSPMKYHGLNVPGMHLGILGLGGLGHVAVKFGKAFGMKVTVISSSPGKKEEALEQLGADAFVVSKDAEEMKAAMSTMDGIINTVSANIPMAPLLGLLKPNGKMIMVGLPEKPMEISPFALVAMNKTLAGSCIGGMKDTQEMLDLAAKHDVTADIEVIGAEYVNTAMERLAKADVRYRFVIDIGNTLDKAAATASE

SEQ ID NO: 29114 - protein, 268 aa, Triticum aestivum
MVNSCQSCESCNKGFENHCPGIIPTYNTVDLDGTITYGGYSGMVVVHERFVVRFPDTIPLDKGAPLLCAGITVYSPMKYHGLNVPGMHLGILGLGGLGHVAVKFGKAFGMKVTVISSSPGKKEEALEQLGADAFVVSKDAEEMKAAMSTMDGIINTVSANIPMAPLLGLLKPNGKMIMVGLPEKPMEISPFALVAMNKTLAGSCIGGMKDTQEMLDLAAKHDVTADIEVIGAEYVNTAMERLAKADVRYRFVIDIGNTLDKAAATASE

SEQ ID NO: 29115 - DNA, 1451 bp, Triticum aestivum
aaaatttggtccagcgaacgcagagcggataccaaccaggtgagccatcaaagccgcttctcttcccctaaaacctagcccgcaaatcccaatccagcccacgcgcctcccccccaaaccctcgtccccaagctcgcgaacctcgccgccgccaccgcccgcaccaccaccggccgctccgcgcgaccgcccaccatggcgcgtaacgaggagaaggcgcagtccatgctgaaccgcttcatcacgatgaagcaggaggagaagcgcaagccccgcgagcgccggccgtacctcgcctccgagtgccgggacctcgctgacgccgaccgctggcgtggagagatcctgcgcgagatcggcgtcaaggtcgccgagatccagaacgagggcctcggggagcaccgcctccgagacctcaacgacgagatcaacaagctcctccgcgagcgcagccactgggagcgccgcatcctcgagctcggaggccgcgactactctcgcagctccaacgccgccctcatgaccgacctcgacggcaacatcgtcgccatccccaacccctccggccggggcccaggctaccgctactttggcgctgccaagaagctccccggcgtccgtgagctatttgacaagccacctgaggtccgcaagcgccgcacccgctatgagatccacaagcgcatcaatgccgggtactacggatactatgacgatgaggacggtgtgcttgagccccttgaggctgctgccgagaagcgcatgcgggacgaggttgtcacggagtggcaccgggtggagcgtgtgcggcgggaggccatgaagaatgtggtgagtggcgaggtggctgcagcaggtgggcgtggtggggaagctgctagggaggtgctgttcgaggaggtggaggaggaggttgaggaggagaggaggctggaggaagagaggatggaaagagagaagggggaagaggctgggagggagtttgtcgcacatgtgccgctccctgatgagaaggagattgagcggatggtgctagagaagaagaagaaggagctgctcagcaagtacacaagtgataccctgcaaggcgagcagaaggaggctaaggagatgctcaatgtgcaacgctaggagagatgttggccattgctgaatccttcacggtattgagacgagtgaagtgcgaggagcaatatgtgcagtgctggacaagcgttgacgcaaccctagaagatctgatgctgaaaacgctgaagggcttcgctgcaatcatgttgatcgatgtgatgtttattaccctagaatgattgatgccaaaagggtaaacctgagatagtggtggtgaaccgtcactgtgcatggatgtgctgtattcactggcactgtacaagtacatccattggctacgcatatatctaaaaaactactagaccataatgaaagcaattctg

SEQ ID NO: 29116 - protein, 311 aa, Triticum aestivum
MARNEEKAQSMLNRFITMKQEEKRKPRERRPYLASECRDLADADRWRGEILREIGVKVAEIQNEGLGEHRLRDLNDEINKLLRERSHWERRILELGGRDYSRSSNAALMTDLDGNIVAIPNPSGRGPGYRYFGAAKKLPGVRELFDKPPEVRKRRTRYEIHKRINAGYYGYYDDEDGVLEPLEAAAEKRMRDEVVTEWHRVERVRREAMKNVVSGEVAAAGGRGGEAAREVLFEEVEEEVEEERRLEEERMEREKGEEAGREFVAHVPLPDEKEIERMVLEKKKKELLSKYTSDTLQGEQKEAKEMLNVQR

SEQ ID NO: 29117 - protein, 301 aa, Triticum aestivum
MLNRFITMKQEEKRKPRERRPYLASECRDLADADRWRGEILREIGVKVAEIQNEGLGEHRLRDLNDEINKLLRERSHWERRILELGGRDYSRSSNAALMTDLDGNIVAIPNPSGRGPGYRYFGAAKKLPGVRELFDKPPEVRKRRTRYEIHKRINAGYYGYYDDEDGVLEPLEAAAEKRMRDEVVTEWHRVERVRREAMKNVVSGEVAAAGGRGGEAAREVLFEEVEEEVEEERRLEEERMEREKGEEAGREFVAHVPLPDEKEIERMVLEKKKKELLSKYTSDTLQGEQKEAKEMLNVQR

SEQ ID NO: 29118 - protein, 294 aa, Triticum aestivum
MKQEEKRKPRERRPYLASECRDLADADRWRGEILREIGVKVAEIQNEGLGEHRLRDLNDEINKLLRERSHWERRILELGGRDYSRSSNAALMTDLDGNIVAIPNPSGRGPGYRYFGAAKKLPGVRELFDKPPEVRKRRTRYEIHKRINAGYYGYYDDEDGVLEPLEAAAEKRMRDEVVTEWHRVERVRREAMKNVVSGEVAAAGGRGGEAAREVLFEEVEEEVEEERRLEEERMEREKGEEAGREFVAHVPLPDEKEIERMVLEKKKKELLSKYTSDTLQGEQKEAKEMLNVQR

SEQ ID NO: 29119 - DNA, 1139 bp, Triticum aestivum
atcggatctccgaaccggaactctgactctctctgtctcctccccgtgccggacggcgaggtccccctcttcctccggccgcctctcccccccgttcccgtcgcttctcggttccacgggcgccgcggccgccggtctccgacgccatggggttcctcgaggacttccaggccagtgttgaaacattgccagctatgctgcacaagaactattcattaatgcgagagctcgataaaagcttgcaaggtgtgcagctggaaaatgagcagcgatgtcaacaagaaatagaggacattaagcatggacttgaatctggaagtattacaacatatgagccagcaaaacttaaattttctgatgaggcaatcgaggagcagaaacattgtgttaggattgctgatgagaaggtggctttagccacacaaacatatgacctggtcgacgctcatatccaacagcttgatcaatacatgaggaagcttgaagaacttcgactagaaaaggaggcagtggcagctgcagctgcagctgcggcagatacagctgttgctgctacttcagctgctcctgctggtgctggtagcttaaggtccgcagctgctgatcctgctccaaaaactggacgagctggcgaaagaagcagaggagggcggaagaaggctaaggtgcccacggagatgcctacagagatgcccatggagcagccagctatagatttagaattgcctgtcgatcctaatgaaccgacgtattgtttctgcaaccaagtcagctacggtgagatggtcgcgtgcgacaaccctgattgcaagatagagtggttccactttggatgcgtgggcttgaaagagcagccgaggggaaagtggtattgcctgagttgcagcgcgttccaaaagaagcgcaagggaaggtgagatacatatggtccttgtgctaggaggtatgcagtcagtcatccgtgatcgtctgattccgttgtgctgagcagcgccttgtttgtctgggaagcaactgttgaatgtagcttgagtgatcttgcacatgttgtgacagtcttgaggagtgttgtacatgtgtggccccgtttagaacatgggaatttcttctgttcttgtgggtgatgaactggtgactgc

SEQ ID NO: 29120 - protein, 256 aa, Triticum aestivum
MGFLEDFQASVETLPAMLHKNYSLMRELDKSLQGVQLENEQRCQQEIEDIKHGLESGSITTYEPAKLKFSDEAIEEQKHCVRIADEKVALATQTYDLVDAHIQQLDQYMRKLEELRLEKEAVAAAAAAAADTAVAATSAAPAGAGSLRSAAADPAPKTGRAGERSRGGRKKAKVPTEMPTEMPMEQPAIDLELPVDPNEPTYCFCNQVSYGEMVACDNPDCKIEWFHFGCVGLKEQPRGKWYCLSCSAFQKKRKGR

SEQ ID NO: 29121 - protein, 240 aa, Triticum aestivum
MLHKNYSLMRELDKSLQGVQLENEQRCQQEIEDIKHGLESGSITTYEPAKLKFSDEAIEEQKHCVRIADEKVALATQTYDLVDAHIQQLDQYMRKLEELRLEKEAVAAAAAAAADTAVAATSAAPAGAGSLRSAAADPAPKTGRAGERSRGGRKKAKVPTEMPTEMPMEQPAIDLELPVDPNEPTYCFCNQVSYGEMVACDNPDCKIEWFHFGCVGLKEQPRGKWYCLSCSAFQKKRKGR

SEQ ID NO: 29122 - protein, 232 aa, Triticum aestivum
MRELDKSLQGVQLENEQRCQQEIEDIKHGLESGSITTYEPAKLKFSDEAIEEQKHCVRIADEKVALATQTYDLVDAHIQQLDQYMRKLEELRLEKEAVAAAAAAAADTAVAATSAAPAGAGSLRSAAADPAPKTGRAGERSRGGRKKAKVPTEMPTEMPMEQPAIDLELPVDPNEPTYCFCNQVSYGEMVACDNPDCKIEWFHFGCVGLKEQPRGKWYCLSCSAFQKKRKGR

SEQ ID NO: 29123 - DNA, 701 bp, Triticum aestivum
aaaaaggagactgcgccgaggagttaccaggattcatggagcccgaggcctccaaggaggcggagaagcagccgatggatgcggaggccggagatccagcagatccccgcgacctagtgtccagcgacgatgagatagactactccgtggagcctgagttctacgaccccgccgtagacgatgtcgatgagcgctgggcgcacaagcagaggaaaggacggacctctgacgccgtgctcagctgccccgcgtgtttcactaccttgtgcctggattcccagaggcacgaaaagtatgttaaccagtaccgtgcaatgtttgtgtgcaattgcaaggtcaagattaatcagattctacgggaggggaaaggaaaaaggaagaatcggaaagtaacggctgttgattctactacaccagaagttgaaaacaaggggccagtttatcaccctgtttgttgtgagatctgctcaactgaggttggagtgtttgatgaagatgaagtttaccacttctttaatgtcattcctagtaactcatgaaccttctgatgttgtgagaatagttctcgtagtgccgtttttgtcgatccagagctgatgtggtagtatgcgagttattgttttcttttcatgatatcaagttaaacctgccatccttcatgaaaattatattctggcatcatggagaatttggatcatccg

SEQ ID NO: 29124 - protein, 178 aa, Triticum aestivum
KGDCAEELPGFMEPEASKEAEKQPMDAEAGDPADPRDLVSSDDEIDYSVEPEFYDPAVDDVDERWAHKQRKGRTSDAVLSCPACFTTLCLDSQRHEKYVNQYRAMFVCNCKVKINQILREGKGKRKNRKVTAVDSTTPEVENKGPVYHPVCCEICSTEVGVFDEDEVYHFFNVIPSNS

SEQ ID NO: 29125 - protein, 167 aa, Triticum aestivum
MEPEASKEAEKQPMDAEAGDPADPRDLVSSDDEIDYSVEPEFYDPAVDDVDERWAHKQRKGRTSDAVLSCPACFTTLCLDSQRHEKYVNQYRAMFVCNCKVKINQILREGKGKRKNRKVTAVDSTTPEVENKGPVYHPVCCEICSTEVGVFDEDEVYHFFNVIPSNS

SEQ ID NO: 29126 - protein, 154 aa, Triticum aestivum
MDAEAGDPADPRDLVSSDDEIDYSVEPEFYDPAVDDVDERWAHKQRKGRTSDAVLSCPACFTTLCLDSQRHEKYVNQYRAMFVCNCKVKINQILREGKGKRKNRKVTAVDSTTPEVENKGPVYHPVCCEICSTEVGVFDEDEVYHFFNVIPSNS

SEQ ID NO: 29127 - DNA, 1315 bp, Triticum aestivum
ataaaccgtagcgtagcgcgcatagcactcgcacggagacatagcacattagtatcttagcaccttgctaaaccctgaagcttagagaactcgaagcgccataaatttaatggctagcccgacgaagctcgacatggccggccatggcgacgaggtgacgaggaacaagaaggtggtgctgaggaggtacgtgacaggctacccgacggcggaggacatggaggtggtcgtcacctccgacgtccggctgcgggtgccggaggggtcggcggccgccgtggtggtcaagaacctgtacctgtcctgcgacccgtggatgcgcggccgcatgaccaagcatgacgacggcgacgccgtgccggccgaggacttcgtgcttggagaggccttggtcaatttcaccgtcggcgaggtggtcgactcgacgcacccggagttcgacgccggtgacctcgtatggggcatgagtgcatgggaggagtacaccctcatcacccaaacggagggcctgttcaagatcaaccaccccgagctgccactctcacactacacaggtgttcttggcttggcagggctcactgcatatgctggacttttcgaggttggcaagccaaagcaaggtgaaactgtttttgtgtcggcagcatctggcgccgtcggtcaggttgtcggacagctcgccaagatcgcaggatgctatgtggttggaagtgccggctccgatgagaaggtgagtctcctgaagagcaagatgggcttcgacgacgcgttcaactacaagtcggagggggacaacctcggcgcggcgctcgggcggcgcctcccggacggcatcgacgtctacttcgacaacgtgggtggtgcgacgctggacgcggcattgctgcggatgcggccgggcggcagggtggtggcgtgcgggatgatctcacagtacaatctgtcggagcaccagggggtgcgcaacctgtggtgcatcatcccaaagcgcgtccgggtggagggcttctcctgcatggactaccaccacctgtaccccaggttcgaggaggagatggccgcctatatcaacgcagggaaggtgaccgtcgcggaggacgtcgtccgagggattgagaaggcgcctgaggctctggtgggcctgttttctgggagaaatgtgggcaagctgttggttgctcttgcatgagtcgtgagtgcaagtccatggaatgatgacttctttctgtgttttattgaataagattgtacctgtgggcttataattatgatcatgtaattgtaagctacaaaaattatacacttctgttttggt

SEQ ID NO: 29128 - protein, 359 aa, Triticum aestivum
MASPTKLDMAGHGDEVTRNKKVVLRRYVTGYPTAEDMEVVVTSDVRLRVPEGSAAAVVVKNLYLSCDPWMRGRMTKHDDGDAVPAEDFVLGEALVNFTVGEVVDSTHPEFDAGDLVWGMSAWEEYTLITQTEGLFKINHPELPLSHYTGVLGLAGLTAYAGLFEVGKPKQGETVFVSAASGAVGQVVGQLAKIAGCYVVGSAGSDEKVSLLKSKMGFDDAFNYKSEGDNLGAALGRRLPDGIDVYFDNVGGATLDAALLRMRPGGRVVACGMISQYNLSEHQGVRNLWCIIPKRVRVEGFSCMDYHHLYPRFEEEMAAYINAGKVTVAEDVVRGIEKAPEALVGLFSGRNVGKLLVALA

SEQ ID NO: 29129 - protein, 351 aa, Triticum aestivum
MAGHGDEVTRNKKVVLRRYVTGYPTAEDMEVVVTSDVRLRVPEGSAAAVVVKNLYLSCDPWMRGRMTKHDDGDAVPAEDFVLGEALVNFTVGEVVDSTHPEFDAGDLVWGMSAWEEYTLITQTEGLFKINHPELPLSHYTGVLGLAGLTAYAGLFEVGKPKQGETVFVSAASGAVGQVVGQLAKIAGCYVVGSAGSDEKVSLLKSKMGFDDAFNYKSEGDNLGAALGRRLPDGIDVYFDNVGGATLDAALLRMRPGGRVVACGMISQYNLSEHQGVRNLWCIIPKRVRVEGFSCMDYHHLYPRFEEEMAAYINAGKVTVAEDVVRGIEKAPEALVGLFSGRNVGKLLVALA

SEQ ID NO: 29130 - protein, 323 aa, Triticum aestivum
MEVVVTSDVRLRVPEGSAAAVVVKNLYLSCDPWMRGRMTKHDDGDAVPAEDFVLGEALVNFTVGEVVDSTHPEFDAGDLVWGMSAWEEYTLITQTEGLFKINHPELPLSHYTGVLGLAGLTAYAGLFEVGKPKQGETVFVSAASGAVGQVVGQLAKIAGCYVVGSAGSDEKVSLLKSKMGFDDAFNYKSEGDNLGAALGRRLPDGIDVYFDNVGGATLDAALLRMRPGGRVVACGMISQYNLSEHQGVRNLWCIIPKRVRVEGFSCMDYHHLYPRFEEEMAAYINAGKVTVAEDVVRGIEKAPEALVGLFSGRNVGKLLVALA

SEQ ID NO: 29131 - DNA, 1742 bp, Triticum aestivum
atccatatagaaatacctcgtctccctccccgcccctgattcgcaaggccaaagcaagaggggcaggagcgccaccgcgaatcccatcccatccccgcaccgccgccgatcccgcccgcccgcccctccgcagatctccccgacattgcccgctccccggccggattcgcccagatccaccgacgcggcgcgcggtgctcccggcggcgtggtccggtcggtctgatcgggaaggcttgatcttttttgttggtgctgttgtctggagggtggtggcagcggagatgggcgtcggaggggagaagttccagctggggacggtgggggcgctgggcctctccgtggtgtcctccgtgtccattgtcatctgcaacaaggccctcatgagctccctcggcttcaccttcgctaccaccttgacgagctggcatctcctggtcactttctgctcccttcatgtggcactatggatgaagttttttgagcacaaggcttttgattcgagaactgtcatgggattcggagtactcaatggcatctccattgggctcctcaatctgagtcttggtttcaattctgttggcttttaccagatgacaaagctggccatcatcccctgcactgttattttggagactcttttcttcaggaagaagttcagccggactatccagatctccctttccgtgcttcttttgggtgtcggtgttgcaaccatgactgatttgcaactcaatgctgtggggtccatactgtccttgctggccattatcacgacttgcatcgctcaaatcatgacaaacactattcagaagaaattcaaggtttcttcaacccagctgctatatcagtcttgtccttaccagtcattgacactgtttcttatcggcccgttccttgatggattcctgactaaccaaaacgtctttgctttcaattacacatctaacgttgtgtttttcatcgtcttgtcgtgtttgatatcggtctcagtaaacttcagcacctttcttgtgatcggaaagacatctcctgttacttaccaagtcctgggccatcttaaaacatgcctagttttgaccttcggctacgttttgcttcatgatccgtttagctggagaaacatacttggcatcctaattgcggttgttgggatggtactatattcatacttctgctcaacagagactcaaccaaaaaataccgatgtctccgcacagcagtcaaaagaaggtgactcggcacctttgatctctgattctttgagcaaagttgaaaatggaggtgatgacgatgagcctttgaaggtaccgatgtggagctcaaagtactcaagggcgtgagaattttgtctcttagacggcggatggcattatacaggattcaatttagtaggcagatagtagggttggaagccaactttccaacccaagtaatgaagcaatggacatttcagttacaattaaaatgatctgattctttggagggttttaccttccaaaattgcagatcgaccatgaaactagatagcagatattgtaaaattgtatctggatatggtccaaatcttctcactgtaacttcacgttgggacactggtctgcagatagactccattctttttgtaccaaaggtcccgaggtcaagaattgtgcaagactttaaagtatttataggttcaagtttgtaactgtactttcagatttaccttggaccatagtaatgcaagtgatgtacatttc

SEQ ID NO: 29132 - protein, 446 aa, Triticum aestivum
PYRNTSSPSPPLIRKAKARGAGAPPRIPSHPRTAADPARPPLRRSPRHCPLPGRIRPDPPTRRAVLPAAWSGRSDREGLIFFVGAVVWRVVAAEMGVGGEKFQLGTVGALGLSVVSSVSIVICNKALMSSLGFTFATTLTSWHLLVTFCSLHVALWMKFFEHKAFDSRTVMGFGVLNGISIGLLNLSLGFNSVGFYQMTKLAIIPCTVILETLFFRKKFSRTIQISLSVLLLGVGVATMTDLQLNAVGSILSLLAIITTCIAQIMTNTIQKKFKVSSTQLLYQSCPYQSLTLFLIGPFLDGFLTNQNVFAFNYTSNVVFFIVLSCLISVSVNFSTFLVIGKTSPVTYQVLGHLKTCLVLTFGYVLLHDPFSWRNILGILIAVVGMVLYSYFCSTETQPKNTDVSAQQSKEGDSAPLISDSLSKVENGGDDDEPLKVPMWSSKYSRA

SEQ ID NO: 29133 - protein, 352 aa, Triticum aestivum
MGVGGEKFQLGTVGALGLSVVSSVSIVICNKALMSSLGFTFATTLTSWHLLVTFCSLHVALWMKFFEHKAFDSRTVMGFGVLNGISIGLLNLSLGFNSVGFYQMTKLAIIPCTVILETLFFRKKFSRTIQISLSVLLLGVGVATMTDLQLNAVGSILSLLAIITTCIAQIMTNTIQKKFKVSSTQLLYQSCPYQSLTLFLIGPFLDGFLTNQNVFAFNYTSNVVFFIVLSCLISVSVNFSTFLVIGKTSPVTYQVLGHLKTCLVLTFGYVLLHDPFSWRNILGILIAVVGMVLYSYFCSTETQPKNTDVSAQQSKEGDSAPLISDSLSKVENGGDDDEPLKVPMWSSKYSRA

SEQ ID NO: 29134 - protein, 319 aa, Triticum aestivum
MSSLGFTFATTLTSWHLLVTFCSLHVALWMKFFEHKAFDSRTVMGFGVLNGISIGLLNLSLGFNSVGFYQMTKLAIIPCTVILETLFFRKKFSRTIQISLSVLLLGVGVATMTDLQLNAVGSILSLLAIITTCIAQIMTNTIQKKFKVSSTQLLYQSCPYQSLTLFLIGPFLDGFLTNQNVFAFNYTSNVVFFIVLSCLISVSVNFSTFLVIGKTSPVTYQVLGHLKTCLVLTFGYVLLHDPFSWRNILGILIAVVGMVLYSYFCSTETQPKNTDVSAQQSKEGDSAPLISDSLSKVENGGDDDEPLKVPMWSSKYSRA

SEQ ID NO: 29135 - DNA, 1394 bp, Triticum aestivum
aacactcgccgccgtccccgacagcaagaatcgcctagcgaaaatccttgcggctcggattccggcggccgccgccgcgatgaagctcgtccaccgcaacctcacccgcaacgggcccggctccgccaagctgctgccggaggaggaggacgacctgtggcacgcgtacaatctcatcgccgtaggggacagcctccaggccgtcactgtccggaaagttctgagagattctgcttcgggaggacgtgatgcggagcgcgtgaagctaaagttggagattgtagttgagtctgtagattatgacaaggaagggaacgttttgcgcgtccgtggcaaaaatattactgagaatgatcacgtgaagattggccagtttcatactttagaacttgagctgaagagaccttttgttctacgaaaggaatattgggattggttagcacttgataccatccaacaagcatgtgatcctactgcaagtgctgatctagcagttattcttatgcaagaaggacttgcccacttattccttattgggagaagcataacagcaacaaggtcacgtattgaaacctcgattcctaggaaacatggacctgccattgctggttacgagtcggctctcaagaagttctttgagcatgttttgcaagccttgctgaagcacattgattttgaagtggtccagtgtgttgtaattgcaagcccaggttttactaaggatcagtttcgtgattacatgcatcttgaagctgcacggcgagacttgagagtaataattgagaacaaatcacgcattattcttgcacatgcaccttcaggctacaagcatagtttgaaggaagttttggacaccccaggtgtgatgtcactgataaaagatacaaaagcggcacaggaggactcagcccgagcgtgttatggacctaagcacgttgaggtcgcacatgaacgtcttgcaatacaaactcttctgatgacagatactttgtttcggaacacggacatcgctagcaggagaaagtatgtgaacttggttgagtcagtcaagaaatatggtggtacagtgcacatattttcttcgatgcatgtctccggcgaccaattggctcagttgacaggaatagcagcaatacttcgtttccccctgccagatttggaggacatcgagatgtgattagtccagacctccggagctgcctaacatttgttgtaccaacctgttaacctatagctgatcaagtgtaataataatataacagttggttctatttaggtagcaacagaaagaaattctgatgacattttaatatatccttgttgtaaatggttagctatgccacatctattggttattcttgacttaataataagggccctctccattttttttc

SEQ ID NO: 29136 - protein, 391 aa, Triticum aestivum
TLAAVPDSKNRLAKILAARIPAAAAAMKLVHRNLTRNGPGSAKLLPEEEDDLWHAYNLIAVGDSLQAVTVRKVLRDSASGGRDAERVKLKLEIVVESVDYDKEGNVLRVRGKNITENDHVKIGQFHTLELELKRPFVLRKEYWDWLALDTIQQACDPTASADLAVILMQEGLAHLFLIGRSITATRSRIETSIPRKHGPAIAGYESALKKFFEHVLQALLKHIDFEVVQCVVIASPGFTKDQFRDYMHLEAARRDLRVIIENKSRIILAHAPSGYKHSLKEVLDTPGVMSLIKDTKAAQEDSARACYGPKHVEVAHERLAIQTLLMTDTLFRNTDIASRRKYVNLVESVKKYGGTVHIFSSMHVSGDQLAQLTGIAAILRFPLPDLEDIEM

SEQ ID NO: 29137 - protein, 365 aa, Triticum aestivum
MKLVHRNLTRNGPGSAKLLPEEEDDLWHAYNLIAVGDSLQAVTVRKVLRDSASGGRDAERVKLKLEIVVESVDYDKEGNVLRVRGKNITENDHVKIGQFHTLELELKRPFVLRKEYWDWLALDTIQQACDPTASADLAVILMQEGLAHLFLIGRSITATRSRIETSIPRKHGPAIAGYESALKKFFEHVLQALLKHIDFEVVQCVVIASPGFTKDQFRDYMHLEAARRDLRVIIENKSRIILAHAPSGYKHSLKEVLDTPGVMSLIKDTKAAQEDSARACYGPKHVEVAHERLAIQTLLMTDTLFRNTDIASRRKYVNLVESVKKYGGTVHIFSSMHVSGDQLAQLTGIAAILRFPLPDLEDIEM

SEQ ID NO: 29138 - protein, 224 aa, Triticum aestivum
MQEGLAHLFLIGRSITATRSRIETSIPRKHGPAIAGYESALKKFFEHVLQALLKHIDFEVVQCVVIASPGFTKDQFRDYMHLEAARRDLRVIIENKSRIILAHAPSGYKHSLKEVLDTPGVMSLIKDTKAAQEDSARACYGPKHVEVAHERLAIQTLLMTDTLFRNTDIASRRKYVNLVESVKKYGGTVHIFSSMHVSGDQLAQLTGIAAILRFPLPDLEDIEM

SEQ ID NO: 29139 - DNA, 1169 bp, Triticum aestivum
ccagctctagcagtcccggctttccctgctcgcctcgcagtcgccgccgccgccgccagccatgggtcgcaccaaggacgagctcctcgcgcgcctcgaggagcttaagattgatttcaagcgctacgaccacccggttgtgctgacggtcgaggaacaggccaaacatgtgggaagttttggaggtgctttgaccaagaatctgcttctgaaggacaagaagcatcgcttgtacattgtttctgcacttgctgacaccaaagttgacatgaaaattctgtcccagcgtcttggcttgggaaaaggtggtgtgcgaatggctcctgaggagaatttgcgtcaagtgcttcaggtaccgttaggatgtgttactccgtttgcgctattcaatgagtccgcgagtgccgtctcattattactggaccaagggttcaagtctaaacagagctgctacttccatccactgacaaatgatgtgactattgccctcagttcaagcaacctggacaagtttctcctctccattgggaagcaaccagcttatgtagacttggaggcctcaccagtggtaggtaaagataatccccctgatctagcagatcttgtgccttctggtgcactctgttcctcagaagaatcagttgagaatccgactcctaaagatgctcctcaagtcaacgtacccaaacagaaaacgtgtctaccagaagtgaaggctaagcccaaagttcagaacaagggtgcagaaagttcagagagtaaagttcctactaataatggcgcaaatgttgagatatttgcaagtgatgtgcttgaggtcatcttcccattgttcctgtctgagacatcaaagaaattgaatattaaacaggaagagcttactcaaattttaaaattagatgactttaaacgacgagctgctccagatctggagagtgcaacgaatatgttcaaaaacatggcatacagtgcaggatttcacgctggcttcgataccatgctcaagtcgggtttaggtgggatgccctctcggaaatagtgggttaattcgatatagaagactgtgagttgattcagtcaatttttgtatgccccttggtgtaaaatcaaatcataccatatagtacttattatgttgaatgattcgattgaatgtatcaccttaagcc

SEQ ID NO: 29140 - protein, 325 aa, Triticum aestivum
MGRTKDELLARLEELKIDFKRYDHPVVLTVEEQAKHVGSFGGALTKNLLLKDKKHRLYIVSALADTKVDMKILSQRLGLGKGGVRMAPEENLRQVLQVPLGCVTPFALFNESASAVSLLLDQGFKSKQSCYFHPLTNDVTIALSSSNLDKFLLSIGKQPAYVDLEASPVVGKDNPPDLADLVPSGALCSSEESVENPTPKDAPQVNVPKQKTCLPEVKAKPKVQNKGAESSESKVPTNNGANVEIFASDVLEVIFPLFLSETSKKLNIKQEELTQILKLDDFKRRAAPDLESATNMFKNMAYSAGFHAGFDTMLKSGLGGMPSRK

SEQ ID NO: 29141 - protein, 256 aa, Triticum aestivum
MKILSQRLGLGKGGVRMAPEENLRQVLQVPLGCVTPFALFNESASAVSLLLDQGFKSKQSCYFHPLTNDVTIALSSSNLDKFLLSIGKQPAYVDLEASPVVGKDNPPDLADLVPSGALCSSEESVENPTPKDAPQVNVPKQKTCLPEVKAKPKVQNKGAESSESKVPTNNGANVEIFASDVLEVIFPLFLSETSKKLNIKQEELTQILKLDDFKRRAAPDLESATNMFKNMAYSAGFHAGFDTMLKSGLGGMPSRK

SEQ ID NO: 29142 - protein, 240 aa, Triticum aestivum
MAPEENLRQVLQVPLGCVTPFALFNESASAVSLLLDQGFKSKQSCYFHPLTNDVTIALSSSNLDKFLLSIGKQPAYVDLEASPVVGKDNPPDLADLVPSGALCSSEESVENPTPKDAPQVNVPKQKTCLPEVKAKPKVQNKGAESSESKVPTNNGANVEIFASDVLEVIFPLFLSETSKKLNIKQEELTQILKLDDFKRRAAPDLESATNMFKNMAYSAGFHAGFDTMLKSGLGGMPSRK

SEQ ID NO: 29143 - DNA, 1126 bp, Triticum aestivum
gtcggcttcttgatcggggttggttgggtgttgtatgagagggagtgagcgggcggcggtgtcagcgtcaacgtcggggatgagctgcaacggctgccgcgtgctgcgcaagggctgcaacgacgcctgcgtgctgcgcccctgcctgctctggatcgaggccgccgacgcgcagggccacgccaccctcttcgccgccaagttcttcggccgcgccggcctcatgtccttcctcaccgctgtccccgagcagcagcgcccaggtacgtacggacggaagggagatcgatggtcttcttcttggcacgacggttcatcggtagcactatatatgttgatcttctttggctgatgtttgcatggtgtttgctgtgggttgcagccgtgttccagtcgctgctgtacgaggcggcggggcggacgatcaacccggtgagcggcgcggtggggctgctctgggcggggagctggcacctctgcgaggcggcggtccagaccgtgctccggggcggcgccatccgcccgctgccggagctcgcgggcggcgtcccggaaggcggcgtcggtggcagcgatctgttcgcctcctcttccaggcgggccgtggtggggtgctccacgtattcggcggcgaagcgggtaacgccgaggaagacctgggcgccggaggccgcgtcccagcaccaggagcccccgtgcgacctcgggcttttcctcacccccggatcggccgccgcggcggagggggagcgacgggtgaggcgtgccggcacgccgtcgatgagctccgacggctccgtgaccacgagcgccggcgccggcgagaaggagccggagctgctgaatctttttgtttaatgaagctagttattaatctgcgcgttcattcaccgtagtagtaccgcgcgatcgaccgatcgatcgatgcgctgctcgctcgctggcgctggaaccagctgaactttttggtagcctccctctcgtcccaccggcgacgcgccccttgattcttttttgggcgtgcatgaaccgccggctcggtgtgacacggagatgactagatgagaccgccccggccggctttgttccttgtctactccgataatagtaccgctgctttctaagc

SEQ ID NO: 29144 - protein, 189 aa, Triticum aestivum
MVFFLARRFIGSTIYVDLLWLMFAWCLLWVAAVFQSLLYEAAGRTINPVSGAVGLLWAGSWHLCEAAVQTVLRGGAIRPLPELAGGVPEGGVGGSDLFASSSRRAVVGCSTYSAAKRVTPRKTWAPEAASQHQEPPCDLGLFLTPGSAAAAEGERRVRRAGTPSMSSDGSVTTSAGAGEKEPELLNLFV

SEQ ID NO: 29145 - protein, 178 aa, Triticum aestivum
MVFAVGCSRVPVAAVRGGGADDQPGERRGGAALGGELAPLRGGGPDRAPGRRHPPAAGARGRRPGRRRRWQRSVRLLFQAGRGGVLHVFGGEAGNAEEDLGAGGRVPAPGAPVRPRAFPHPRIGRRGGGGATGEACRHAVDELRRLRDHERRRRREGAGAAESFCLMKLVINLRVHSP

SEQ ID NO: 29146 - protein, 168 aa, Triticum aestivum
MFAWCLLWVAAVFQSLLYEAAGRTINPVSGAVGLLWAGSWHLCEAAVQTVLRGGAIRPLPELAGGVPEGGVGGSDLFASSSRRAVVGCSTYSAAKRVTPRKTWAPEAASQHQEPPCDLGLFLTPGSAAAAEGERRVRRAGTPSMSSDGSVTTSAGAGEKEPELLNLFV

SEQ ID NO: 29147 - DNA, 1472 bp, Triticum aestivum
ctaatcgaaaacattcggcagggttgtgaacaccatgtgcaacgtcggagccaaccgcaaccaggccttcgtggagttcgcagatcaaaaccaggcaatttcaatggtttcatattatgcttcatcttcagaacctgcccaagttcgtggtaaaactgtatatatccagtattcaaataggcaagaaattacaaacaataaaggcactggtgattcttctggcaatgtcctgcttgtcacctttgaaggtgtccagcctaatgatgttagcatagatgttatccatttggtattttctgcttttgggtttgttcacaagatagcaacgtttgagaaagccgctggtttccaggcacttatccaatatactgatgctccaactgctctagaggcaaaaaattcgttagacggaagaagcataccgaggtatctactggctgaacacgtcagcatttgtcacctgcgcataacattttctgcgcacaaagatttgaatattaaatttcaatcacatcgcagcagggattacacaaatccttatcttcctgttaatccaactgcaatcgagggaatcacacagcccatattaggctctgatgggaagattaaggagccagagagcaatgtacttttagcatcaatcgagaacatgcagtatgctgtgggagtggatgttctacacactgtgttctcttcttttggtgctgtccgaaagattgcaatgttcgagaagaatggtggaatgcaggctctaattcagtatccagatataacaacagcaggagttgctaaacaagctctggaggggcattgcatatatgatggtggttactgtaagcttcatctgtcatactctcgtcatactgatctgaatgtgaaggcacatgacgagagaagcagagactacaccgtctcggatcctagtgctcaggtacaagctgcaggtcaagcccctggtctaagcactcctggagcagcatggcaaagcaccacgcctgctgctttttatggaagctcagcaggaccgacctctatcggacaagcgccagcctggaatcctaacatgcagcgaggggcatttgcacctgcatcaacctcgtaccctacccaattattgatggcaaacccaggcccgcactttccagcagtcggatcaagctctggtgctcctccgatgttgtaccaagcttcgcagcagatggcacattatggcacagcccctgctgctctgcctcatgcagccttgtctggcgaaccgatgtacttcccaaaatgagctattcatccaatagagcagttgcctatgctttgtgcagcacctctggtcttcaatttttggaactgcactgtaatgccgatctgtttttcttggtacttgtgagacccctgtggcaaatgtacctgtctggctgttggtgcctgtaaactgcacaacaaaatggaaaattactcgagccatgtcagttcaatcc

SEQ ID NO: 29148 - protein, 413 aa, Triticum aestivum
MCNVGANRNQAFVEFADQNQAISMVSYYASSSEPAQVRGKTVYIQYSNRQEITNNKGTGDSSGNVLLVTFEGVQPNDVSIDVIHLVFSAFGFVHKIATFEKAAGFQALIQYTDAPTALEAKNSLDGRSIPRYLLAEHVSICHLRITFSAHKDLNIKFQSHRSRDYTNPYLPVNPTAIEGITQPILGSDGKIKEPESNVLLASIENMQYAVGVDVLHTVFSSFGAVRKIAMFEKNGGMQALIQYPDITTAGVAKQALEGHCIYDGGYCKLHLSYSRHTDLNVKAHDERSRDYTVSDPSAQVQAAGQAPGLSTPGAAWQSTTPAAFYGSSAGPTSIGQAPAWNPNMQRGAFAPASTSYPTQLLMANPGPHFPAVGSSSGAPPMLYQASQQMAHYGTAPAALPHAALSGEPMYFPK

SEQ ID NO: 29149 - protein, 390 aa, Triticum aestivum
MVSYYASSSEPAQVRGKTVYIQYSNRQEITNNKGTGDSSGNVLLVTFEGVQPNDVSIDVIHLVFSAFGFVHKIATFEKAAGFQALIQYTDAPTALEAKNSLDGRSIPRYLLAEHVSICHLRITFSAHKDLNIKFQSHRSRDYTNPYLPVNPTAIEGITQPILGSDGKIKEPESNVLLASIENMQYAVGVDVLHTVFSSFGAVRKIAMFEKNGGMQALIQYPDITTAGVAKQALEGHCIYDGGYCKLHLSYSRHTDLNVKAHDERSRDYTVSDPSAQVQAAGQAPGLSTPGAAWQSTTPAAFYGSSAGPTSIGQAPAWNPNMQRGAFAPASTSYPTQLLMANPGPHFPAVGSSSGAPPMLYQASQQMAHYGTAPAALPHAALSGEPMYFPK

SEQ ID NO: 29150 - protein, 208 aa, Triticum aestivum
MQYAVGVDVLHTVFSSFGAVRKIAMFEKNGGMQALIQYPDITTAGVAKQALEGHCIYDGGYCKLHLSYSRHTDLNVKAHDERSRDYTVSDPSAQVQAAGQAPGLSTPGAAWQSTTPAAFYGSSAGPTSIGQAPAWNPNMQRGAFAPASTSYPTQLLMANPGPHFPAVGSSSGAPPMLYQASQQMAHYGTAPAALPHAALSGEPMYFPK

SEQ ID NO: 29151 - DNA, 1526 bp, Triticum aestivum
acatcctaatcgaaaaaccacacacgagcacccgccggagccgatcgaccgagagccgccgcgcgcgcagctcagctcagccccgccgcctcccctcctcctccaccgcgccgcattcctctcccgcgcgcaggcagggggagatccgcctccctggcccgatggcgccgtcgcggccgctgatgcgcggggcgggcccgccgcgggtcttcggctccgggcgcgccggccgggcatcgccgtacgcgctcgcgctcgccgcgctgctcctcgcctccgccttcctcctcgccctcatcgccttcggcgtcttctcgctccccgtctcctcccccgcgctccccaccaccggcgccgagaccgagtcgtccggcgacggcggggccgcggagtccgatgcctccggcggctcctcccgcgccgcgcgcagccgcgcccgccgcgacctcagcgaggggctgggcgagcgcggcgcgcagtggacggaggtcatctcgtgggagcccagggcgttcgtctaccacaacttcctgtctaaggaagagtgtgagtacttaattggattggcgaagcctcgcatggtgaaatcaacagtggtcgacagtgagactggtaaaagcaaggacagcagggttcgtacaagttcaggcatgtttcttcaaagagggcgggacaaggttatccgggccattgaaaggaggatagcagattacaccttcatacctgcagaacatggagagggactccaagtactgcactatgaagtcgggcagaagtacgaaccccactttgattattttcttgacgagttcaacaccaagaatggtggccagaggatggcaactattctcatgtacctgtcagatgttgaagaagggggtgagactattttccccgatgcaaatgtgaacagcagttccttaccgtggtacaacgaactttcagagtgtgccagaaaaggtcttgctgtcaaaccgaagatgggagatgcgctgcttttctggagcatgaaaccagatgccactctagatccactaagtttgcacgggggctgtcctgtcatcaaagggaacaaatggtcatcaaccaagtggctgcatgttcacgagtacaaagcataggccttgtgaactcattccaaagatgacacgatctgagcatgtgacctgggctctttacatgatggctttacagttacagatccacccccattgtgttcattgcttgtggaggacatatatatacaaggagggcttcatgctggaatactgactcggcatttttcttcttcttctccctcgccgcagtgcccccagcaacttattatagaggaatgaatatgatatgatgtgatgtatgtagcgtcgggggctgtaggatccggagttccattttcggttcgtgttcttgtcctgtttgtagcactagtactataatgcagtactgatgtagcagcctcgaggtgagtcgttactgaacaataactattgaggattttgcttgtctcggcattttacacagttatt

SEQ ID NO: 29152 - protein, 372 aa, Triticum aestivum
ILIEKPHTSTRRSRSTESRRARSSAQPRRLPSSSTAPHSSPARRQGEIRLPGPMAPSRPLMRGAGPPRVFGSGRAGRASPYALALAALLLASAFLLALIAFGVFSLPVSSPALPTTGAETESSGDGGAAESDASGGSSRAARSRARRDLSEGLGERGAQWTEVISWEPRAFVYHNFLSKEECEYLIGLAKPRMVKSTVVDSETGKSKDSRVRTSSGMFLQRGRDKVIRAIERRIADYTFIPAEHGEGLQVLHYEVGQKYEPHFDYFLDEFNTKNGGQRMATILMYLSDVEEGGETIFPDANVNSSSLPWYNELSECARKGLAVKPKMGDALLFWSMKPDATLDPLSLHGGCPVIKGNKWSSTKWLHVHEYKA

SEQ ID NO: 29153 - protein, 319 aa, Triticum aestivum
MAPSRPLMRGAGPPRVFGSGRAGRASPYALALAALLLASAFLLALIAFGVFSLPVSSPALPTTGAETESSGDGGAAESDASGGSSRAARSRARRDLSEGLGERGAQWTEVISWEPRAFVYHNFLSKEECEYLIGLAKPRMVKSTVVDSETGKSKDSRVRTSSGMFLQRGRDKVIRAIERRIADYTFIPAEHGEGLQVLHYEVGQKYEPHFDYFLDEFNTKNGGQRMATILMYLSDVEEGGETIFPDANVNSSSLPWYNELSECARKGLAVKPKMGDALLFWSMKPDATLDPLSLHGGCPVIKGNKWSSTKWLHVHEYKA

SEQ ID NO: 29154 - protein, 312 aa, Triticum aestivum
MRGAGPPRVFGSGRAGRASPYALALAALLLASAFLLALIAFGVFSLPVSSPALPTTGAETESSGDGGAAESDASGGSSRAARSRARRDLSEGLGERGAQWTEVISWEPRAFVYHNFLSKEECEYLIGLAKPRMVKSTVVDSETGKSKDSRVRTSSGMFLQRGRDKVIRAIERRIADYTFIPAEHGEGLQVLHYEVGQKYEPHFDYFLDEFNTKNGGQRMATILMYLSDVEEGGETIFPDANVNSSSLPWYNELSECARKGLAVKPKMGDALLFWSMKPDATLDPLSLHGGCPVIKGNKWSSTKWLHVHEYKA

SEQ ID NO: 29155 - DNA, 439 bp, Triticum aestivum
acagctcgcccactccctacccatctcgccggcgcgcaggcggcgccgtcccaacatgggatgacgtccgccgtaaaatagggcccccacgaccaaacaaagccccgactagccaccaacatcgaaccccatgaaggcgtctatcaagttccgcgacgacgaccggccgctgatgcgggccaaggtgccgatcggcgtgctcgggctgccgttccagtccggcctctccgccggtggcgatccccgggagctccgcttcgatctctccaccgctttcgcctccgggccagctctccgcttatcgtatcgccccaacgaccctggtctccccttcgccatctccatccgcgccggtgtcggagccctcggctcccctgtccgggcccccttctccctcgccgccgagttcaacctcctctctgccaactccggatctcct

SEQ ID NO: 29156 - protein, 103 aa, Triticum aestivum
MKASIKFRDDDRPLMRAKVPIGVLGLPFQSGLSAGGDPRELRFDLSTAFASGPALRLSYRPNDPGLPFAISIRAGVGALGSPVRAPFSLAAEFNLLSANSGSP

SEQ ID NO: 29157 - protein, 89 aa, Triticum aestivum
MRAKVPIGVLGLPFQSGLSAGGDPRELRFDLSTAFASGPALRLSYRPNDPGLPFAISIRAGVGALGSPVRAPFSLAAEFNLLSANSGSP

SEQ ID NO: 29158 - DNA, 1469 bp, Triticum aestivum
acattttttcttacgacggcgttgctcttttttcttacgatggctccatgaagggatgaggtgatatgggttccctcttccctccatggccgctgccttccaccgttcgtcctctcccggccgctcgtcgccgaccccgggagcaccaccacgcgcccctcgccgttccgtcctcctcgtctcatcacgtccgtctccctcctccctcttcttcgcgcagtgagctccgtctcacccaaactgacctagcccgggcgcacacgccggcgtcgaggcgtgccgtgctccgtccaagaactgccccggaagccgatgccgcggcggccctcatggtcgtccgcgcggaggccggcgacttcgcgcgggctcagtccatctgggcgcagctcctgctcagctccgccgcgccgtgcctggccgccgcagcgcccagcctcctcccggcgtacgcgcgtctcggtcgctacgacgaggtcctcctcgccgcgcgggagctctccgcgcgcgaccccgccgcggcgcgggacctctacccgctcgccgtctcctgcctcggcgccgccggcgagctcgccctcatggaggacgccgtgcaggagatggcccgcgccggcctccgcgtcgactccgccaccggcaacgccttcgtgcggcactacgcggcctccggcaccgtaccggagatggaggcggcggtcggccggctcaagaagtccggcctcctcatctccgtcgacgccatccgcgccgtcgcttcagcgtacatcgccaaccggaagtactacaagctcggcgagttcgtcaggggcgtcggcctcggccgccgggacgccggcaacctgctctggaacctctacctcctctccttcgcggccaacttcaagatgaagtcgctgcagcgcgccttcctggagatgaccgccgccgggtgccggccggacctcaccaccttcaacatccgcgccgccgccttctccaagatgtgcatgttctgggacctccacctcaccgccgagcacatgcgccgcgacggcgtcgcgccggacctcgtcacgcacggctgcttcgtggacgcctacatggagcgccggctcgcgcgcaacctctccttcgcgttccgccggctggacggctcaggcgagcccgtggtggccacggacggcgtcgtgttcgaggcgttcggcaaggggggcttccacaccacctccgaggggctgctagaggcggccggcgggaagcggcgatggacgtaccacgacttgctcggcgtctacctgaggaagcagcacaggagaaaccaaatcttttggaactactgatcttcaccagtacagcactgttacactagtgcaacaaggtagtagtaccagatgctacgatgtacagggatgatgttatgcttagaaacaaaatcatagatgtaatggaactatggaagagtctttgtaaagatgattgtgccaaatttg

SEQ ID NO: 29159 - protein, 417 aa, Triticum aestivum
MGSLFPPWPLPSTVRPLPAARRRPREHHHAPLAVPSSSSHHVRLPPPSSSRSELRLTQTDLARAHTPASRRAVLRPRTAPEADAAAALMVVRAEAGDFARAQSIWAQLLLSSAAPCLAAAAPSLLPAYARLGRYDEVLLAARELSARDPAAARDLYPLAVSCLGAAGELALMEDAVQEMARAGLRVDSATGNAFVRHYAASGTVPEMEAAVGRLKKSGLLISVDAIRAVASAYIANRKYYKLGEFVRGVGLGRRDAGNLLWNLYLLSFAANFKMKSLQRAFLEMTAAGCRPDLTTFNIRAAAFSKMCMFWDLHLTAEHMRRDGVAPDLVTHGCFVDAYMERRLARNLSFAFRRLDGSGEPVVATDGVVFEAFGKGGFHTTSEGLLEAAGGKRRWTYHDLLGVYLRKQHRRNQIFWNY

SEQ ID NO: 29160 - protein, 329 aa, Triticum aestivum
MVVRAEAGDFARAQSIWAQLLLSSAAPCLAAAAPSLLPAYARLGRYDEVLLAARELSARDPAAARDLYPLAVSCLGAAGELALMEDAVQEMARAGLRVDSATGNAFVRHYAASGTVPEMEAAVGRLKKSGLLISVDAIRAVASAYIANRKYYKLGEFVRGVGLGRRDAGNLLWNLYLLSFAANFKMKSLQRAFLEMTAAGCRPDLTTFNIRAAAFSKMCMFWDLHLTAEHMRRDGVAPDLVTHGCFVDAYMERRLARNLSFAFRRLDGSGEPVVATDGVVFEAFGKGGFHTTSEGLLEAAGGKRRWTYHDLLGVYLRKQHRRNQIFWNY

SEQ ID NO: 29161 - protein, 246 aa, Triticum aestivum
MEDAVQEMARAGLRVDSATGNAFVRHYAASGTVPEMEAAVGRLKKSGLLISVDAIRAVASAYIANRKYYKLGEFVRGVGLGRRDAGNLLWNLYLLSFAANFKMKSLQRAFLEMTAAGCRPDLTTFNIRAAAFSKMCMFWDLHLTAEHMRRDGVAPDLVTHGCFVDAYMERRLARNLSFAFRRLDGSGEPVVATDGVVFEAFGKGGFHTTSEGLLEAAGGKRRWTYHDLLGVYLRKQHRRNQIFWNY

SEQ ID NO: 29162 - DNA, 852 bp, Triticum aestivum
aaaagtcccctttcgcagtggttggcctcccgacccctatcttctcccactaatccccccattcccctcgccgccgccgccgccgtcgcctgccaaagatgaatgtcgacaagctgaagaagatggccggtgccgtgcgcaccggcggcaagggcagcgtgcgcaggaagaagaaggcagtgcacaagaccacgacaaccgatgacaagaggctccagagcaccttgaaaagagtaggagtgaacaccattcctggtattgaagaggtcaatattttcaaggatgacgttgtcatccaatttcagaacccgaaagtgcaagcatcaattgccgcaaacacatgggtagtcagtggaacaccacagacgaaaaagctgcaagatttactgccgacaattatcaaccaactgggcccggataacttggacaacctgcggaggcttgctgagcagttccagaagcagatgcctggtggtgaggctggcggcgccagcatcggtgctgcccaggacgatgacgacgatgtcccagagctcgtcccaggagagaccttcgaagaggccgcggaggagaagaaggaacccgaggcgaagaaggaacctgagccggaggagaagaaagagtcgtcgtaatcttgtcacgccattcattgttgtgaagggttccttgttggttcagggttgattggcatcttattactgtatatgccagagacatggtcctgtgagaactctggcccatctttcatttctagcgctcctccggttggttttgtctcggccgtgggttctgtccgaaccgacggcggaactgagttttacgacaattatcgtttaccattccaaagtgttg

SEQ ID NO: 29163 - protein, 177 aa, Triticum aestivum
MNVDKLKKMAGAVRTGGKGSVRRKKKAVHKTTTTDDKRLQSTLKRVGVNTIPGIEEVNIFKDDVVIQFQNPKVQASIAANTWVVSGTPQTKKLQDLLPTIINQLGPDNLDNLRRLAEQFQKQMPGGEAGGASIGAAQDDDDDVPELVPGETFEEAAEEKKEPEAKKEPEPEEKKESS

SEQ ID NO: 29164 - protein, 169 aa, Triticum aestivum
MAGAVRTGGKGSVRRKKKAVHKTTTTDDKRLQSTLKRVGVNTIPGIEEVNIFKDDVVIQFQNPKVQASIAANTWVVSGTPQTKKLQDLLPTIINQLGPDNLDNLRRLAEQFQKQMPGGEAGGASIGAAQDDDDDVPELVPGETFEEAAEEKKEPEAKKEPEPEEKKESS

SEQ ID NO: 29165 - DNA, 493 bp, Triticum aestivum
ccaaagcagagcaagtgcagatcagatcagaccagaccagagacacagagcagagcggataaactcagagggagatcatcaccaaccgaccatgtcgtgctgcggaggcaactgcggatgcggatccggctgcaagtgcggcaacggctgcggagggtgcaagatgtaccctgagatggacgagggggtgaacaccacctcccagaccctcatcatggggcgtggcgcccctccaagggcaccccgtcgttcgaggccgccgccgagaacggaggatgcaagtgcggccccaactgctcctgcaacccgtgcacctgcaagtgatccatcaaatcaagacaaggagacgccatggacggacctgatgaaggagcactagtggttatgcatggtgtgtgtttcgtttttaattgccaccgagaataagatgagatctatcgcatcgtatcgagccactagtagttcatggcgtatgtgtgccccttgtggcttg

SEQ ID NO: 29166 - protein, 125 aa, Triticum aestivum
QSRASADQIRPDQRHRAERINSEGDHHQPTMSCCGGNCGCGSGCKCGNGCGGCKMYPEMDEGVNTTSQTLIMGRGAPPRAPRRSRPPPRTEDASAAPTAPATRAPASDPSNQDKETPWTDLMKEH

SEQ ID NO: 29167 - protein, 95 aa, Triticum aestivum
MSCCGGNCGCGSGCKCGNGCGGCKMYPEMDEGVNTTSQTLIMGRGAPPRAPRRSRPPPRTEDASAAPTAPATRAPASDPSNQDKETPWTDLMKEH

SEQ ID NO: 29168 - protein, 71 aa, Triticum aestivum
MYPEMDEGVNTTSQTLIMGRGAPPRAPRRSRPPPRTEDASAAPTAPATRAPASDPSNQDKETPWTDLMKEH

SEQ ID NO: 29169 - DNA, 681 bp, Triticum aestivum
  misc_feature (622)..(623): n is a, c, g, or t
atctctgtccatacggagtgtcgggctttgaatagtgcaaactttttgtgctcacacactattctagatagacaacctccatggctgctgctcctgctactcaacctcgtgtcatggtgttacccttccctgcacagggccatgtcatcccgctaatggagctgtctcgcaagctcgccgggcacggcgtcgaggtggacttcgtgaacaccgagttcaaccacgacctcgtcatggaagcaatggcagagaagggagcaattcctgatgggatccacatgctcaccgttccggacggcctgggccccggagacgaccacgcggacatcggcaagtttgtcaaggacctgcccgccgccatgtccggccgcctggaggagatgatccggtcgaggaagatcaagtgggtgatcgtggatgtgtccatgagctgggcactgcaggtggccaccacggcgggtgcccgtgttgcctcgttctcgacctactccgcggccgtgtttgctctcaggatgaacctccccaaattgatacaggacggtgttcttgatgaaagtggggatgtgaaggggcaggagcagatcaagatgatgccgcccatcgacgcgtcggagatcccctnngtcagcctggccagcaccagcgcccctgagaggcgcagaaacaatatcgagaacgtcc

SEQ ID NO: 29170 - protein, 200 aa, Triticum aestivum
  misc_feature (181)..(181): Xaa can be any naturally occurring amino acid
MAAAPATQPRVMVLPFPAQGHVIPLMELSRKLAGHGVEVDFVNTEFNHDLVMEAMAEKGAIPDGIHMLTVPDGLGPGDDHADIGKFVKDLPAAMSGRLEEMIRSRKIKWVIVDVSMSWALQVATTAGARVASFSTYSAAVFALRMNLPKLIQDGVLDESGDVKGQEQIKMMPPIDASEIPXVSLASTSAPERRRNNIENV

SEQ ID NO: 29171 - protein, 189 aa, Triticum aestivum
  misc_feature (170)..(170): Xaa can be any naturally occurring amino acid
MVLPFPAQGHVIPLMELSRKLAGHGVEVDFVNTEFNHDLVMEAMAEKGAIPDGIHMLTVPDGLGPGDDHADIGKFVKDLPAAMSGRLEEMIRSRKIKWVIVDVSMSWALQVATTAGARVASFSTYSAAVFALRMNLPKLIQDGVLDESGDVKGQEQIKMMPPIDASEIPXVSLASTSAPERRRNNIENV

SEQ ID NO: 29172 - protein, 175 aa, Triticum aestivum
  misc_feature (156)..(156): Xaa can be any naturally occurring amino acid
MELSRKLAGHGVEVDFVNTEFNHDLVMEAMAEKGAIPDGIHMLTVPDGLGPGDDHADIGKFVKDLPAAMSGRLEEMIRSRKIKWVIVDVSMSWALQVATTAGARVASFSTYSAAVFALRMNLPKLIQDGVLDESGDVKGQEQIKMMPPIDASEIPXVSLASTSAPERRRNNIENV

SEQ ID NO: 29173 - DNA, 1238 bp, Triticum aestivum
gcacacggagcagcaaccgaaggggggaagaagagccgtcgccggagaagaccaaggggaagagcctctgccgccgccagagctagcgtcaccggtgcctcgccgcccctccgtcggcgcgctgccctccccttggtccgctgcagccatcatctcctctctgcaccttcagccgggagcccatccggagcagctgtagattggatgtggagattggcgaatctggatacgatggagctggagatcctgggcatgaacttcggctgcgtcctctcggcgctgtcggacgccaagatcccggagaaagaatgcctgctcccgctcgtctccaagctcctcggctactgcatcgttgccgcctccaccaccgtcaagctcccgcagatactaaagattttgaagcatggaagtgttagaggacttagtgtagcctcctttgagcttgagctcattggctacacaattgctctggcatattgtattcataaaggactgcccttttcagcttatggagagctagcttttctgctgatccaagcaattatcttgattggaatcatttactattactcgccaccaatgggaagcaaaacatggatgaaagctttgctatattgtggactagctccaactgttttggctggaaaaattgatccaggtctttttgaaatcctttatgcttcacagcatgccatcttcttttgtgctagagtaccgcagatatggaaaaatttcacaaataagagcactggcgagctgagcttcctgacttctttcatgaacttcgctggttcccttgtaagagtttttaccagcatccaggagaagactccgttaagtgtacttatgggctctgtaatcggcatcgtgacaaacggtacgattttgggtcagatagcgatgtaccaaaagcctgtgccaaagaaaggaaagaaagaagaatagggcgtgagaactcttgctgctggtttacaattttgctccagggctattcttggagcaacatgcaccacttaccaggacttcatgacaaaaacagtagggagaaaattcatgcagacttgggtgatgatggaaacaataggatatttcttggtttgtaatttttcgaagtatcgtaaaatgactggctgtgtagttttcaattgccaccttggttagttttctctgtgcaactgtttaatgatgctagaaagatgtatatccatttttatgtttgaatattatttgttgttttt

SEQ ID NO: 29174 - protein, 314 aa, Triticum aestivum
AHGAATEGGKKSRRRRRPRGRASAAARASVTGASPPLRRRAALPLVRCSHHLLSAPSAGSPSGAAVDWMWRLANLDTMELEILGMNFGCVLSALSDAKIPEKECLLPLVSKLLGYCIVAASTTVKLPQILKILKHGSVRGLSVASFELELIGYTIALAYCIHKGLPFSAYGELAFLLIQAIILIGIIYYYSPPMGSKTWMKALLYCGLAPTVLAGKIDPGLFEILYASQHAIFFCARVPQIWKNFTNKSTGELSFLTSFMNFAGSLVRVFTSIQEKTPLSVLMGSVIGIVTNGTILGQIAMYQKPVPKKGKKEE

SEQ ID NO: 29175 - protein, 246 aa, Triticum aestivum
MWRLANLDTMELEILGMNFGCVLSALSDAKIPEKECLLPLVSKLLGYCIVAASTTVKLPQILKILKHGSVRGLSVASFELELIGYTIALAYCIHKGLPFSAYGELAFLLIQAIILIGIIYYYSPPMGSKTWMKALLYCGLAPTVLAGKIDPGLFEILYASQHAIFFCARVPQIWKNFTNKSTGELSFLTSFMNFAGSLVRVFTSIQEKTPLSVLMGSVIGIVTNGTILGQIAMYQKPVPKKGKKEE

SEQ ID NO: 29176 - protein, 237 aa, Triticum aestivum
MELEILGMNFGCVLSALSDAKIPEKECLLPLVSKLLGYCIVAASTTVKLPQILKILKHGSVRGLSVASFELELIGYTIALAYCIHKGLPFSAYGELAFLLIQAIILIGIIYYYSPPMGSKTWMKALLYCGLAPTVLAGKIDPGLFEILYASQHAIFFCARVPQIWKNFTNKSTGELSFLTSFMNFAGSLVRVFTSIQEKTPLSVLMGSVIGIVTNGTILGQIAMYQKPVPKKGKKEE

SEQ ID NO: 29177 - DNA, 1230 bp, Triticum aestivum
aggttttactagggtttttgctagtttgcgccgtcgatcgccgccgacccccgccacccgccgacgcatccctccttcccggcacagcgtacgggccatgagagacctccacctcccgctgaaccagacccagagggtccgcctcgaggccgcgctccacgagctccagacccttgcccccgcggccgcgtccgccgccgccgtcaccgtcgcggacaacatccccgtcaaccacgaggacaacatcctcaaagggcatggtacgacggatcaggatggggaggtggtggcgacgctgtgcggcgtggtggagcgggtcaacaagctcgtctacgtgaggacgctccgggctaggtataagccagaggttggtgatatcatagttggccgtgtcatcgagattgctccaaagcgctggcggttggagataaactttagccaagatgctgttttaatgctttcttcaatgaatttgcctgatggaattcagagaagaagaactgcggttgatgagcttaatatgcggagtatatttgaagaaaatgatgtcgtctgcgctgaagttcgtggtttccaacatgatggatctcttcatctacaagcaaggagtcaaaaatatggaaagcttcagagaggtcaattgctcacggtgcctgcgtatctggtaaaacgccggaagctgcatttccatcatctagagcagtatgacgtcgacctgatccttggctgcaacggtttcatctgggtcggtgagcacgtcgtggtgcgtgaaattgctgatttgaaggaagacgaacagaagctgagcgccgaagcggagacttttaccccaatagaaacaaggagacacatttgccgtcttgccaatgctgcacgcttgctttcagccctaggattcactctgactgttgagctgataattcagactgcggaagcgagcgtatcatcaaatgtcgagataaacgacatgctcggggctgaattctatgtccagacggcggagggagaggctaagcgtcgaggtgacctcctgggaaagaagaggtaatcatcttggccctgcctgcctggtttgctgtaaactgaaaatgctgacatgtacgggatatgtaaaaggaggtaatgccacccggtgcccttgtagcatacgacgattttgagattttggagcttgctccactgtagtgtgcattcgttttaagatggtattaagatatctgttattctgtc

SEQ ID NO: 29178 - protein, 348 aa, Triticum aestivum
GFTRVFASLRRRSPPTPATRRRIPPSRHSVRAMRDLHLPLNQTQRVRLEAALHELQTLAPAAASAAAVTVADNIPVNHEDNILKGHGTTDQDGEVVATLCGVVERVNKLVYVRTLRARYKPEVGDIIVGRVIEIAPKRWRLEINFSQDAVLMLSSMNLPDGIQRRRTAVDELNMRSIFEENDVVCAEVRGFQHDGSLHLQARSQKYGKLQRGQLLTVPAYLVKRRKLHFHHLEQYDVDLILGCNGFIWVGEHVVVREIADLKEDEQKLSAEAETFTPIETRRHICRLANAARLLSALGFTLTVELIIQTAEASVSSNVEINDMLGAEFYVQTAEGEAKRRGDLLGKKR

SEQ ID NO: 29179 - protein, 316 aa, Triticum aestivum
MRDLHLPLNQTQRVRLEAALHELQTLAPAAASAAAVTVADNIPVNHEDNILKGHGTTDQDGEVVATLCGVVERVNKLVYVRTLRARYKPEVGDIIVGRVIEIAPKRWRLEINFSQDAVLMLSSMNLPDGIQRRRTAVDELNMRSIFEENDVVCAEVRGFQHDGSLHLQARSQKYGKLQRGQLLTVPAYLVKRRKLHFHHLEQYDVDLILGCNGFIWVGEHVVVREIADLKEDEQKLSAEAETFTPIETRRHICRLANAARLLSALGFTLTVELIIQTAEASVSSNVEINDMLGAEFYVQTAEGEAKRRGDLLGKKR

SEQ ID NO: 29180 - protein, 197 aa, Triticum aestivum
MLSSMNLPDGIQRRRTAVDELNMRSIFEENDVVCAEVRGFQHDGSLHLQARSQKYGKLQRGQLLTVPAYLVKRRKLHFHHLEQYDVDLILGCNGFIWVGEHVVVREIADLKEDEQKLSAEAETFTPIETRRHICRLANAARLLSALGFTLTVELIIQTAEASVSSNVEINDMLGAEFYVQTAEGEAKRRGDLLGKKR

SEQ ID NO: 29181 - DNA, 658 bp, Triticum aestivum
gtgccaagaaaggatatattcaggcgcagttctactcagatggtgaacgatccatacaccctggtgatagccctcaatagctcgggttctgcagaaggtgaactttatgtggatgatgggaaaagttatgattatcagcaaggggcattcatccatcggcgttttgtatttgcagacaataaactaacttcaatcaatattgcgcctgatagtctgggcaagaaggtgtattcaactgagtgtgtgattgaaagaattatagtgcttgggttatcatcgggagcaaagaaggctatcattgaacctgggaaccaagaagtggaaattgatctgggaccgattagtttaaggagtggttcaaagtctgttgcgccaacagtcaggaggcccaatgttcgtgttgtagatgattggacgataaggatcgcatgatatgcagcccattcacatctggagcctgatgtctccattgttcgctgtcaggctataaactcgagcaatgctagaagcgtagtttcagactcgtaaatgttatctgtggacacccaaatttcattgtttcagacttccagtggacccaaaatttctgcaggtgcctggtacgcatgctgtttgtactcccaattttgacataagtcgtgacataaattgctgatgc

SEQ ID NO: 29182 - protein, 143 aa, Triticum aestivum
VPRKDIFRRSSTQMVNDPYTLVIALNSSGSAEGELYVDDGKSYDYQQGAFIHRRFVFADNKLTSINIAPDSLGKKVYSTECVIERIIVLGLSSGAKKAIIEPGNQEVEIDLGPISLRSGSKSVAPTVRRPNVRVVDDWTIRIA

SEQ ID NO: 29183 - protein, 130 aa, Triticum aestivum
MVNDPYTLVIALNSSGSAEGELYVDDGKSYDYQQGAFIHRRFVFADNKLTSINIAPDSLGKKVYSTECVIERIIVLGLSSGAKKAIIEPGNQEVEIDLGPISLRSGSKSVAPTVRRPNVRVVDDWTIRIA

SEQ ID NO: 29184 - DNA, 1047 bp, Triticum aestivum
gaagagaattttctcctacctttcctttgcagttgcaaagcgtctcctcttctctcctgctcctcctctcctaccctcgttgcctcccaccaaaccctaaaccaagctccgaatccctcccgtctctacccccaccgagctcgcaagttcttgattggagcagccgagcccagctcagattccccgcggggtcccgggagtattcgaggtcttggcgggaagccaagaaatggcggagggggaggagaccaaggtggagggaacgagagaggaagagagagcggatgcaggggcgggagcggaggaggaggaggtagaggtgaagttccggctcttcgacggctctgacatcggccccatccgctgcaacgccgctgctaccaccgtcgccgcactcaaggaccgcgtcgttgccgattggcccaaagataaaacaattgtcccaaagagtgctaatgatgtgaaactgataagtggaggcaaaattctagaaaatgacaagaatattgcacagtgcagagcaccttttggtgatcttcccagcactgttataacaatgcatgttgttgtccagccatcatccgcaaagtcaaaaccagacaagaagacgaacaagttgcctaagaccactcgctgctcttgtaccatactatgaatgtcaagtgtactccgtcgacaataatttgtgtgcccaccaagagagacgactggacagaagtggaacatccagcacccaagacgtgtcgtgtattgttgtgaggtgatattgtaactgtaagctagatactacacaagagtcggtccggtccctctgtcgctagggcaatagcgtcgctttgtcttgttttacccaacaaaggatgtttctatatgatgtacaagatacacacacattgctggtgctgttgctgttgtggaggtgaaggacctgctgttcgtcgccgtgccaagttgggttaaaaagggtcaaggttgttgggtgtgtcacgcaacctgattgtttgttctcacttgagactccgtgaaatgatgttttactccttgttt

SEQ ID NO: 29185 - protein, 141 aa, Triticum aestivum
MAEGEETKVEGTREEERADAGAGAEEEEVEVKFRLFDGSDIGPIRCNAAATTVAALKDRVVADWPKDKTIVPKSANDVKLISGGKILENDKNIAQCRAPFGDLPSTVITMHVVVQPSSAKSKPDKKTNKLPKTTRCSCTIL

SEQ ID NO: 29186 - protein, 115 aa, Triticum aestivum
EENFLLPFLCSCKASPLLSCSSSPTLVASHQTLNQAPNPSRLYPHRARKFLIGAAEPSSDSPRGPGSIRGLGGKPRNGGGGGDQGGGNERGRESGCRGGSGGGGGRGEVPALRRL

SEQ ID NO: 29187 - protein, 104 aa, Triticum aestivum
REFSPTFPLQLQSVSSSLLLLLSYPRCLPPNPKPSSESLPSLPPPSSQVLDWSSRAQLRFPAGSREYSRSWREAKKWRRGRRPRWRERERKRERMQGRERRRRR

SEQ ID NO: 29188 - DNA, 667 bp, Triticum aestivum
acagtctcacacccgccgctcagccgtaacttcacaaagatgctgaggtccaccggccgccttctgctgctcgcgctagcggcgagccacctgctgctcaccgccgccggcgctggctgcgagccgagcggcacgctccggccgacccagagccacgcgtgccaggactgctgcaaggccgggcaggcgtacccgacgtacaggtgctcgccgccggtctcctcgtccacccgggcggtcatgactctgaacgacttcgacgcgggcggcgacggcggggacccgtccgagtgcgacggcgcgttccaccgcagctcggagcgcgtggcggcgctgtccacggggtggtacagcgggggctcccgctgcggcaagagcatacggatccgggccaacggcaggtccgtgctcgccaaggtcgtcgacgagtgcgacaccgtgaacgggtgcgaccgcgagcacgccttccagccgccgtgccgcaacaacgtcgtcgacgcctcccaggcggtctgggacgcgctgggcatcaccggggaggaggtcggcgagtacaacgtcacttggtcagatgcatgacctatatatgtgcatggacgaatagagtgtacacgcggacccaaaatgaataaacggaatttataagggccgcctatttaacagggct

SEQ ID NO: 29189 - protein, 192 aa, Triticum aestivum
TVSHPPLSRNFTKMLRSTGRLLLLALAASHLLLTAAGAGCEPSGTLRPTQSHACQDCCKAGQAYPTYRCSPPVSSSTRAVMTLNDFDAGGDGGDPSECDGAFHRSSERVAALSTGWYSGGSRCGKSIRIRANGRSVLAKVVDECDTVNGCDREHAFQPPCRNNVVDASQAVWDALGITGEEVGEYNVTWSDA

SEQ ID NO: 29190 - protein, 179 aa, Triticum aestivum
MLRSTGRLLLLALAASHLLLTAAGAGCEPSGTLRPTQSHACQDCCKAGQAYPTYRCSPPVSSSTRAVMTLNDFDAGGDGGDPSECDGAFHRSSERVAALSTGWYSGGSRCGKSIRIRANGRSVLAKVVDECDTVNGCDREHAFQPPCRNNVVDASQAVWDALGITGEEVGEYNVTWSDA

SEQ ID NO: 29191 - protein, 112 aa, Triticum aestivum
MTLNDFDAGGDGGDPSECDGAFHRSSERVAALSTGWYSGGSRCGKSIRIRANGRSVLAKVVDECDTVNGCDREHAFQPPCRNNVVDASQAVWDALGITGEEVGEYNVTWSDA

SEQ ID NO: 29192 - DNA, 1347 bp, Triticum aestivum
tcctctctagacactgctgttgactccgccgttctctcaacccacatggctctcgaagcgcgcctccgcctcccgctcgccgggccaactccggccaccgctttcctctcaggatctaaccccaaacccagtcacatatccttctccctcaaacccacctccacttctctctccgccgccaatgcgccgcccatcgtcgtcgtgggctccgccaacgcggacatctacgtcgaggtcgaccgtctcccgctcgtcggcgagacggttgccgcgagtgccggtcacagcctcgccggcgggaagggcgccaatcaagctgcctgtggggggcggctggcgctggggcccacctacctcgtggcgcgcgtgggggacgacgccaacgggcgcctcctcgagggggcactcgcggacgccggcggcgtccgcctcgaccgcgtcgctcgcgcccccggcgcgccctcggggcacgctgttgtcatgctcatgcccgacgggcagaactccatcatcatcgttggcggcgccaacatggagagctgggcaccggaggtcgacccggaggacctggacctgatccggcaggccggcgtgctactgctgcaacgggagatacccgattgggtcaacattcaggtcgctcaggctgcaaaaggcgcaggtgtgcctgttatcttggatgcaggtggaatggatgctcctgtccccagagaactactcgaactggtggatatttttagtccaaatgagacagagctagcacgtttgactgggatgcctacagagacttttgaacaaatcagccaggctgcaggagcatgccataaaatgggtgtgaaagaagttttggttaaacttggatcacaaggatctgctctgtttgtcgagggagaggaaccaattaggcaggcgataatacctgccgcagaagtggtagacaccaccggcgctggtgacaccttcacctcagcttttgctgtagctctggtggaggggaagccaaagaaagagtgcatgaaatttgctgctgccgccgcctcactgtgtgttcgagtgaagggagccattcccagcatgcctgacaggaaaactgtgatgagccttctagaatctgtgcaagatgaataaccgtagaaacggtgactttagccctattcatcagcaataatgtgagctgttaagcttcaatctcctcgttcggttcatttatctcgggtatctatatatatttgtagccccttgtcaagttatggtagaggaaataagagaaaatggcattcctagcgccgtcctccgcagaaacagaatcgctggttcaggagttctaggtctgttgtttttatagcc

SEQ ID NO: 29193 - protein, 375 aa, Triticum aestivum
SSLDTAVDSAVLSTHMALEARLRLPLAGPTPATAFLSGSNPKPSHISFSLKPTSTSLSAANAPPIVVVGSANADIYVEVDRLPLVGETVAASAGHSLAGGKGANQAACGGRLALGPTYLVARVGDDANGRLLEGALADAGGVRLDRVARAPGAPSGHAVVMLMPDGQNSIIIVGGANMESWAPEVDPEDLDLIRQAGVLLLQREIPDWVNIQVAQAAKGAGVPVILDAGGMDAPVPRELLELVDIFSPNETELARLTGMPTETFEQISQAAGACHKMGVKEVLVKLGSQGSALFVEGEEPIRQAIIPAAEVVDTTGAGDTFTSAFAVALVEGKPKKECMKFAAAAASLCVRVKGAIPSMPDRKTVMSLLESVQDE

SEQ ID NO: 29194 - protein, 360 aa, Triticum aestivum
MALEARLRLPLAGPTPATAFLSGSNPKPSHISFSLKPTSTSLSAANAPPIVVVGSANADIYVEVDRLPLVGETVAASAGHSLAGGKGANQAACGGRLALGPTYLVARVGDDANGRLLEGALADAGGVRLDRVARAPGAPSGHAVVMLMPDGQNSIIIVGGANMESWAPEVDPEDLDLIRQAGVLLLQREIPDWVNIQVAQAAKGAGVPVILDAGGMDAPVPRELLELVDIFSPNETELARLTGMPTETFEQISQAAGACHKMGVKEVLVKLGSQGSALFVEGEEPIRQAIIPAAEVVDTTGAGDTFTSAFAVALVEGKPKKECMKFAAAAASLCVRVKGAIPSMPDRKTVMSLLESVQDE

SEQ ID NO: 29195 - protein, 215 aa, Triticum aestivum
MLMPDGQNSIIIVGGANMESWAPEVDPEDLDLIRQAGVLLLQREIPDWVNIQVAQAAKGAGVPVILDAGGMDAPVPRELLELVDIFSPNETELARLTGMPTETFEQISQAAGACHKMGVKEVLVKLGSQGSALFVEGEEPIRQAIIPAAEVVDTTGAGDTFTSAFAVALVEGKPKKECMKFAAAAASLCVRVKGAIPSMPDRKTVMSLLESVQDE

SEQ ID NO: 29196 - DNA, 922 bp, Triticum aestivum
atgctctgatagtgctgcttcgcccgcgctccccgaaaatcagaagcgaaaagcgcgcgggaggacacgaggagcggcgctgggaagcacagcaggcctcgacggcggcgccgcagggttgagaataagaaacagtgacctgtcccacctggcgaaatgccttgttactacgacgttgccgacatcctcatggaggaggagcttatttcggttgttttccaagtaactgcaaatggcgttggtctgctagatcctggtgccgagagaaacagtgttggaaagggtgctaaagtagaccttccattttggcttgcgcatggaatgttgtctctggaacaagcggtgtcaataaatgtacctccttgcttcacccagaaaactcggaaggagatccaagctgatgcagcctgtgttgatttgagggttcggtgcccttacttttatgagcttggatgcaagattgttcctctggtgggtgacaagagcattggccagttcttgcgctacgcgttcaccagtaggtacaaggagatactaagcaaggcacacagctcttcgacgatgacagtgcccaagttcgcaacgcgccttacaaaagaagaagctcaagtgttcgaatctgctagggaatctatgtttgccttcaggaagtggcgtgtcgggggtgcgaggctgcaaaaggcgtccattcttggaaggaagaggaagacaaagctgcctgacgggccttcgacgccctgaattatttttactgtcgagcagagtgcctgggcgggagaggtccaatgtttgcacactgatcgatctggtactgtaagtgtatggaacagaaaaagcgcgaaaggcagttctgatctgcgatcagacgtcggcatacctgatatgtttgtttgaatactcgtatcttcaatttgtcagttgg

SEQ ID NO: 29197 - protein, 194 aa, Triticum aestivum
MPCYYDVADILMEEELISVVFQVTANGVGLLDPGAERNSVGKGAKVDLPFWLAHGMLSLEQAVSINVPPCFTQKTRKEIQADAACVDLRVRCPYFYELGCKIVPLVGDKSIGQFLRYAFTSRYKEILSKAHSSSTMTVPKFATRLTKEEAQVFESARESMFAFRKWRVGGARLQKASILGRKRKTKLPDGPSTP

SEQ ID NO: 29198 - protein, 183 aa, Triticum aestivum
MEEELISVVFQVTANGVGLLDPGAERNSVGKGAKVDLPFWLAHGMLSLEQAVSINVPPCFTQKTRKEIQADAACVDLRVRCPYFYELGCKIVPLVGDKSIGQFLRYAFTSRYKEILSKAHSSSTMTVPKFATRLTKEEAQVFESARESMFAFRKWRVGGARLQKASILGRKRKTKLPDGPSTP

SEQ ID NO: 29199 - protein, 139 aa, Triticum aestivum
MLSLEQAVSINVPPCFTQKTRKEIQADAACVDLRVRCPYFYELGCKIVPLVGDKSIGQFLRYAFTSRYKEILSKAHSSSTMTVPKFATRLTKEEAQVFESARESMFAFRKWRVGGARLQKASILGRKRKTKLPDGPSTP

SEQ ID NO: 29200 - DNA, 940 bp, Triticum aestivum
caatccacctctcgagctcctcctcctcctccaaatctcaagcgagcacaccgcgcaagtagcaccgcttcagtttcggtttcagagctccgcttcagtcagctgacatgcctgccctcgccaagcccgctgcccgccccgccaagcccgccgccgcggcgccgaagccgaagcccgccgccgccaagcccaaggcggccgccgctggagccgcccacccgacctactttgagatgatcaaggaggcgatcgcggcgctcaaggacaggaccgggtcgagctcggtcgccatcgccaagtacatcgaggagaagcacggcaaggctctcccgcccaacttcaagaagatgctctccgtccagctccgcgcttccgccgccaagggcaagctcgtcaaggtcaaggcctcctacaagctctccgacgccgccaagaaggactcccccaaggccaagcccgcggcgaagcccgccaaggacgccgccaagcccaaaaagaaggcggccgagaagcccaagaagacggccgccgttggcaccaagcgcaaggcgccggagaagaagaagctggtcaccaaggccaagaagtcgccggctgccaaggccaaggcgaagccgaagaccgtccgctccccggccgccaagaaggcccgcaaggtcgccgccgcttgatcttgatgcgatagctggtcttaggagtgcttggtgttccaagggtctgtacaaaaggatgcctcatcctcccttgtttaggtttcggttctgctaggcaagtttatgtatcgtgggtggtgtttagtgtaatgaaatggttgttttagagaaaaaaaaaaaaaaaaaaaaaaaaaaaaaaaaaaaaaaaaaaaaaaaaccaaaaaaaacaaaccccaaaaaaaaaaaaaaaagtttatcaataccgtcaacctcaagggggggcccgg

SEQ ID NO: 29201 - protein, 187 aa, Triticum aestivum
MPALAKPAARPAKPAAAAPKPKPAAAKPKAAAAGAAHPTYFEMIKEAIAALKDRTGSSSVAIAKYIEEKHGKALPPNFKKMLSVQLRASAAKGKLVKVKASYKLSDAAKKDSPKAKPAAKPAKDAAKPKKKAAEKPKKTAAVGTKRKAPEKKKLVTKAKKSPAAKAKAKPKTVRSPAAKKARKVAAA

SEQ ID NO: 29202 - protein, 145 aa, Triticum aestivum
MIKEAIAALKDRTGSSSVAIAKYIEEKHGKALPPNFKKMLSVQLRASAAKGKLVKVKASYKLSDAAKKDSPKAKPAAKPAKDAAKPKKKAAEKPKKTAAVGTKRKAPEKKKLVTKAKKSPAAKAKAKPKTVRSPAAKKARKVAAA

SEQ ID NO: 29203 - protein, 107 aa, Triticum aestivum
MLSVQLRASAAKGKLVKVKASYKLSDAAKKDSPKAKPAAKPAKDAAKPKKKAAEKPKKTAAVGTKRKAPEKKKLVTKAKKSPAAKAKAKPKTVRSPAAKKARKVAAA

SEQ ID NO: 29204 - DNA, 649 bp, Triticum aestivum
gactcacccttttcccccatgtcggacgtttacaagaaagccaagcccggccgcctcgtcttcaagggcggcgaggccgccaccctccgcaagcccaagaagcaaaagaagaacaagaagcccgccgacgatgtccccgccgacgccgacgctgaagcctccgccgctgctgctgccgctgcggccacggagggcgccgaagccggcggcgactacaccatcgacgcggcgaagcggatgaagtacgaggagctgttccccgtggagacgaggaagttcgggtacgacccgtccaacgccgcccgcacctcccgcgaccgcaccgtcgagcaggccctcgacgaccgcgtgaggaagaaggccgaccgctactgcaagtgaggtcaggcgctagaatctagggtttgttgattcggcggaatcggtcgccttagattgttgcgctcgaggcgaattagattggtttctggtgttgaaacacatggattaagttgtcggggaactgatttatgttcgattgtttagtttgatttggtatcgatatgaattatgaaacagccatatgtgatgtgttgctacttttgttcaatgtttgatgcacattggcaataccagagtaacaatctatttatataatccacaatttcgg

SEQ ID NO: 29205 - protein, 126 aa, Triticum aestivum
DSPFSPMSDVYKKAKPGRLVFKGGEAATLRKPKKQKKNKKPADDVPADADAEASAAAAAAAATEGAEAGGDYTIDAAKRMKYEELFPVETRKFGYDPSNAARTSRDRTVEQALDDRVRKKADRYCK

SEQ ID NO: 29206 - protein, 120 aa, Triticum aestivum
MSDVYKKAKPGRLVFKGGEAATLRKPKKQKKNKKPADDVPADADAEASAAAAAAAATEGAEAGGDYTIDAAKRMKYEELFPVETRKFGYDPSNAARTSRDRTVEQALDDRVRKKADRYCK

SEQ ID NO: 29207 - protein, 79 aa, Triticum aestivum
THPFPPCRTFTRKPSPAASSSRAARPPPSASPRSKRRTRSPPTMSPPTPTLKPPPLLLPLRPRRAPKPAATTPSTRRSG

SEQ ID NO: 29208 - DNA, 831 bp, Triticum aestivum
aaaagctgaaacagagaaaccgatcggagcaataatggacgccctcacccgcttccaccggtcggtcgccggcggcgacgacgaggagtggcaggaggacgacatcctcggtgataccgagggcctctgctctctgtcccctctccagcggctctacgccttcgcggcttgcttggttgctggactcgccctcatgatgctgtcacttattgttttcgccagacctatcaaatttgctctcttgtttacatttggaaacataatggcagttggcagcacagtctttataatgggggtaaataaacaattgaggatgatgcttgacccagttcgtgtttatgcaacggctatttatgttggatgtgctgtttttgctctgattttcgctcttttgattcatgacaagctgctaacattgattgcaatcatatgtgagatatgtgcgctcttctggtatagcttgagctacatccctttcgctcgacggattgtctccgacctgatggtgaagctctgcgacactgagctatgatcttcttacttgggcgcctgatggatattgtcaacatgctcgggcgcctaaaattggagacctgttcatctccaccggctccagcagtgcatgtattccactcatttccctttttgttgatgaatgatgaacggatcaagctccatatattgtgtataaatgctacacgaaacactgtttgtgcagctcacaacccccttctgtaacccttgattccatttgttccttcaaaccagattctatgtaaatttgttgctgcaaaaactcagccgaatcagattccatttgtttacttgtcc

SEQ ID NO: 29209 - protein, 176 aa, Triticum aestivum
KAETEKPIGAIMDALTRFHRSVAGGDDEEWQEDDILGDTEGLCSLSPLQRLYAFAACLVAGLALMMLSLIVFARPIKFALLFTFGNIMAVGSTVFIMGVNKQLRMMLDPVRVYATAIYVGCAVFALIFALLIHDKLLTLIAIICEICALFWYSLSYIPFARRIVSDLMVKLCDTEL

SEQ ID NO: 29210 - protein, 165 aa, Triticum aestivum
MDALTRFHRSVAGGDDEEWQEDDILGDTEGLCSLSPLQRLYAFAACLVAGLALMMLSLIVFARPIKFALLFTFGNIMAVGSTVFIMGVNKQLRMMLDPVRVYATAIYVGCAVFALIFALLIHDKLLTLIAIICEICALFWYSLSYIPFARRIVSDLMVKLCDTEL

SEQ ID NO: 29211 - protein, 112 aa, Triticum aestivum
MMLSLIVFARPIKFALLFTFGNIMAVGSTVFIMGVNKQLRMMLDPVRVYATAIYVGCAVFALIFALLIHDKLLTLIAIICEICALFWYSLSYIPFARRIVSDLMVKLCDTEL

SEQ ID NO: 29212 - DNA, 491 bp, Triticum aestivum
agaaaccctagcagatcgctcgagccctccgccgccgccgcgccttcagctctctccttccttcaccgattcaagatgaagttcatcgctgcctatctgcttgcttacctctcgccgtccaactacgcggctttggaaggcatcctctactgcaagcaccatttctcccagcttttcaaggagaaggggagctacaaccatctgatcaagtgcgcatcggtcaagcgcgcagcagaggcgcaaacagcacaggcggcggcacaggcagcgccggcggcagctgaatcctcctgattatgctgtcatctttaaagtgggctttgagggcgaaagtttggaaagccttgctctttttttacgattgtaacctgctgtgtgctgtgttctagctctggggataccaggaccatatttcgtgtccccttatgtgctagctcgatcacgttgttgaaccatggagttggatgtcatttcggaagaaattgttgtgc

SEQ ID NO: 29213 - protein, 97 aa, Triticum aestivum
RNPSRSLEPSAAAAPSALSFLHRFKMKFIAAYLLAYLSPSNYAALEGILYCKHHFSQLFKEKGSYNHLIKCASVKRAAEAQTAQAAAQAAPAAAESS

SEQ ID NO: 29214 - protein, 72 aa, Triticum aestivum
MKFIAAYLLAYLSPSNYAALEGILYCKHHFSQLFKEKGSYNHLIKCASVKRAAEAQTAQAAAQAAPAAAESS

SEQ ID NO: 29215 - DNA, 665 bp, Triticum aestivum
aagttagcttctggcccggcccggcccgtttgtcttgctatccggtttcgtctcgccctcgtctccagcggcccggacggcgagccggagacggcgcccatctcaatctcaacgtagcggcacatcgattcccggcgaccaaacgatgcggcggccggcggcgagtgtctctgtagcatcgaaggttcagtctgtacccaagaaggccaaagagatgatacacttttctagagatcagctgattgggttggcatttgttgcatttggcatcatattatttgtgggtttcttctacgcagctgttgtgtccaaaatgcttccgccttatgagaactggcttctatctgccatccaaaatgacaggtattactgcctactcgtgcccttgacacttcccgtgataattgtggctgtctatctgcattggctaagcatgaagatgttcaagcatgcctgaagaattgcacatctgttttgcagaagccagttttctagcgtaaattttgatggcaacatactaaattgacctcatggtgtcattactagatattaaaatgagcacatttatgtgtagaaagtgtagttgtatttgtgaaatgcttatggtggaaaatacatatttatttgttaaatgtttatgtgatggaaaatgcacttgtagttcg

SEQ ID NO: 29216 - protein, 103 aa, Triticum aestivum
MRRPAASVSVASKVQSVPKKAKEMIHFSRDQLIGLAFVAFGIILFVGFFYAAVVSKMLPPYENWLLSAIQNDRYYCLLVPLTLPVIIVAVYLHWLSMKMFKHA

SEQ ID NO: 29217 - protein, 80 aa, Triticum aestivum
MIHFSRDQLIGLAFVAFGIILFVGFFYAAVVSKMLPPYENWLLSAIQNDRYYCLLVPLTLPVIIVAVYLHWLSMKMFKHA

SEQ ID NO: 29218 - protein, 57 aa, Triticum aestivum
VSFWPGPARLSCYPVSSRPRLQRPGRRAGDGAHLNLNVAAHRFPATKRCGGRRRVSL

SEQ ID NO: 29219 - DNA, 668 bp, Triticum aestivum
gaaagtcgccttcttgtttgccttgccttggctccgccggaacacacagagaccgagaggaggcgaaatcgcgaacagaccagccatgggcgtgaccaaggaggacgtggaggccgccgtcgccgccgcgctcagccccacccacctcgtggtcaccgatacatccggcgggtgcggcgcgagctacgagatcgaggtggtctcggacaagttcgaggggaagcggctgctggagcgccaccggatggtcaacaccgcgctggcgccgctcatggccgagatccacgccgtctccatcaaggcgctcaccccggcgcaggcccatcccaagccccagccggagccggccgccgccgccgccgacaagccgcaggcctgactcgctccgaaggaagcactggtaccgaaaccacaccatgtccgccgttggatgttgggaattcgcatcatacagtactctctgcttgaatgaataatgtagcaagatgcgtctgcggaatcgaggctttgcagtggtgctatgcctgggtgataagattttgctgcgttttgtccatgtgattgtgatgattcagcgcttcttctctaactgtgttgacctgagattgtgtggcgacatgttcccgagtttcagtcatagaataagctgtttgcagtttagtttctcc

SEQ ID NO: 29220 - protein, 155 aa, Triticum aestivum
ESRLLVCLALAPPEHTETERRRNREQTSHGRDQGGRGGRRRRRAQPHPPRGHRYIRRVRRELRDRGGLGQVRGEAAAGAPPDGQHRAGAAHGRDPRRLHQGAHPGAGPSQAPAGAGRRRRRQAAGLTRSEGSTGTETTPCPPLDVGNSHHTVLSA

SEQ ID NO: 29221 - protein, 125 aa, Triticum aestivum
KVAFLFALPWLRRNTQRPRGGEIANRPAMGVTKEDVEAAVAAALSPTHLVVTDTSGGCGASYEIEVVSDKFEGKRLLERHRMVNTALAPLMAEIHAVSIKALTPAQAHPKPQPEPAAAAADKPQA

SEQ ID NO: 29222 - protein, 97 aa, Triticum aestivum
MGVTKEDVEAAVAAALSPTHLVVTDTSGGCGASYEIEVVSDKFEGKRLLERHRMVNTALAPLMAEIHAVSIKALTPAQAHPKPQPEPAAAAADKPQA

SEQ ID NO: 29223 - DNA, 1114 bp, Triticum aestivum
aatccgctaaggagtgtgtaacaacaccacacaattcaacactgctagctacacagcacacgaaccgatccatccatccagaaaaaaaagaaagagtgcccgtcgaaaatgccggtgagcaggatcgccatcggcgccccgggggagctgtcccacccggacaccttccgcgccggcgtcgccgagttcatctccatgctcatcttcgtcttcgccggctcaggctccggcatggccttcggcaagctgactgacggcggcgcgacgacgccggcggggcttatcgcggcggcgctggcgcacgcgttcgcgctcttcgtggccgtctccgtgggcgccaacatctccggcgggcacgtgaacccggccgtcacattcggcgccttcgtgggcggcaacatcagcctgctcaaggccgtggtgtactgggtggcgcagctgctcggctccgtcgtggcctgcctcctcctcaagatcgccaccggcggcgaggccgtgggcgccttctcgctctccgccggcgtcggcgtctggaacgccgtggtgttcgagatcgtcatgaccttcgggctcgtctacacggtgtacgccaccgcggtcgaccccaagcgcggcgacctcggggtgatcgcgcccatcgccatcggcttcatcgtcggcgccaacatcctcgccggcggcgccttcgacggcgcctccatgaaccccgccgtctccttcggccccgctgtcgtcagcggcgtctgggagaaccactgggtctactggctcggccccttcgccggcgccgccatcgccgccctcgtctacgacatctgcttcatcggccagcgcccccacgagcagctccccaccgccgactactgaaaacctcaatctcatctcgtccatccgtcatcgccatgagagattgaaatcgcttcaaaaattccagcaagtgtacgtcgtcgcgtcatcatcagtaagccagtttagtttcattgcgctatcttgtccttgagaaattcagggtaaacagtgtgtgcgagtcagtcagtcaggaataatctcatccttctcttatcttggtgtatgtatgtacgtcctcaattatgaatgcttctattccatggcc

SEQ ID NO: 29224 - protein, 252 aa, Triticum aestivum
MPVSRIAIGAPGELSHPDTFRAGVAEFISMLIFVFAGSGSGMAFGKLTDGGATTPAGLIAAALAHAFALFVAVSVGANISGGHVNPAVTFGAFVGGNISLLKAVVYWVAQLLGSVVACLLLKIATGGEAVGAFSLSAGVGVWNAVVFEIVMTFGLVYTVYATAVDPKRGDLGVIAPIAIGFIVGANILAGGAFDGASMNPAVSFGPAVVSGVWENHWVYWLGPFAGAAIAALVYDICFIGQRPHEQLPTADY

SEQ ID NO: 29225 - protein, 223 aa, Triticum aestivum
MLIFVFAGSGSGMAFGKLTDGGATTPAGLIAAALAHAFALFVAVSVGANISGGHVNPAVTFGAFVGGNISLLKAVVYWVAQLLGSVVACLLLKIATGGEAVGAFSLSAGVGVWNAVVFEIVMTFGLVYTVYATAVDPKRGDLGVIAPIAIGFIVGANILAGGAFDGASMNPAVSFGPAVVSGVWENHWVYWLGPFAGAAIAALVYDICFIGQRPHEQLPTADY

SEQ ID NO: 29226 - protein, 211 aa, Triticum aestivum
MAFGKLTDGGATTPAGLIAAALAHAFALFVAVSVGANISGGHVNPAVTFGAFVGGNISLLKAVVYWVAQLLGSVVACLLLKIATGGEAVGAFSLSAGVGVWNAVVFEIVMTFGLVYTVYATAVDPKRGDLGVIAPIAIGFIVGANILAGGAFDGASMNPAVSFGPAVVSGVWENHWVYWLGPFAGAAIAALVYDICFIGQRPHEQLPTADY

SEQ ID NO: 29227 - DNA, 1501 bp, Triticum aestivum
accttgttctatcctgaactcgccatcaccacctctcgtcctcttcctcggcagaaaagaaagatggaggccttcctcgccggcttccgggcgccgcctcgagcttccgccgtacccaccgcccggagcccgcctcccagccccttttttctcggcacacggcgcagtaagccctcctcctccgcctccgtggtctgcatggcggagcgacatctcatatcaaagttggattctacagagaaggcatggaaagaaatgtcgattagattgggtgaccctgacattgtctcagatccaagcaaataccaaaaacttgcacagtctgtttccgatctgggagaggttgtgacggcatatagggaatttaaggaatgtgaaaggcagattgaagaaacaaaagctttgcaaaaagagaatggtgatgaccctgatatggctgagatgatagcttcagagctagagtctctctctgatcagcttgcggagctcgaggaaagactgacggtacttctgcttccaagcgaccctctaaattcacgtaacatcttacttgaagtaagagctggcactggaggtgatgaagctggaatttgggctggtgaccttgtacgcatgtaccaaagatattgtgagctcaacaattggaagtttaaaccagtttcttgctcagaagcagaaaagggtggatacaaaacatatgtgatggaggtgaagggaaagcaagtctacagtaaactgaagtttgagtcaggtgtgcaccgtgttcagcgtgtaccacagacagagactatgggtcgtgttcacacgtcaaccgcaactgtggctattatgccagagcccgacgaagtggacgtggttattgatccaaaagatattgaacttaaagctgccagatctggtggagctggagggcagaatgttaacaaggtggagacggctattgatcttattcacaagcctacgggaataaggatattctgcacagaagaaaggtcacaacttcaaaacaaagaacgcgcgttccagttattaagagcaaaactgtcggtactggtgctcgctcggagaagatacggacgtacaattataaggacaacagagtgactgatcatcggttgaagatgaattttgtattgtctagcttccttttaggagatattgaatcagctgttcagtcctgcgctgcattggagcagaaggaactcttggaggaaatggccacttcttctgcagtgaaggcgtgatcaggttaactattccttttgcttctagccatatcctaaaggagaacagatccaatggcatcttacagtcgatggagatcgacgaccaagatgtacatgaaaaaactcgcgagtagcgaatcatattccttgcgtgcacacactgttctgttttctcatggtcattttgcatatacactagtgtctctagacaatttgatgcactccacttgccctgatgggagcagattttgagtagctgaaatcgacattttttt

SEQ ID NO: 29228 - protein, 367 aa, Triticum aestivum
TLFYPELAITTSRPLPRQKRKMEAFLAGFRAPPRASAVPTARSPPPSPFFLGTRRSKPSSSASVVCMAERHLISKLDSTEKAWKEMSIRLGDPDIVSDPSKYQKLAQSVSDLGEVVTAYREFKECERQIEETKALQKENGDDPDMAEMIASELESLSDQLAELEERLTVLLLPSDPLNSRNILLEVRAGTGGDEAGIWAGDLVRMYQRYCELNNWKFKPVSCSEAEKGGYKTYVMEVKGKQVYSKLKFESGVHRVQRVPQTETMGRVHTSTATVAIMPEPDEVDVVIDPKDIELKAARSGGAGGQNVNKVETAIDLIHKPTGIRIFCTEERSQLQNKERAFQLLRAKLSVLVLARRRYGRTIIRTTE

SEQ ID NO: 29229 - protein, 346 aa, Triticum aestivum
MEAFLAGFRAPPRASAVPTARSPPPSPFFLGTRRSKPSSSASVVCMAERHLISKLDSTEKAWKEMSIRLGDPDIVSDPSKYQKLAQSVSDLGEVVTAYREFKECERQIEETKALQKENGDDPDMAEMIASELESLSDQLAELEERLTVLLLPSDPLNSRNILLEVRAGTGGDEAGIWAGDLVRMYQRYCELNNWKFKPVSCSEAEKGGYKTYVMEVKGKQVYSKLKFESGVHRVQRVPQTETMGRVHTSTATVAIMPEPDEVDVVIDPKDIELKAARSGGAGGQNVNKVETAIDLIHKPTGIRIFCTEERSQLQNKERAFQLLRAKLSVLVLARRRYGRTIIRTTE

SEQ ID NO: 29230 - protein, 301 aa, Triticum aestivum
MAERHLISKLDSTEKAWKEMSIRLGDPDIVSDPSKYQKLAQSVSDLGEVVTAYREFKECERQIEETKALQKENGDDPDMAEMIASELESLSDQLAELEERLTVLLLPSDPLNSRNILLEVRAGTGGDEAGIWAGDLVRMYQRYCELNNWKFKPVSCSEAEKGGYKTYVMEVKGKQVYSKLKFESGVHRVQRVPQTETMGRVHTSTATVAIMPEPDEVDVVIDPKDIELKAARSGGAGGQNVNKVETAIDLIHKPTGIRIFCTEERSQLQNKERAFQLLRAKLSVLVLARRRYGRTIIRTTE

SEQ ID NO: 29231 - DNA, 953 bp, Triticum aestivum
catataagcatgcgacgaaaccccatcgtccattcttccctgccgccgcctcctcccttcttcagccgaagcgcccgcacgcctcgacccaagggatctcaatggcgccgacctccaagatggcgctgggcatcaagcgcgcgtcgcggtcgcacacctaccaccgccgcgggctgtgggccatcaaggccaagcacggcggagccttccccaaggccgagaagccagccgccgtcgccgagcccaagttctaccccgccgacgacgtcaagccccgcaccgccagcacccgcaagcctaagcccaccaagctcaggtcgaccatcacgcccggtacggtgctgatcctgctcgctgggaggtacatggggaagcgcgtggtgttcctcaagcagctcaagtctggcctgctcctcatctctgggcctttcaagatcaatggtgtgccagttcgccgggtgaaccaggcttatgtcattgccacatccacaaaggttgacatctctggtgttaacgtggagaagtttgatgacaagtacttcgccagggacaagaagaccagggcaaagaagactgaaggggagctgtttgagactgagaaggagaccaccaagaatctgccagaatttaaaaaagatgatcagaaggccatcgatgctgagttgatcaaagctattgaggctgtccctgaccttaagaactatcttggtgctcggttctctctcagggatggtgacaagccccatgagatgaccttctaagttgctacaagttcctgagttttggatgtgttttgcctagattgttgctgaaatttgtaccctgttagttgacttcctatgtcagttgaagtgaccgtaagatattatgagaagatcaagagaatccttatctgctttggtggttctttttttacttatgcttaatggaacagtttgtcgtgtgttatttgt

SEQ ID NO: 29232 - protein, 252 aa, Triticum aestivum
YKHATKPHRPFFPAAASSLLQPKRPHASTQGISMAPTSKMALGIKRASRSHTYHRRGLWAIKAKHGGAFPKAEKPAAVAEPKFYPADDVKPRTASTRKPKPTKLRSTITPGTVLILLAGRYMGKRVVFLKQLKSGLLLISGPFKINGVPVRRVNQAYVIATSTKVDISGVNVEKFDDKYFARDKKTRAKKTEGELFETEKETTKNLPEFKKDDQKAIDAELIKAIEAVPDLKNYLGARFSLRDGDKPHEMTF

SEQ ID NO: 29233 - protein, 219 aa, Triticum aestivum
MAPTSKMALGIKRASRSHTYHRRGLWAIKAKHGGAFPKAEKPAAVAEPKFYPADDVKPRTASTRKPKPTKLRSTITPGTVLILLAGRYMGKRVVFLKQLKSGLLLISGPFKINGVPVRRVNQAYVIATSTKVDISGVNVEKFDDKYFARDKKTRAKKTEGELFETEKETTKNLPEFKKDDQKAIDAELIKAIEAVPDLKNYLGARFSLRDGDKPHEMTF

SEQ ID NO: 29234 - protein, 213 aa, Triticum aestivum
MALGIKRASRSHTYHRRGLWAIKAKHGGAFPKAEKPAAVAEPKFYPADDVKPRTASTRKPKPTKLRSTITPGTVLILLAGRYMGKRVVFLKQLKSGLLLISGPFKINGVPVRRVNQAYVIATSTKVDISGVNVEKFDDKYFARDKKTRAKKTEGELFETEKETTKNLPEFKKDDQKAIDAELIKAIEAVPDLKNYLGARFSLRDGDKPHEMTF

SEQ ID NO: 29235 - DNA, 1220 bp, Triticum aestivum
ccatccatcctcctctcctgcaaaaccaaaggccagacccagacccagaccgctcacgccgcaccgcacgcgctgcacgggcacccaacacaagcccttctccgatcgtgctctctcgccgccggtagcagtctagcagagcagcggggaggagctccgagatgagggcgccgcggaggccgatggcggtcgtgctcagctgggtgcggaggcagccgcccaaggtcaaggccttcctcgccgtcgtcgcgggcatgaccgcgctcgtcttcatccgcttcatcgtccacgaccacgacaacctcttcgtcgccgccgaggccgcgcacgcgctcggcatcgccgtgctcatctacaagctcaccaaggagaagacctgcgctggactttcactcaagtctcaggatttgacagcactgttcctggccgttaggttgtactgcagctttgttatggagtatgacatccatacaatactggattcagctacactagtagctactctttttgtcatttacatgattcggttcagactgaggtcaacttatatgctggacaaggacaattttgcattgcactacgaggttgcaccatggtgtgtgctggcatttattgctcatccttcgacatcacatatcatgatcaataggatctgctgggccttctgtgtttacttgaaagctgtttcagtgctgccccagttgcgcttgatgcagaatacaaagattgttgaaccattcacagctcattatgtgtttgcattgggagtggcaaggttccttagctgtgcacactgggtccttcaggtcttggatactcgtggcagattattgactgctctgggctatggcttttggccatcgatggttctcctctctgaaatcgtccagacgttcatccttgcagatttctgctactactatgtgaagagtcttgctggtggacaactagtgctgcgacttccttctggggtggtgtaaaatctgcatcatgatggacaactcatttgtttggtgctgtgtcttactgttgaacagtggctctgcttctggcgcccaaccttcgctcttcccatgtgggatggattcaagagtcttgtttgccttttctttttcagttataaactgtttggtgaaaattgtaccagagactcttggtcgtgaaatgtaggctgttgagaatactatctatagctgactatttatccagacttgttttcg

SEQ ID NO: 29236 - protein, 272 aa, Triticum aestivum
MRAPRRPMAVVLSWVRRQPPKVKAFLAVVAGMTALVFIRFIVHDHDNLFVAAEAAHALGIAVLIYKLTKEKTCAGLSLKSQDLTALFLAVRLYCSFVMEYDIHTILDSATLVATLFVIYMIRFRLRSTYMLDKDNFALHYEVAPWCVLAFIAHPSTSHIMINRICWAFCVYLKAVSVLPQLRLMQNTKIVEPFTAHYVFALGVARFLSCAHWVLQVLDTRGRLLTALGYGFWPSMVLLSEIVQTFILADFCYYYVKSLAGGQLVLRLPSGVV

SEQ ID NO: 29237 - protein, 265 aa, Triticum aestivum
MAVVLSWVRRQPPKVKAFLAVVAGMTALVFIRFIVHDHDNLFVAAEAAHALGIAVLIYKLTKEKTCAGLSLKSQDLTALFLAVRLYCSFVMEYDIHTILDSATLVATLFVIYMIRFRLRSTYMLDKDNFALHYEVAPWCVLAFIAHPSTSHIMINRICWAFCVYLKAVSVLPQLRLMQNTKIVEPFTAHYVFALGVARFLSCAHWVLQVLDTRGRLLTALGYGFWPSMVLLSEIVQTFILADFCYYYVKSLAGGQLVLRLPSGVV

SEQ ID NO: 29238 - protein, 241 aa, Triticum aestivum
MTALVFIRFIVHDHDNLFVAAEAAHALGIAVLIYKLTKEKTCAGLSLKSQDLTALFLAVRLYCSFVMEYDIHTILDSATLVATLFVIYMIRFRLRSTYMLDKDNFALHYEVAPWCVLAFIAHPSTSHIMINRICWAFCVYLKAVSVLPQLRLMQNTKIVEPFTAHYVFALGVARFLSCAHWVLQVLDTRGRLLTALGYGFWPSMVLLSEIVQTFILADFCYYYVKSLAGGQLVLRLPSGVV

SEQ ID NO: 29239 - DNA, 994 bp, Triticum aestivum
ccgacgagcggctgggctcggttagccaaaggagcaagccctagctcgcccaaatccccgctcccctccccctcgccgaacaaatgtccgaccgccgccgcgacagggagaggccccgcgagcgcggcggctacgaccagccgcgggagcgcgaccacgacgccgaccgccaccgcgaccgggaccgcgacgtcgaccgccaccgggaccgggaccgcggccaggacaaggagcgggaccgggaccgggactaccgccgcgcccgcaagcgctcgcgctcccgctccccctcggccgacagggaccgcgcccgccgccgccgctcccactcccactcccacccccaccggtcacgctcccccgacgccggccgccacaagcgccgccgcgaggggtcgcccgtcgccgactcgaaggaggacaggaagccggatccccccaaggccgccgaggaggcggccgccccggtgggcgacggggacgtggacgcggaggagctggagatgatgaagatgatggggatccccgtcgggttcgactccaccaagggcaagtacgtccccggcgccgacgtcagcggcgtgcgcgccgtcaccaagcgccagccgcggcagtacatgaaccgcaggggcgggttcaaccgtcccctgccgcccgaggtcaaccgctgaggaggatcatgtatcactgcagtatacctcgttgctggaatgcaaacttgcggttgattactagacttctttgctggccatagcaaggattgagcttctactgtctaccaagcatgtataaccttgatggctagttactttgccaaactttgcagactgagacatgtagttctcgttttcatcatttgctctgtcgacattccagggaaagatattggtggcgtgtttttggaaatgtggtttagaaaattacatgatgtttctgcacataatttgtatgtttttcaggcatgcaccacatggaatggaacttgtgatgatgc

SEQ ID NO: 29240 - protein, 195 aa, Triticum aestivum
MSDRRRDRERPRERGGYDQPRERDHDADRHRDRDRDVDRHRDRDRGQDKERDRDRDYRRARKRSRSRSPSADRDRARRRRSHSHSHPHRSRSPDAGRHKRRREGSPVADSKEDRKPDPPKAAEEAAAPVGDGDVDAEELEMMKMMGIPVGFDSTKGKYVPGADVSGVRAVTKRQPRQYMNRRGGFNRPLPPEVNR

SEQ ID NO: 29241 - protein, 168 aa, Triticum aestivum
PTSGWARLAKGASPSSPKSPLPSPSPNKCPTAAATGRGPASAAATTSRGSATTTPTATATGTATSTATGTGTAARTRSGTGTGTTAAPASARAPAPPRPTGTAPAAAAPTPTPTPTGHAPPTPAATSAAARGRPSPTRRRTGSRIPPRPPRRRPPRWATGTWTRRSWR

SEQ ID NO: 29242 - DNA, 1301 bp, Triticum aestivum
atcccgcagactggactcccacagtattaaccccaggcacgcctcccgctgcaaccaacccgagtccttccaccctgcacagaatctcagcccaacccacaggtctcgactcaagccatgggcgccggcgacaagacggccgcgggcatgccgcgcatcggcatgggcacggcggtgcaggggcccaagccggaccccatccgccgcgccgtcctccgcgccatcgaggtagggtaccgccacttcgacacggccgcgcactacgagaccgaggcccccatcggcgaggccgccgccgaggccgtgcgctccggcgccgtcgcctcccgggacgacctcttcatcacctccaagctctggtgcagcgatgcgcaccgcgacagggtcgtccccgccctcaggcagacgctccggaatctccagatggagtacgtggacctgtacctcgtccactggccggtgtccatgaagcccgggcggttcaaggcccccttcacggcggaggacttcgtgccgttcgacatgcgggccgtgtgggaggccatggaggagtgccacaggctgggcctcgccaaggccatcggcgtcgccaatttctcctgcaagaagcttgagaccctcctctccttcgccaccatccctcccaccgtcaatcaggtggaggtgaacccggtgtggcagcagaggaagctgagggagttctgcaggggcaagggcatccagctgtgcacctactcgccgctgggggccaagggcacgcactggggcagcgacgccgtgatggacgcgggcgtcctgcaggagatcgccgcgtccaggggcaagagtgtggcgcaggtgtgcctgaggtgggtgtacgagcagggggactgcctcatcgtcaagagcttcgacgaggcccggatgcgggagaacctggacgtggacggctgggagctcaccgaggaggagcaccgcaggatcgcggagatcccgcagcgcaagatcaacctcggcaagcgctacgtgtccgagcacgggccctacaagtccctcgaggagctctgggacggtgagatataagtgatcactggagaggctggctggccggtgcgacgggttctgttgggttgtcatccttggccatggatgggtggttgatcgggggacgatttccctttgaataaaatcatgttctgcattgtgtttcagtgaataaatggagatgtttactaccggatttaaggagagttactaagagattgggatcatctcatcatgttattatgcgtactttcctggcaatgcaagttgttacaatg

SEQ ID NO: 29243 - protein, 314 aa, Triticum aestivum
MGAGDKTAAGMPRIGMGTAVQGPKPDPIRRAVLRAIEVGYRHFDTAAHYETEAPIGEAAAEAVRSGAVASRDDLFITSKLWCSDAHRDRVVPALRQTLRNLQMEYVDLYLVHWPVSMKPGRFKAPFTAEDFVPFDMRAVWEAMEECHRLGLAKAIGVANFSCKKLETLLSFATIPPTVNQVEVNPVWQQRKLREFCRGKGIQLCTYSPLGAKGTHWGSDAVMDAGVLQEIAASRGKSVAQVCLRWVYEQGDCLIVKSFDEARMRENLDVDGWELTEEEHRRIAEIPQRKINLGKRYVSEHGPYKSLEELWDGEI

SEQ ID NO: 29244 - protein, 304 aa, Triticum aestivum
MPRIGMGTAVQGPKPDPIRRAVLRAIEVGYRHFDTAAHYETEAPIGEAAAEAVRSGAVASRDDLFITSKLWCSDAHRDRVVPALRQTLRNLQMEYVDLYLVHWPVSMKPGRFKAPFTAEDFVPFDMRAVWEAMEECHRLGLAKAIGVANFSCKKLETLLSFATIPPTVNQVEVNPVWQQRKLREFCRGKGIQLCTYSPLGAKGTHWGSDAVMDAGVLQEIAASRGKSVAQVCLRWVYEQGDCLIVKSFDEARMRENLDVDGWELTEEEHRRIAEIPQRKINLGKRYVSEHGPYKSLEELWDGEI

SEQ ID NO: 29245 - protein, 299 aa, Triticum aestivum
MGTAVQGPKPDPIRRAVLRAIEVGYRHFDTAAHYETEAPIGEAAAEAVRSGAVASRDDLFITSKLWCSDAHRDRVVPALRQTLRNLQMEYVDLYLVHWPVSMKPGRFKAPFTAEDFVPFDMRAVWEAMEECHRLGLAKAIGVANFSCKKLETLLSFATIPPTVNQVEVNPVWQQRKLREFCRGKGIQLCTYSPLGAKGTHWGSDAVMDAGVLQEIAASRGKSVAQVCLRWVYEQGDCLIVKSFDEARMRENLDVDGWELTEEEHRRIAEIPQRKINLGKRYVSEHGPYKSLEELWDGEI

SEQ ID NO: 29246 - DNA, 2292 bp, Triticum aestivum
acagccgacgaatacaaaacatttcctgattctggcagccgagacggcactgtcaaaccaaggctcctagcaacaagaaagaatgtcgtcccttgtacgccttatcctgacaatctccttgggcctaaacctcgcagccttgatcaccaccgccaacgaccaattcatctactccggattcagtggttccaacctcgccgtcgacgacaccgccaccatcacgccggacgggctcctggagctgacaaacggcacggcgtaccagaaaggccacgcgttccacccggccccgttccgcctccgcgactccacggccaacggcgtcggcgatggcaaggtgcggtccttctccgtcgccttcgtgttcggcatcgtctccgcctaccccgacttcagcgcccacggcatggccttcgtcatcgccccgcggaggaacttctccgatgctcttcctgccaagtatctgggccttaccaacgtccagaacgatggcaacgccagcaacagcatcttcgccgtggagctggacaccatccagagcgtggagttcaaggacatcaacgccaaccacgtcggcatcgacatcaacggcctgcagtccctacggtcatacaacgccggctactacgatgacgagagcggcgacttccgaggcatgaagctcatcagccgcgaggccatgcaagtgtggattgattaccacggggagaggaaggagatcaacgtgacactggctcccttcgacatggccaagcctgctaggccactcctctcggccagctacgacctctccacggtgctcactgagctggtgtatctcgggttctcagcggcgaccggtcgtgtcaactcgcggcatttcgttctcggttggagcttgggcgtgagcagacaagctccggccatcgacatggccaagctgcccaagttgcctcgggttggccccaagcctcggtccaaggtcctggacatcgttctaccaatagttacggccacatttgtacttggtttgggtggtatccttgtcctggtcatgcggaggagatcaaggtacgctgaactgcgggaagattgggaggttgagttcggaccacaccgcttcttgtacaaggatttattccgtgcaactgacggattcaaggacaagcatctacttggcgcaggggggtttggaagggtatacagaggcgtgcttgagacatctaaactggaggttgcggtgaagagggtgtctcacgagtcaagacaggggatgagggagttcatagctgagattacaagcatcggccgcatccgacatcgtaatcttgtagagttgctcggttactgccgtcgaaaaggtgaacttcttttggtgtacgcctacatgcccaacggaagcctggataaacatctatacaacactagagaggatcagcctactctgaattgggctttgaggtttcagaccgtcaaagatgtcgcgtccggcttgctttatctgcatgagaggtgggagaaagttgtcatccacagagacatcaaggccagcaacgtgctcctcgacaaagacatgaacgcccagcttggtgactttgggctagcaaggctgtacgaccatggggcagactcgcaaaccacgcacgtggtcggcaccatgggttacttggctccggagctcatacgcacgggcagggcgtcccctctgaccgatatgttcgcctttggcatattccttcttgaggttgcatgcggacagaaacccatcaaggagaatgcgcaaggcggacagatagcgctcgtcgactgggtgctggagcactggcgtgatggtacgctcatggagacggtggacgcgaggctccagggtgagttcgacatcgaccaggcagggctggtgctcacgctagcgctcatgtgctcacaccttctcgctagcgcgaggcctggcattggacaagtcatgcgctatctgaccggtgttacgcccctccctgagctcacaccaacagatgtgctcaccttgatgcaaaacaaggggtttgacgaatccgccatgtcatatccggatctggtgtcgagctttggcacaatttccaccctctcgggaggaagataacctcagtgctagcttaattcacggcttcaataagttttactagtattatgcatgtgtagtgccagaagttcgtaattagaattgtaaacccaataattatcctttggccgcagtacactttcaaattaccgtggccaacatgtaagaagttatattgttcaaaactcagaactcgaaacaaggtgatacggggc

SEQ ID NO: 29247 - protein, 671 aa, Triticum aestivum
MSSLVRLILTISLGLNLAALITTANDQFIYSGFSGSNLAVDDTATITPDGLLELTNGTAYQKGHAFHPAPFRLRDSTANGVGDGKVRSFSVAFVFGIVSAYPDFSAHGMAFVIAPRRNFSDALPAKYLGLTNVQNDGNASNSIFAVELDTIQSVEFKDINANHVGIDINGLQSLRSYNAGYYDDESGDFRGMKLISREAMQVWIDYHGERKEINVTLAPFDMAKPARPLLSASYDLSTVLTELVYLGFSAATGRVNSRHFVLGWSLGVSRQAPAIDMAKLPKLPRVGPKPRSKVLDIVLPIVTATFVLGLGGILVLVMRRRSRYAELREDWEVEFGPHRFLYKDLFRATDGFKDKHLLGAGGFGRVYRGVLETSKLEVAVKRVSHESRQGMREFIAEITSIGRIRHRNLVELLGYCRRKGELLLVYAYMPNGSLDKHLYNTREDQPTLNWALRFQTVKDVASGLLYLHERWEKVVIHRDIKASNVLLDKDMNAQLGDFGLARLYDHGADSQTTHVVGTMGYLAPELIRTGRASPLTDMFAFGIFLLEVACGQKPIKENAQGGQIALVDWVLEHWRDGTLMETVDARLQGEFDIDQAGLVLTLALMCSHLLASARPGIGQVMRYLTGVTPLPELTPTDVLTLMQNKGFDESAMSYPDLVSSFGTISTLSGGR

SEQ ID NO: 29248 - protein, 563 aa, Triticum aestivum
MAFVIAPRRNFSDALPAKYLGLTNVQNDGNASNSIFAVELDTIQSVEFKDINANHVGIDINGLQSLRSYNAGYYDDESGDFRGMKLISREAMQVWIDYHGERKEINVTLAPFDMAKPARPLLSASYDLSTVLTELVYLGFSAATGRVNSRHFVLGWSLGVSRQAPAIDMAKLPKLPRVGPKPRSKVLDIVLPIVTATFVLGLGGILVLVMRRRSRYAELREDWEVEFGPHRFLYKDLFRATDGFKDKHLLGAGGFGRVYRGVLETSKLEVAVKRVSHESRQGMREFIAEITSIGRIRHRNLVELLGYCRRKGELLLVYAYMPNGSLDKHLYNTREDQPTLNWALRFQTVKDVASGLLYLHERWEKVVIHRDIKASNVLLDKDMNAQLGDFGLARLYDHGADSQTTHVVGTMGYLAPELIRTGRASPLTDMFAFGIFLLEVACGQKPIKENAQGGQIALVDWVLEHWRDGTLMETVDARLQGEFDIDQAGLVLTLALMCSHLLASARPGIGQVMRYLTGVTPLPELTPTDVLTLMQNKGFDESAMSYPDLVSSFGTISTLSGGR

SEQ ID NO: 29249 - protein, 480 aa, Triticum aestivum
MKLISREAMQVWIDYHGERKEINVTLAPFDMAKPARPLLSASYDLSTVLTELVYLGFSAATGRVNSRHFVLGWSLGVSRQAPAIDMAKLPKLPRVGPKPRSKVLDIVLPIVTATFVLGLGGILVLVMRRRSRYAELREDWEVEFGPHRFLYKDLFRATDGFKDKHLLGAGGFGRVYRGVLETSKLEVAVKRVSHESRQGMREFIAEITSIGRIRHRNLVELLGYCRRKGELLLVYAYMPNGSLDKHLYNTREDQPTLNWALRFQTVKDVASGLLYLHERWEKVVIHRDIKASNVLLDKDMNAQLGDFGLARLYDHGADSQTTHVVGTMGYLAPELIRTGRASPLTDMFAFGIFLLEVACGQKPIKENAQGGQIALVDWVLEHWRDGTLMETVDARLQGEFDIDQAGLVLTLALMCSHLLASARPGIGQVMRYLTGVTPLPELTPTDVLTLMQNKGFDESAMSYPDLVSSFGTISTLSGGR

SEQ ID NO: 29250 - DNA, 1071 bp, Triticum aestivum
caaaaaaaaaaggtttcatctcttcaagcagggcaggccgagccacaggttcctccgcaccctcggccttccctcccatcaccagtttccagccgcgagcgaacccgacgcgagtgcggttcgagggagagagaagaggggactagcaccatggccgccaggctgctgctcctctccttcgattgcccggccgtcgctggcgggcggcggtctcgtctgtctgcaatgccacggatgtcttccggtgctcccctcgtgcggcccccagcctcatccgtcggcgcgttcgcggtcaccgccgccagaggcaacctgccgcaccacacctccgtggttgtggagggtggtggagtttacactgttcgtgactttatgactaaaagggaacaactccatgttgtgaaaccatccacttcagtagatgaagctcttgacaggctggtggagcatcgaataactggctttcctgttaccgatgatcactggaatttggttggtgtggtctcagattatgatctgttagcactggacttgatatcaggaaatggacaggctgaagcggacatatttcctgaggtggacagcacttggaagactttccatcagatacaaaagctcttaagcaaaaccaatgggaaagtagttagtgatgttatgacttctgcacctcttgtggtgcgtgaaactactaaccttgaagatgctgcaaggttacttcttgttactaaataccgcaggctgccagtagtcgacagttcgggcaaattggttggaatcatcacaagagggaacgtcgtcagagctgctcttgagtttaagaaaaatgttgaagggagtctttgaagtggaactgtagatgatcctttccgaaggtggaacttgaacatattgctagtaggcaagcatactgaaaaaattgtttacacaacatgctagtttaattgcagttgggatacatgtattgtgagcatcatgcatcatccttaaatttcaaaattttgaattgaaggaattttcaaagcctctgctaaataaagggcaaagaacccaaaaaaatgcattcaatgtttc

SEQ ID NO: 29251 - protein, 280 aa, Triticum aestivum
QKKKVSSLQAGQAEPQVPPHPRPSLPSPVSSRERTRRECGSREREEGTSTMAARLLLLSFDCPAVAGGRRSRLSAMPRMSSGAPLVRPPASSVGAFAVTAARGNLPHHTSVVVEGGGVYTVRDFMTKREQLHVVKPSTSVDEALDRLVEHRITGFPVTDDHWNLVGVVSDYDLLALDLISGNGQAEADIFPEVDSTWKTFHQIQKLLSKTNGKVVSDVMTSAPLVVRETTNLEDAARLLLVTKYRRLPVVDSSGKLVGIITRGNVVRAALEFKKNVEGSL

SEQ ID NO: 29252 - protein, 230 aa, Triticum aestivum
MAARLLLLSFDCPAVAGGRRSRLSAMPRMSSGAPLVRPPASSVGAFAVTAARGNLPHHTSVVVEGGGVYTVRDFMTKREQLHVVKPSTSVDEALDRLVEHRITGFPVTDDHWNLVGVVSDYDLLALDLISGNGQAEADIFPEVDSTWKTFHQIQKLLSKTNGKVVSDVMTSAPLVVRETTNLEDAARLLLVTKYRRLPVVDSSGKLVGIITRGNVVRAALEFKKNVEGSL

SEQ ID NO: 29253 - protein, 205 aa, Triticum aestivum
MPRMSSGAPLVRPPASSVGAFAVTAARGNLPHHTSVVVEGGGVYTVRDFMTKREQLHVVKPSTSVDEALDRLVEHRITGFPVTDDHWNLVGVVSDYDLLALDLISGNGQAEADIFPEVDSTWKTFHQIQKLLSKTNGKVVSDVMTSAPLVVRETTNLEDAARLLLVTKYRRLPVVDSSGKLVGIITRGNVVRAALEFKKNVEGSL

SEQ ID NO: 29254 - DNA, 1623 bp, Triticum aestivum
aaaaaccctccttcgcccattcattccccactcctttcgccccaaaccccctccacccgccgcattcccatggctaccaccgccgcggctgccgccgccgccgccgccaccgcctccacccgggcaaacagcctctcccgcatcttctcctcctcctcgccaatcgtacaaccacccaagcgcaatcccaagaccaagagcgcgccgaagccgaagccgacgccgaaaccgcccgccgccgatgccgtctccatcgcggacgagaagcccccgaagcccctcggcgcacagcccgccgccaaaggtgattccgacgggaagcacaagctcccgaagccccttgggcttctcgtcaaggccctcagccggcagcgcgaccctgacaagctgatctccggcttcatccaagcgtcaaccgtgtcgtcgcgcttccgcgaccggcaccgcgtgttcgagatagcggtgagccgcctcacttccctcggccgccaagacggcatcgaggccatcatcgaagcgcagatgcccttcctcgagacctcagccgagggattcgcctcgcgcctcatccgcctctacggccgtgcctccatgccatcccacgcggccgcaaccttccataaacttcccgcgcagcataaatccaacatgacattcaactcccttctttcctgttacgccgatgccggagattttgacgggctcactgctgcattccaggagatcccagccacttacccctcgattgttcccaccgtatactcttacaacgtactcatccacgcattgtgccggaagcccgacgtctcagctgctcttgacgctgtccatctcatggagaagatcggtgtttcacctgacattattactttcaacacgctgttgaatgggttttgcaacaatggccgcttggatgaagcagagacagtatgggagatgatcaaggagaggaatttggagcctgacgccaagtgctacaatgccaagctgcggggtttggttgcagaagggaggattgatgatgcagctgctgtgctggagggattggagaaggatgggccaaaacccgatacagtatcctacaatgagttgattcgaggatattgcaaagccgggaagttacaggaggccaagaagctgtatgatgatttggtaaaaaatgagtgtgccccaaataagggaacatatgagactcttctgccacaccttctgcaggctggggagctggattgtgcactgacgtactgttataaaatctttagtcataaaaggaaccttagagtggagtgtggtgtgctgcaggatgtagtgaatgcattggtagatgtattgagggtggaggaggctgccaagattattgtgctggggcggaagaagtactacccccgaaagggtttgaggatgcctgatagtacaaaaaggcagtgaattaagagctgaaactgatgaggaagaagcaatatcagaagaagagtgtgaagtggagcacgagactgaaaaataaattcataggtcagacttttactgatgcatgccaaatttcaccatggcctggtttactctgttcctctgttggcatgatacaacaaaaagtgcaagttaaagtagtggttaaactagtcc

SEQ ID NO: 29255 - protein, 475 aa, Triticum aestivum
KNPPSPIHSPLLSPQTPSTRRIPMATTAAAAAAAAATASTRANSLSRIFSSSSPIVQPPKRNPKTKSAPKPKPTPKPPAADAVSIADEKPPKPLGAQPAAKGDSDGKHKLPKPLGLLVKALSRQRDPDKLISGFIQASTVSSRFRDRHRVFEIAVSRLTSLGRQDGIEAIIEAQMPFLETSAEGFASRLIRLYGRASMPSHAAATFHKLPAQHKSNMTFNSLLSCYADAGDFDGLTAAFQEIPATYPSIVPTVYSYNVLIHALCRKPDVSAALDAVHLMEKIGVSPDIITFNTLLNGFCNNGRLDEAETVWEMIKERNLEPDAKCYNAKLRGLVAEGRIDDAAAVLEGLEKDGPKPDTVSYNELIRGYCKAGKLQEAKKLYDDLVKNECAPNKGTYETLLPHLLQAGELDCALTYCYKIFSHKRNLRVECGVLQDVVNALVDVLRVEEAAKIIVLGRKKYYPRKGLRMPDSTKRQ

SEQ ID NO: 29256 - protein, 452 aa, Triticum aestivum
MATTAAAAAAAAATASTRANSLSRIFSSSSPIVQPPKRNPKTKSAPKPKPTPKPPAADAVSIADEKPPKPLGAQPAAKGDSDGKHKLPKPLGLLVKALSRQRDPDKLISGFIQASTVSSRFRDRHRVFEIAVSRLTSLGRQDGIEAIIEAQMPFLETSAEGFASRLIRLYGRASMPSHAAATFHKLPAQHKSNMTFNSLLSCYADAGDFDGLTAAFQEIPATYPSIVPTVYSYNVLIHALCRKPDVSAALDAVHLMEKIGVSPDIITFNTLLNGFCNNGRLDEAETVWEMIKERNLEPDAKCYNAKLRGLVAEGRIDDAAAVLEGLEKDGPKPDTVSYNELIRGYCKAGKLQEAKKLYDDLVKNECAPNKGTYETLLPHLLQAGELDCALTYCYKIFSHKRNLRVECGVLQDVVNALVDVLRVEEAAKIIVLGRKKYYPRKGLRMPDSTKRQ

SEQ ID NO: 29257 - protein, 301 aa, Triticum aestivum
MPFLETSAEGFASRLIRLYGRASMPSHAAATFHKLPAQHKSNMTFNSLLSCYADAGDFDGLTAAFQEIPATYPSIVPTVYSYNVLIHALCRKPDVSAALDAVHLMEKIGVSPDIITFNTLLNGFCNNGRLDEAETVWEMIKERNLEPDAKCYNAKLRGLVAEGRIDDAAAVLEGLEKDGPKPDTVSYNELIRGYCKAGKLQEAKKLYDDLVKNECAPNKGTYETLLPHLLQAGELDCALTYCYKIFSHKRNLRVECGVLQDVVNALVDVLRVEEAAKIIVLGRKKYYPRKGLRMPDSTKRQ

SEQ ID NO: 29258 - DNA, 1315 bp, Triticum aestivum
aacaagtcgctcgccaaggaggtgatcaagaagtacgccaagaaggtgaagcctctgtacgagaagctgtcccagatccccaagaaccagaacaaccagcctcagccgcagcctccggcgcagcagcagcagtgtttcaagaagccgttcagtttctcgatccggaagaagcggggcgacgaagacaacgccgccgcgtccgcggcggcggcggaggcggaggcgagcaccggcaagtacgcgcactcaaactcgttctctggcaacctccggttcccgcgtcagaagcggtgcgcggcgagctgcccgtcgtcgatgcggtcgtcgccgaaccactccgggatgctctccttcggcggagcaggcggagtcggcttccccgacgtgccggccgcagcagcggcggccatgacaagcagcattggcatgcggcccgtgtcgctgtcggcggcgtcgtcgtcttcgatggaggagctccagagcgccatcgagggcgccatcgcgcactgcaagaacacaatgggcggcgtcgtgtccctgtgcccgcgcaaggtgccggcgtcggcggcggccggcgagatcaccgcgttctgagcgcgcgggtgcatgcatgcatgcactaggattcgtgcgaggagctgagtaaggctgattaatcagtggtatccatccatgtgttaatttttgttcgtttaattagctttgtgtcctttgggcaagactttaagatgatgttggtaaataagggtagttcgaaggggtaaaatgagactctaatcctccttcctttggacgtcttttctcccgcagtgtgaaatttgcgtcggtgtcctccaaatattgcctctaaaacctaaatacatcaaatccatctaagaagatttaaaagttactggaaatgctctcatataggttgagtgtattacagcggaaatatcctagaatcttaagttgggtgtatttcagtgaaaatatcatcttttggatggcctctgcattgtaaaatttgccaaatgaaatccattggtttgagaagaagcggggggttgctagcattctatcccatcaagttcagaatatgaatctgccaacttaaatttgtgatcgaggtgctgatgcaaatacctcatgctccggagaagaggtgtgcagaatccttagttaaccagaccggggttcccttccaaaaaggttaggagtgggattttgggtatgatgtggaagtctgagctagaggtgtcaaattttgttttgtaatgatgtctcgagacaagtgtttattcagctaatcctcctaatatagtttgcctcctgt

SEQ ID NO: 29259 - protein, 206 aa, Triticum aestivum
QVARQGGDQEVRQEGEASVREAVPDPQEPEQPASAAASGAAAAVFQEAVQFLDPEEAGRRRQRRRVRGGGGGGGEHRQVRALKLVLWQPPVPASEAVRGELPVVDAVVAEPLRDALLRRSRRSRLPRRAGRSSGGHDKQHWHAARVAVGGVVVFDGGAPERHRGRHRALQEHNGRRRVPVPAQGAGVGGGRRDHRVLSARVHACMH

SEQ ID NO: 29260 - protein, 197 aa, Triticum aestivum
NKSLAKEVIKKYAKKVKPLYEKLSQIPKNQNNQPQPQPPAQQQQCFKKPFSFSIRKKRGDEDNAAASAAAAEAEASTGKYAHSNSFSGNLRFPRQKRCAASCPSSMRSSPNHSGMLSFGGAGGVGFPDVPAAAAAAMTSSIGMRPVSLSAASSSSMEELQSAIEGAIAHCKNTMGGVVSLCPRKVPASAAAGEITAF

SEQ ID NO: 29261 - DNA, 820 bp, Triticum aestivum
attggagtcggagaggagaggaaagcaggaggaggcgacaggtgctcgcccgccccaccgccgggaagactcgctccgccgcccgccgcccgccgcccgccggagatggcgatgaccgtggaagtgctcgctggacttgcgtgtatgttctccacgagcgttcttttgcaaatcctggcatgtgctttgtacaacaactggtggcctatgttagcagcactcatgtatatcattgtgccaatgccatgcctgttctttggcgacggatccacacggttcttgagtagcggagagggtggagcctggatgaaagccgcaaagttcttgaccggcatgtctgccatgggaagcctcgccatcccggcgatcctgaggcacgctggcctgatcgagacgggggccatgttcatcgagttcacctccttcttcatcctggtgtgcacggttctgtgcttccacagggctaccctggacgaggagtggtaaaggctcgcgcaaggccacaaggagtgcccgagagaagaacgcctgttaggatgtggaaaagaaattccttggtgggagggagctaacgtggaactgtgtacaaagaagcgtgcttcaagcgcttgactactgtatttatgtatacgcgtacccgagattcggtaatctagttggtaatctgtgctgaaccggtcgtgtgaagcatatatgattcggcgcagttgattgacgcaaagcagtctttctatggtcggtttgacacttgtgcattcagaatctgcacttgcagtatggtacaaactattggatggaatgaagtgacaatattttgttt

SEQ ID NO: 29262 - protein, 161 aa, Triticum aestivum
IGVGEERKAGGGDRCSPAPPPGRLAPPPAARRPPEMAMTVEVLAGLACMFSTSVLLQILACALYNNWWPMLAALMYIIVPMPCLFFGDGSTRFLSSGEGGAWMKAAKFLTGMSAMGSLAIPAILRHAGLIETGAMFIEFTSFFILVCTVLCFHRATLDEEW

SEQ ID NO: 29263 - protein, 126 aa, Triticum aestivum
MAMTVEVLAGLACMFSTSVLLQILACALYNNWWPMLAALMYIIVPMPCLFFGDGSTRFLSSGEGGAWMKAAKFLTGMSAMGSLAIPAILRHAGLIETGAMFIEFTSFFILVCTVLCFHRATLDEEW

SEQ ID NO: 29264 - protein, 124 aa, Triticum aestivum
MTVEVLAGLACMFSTSVLLQILACALYNNWWPMLAALMYIIVPMPCLFFGDGSTRFLSSGEGGAWMKAAKFLTGMSAMGSLAIPAILRHAGLIETGAMFIEFTSFFILVCTVLCFHRATLDEEW

SEQ ID NO: 29265 - DNA, 767 bp, Triticum aestivum
aagagaatggagaacagggtaatattacaggaatggtttgaccgcgttgactcggagaaaagtggaagcataacagcggtacagctgaagactgctcttgctgtgggcaacctggaatttccgctctcagttgttcagcaaatgatcaggatgtacgatttcgacaggaatggtactatgagctttcaagaatttgttgcactcaacaacttccttcttaaggttcaacatgcattttctgatctagagaggggtcgtggttttcttgtacctgatgatgtatttgaggctttgggaaaaattggtttcatgctggattctcctgctttttactctgtctgcgagagctttgatcaaagtaaaaatgggaggtttcggctggatgacttaatatcaatctgtatattcttacaatcagcacggaacctatttaattcatttgatacagctaaacaaggcagagttactctcgatctgaatcaatttgtctattgtactgccaattgcagaatatgattcaactatatgacggtttgagaagatgattcacaaatactgcactttgtaataccataaagtcatcttagagtaagttaagttgtgatggtgttgtataagatgaaaacatctcgggtttggatactatttgtcatctgtctgcaaaatactgtggttttttttttctttccagatgatgtaattttgtttataaaacgtaagttgttataaaacatcttgagttatgataacttgtgaagttgattccg

SEQ ID NO: 29266 - protein, 171 aa, Triticum aestivum
KRMENRVILQEWFDRVDSEKSGSITAVQLKTALAVGNLEFPLSVVQQMIRMYDFDRNGTMSFQEFVALNNFLLKVQHAFSDLERGRGFLVPDDVFEALGKIGFMLDSPAFYSVCESFDQSKNGRFRLDDLISICIFLQSARNLFNSFDTAKQGRVTLDLNQFVYCTANCRI

SEQ ID NO: 29267 - protein, 169 aa, Triticum aestivum
MENRVILQEWFDRVDSEKSGSITAVQLKTALAVGNLEFPLSVVQQMIRMYDFDRNGTMSFQEFVALNNFLLKVQHAFSDLERGRGFLVPDDVFEALGKIGFMLDSPAFYSVCESFDQSKNGRFRLDDLISICIFLQSARNLFNSFDTAKQGRVTLDLNQFVYCTANCRI

SEQ ID NO: 29268 - protein, 124 aa, Triticum aestivum
MIRMYDFDRNGTMSFQEFVALNNFLLKVQHAFSDLERGRGFLVPDDVFEALGKIGFMLDSPAFYSVCESFDQSKNGRFRLDDLISICIFLQSARNLFNSFDTAKQGRVTLDLNQFVYCTANCRI

SEQ ID NO: 29269 - DNA, 1413 bp, Triticum aestivum
  misc_feature (578)..(578): n is a, c, g, or t
  misc_feature (1401)..(1401): n is a, c, g, or t
acccgcgacgaattccgcaaggagagaacgcgaaatatagatccgccgtgaaggcccaacggcggctcaccgaaacccggggccgccgccggcgctcgcacccgaagcccccactccgcacgggcagtccaggcagagatggtggcgatctcgatgtaccgcggcaacctccaccggggcggggacgacgccgcgcgccgctggccggtgcccccacccacgctctccgcgtcccagttccgccgcctcctccaccgccggtccctcgccgtctcccgcctcgccggggctccccggcccaactcccccaactcccgcccggacgacggcgccgcggggcccgtggccgtgggggaggcgccggaggtggacgggggtcagcagcagcatcaggccgagcggcaggaggaggaggggcatgatgtgcagatgcagcagcagcagcagcagggggaggaagaggggcagggtgtgcaggatcaacagggggagggagatggccaagacgagcagcagcaaggagatgaggaggagcaggaggagggggcggtggaggatgtggaaatggacgatgcggnggaggtggtcgccggagatgctgatgccggcggcaatggtgaccctgaagaagggcaaggcgaaagcgaaggcttcgaccccaactcggaggtgggtcaacctgatggagttgaagaaaggaagagagagttgactgacaagctggataccttaagtaagaaaaagcatgatcttgtgcagatgctgaagcagattttaaatgccgaagaagaaatcagaacacgtagcatgcaggtttcgctgcgtgctgccatgcctcagccgccagaaaacacagctgatggaagtgttcctagacaggtgccgagaatgaccgttgatgtcaatttcagcgagtttgctggggagtcagatgctggttccaaccagggcactcctgggcgccccttgcatcatgtccacagtatttctccttcaacagcctcctttgctaggtctccattcggttctcgcaaccacaaacctcgcaacactccaagaagtccagcacctttctttacagcaagcccgtctcgcttcgcaggtaccgggcatcaaggacaccacccctcggcatcattaccagcaggcaactttgtagcatcgtcgccttcccctgctgcatccggtggctcttcctctgtattcagggactatcgcccgcccagttcaacataattccacaaaacccgaatgaaggccaatgtacatgagtcaccctgaatagtttgaatgctctttgtgctcctccttgcattgttactttattgacaatattatcagattgcgaagagcaactcagggagaacaaggtcatgttgaagtatcattttgtatatctgngccagtgctgct

SEQ ID NO: 29270 - protein, 365 aa, Triticum aestivum
  misc_feature (147)..(147): Xaa can be any naturally occurring amino acid
MVAISMYRGNLHRGGDDAARRWPVPPPTLSASQFRRLLHRRSLAVSRLAGAPRPNSPNSRPDDGAAGPVAVGEAPEVDGGQQQHQAERQEEEGHDVQMQQQQQQGEEEGQGVQDQQGEGDGQDEQQQGDEEEQEEGAVEDVEMDDAXEVVAGDADAGGNGDPEEGQGESEGFDPNSEVGQPDGVEERKRELTDKLDTLSKKKHDLVQMLKQILNAEEEIRTRSMQVSLRAAMPQPPENTADGSVPRQVPRMTVDVNFSEFAGESDAGSNQGTPGRPLHHVHSISPSTASFARSPFGSRNHKPRNTPRSPAPFFTASPSRFAGTGHQGHHPSASLPAGNFVASSPSPAASGGSSSVFRDYRPPSST

SEQ ID NO: 29271 - protein, 360 aa, Triticum aestivum
  misc_feature (142)..(142): Xaa can be any naturally occurring amino acid
MYRGNLHRGGDDAARRWPVPPPTLSASQFRRLLHRRSLAVSRLAGAPRPNSPNSRPDDGAAGPVAVGEAPEVDGGQQQHQAERQEEEGHDVQMQQQQQQGEEEGQGVQDQQGEGDGQDEQQQGDEEEQEEGAVEDVEMDDAXEVVAGDADAGGNGDPEEGQGESEGFDPNSEVGQPDGVEERKRELTDKLDTLSKKKHDLVQMLKQILNAEEEIRTRSMQVSLRAAMPQPPENTADGSVPRQVPRMTVDVNFSEFAGESDAGSNQGTPGRPLHHVHSISPSTASFARSPFGSRNHKPRNTPRSPAPFFTASPSRFAGTGHQGHHPSASLPAGNFVASSPSPAASGGSSSVFRDYRPPSST

SEQ ID NO: 29272 - protein, 268 aa, Triticum aestivum
  misc_feature (50)..(50): Xaa can be any naturally occurring amino acid
MQQQQQQGEEEGQGVQDQQGEGDGQDEQQQGDEEEQEEGAVEDVEMDDAXEVVAGDADAGGNGDPEEGQGESEGFDPNSEVGQPDGVEERKRELTDKLDTLSKKKHDLVQMLKQILNAEEEIRTRSMQVSLRAAMPQPPENTADGSVPRQVPRMTVDVNFSEFAGESDAGSNQGTPGRPLHHVHSISPSTASFARSPFGSRNHKPRNTPRSPAPFFTASPSRFAGTGHQGHHPSASLPAGNFVASSPSPAASGGSSSVFRDYRPPSST

SEQ ID NO: 29273 - DNA, 663 bp, Triticum aestivum
aatcgaaaaactccaaatcccccaaccctcccagcgctcctccctccccaacctaccggcgcatctccgacgacatggcccgcaccaagcagacggcgaggaagtccaccggcggcaaggcgccgaggaagcagctggccaccaaggccgcccgcaagtccgccccggccaccggcggcgtcaagaagccccaccgcttccgccccggcaccgtcgcgctccgggagatccgcaagtaccagaagagcaccgagctgctcatccgcaagctccccttccagcgcctcgtccgcgagatcgcccaggacttcaagaccgacctccgcttccagtcctccgccgtctccgcgctgcaggaggccgccgaggcctacctcgtcggcctcttcgaggacaccaacctctgcgccatccacgccaagcgcgtcaccatcatgcccaaggacatccagctcgcccgccgcatccgtggcgagagggcctaggccgcgatctgcaatccatgcgtcgtctgttagatcgttgttaggaagtgtgtgtgctcgtagtgtttcagaatgtgcctgtgttgttcttgtcatggtgggtctgttatgcctaatctgatggtaccttcttgttgccatcagctatggaaatgaaaaatgttggcttcctgttccc

SEQ ID NO: 29274 - protein, 201 aa, Triticum aestivum
NRKTPNPPTLPALLPPQPTGASPTTWPAPSRRRGSPPAARRRGSSWPPRPPASPPRPPAASRSPTASAPAPSRSGRSASTRRAPSCSSASSPSSASSARSPRTSRPTSASSPPPSPRCRRPPRPTSSASSRTPTSAPSTPSASPSCPRTSSSPAASVARGPRPRSAIHASSVRSLLGSVCARSVSECACVVLVMVGLLCLI

SEQ ID NO: 29275 - protein, 175 aa, Triticum aestivum
IEKLQIPQPSQRSSLPNLPAHLRRHGPHQADGEEVHRRQGAEEAAGHQGRPQVRPGHRRRQEAPPLPPRHRRAPGDPQVPEEHRAAHPQAPLPAPRPRDRPGLQDRPPLPVLRRLRAAGGRRGLPRRPLRGHQPLRHPRQARHHHAQGHPARPPHPWREGLGRDLQSMRRLLDRC

SEQ ID NO: 29276 - protein, 160 aa, Triticum aestivum
SKNSKSPNPPSAPPSPTYRRISDDMARTKQTARKSTGGKAPRKQLATKAARKSAPATGGVKKPHRFRPGTVALREIRKYQKSTELLIRKLPFQRLVREIAQDFKTDLRFQSSAVSALQEAAEAYLVGLFEDTNLCAIHAKRVTIMPKDIQLARRIRGERA

SEQ ID NO: 29277 - protein, 136 aa, Triticum aestivum; identical to SEQ ID NO: 13956

SEQ ID NO: 29278 - DNA, 1593 bp, Triticum aestivum
ctctcagtttctctctcacacacagctctctctctctctctctccttctctccctctctcaaatactccccatgcccatcgccgtcctcctttgaagaagccaatggccagcaatggcatggcgtcctctccctccgccttcttccctccgaatttcctcctccacatgcagcaagcaccaccgcagcatgacccccaagaacaccaccagcagcaccaccaccaccaccatgagcaccacctccctcctccccatccccagcacaaccccttcctcccctccccccaatgcccctccctccaggacttccgtggcggtctgtcgccaatgctggggaagcgcccggcgatgtacgggggcggcggcgacgggggctgcggcggcgacgaggtgaccggcggaggcgcgaacgaggaggagacgtcggacgacgggtcgcagctgggcggcgagaagaagcggcggctgaacgtggagcaggtgcggacgctggagaagaacttcgaggtggccaacaagctggagccggagcgcaagatgcagctggcccgcgcgctggggctgcagccgcggcaggtggccatctggttccagaaccgccgcgcccggtggaagacaaagcagctggagaaggactacgacgtgctcaagcgccagttcgacgccgtcaaggccgagaacgacgccctcctctcccacaacaagaagctccagtccgagatactgggactgaagggatgcagggaggcggcgtcggagctgatcaacctcaacaaggagacggaggcgtcctgcagcaaccgcagcgagaacagctccgagatcaacctcgacatctcgcgcacgccgccgtccgacggccccatggacgctccgccctcgcaccagcagggcggcgggggcgggggcatgatccccttctacccctccgtcgcgcgccccgcgggcgtcgacatcgaccatctcctccacgcctccgtccccaagatggagcaccaccacggcggccccgacacgcccagcttcggcaacctgctgtgcggcgtcgacgagccgccgccgttctggccgtgggcggatcaccagcagttcaactgatcgcccggtcggtcgatcgggacgatatatatctttgttgcagtcaatgacgtctgctttgcttgcatggtcagcaatgagcgtgcataaatattcgatgcgtttggattcttgatgaggacgtacgtacggtggagacggttgtacatgcatgtttgatgagaggcaagttcagttcatccatgaggtacctactgaagacgatggtgatgcgatttgagtcatggatcgatcgagttgatgatgaatagtggggctacgtgtaggggaataagtccggtgtgtgtgaagcgtgtgtaggtagattttggagttgaatagtacctacctttggtattcttattattttttcttgttttttcatttttcctcttccttttgttcccatacataaatttgtgaattgtgaggcggtgttgatccgttgttgtataggttaatggtgcatgtggtgcttattccccctatttatatatggattatgtgaagactgt

SEQ ID NO: 29279 - protein, 365 aa, Triticum aestivum
SQFLSHTQLSLSLSPSLPLSNTPHAHRRPPLKKPMASNGMASSPSAFFPPNFLLHMQQAPPQHDPQEHHQQHHHHHHEHHLPPPHPQHNPFLPSPQCPSLQDFRGGLSPMLGKRPAMYGGGGDGGCGGDEVTGGGANEEETSDDGSQLGGEKKRRLNVEQVRTLEKNFEVANKLEPERKMQLARALGLQPRQVAIWFQNRRARWKTKQLEKDYDVLKRQFDAVKAENDALLSHNKKLQSEILGLKGCREAASELINLNKETEASCSNRSENSSEINLDISRTPPSDGPMDAPPSHQQGGGGGGMIPFYPSVARPAGVDIDHLLHASVPKMEHHHGGPDTPSFGNLLCGVDEPPPFWPWADHQQFN

SEQ ID NO: 29280 - protein, 331 aa, Triticum aestivum
MASNGMASSPSAFFPPNFLLHMQQAPPQHDPQEHHQQHHHHHHEHHLPPPHPQHNPFLPSPQCPSLQDFRGGLSPMLGKRPAMYGGGGDGGCGGDEVTGGGANEEETSDDGSQLGGEKKRRLNVEQVRTLEKNFEVANKLEPERKMQLARALGLQPRQVAIWFQNRRARWKTKQLEKDYDVLKRQFDAVKAENDALLSHNKKLQSEILGLKGCREAASELINLNKETEASCSNRSENSSEINLDISRTPPSDGPMDAPPSHQQGGGGGGMIPFYPSVARPAGVDIDHLLHASVPKMEHHHGGPDTPSFGNLLCGVDEPPPFWPWADHQQFN

SEQ ID NO: 29281 - protein, 326 aa, Triticum aestivum
MASSPSAFFPPNFLLHMQQAPPQHDPQEHHQQHHHHHHEHHLPPPHPQHNPFLPSPQCPSLQDFRGGLSPMLGKRPAMYGGGGDGGCGGDEVTGGGANEEETSDDGSQLGGEKKRRLNVEQVRTLEKNFEVANKLEPERKMQLARALGLQPRQVAIWFQNRRARWKTKQLEKDYDVLKRQFDAVKAENDALLSHNKKLQSEILGLKGCREAASELINLNKETEASCSNRSENSSEINLDISRTPPSDGPMDAPPSHQQGGGGGGMIPFYPSVARPAGVDIDHLLHASVPKMEHHHGGPDTPSFGNLLCGVDEPPPFWPWADHQQFN

SEQ ID NO: 29282 - DNA, 802 bp, Triticum aestivum
gcaacaaaaagtctccgctatcctcttcccctcctctgctctctctcgatcttcccctccctgtctccctcctcggcgctccgccggcttcttgctcccccgcgttcgccgcgcgcgctagcgcgaccgatggcgtccggcgacagcaagccgaggagcgaggaggagtggcgcgccgtcctcaaccccgagcagttccgcatcctccgcctcaagggcaccgagttgccgggaacaggcgagtacaacaagttctacggtgatggggcgtacaagtgcgctggctgcggaacgcccctgtacaaatccaccaccaaatttgactctggctgtggctggccggccttctttgaaggacttcctggagccatacacaggacgcctgaccctgatggtaggagggtagagatcacatgtgcatcttgcggcgggcatttgggccatgtcttcaagggagaaggcttcaagacgcctaccgatgagcgccactgcgtcaacagcgtttccatcaagtttactcctgcctcctcctgaatccagttcttgagtcatttggatgaacttctcaggtcgtaaaaccgtgaaaacaataatgattaggtcccagagcccgttttctcgaagttatgtggatgaatttccccgatccgaagttgcggaaagtcggtaaataaaacatggataggatcttgcaagtttctgctgttaaccaggctgtaatcctgtactcctaatctgttcggtctgaaagttttctgcgtcatgttttggaactatatatacgtattatatacaccatcct

SEQ ID NO: 29283 - protein, 177 aa, Triticum aestivum
ATKSLRYPLPLLCSLSIFPSLSPSSALRRLLAPPRSPRALARPMASGDSKPRSEEEWRAVLNPEQFRILRLKGTELPGTGEYNKFYGDGAYKCAGCGTPLYKSTTKFDSGCGWPAFFEGLPGAIHRTPDPDGRRVEITCASCGGHLGHVFKGEGFKTPTDERHCVNSVSIKFTPASS

SEQ ID NO: 29284 - protein, 134 aa, Triticum aestivum
MASGDSKPRSEEEWRAVLNPEQFRILRLKGTELPGTGEYNKFYGDGAYKCAGCGTPLYKSTTKFDSGCGWPAFFEGLPGAIHRTPDPDGRRVEITCASCGGHLGHVFKGEGFKTPTDERHCVNSVSIKFTPASS

SEQ ID NO: 29285 - DNA, 1241 bp, Triticum aestivum
gtccgtgtccaaaaccgagcaaaacctcaaagcgcagacaagagaaggtcgctcgccaccgaggggaatggcggcgccgccggacagcaagtctgataaatccccagaggagctcctgtgcgcggcggcggaggccggtaacgacgatgctatcgccgagatcatttcctctggcgccgaccccacctacttcgacgcctccggcatgacgccactcatgcgcgcggcctccggcggccacgccgctgccgcgcggctcctgctcgatgccggcgcgccctggaacgcgctctcccccgaaggtctctccgcgggtgaccttacctccgaccccgccacatacgacctgctcctcgaccacgccctgcgctccgagctcatcctcggcaccgtcgcccgccgccaggcggcctccgcgaactcctccgacggcgtccccgccgagacctacctcgactcgagggtttcgttcagcgaggaccgggtgatggatgcggagagcaaggcggtgatgatggagtgggagcgtccgctgatggaggcgcacgcgcgggcggtgtgcgccgccggcggcggcaaggtgctcaacgtggggttcgggatggggctcgtggaccaggcgatacagaggtacgagcccgaggagcacaccatcatcgaggcccacccggaggtttacgcccggatgctcaagcttgggtggggtgagaagaagaacgtcaggatcctcttcgggcgatggcaggatgtgatcccgcagctcggctcgtatgatggtatattcttcgacacctacggggagtactacgaggacatgagggagttccacgagcacctcccgaagctgctgaatccgggaggggtctactcctacttcaatgggctgtgcggcgacaatgccttcttccacgtggtgtactgccagctggtggcgatggagctggcgagcctcgggtactcgacgcagttcgtccctctccccgtcagggactgcctcaaggcggaggtgtgggagggggtgaagcagaagtactggcagctcgacacctaccacctcccggtctgccaggccgaatctgaatcagagtagaatttctaccgtgttgctactgatcgagttttcgctagctcttcgctgctgctgtaagtttgttcaggtcttcaggatcaggtcaagcttgcctgcgtgcgtgtttgtggattgcagtcgatgatagaactcccgtggaaaatttggttcc

SEQ ID NO: 29286 - protein, 362 aa, Triticum aestivum
SVSKTEQNLKAQTREGRSPPRGMAAPPDSKSDKSPEELLCAAAEAGNDDAIAEIISSGADPTYFDASGMTPLMRAASGGHAAAARLLLDAGAPWNALSPEGLSAGDLTSDPATYDLLLDHALRSELILGTVARRQAASANSSDGVPAETYLDSRVSFSEDRVMDAESKAVMMEWERPLMEAHARAVCAAGGGKVLNVGFGMGLVDQAIQRYEPEEHTIIEAHPEVYARMLKLGWGEKKNVRILFGRWQDVIPQLGSYDGIFFDTYGEYYEDMREFHEHLPKLLNPGGVYSYFNGLCGDNAFFHVVYCQLVAMELASLGYSTQFVPLPVRDCLKAEVWEGVKQKYWQLDTYHLPVCQAESESE

SEQ ID NO: 29287 - protein, 340 aa, Triticum aestivum
MAAPPDSKSDKSPEELLCAAAEAGNDDAIAEIISSGADPTYFDASGMTPLMRAASGGHAAAARLLLDAGAPWNALSPEGLSAGDLTSDPATYDLLLDHALRSELILGTVARRQAASANSSDGVPAETYLDSRVSFSEDRVMDAESKAVMMEWERPLMEAHARAVCAAGGGKVLNVGFGMGLVDQAIQRYEPEEHTIIEAHPEVYARMLKLGWGEKKNVRILFGRWQDVIPQLGSYDGIFFDTYGEYYEDMREFHEHLPKLLNPGGVYSYFNGLCGDNAFFHVVYCQLVAMELASLGYSTQFVPLPVRDCLKAEVWEGVKQKYWQLDTYHLPVCQAESESE

SEQ ID NO: 29288 - protein, 294 aa, Triticum aestivum
MTPLMRAASGGHAAAARLLLDAGAPWNALSPEGLSAGDLTSDPATYDLLLDHALRSELILGTVARRQAASANSSDGVPAETYLDSRVSFSEDRVMDAESKAVMMEWERPLMEAHARAVCAAGGGKVLNVGFGMGLVDQAIQRYEPEEHTIIEAHPEVYARMLKLGWGEKKNVRILFGRWQDVIPQLGSYDGIFFDTYGEYYEDMREFHEHLPKLLNPGGVYSYFNGLCGDNAFFHVVYCQLVAMELASLGYSTQFVPLPVRDCLKAEVWEGVKQKYWQLDTYHLPVCQAESESE

SEQ ID NO: 29289 - DNA, 1338 bp, Triticum aestivum
agtaaaattcattgacctacgacacgagtagtcatttcaatccccccgaaaccctgaaccgccgctgccgccgccgccgccgcccccgcagccaagccgagcagccatggagggatccgccgccgcggcgccgctccgcacgcgcgtgtgcatcatcggcagcggcccggccgcgcacacggcggccatctacgcggcccgcgcggagctcaagcccgtgctcttcgagggctggatggccaacgacatcgccgcggggggccagctcaccaccaccaccgacgtcgagaacttcccgggcttccccaccggcatcatgggcatcgacctcatggacaactgccgcgcccagtccgcccgcttcggcaccaacatcctctccgagaccgtcaccgaggtcgacttctccgcccgccccttccgcgtcacctccgactccaccaccgtcctcgccgacaccgtcgtcgtcgccacgggcgccgtcgcgcgccgcctccacttccccgggtccgaaacctactggaaccgcggcatctccgcctgcgccgtctgcgacggcgccgcgcccatcttccggaacaagcccatcgccgtcatcggcggcggcgactctgccatggaggagggaaacttcctcaccaagtacggatcccaagtgtacatcatccaccggcgcaacaccttccgcgcctccaagattatgcaggccagggcgctctccaatcctaagatccaggttgtctgggactccgaggtcgtcgaggcctacggcggcgcaggcggtggcccattagctggcgtcaaggtcaagaacttggtgactggtgaggctctgaccttaaggtgtccgggctcttcttcgccatcgggcatgagccggccaccaagtttctcaatgggcagcttgagctccatgccgatgggtatgtggccaccaagccgggctctacacataccagtgtggagggggtctttgctgctggagatgtgcaggataagaagtatcgtcaggccattactgccgctggatcagggtgcatggctgctttggacgcggagccctatctgcaggaggtgggtgcacaggaggccaagtctgattgactatctccgggggaagcgacgaccatcagctcaccgaaagccgcactctgagcttgatgaagttggttgtccagtttcattatgctgcttagcagcaccgtattattattctccgtcattaggaggccctagatcaactttcattagtgtgctggaaatgattcatattttccgctggtggaactcaaactgattctctatgtatcattggcgaaatcacattattattctgtg

SEQ ID NO: 29290 - protein, 396 aa, Triticum aestivum
MEGSAAAAPLRTRVCIIGSGPAAHTAAIYAARAELKPVLFEGWMANDIAAGGQLTTTTDVENFPGFPTGIMGIDLMDNCRAQSARFGTNILSETVTEVDFSARPFRVTSDSTTVLADTVVVATGAVARRLHFPGSETYWNRGISACAVCDGAAPIFRNKPIAVIGGGDSAMEEGNFLTKYGSQVYIIHRRNTFRASKIMQARALSNPKIQVVWDSEVVEAYGGAGGGPLAGVKVKNLVTGEALTLRCPGSSSPSGMSRPPSFSMGSLSSMPMGMWPPSRALHIPVWRGSLLLEMCRIRSIVRPLLPLDQGAWLLWTRSPICRRWVHRRPSLIDYLRGKRRPSAHRKPHSELDEVGCPVSLCCLAAPYYYSPSLGGPRSTFISVLEMIHIFRWWNSN

SEQ ID NO: 29291 - protein, 353 aa, Triticum aestivum
MANDIAAGGQLTTTTDVENFPGFPTGIMGIDLMDNCRAQSARFGTNILSETVTEVDFSARPFRVTSDSTTVLADTVVVATGAVARRLHFPGSETYWNRGISACAVCDGAAPIFRNKPIAVIGGGDSAMEEGNFLTKYGSQVYIIHRRNTFRASKIMQARALSNPKIQVVWDSEVVEAYGGAGGGPLAGVKVKNLVTGEALTLRCPGSSSPSGMSRPPSFSMGSLSSMPMGMWPPSRALHIPVWRGSLLLEMCRIRSIVRPLLPLDQGAWLLWTRSPICRRWVHRRPSLIDYLRGKRRPSAHRKPHSELDEVGCPVSLCCLAAPYYYSPSLGGPRSTFISVLEMIHIFRWWNSN

SEQ ID NO: 29292 - protein, 326 aa, Triticum aestivum
MGIDLMDNCRAQSARFGTNILSETVTEVDFSARPFRVTSDSTTVLADTVVVATGAVARRLHFPGSETYWNRGISACAVCDGAAPIFRNKPIAVIGGGDSAMEEGNFLTKYGSQVYIIHRRNTFRASKIMQARALSNPKIQVVWDSEVVEAYGGAGGGPLAGVKVKNLVTGEALTLRCPGSSSPSGMSRPPSFSMGSLSSMPMGMWPPSRALHIPVWRGSLLLEMCRIRSIVRPLLPLDQGAWLLWTRSPICRRWVHRRPSLIDYLRGKRRPSAHRKPHSELDEVGCPVSLCCLAAPYYYSPSLGGPRSTFISVLEMIHIFRWWNSN

SEQ ID NO: 29293 - DNA, 864 bp, Triticum aestivum
aactgaccatccagaccagtccgggctggcctccttcctaaaccccacacgcaaccgcccaccacaaaccccggccgccggccggcccgcgagttcgaccgagtccaactaagatcagtcccgttccggccatgatgagcggcggtggcagtggcagcggcagcggcgcggggccgagcagctccagcttcgagcggcacgcgaagcggcggcccccggcgacgccggcgtcggaccagcagcggaagctgctgcggctgtcggtgcagcacgggcagggggacgacgacgcgctggcggcgggcgtggtgccgccggtgacggtggtcctggacgggcgctgcatctgccaccgcatccagctcagctgccacaccgggtaccgcagcctcgcgggcgccctccgccgcatgttcgtggacgacgcggccgagggcgacgacgacgggctcgacctctccaatgccgtccccgggcacgtcgtggcgtacgaggacatggaggacgacctcctcctcgccggcgacctcaactggaaggacttctgccgtgtggccaagaggatccggatcatcccggcaaagtcgacgacccgaaggatcaagcaatgcggaggcgcggttaactagctagctagtcagccccgcccggtgaagaaccacaggtgtaattaagccatacctctgcagctccaccccactctcagctcagctcagctcaactccggcgaaaaaaagatcaagtccggccggccggctgtcgagaactcgacgtctccctaaaatcaaatcgatccaaccttttttcatttttcgctgtatcaaaagttcaatgtcgcattgtcacaatgaaaagagaaaagag

SEQ ID NO: 29294 - protein, 165 aa, Triticum aestivum
MMSGGGSGSGSGAGPSSSSFERHAKRRPPATPASDQQRKLLRLSVQHGQGDDDALAAGVVPPVTVVLDGRCICHRIQLSCHTGYRSLAGALRRMFVDDAAEGDDDGLDLSNAVPGHVVAYEDMEDDLLLAGDLNWKDFCRVAKRIRIIPAKSTTRRIKQCGGAVN

SEQ ID NO: 29295 - protein, 164 aa, Triticum aestivum
MSGGGSGSGSGAGPSSSSFERHAKRRPPATPASDQQRKLLRLSVQHGQGDDDALAAGVVPPVTVVLDGRCICHRIQLSCHTGYRSLAGALRRMFVDDAAEGDDDGLDLSNAVPGHVVAYEDMEDDLLLAGDLNWKDFCRVAKRIRIIPAKSTTRRIKQCGGAVN

SEQ ID NO: 29296 - DNA, 1627 bp, Triticum aestivum
tctccctctccctatccatcccatcctctcccccgaccccgcgcacccgccagagaagccgcctccatggcctccctcgccgccgcctccgcctccacggcgctcctcttcccctccacctcctcctccaagccccgcctcccgctctccacatcccttggcttctccgcgcccgcgcggtcacgccgcgccactgcggtggcggggagctccggcaggcgcccggggctgctcgtcgtgcgcgccgccaggggcaagttcgagcggaacaagccccacgtcaacatcggcaccatcggccacgtcgaccacggcaagaccaccctcaccgccgcgctcaccatggtgctcgcctccgtcgggggcagcgcgcccaagaagtacgacgagatcgacgccgcccctgaggagcgcgcccgtggtatcaccatcaacaccgccaccgtcgagtacgagacggagacgcgccactacgcgcacgtcgactgccccggtcacgccgactacgtcaagaacatgattaccggggccgcccagatggacggcgccatcctcgtcgtctccggcgccgacggccccatgccgcagaccaaggagcacatcctgctcgccaaccaggtcggtgtccccagcattgttgttttcctcaacaagaaggaccaggtcgacgacgaggagctgctcgagctcgtcgatctcgaggtccgcgagctgctcacggcctatgaatacgatggtgacaatgtgccaatcgtctccggctctgcactcagagcgctcgaggccctcatggccacccctggcctcaagcgtggggataacgagtgggtggatggcatcttctccttgattgattccgtggatacccacatccctgtcccgcagaggcagaccgacctccccttcttgctcgctgttgaggatgttttctccatcactggtcgtggtacagttgccactggccgtatcgagcgtggcaccgtcaaggttggggacccagtcgacctcgtcggcatcagggagacccgcaatgccacggtcactggtgttgagatgttccagaagaccatggatgatgccattgctggggacaatgttgggcttctgctccgtggtatgcagaaggaagacattgagagaggcatggtgttggcaaagcccggttccatcacgccacacaccaagtttgaggctgttgtgtatgtgctcaagaaggaggagggtggccggcactccccatttttccctggttaccgtccgcaattctacatgcggactactgatgtcacggggaatgtgacaaacattatgaacgacaaggatgaggaggcgaagatgtgcatgccaggtgaccgtatcaagatggttgtggagctcatccagcctgtggcttgtgagcagggaatgaggtttgccatccgtgaaggtggcaagaccgtcggtgccggtgtcatcaataatatcattcagtaatgtggatggaggatatccaccgtgagaattttcctcatttactcttttgcgaaatgctatgtagttgttattatgcgtttagggaaggctcttgtgaaattgtagtatggcacatttttcttcaagtgaaattgcatactttgtagtattcacg

SEQ ID NO: 29297 - protein, 490 aa, Triticum aestivum
SPSPYPSHPLPRPRAPAREAASMASLAAASASTALLFPSTSSSKPRLPLSTSLGFSAPARSRRATAVAGSSGRRPGLLVVRAARGKFERNKPHVNIGTIGHVDHGKTTLTAALTMVLASVGGSAPKKYDEIDAAPEERARGITINTATVEYETETRHYAHVDCPGHADYVKNMITGAAQMDGAILVVSGADGPMPQTKEHILLANQVGVPSIVVFLNKKDQVDDEELLELVDLEVRELLTAYEYDGDNVPIVSGSALRALEALMATPGLKRGDNEWVDGIFSLIDSVDTHIPVPQRQTDLPFLLAVEDVFSITGRGTVATGRIERGTVKVGDPVDLVGIRETRNATVTGVEMFQKTMDDAIAGDNVGLLLRGMQKEDIERGMVLAKPGSITPHTKFEAVVYVLKKEEGGRHSPFFPGYRPQFYMRTTDVTGNVTNIMNDKDEEAKMCMPGDRIKMVVELIQPVACEQGMRFAIREGGKTVGAGVINNIIQ

SEQ ID NO: 29298 - protein, 468 aa, Triticum aestivum
MASLAAASASTALLFPSTSSSKPRLPLSTSLGFSAPARSRRATAVAGSSGRRPGLLVVRAARGKFERNKPHVNIGTIGHVDHGKTTLTAALTMVLASVGGSAPKKYDEIDAAPEERARGITINTATVEYETETRHYAHVDCPGHADYVKNMITGAAQMDGAILVVSGADGPMPQTKEHILLANQVGVPSIVVFLNKKDQVDDEELLELVDLEVRELLTAYEYDGDNVPIVSGSALRALEALMATPGLKRGDNEWVDGIFSLIDSVDTHIPVPQRQTDLPFLLAVEDVFSITGRGTVATGRIERGTVKVGDPVDLVGIRETRNATVTGVEMFQKTMDDAIAGDNVGLLLRGMQKEDIERGMVLAKPGSITPHTKFEAVVYVLKKEEGGRHSPFFPGYRPQFYMRTTDVTGNVTNIMNDKDEEAKMCMPGDRIKMVVELIQPVACEQGMRFAIREGGKTVGAGVINNIIQ

SEQ ID NO: 29299 - protein, 376 aa, Triticum aestivum
MVLASVGGSAPKKYDEIDAAPEERARGITINTATVEYETETRHYAHVDCPGHADYVKNMITGAAQMDGAILVVSGADGPMPQTKEHILLANQVGVPSIVVFLNKKDQVDDEELLELVDLEVRELLTAYEYDGDNVPIVSGSALRALEALMATPGLKRGDNEWVDGIFSLIDSVDTHIPVPQRQTDLPFLLAVEDVFSITGRGTVATGRIERGTVKVGDPVDLVGIRETRNATVTGVEMFQKTMDDAIAGDNVGLLLRGMQKEDIERGMVLAKPGSITPHTKFEAVVYVLKKEEGGRHSPFFPGYRPQFYMRTTDVTGNVTNIMNDKDEEAKMCMPGDRIKMVVELIQPVACEQGMRFAIREGGKTVGAGVINNIIQ

SEQ ID NO: 29300 - DNA, 2306 bp, Triticum aestivum
atccctctcccaactccaaaccatctccgccgccgccgccgaacaccacctccaccgcccacgaaatcttctccccgaagacgcgcgaaccccgccggagacgagaggcatggacgccaagtcggtgacgccgggcgccgtggctctcatcctcgccaaccccacgccggagtcgcccgacgacgtgccggagatcgtcgtgcaggtcctcgacctcaagcccatcggctcccgcttcactttcatggccagcgacggggaggcgaaggtcaaggcgatcctctccacccacttcgcgtcggaggtccactccggcaagctccagaacctcggcctcgtccgcatcctcaactacacgtgcaacgacatcccacaaaagacggacaagatggtgatcatcaccaagtgcgaggtcgtgtcccaggcgctcgacgccgagatcaagagcgaggtcaggatagaagagccagcggctctcatgaagcccaaggaggaggctgcggtcctctccaagcccattggcggggccccggctgcgattatgctgaagccgaggcatgacgtgaagtccgcgtcccagattgttagcgagcagcgcggaaatgctgctcccgctgctcgcttggccatgacgagacgggtgcatcctctgatctccctgaacccctaccaggggaactgggtcatcaaagtgcgggtcacaagcaagggcaacctcaggtcatacaggaatgcccgtggagaaggccatgtcttcaacgtagagctcactgatgaggatggcacccagatccaggccaccatgttcaacgagcctgcaaagaagttctatcccgtgtttgagcttgggaaggtctactacatctccaaggggtcgctcagaattgcgaacaagcagttcaagacagtccagaatgactatgagatgaccctgaatgagaatgctgttgttgaagaagctgagggtgaatctttcattccaccagtgcaatacaactttgtcaagattgatatgctggggccatatgttggtggcagggagttagtagatatcattggtgttgttcagagtgtatcacctactttgagtatcagaagaaagatcgacaatgagtcaatcccaaagcgtgacattgttgttgcagatgactcgaacaaaactgtcaccatttctctttggaatgatcttgccaccactgtcggtgaggaactcttggacatggttgactctgcacctatcattgcagtcaagagcctgaaggtgtctgactttcaaggtgtgtctgtttctacagtaggcaaaagcacacttgtgattaacccagagttgcctgagactgagaagcttagagcttggtatgaatctgaaggcaagggtactgccttggcatcagttggtgctggaatgggtgcatccaacgctggtggcttgagatcaatgtactctgacagagtttttctgtctcacatcacaagtgaccctaacttgggccaggataagcctgttttcttcagcctgtatgccaacataagcaacatcaagcctgaccagaccatgtggtaccgcgcttgcaccacctgtaacaagaaggtgactgaggcacttggatcaggattctggtgtgaagggtgccagaagaactatgagcagtgctcattgaggtacatcatggtgatcaaggtctctgatcccactggtgaggcctggctgtctcttttcaatgaccaagcagagagaatcgtcggctgcagcgcagatgagcttgatcggatcaggaaagaggagggcgatgacatgttccagctcaagctgaaggaagccacctggattcctcacctgttccgtgtcagcgtcgtgcagaacgagtacatgggcgagaagaggcagcgaatcaccgtgaggagcgagtcaccggtcgactacgccgctgaagccaggtaccagctcgaggagatcgccaagctcacctccagctagaagaagatgcaagaggagtatgcctgctcccctcgaggagattcccaagctcaccgctgcctgctgggagaagatgctccccttgaggagatagatatccaggctcatcgcactagacggagccatgttttggccccaagtttcctgaagtgtagtgctgcttcagccgtgtctttctgccgtgtcgctcctcaaatgtagtggtaacttaaaacgtgttatatatgtagatgtttgattcggaggacatcggggtattcttctgttctactatctgtttgatctgcaaccttctgcatatgacaaggatgtatgcagatccactgcc

SEQ ID NO: 29301 - protein, 658 aa, Triticum aestivum
SLSQLQTISAAAAEHHLHRPRNLLPEDARTPPETRGMDAKSVTPGAVALILANPTPESPDDVPEIVVQVLDLKPIGSRFTFMASDGEAKVKAILSTHFASEVHSGKLQNLGLVRILNYTCNDIPQKTDKMVIITKCEVVSQALDAEIKSEVRIEEPAALMKPKEEAAVLSKPIGGAPAAIMLKPRHDVKSASQIVSEQRGNAAPAARLAMTRRVHPLISLNPYQGNWVIKVRVTSKGNLRSYRNARGEGHVFNVELTDEDGTQIQATMFNEPAKKFYPVFELGKVYYISKGSLRIANKQFKTVQNDYEMTLNENAVVEEAEGESFIPPVQYNFVKIDMLGPYVGGRELVDIIGVVQSVSPTLSIRRKIDNESIPKRDIVVADDSNKTVTISLWNDLATTVGEELLDMVDSAPIIAVKSLKVSDFQGVSVSTVGKSTLVINPELPETEKLRAWYESEGKGTALASVGAGMGASNAGGLRSMYSDRVFLSHITSDPNLGQDKPVFFSLYANISNIKPDQTMWYRACTTCNKKVTEALGSGFWCEGCQKNYEQCSLRYIMVIKVSDPTGEAWLSLFNDQAERIVGCSADELDRIRKEEGDDMFQLKLKEATWIPHLFRVSVVQNEYMGEKRQRITVRSESPVDYAAEARYQLEEIAKLTSS

SEQ ID NO: 29302 - protein, 622 aa, Triticum aestivum
MDAKSVTPGAVALILANPTPESPDDVPEIVVQVLDLKPIGSRFTFMASDGEAKVKAILSTHFASEVHSGKLQNLGLVRILNYTCNDIPQKTDKMVIITKCEVVSQALDAEIKSEVRIEEPAALMKPKEEAAVLSKPIGGAPAAIMLKPRHDVKSASQIVSEQRGNAAPAARLAMTRRVHPLISLNPYQGNWVIKVRVTSKGNLRSYRNARGEGHVFNVELTDEDGTQIQATMFNEPAKKFYPVFELGKVYYISKGSLRIANKQFKTVQNDYEMTLNENAVVEEAEGESFIPPVQYNFVKIDMLGPYVGGRELVDIIGVVQSVSPTLSIRRKIDNESIPKRDIVVADDSNKTVTISLWNDLATTVGEELLDMVDSAPIIAVKSLKVSDFQGVSVSTVGKSTLVINPELPETEKLRAWYESEGKGTALASVGAGMGASNAGGLRSMYSDRVFLSHITSDPNLGQDKPVFFSLYANISNIKPDQTMWYRACTTCNKKVTEALGSGFWCEGCQKNYEQCSLRYIMVIKVSDPTGEAWLSLFNDQAERIVGCSADELDRIRKEEGDDMFQLKLKEATWIPHLFRVSVVQNEYMGEKRQRITVRSESPVDYAAEARYQLEEIAKLTSS

SEQ ID NO: 29303 - protein, 577 aa, Triticum aestivum
MASDGEAKVKAILSTHFASEVHSGKLQNLGLVRILNYTCNDIPQKTDKMVIITKCEVVSQALDAEIKSEVRIEEPAALMKPKEEAAVLSKPIGGAPAAIMLKPRHDVKSASQIVSEQRGNAAPAARLAMTRRVHPLISLNPYQGNWVIKVRVTSKGNLRSYRNARGEGHVFNVELTDEDGTQIQATMFNEPAKKFYPVFELGKVYYISKGSLRIANKQFKTVQNDYEMTLNENAVVEEAEGESFIPPVQYNFVKIDMLGPYVGGRELVDIIGVVQSVSPTLSIRRKIDNESIPKRDIVVADDSNKTVTISLWNDLATTVGEELLDMVDSAPIIAVKSLKVSDFQGVSVSTVGKSTLVINPELPETEKLRAWYESEGKGTALASVGAGMGASNAGGLRSMYSDRVFLSHITSDPNLGQDKPVFFSLYANISNIKPDQTMWYRACTTCNKKVTEALGSGFWCEGCQKNYEQCSLRYIMVIKVSDPTGEAWLSLFNDQAERIVGCSADELDRIRKEEGDDMFQLKLKEATWIPHLFRVSVVQNEYMGEKRQRITVRSESPVDYAAEARYQLEEIAKLTSS

SEQ ID NO: 29304 - DNA, 704 bp, Triticum aestivum
gataggaacaggcggaaccgtagacgaagcctcggacggaacgatacagagaagcctcggaaggggagcgatcggaaggggagggcggagagatggggatccggttcgtgctgctggtgaacaagcaggggcagacgcggctggcgcagtactacgagcacctctccctcgacgagcgccgcgccctcgagggcgagatcgtccgcaagtgcctcgcccgcaccgaccagcagtgctctttcgtggagcaccggaactacaaggtcgtctaccggcgctacgcctccctcttcttcctcgtcggcgtcgacaacgatgagaatgagttagccatccttgaattcatacatcttctcgtggaaaccatggaccgtcactttggcaacgtgtgtgagcttgacatcatgttccatctggagaaagtccacttcatgcttgaagagatggtgatgaatggttgcatcgtggagacgagcaaacagaacatattggcgcccatccagcttatggagaaaacctcgtaaatagtgtgtgaactcaagagcgcctaggtgatgcttagcctcttcctcccgccttcaccatagattcccccgttgtgtgaggagaaatgccgaacaactgctgtatgcatgggtggctgtgttcacccgactggaaaatgtgaaatgttctgtaatgttgaaaatgaagaccccatcatt

SEQ ID NO: 29305 - protein, 143 aa, Triticum aestivum
MGIRFVLLVNKQGQTRLAQYYEHLSLDERRALEGEIVRKCLARTDQQCSFVEHRNYKVVYRRYASLFFLVGVDNDENELAILEFIHLLVETMDRHFGNVCELDIMFHLEKVHFMLEEMVMNGCIVETSKQNILAPIQLMEKTS

SEQ ID NO: 29306 - protein, 105 aa, Triticum aestivum
IGTGGTVDEASDGTIQRSLGRGAIGRGGRRDGDPVRAAGEQAGADAAGAVLRAPLPRRAPRPRGRDRPQVPRPHRPAVLFRGAPELQGRLPALRLPLLPRRRRQR

SEQ ID NO: 29307 - DNA, 630 bp, Triticum aestivum
atcgaaaactcttctccccctctcccccgccgccgccgccgccgtctcctcctcctcttcgccgctcccgctcccgctcccgccgccgcgccaccgccgtcagccatggcaccgaagaaggagaaggccccggcggcgtcgtccaagccggccaagtccggcggcggcaagcagaagaagaagaagtggagcaagggcaagcaaaaggagaaggtgaacaacgcggtgctgttcgaccaggccacctacgacaagctgctcaccgaggtgcccaagtacaagcagatcacgccctccgtcctctccgagcgcctcaggatcaacgggtctctggctcgcagggctatcaaagacctgatggagagggggctcatcaggatggtctcaatccactccagccagcagatcttcaccagggcgacaaacacctgatttatcatcatcatgtgttctgtgtctgtttttagtccagtagactgaggtgttgctgttatattcaagttcactatgtccaggggggcacactgtgccaccagtaatgttgaattgcttttgagttttggtacactttaagatcgttttgtcagcgcaatgaaatctaccttatatattgccgtattgggtcttttt

SEQ ID NO: 29308 - protein, 154 aa, Triticum aestivum
RKLFSPSPPPPPPPSPPPLRRSRSRSRRRATAVSHGTEEGEGPGGVVQAGQVRRRQAEEEEVEQGQAKGEGEQRGAVRPGHLRQAAHRGAQVQADHALRPLRAPQDQRVSGSQGYQRPDGEGAHQDGLNPLQPADLHQGDKHLIYHHHVFCVCF

SEQ ID NO: 29309 - protein, 143 aa, Triticum aestivum
IENSSPPLPRRRRRRLLLLFAAPAPAPAAAPPPSAMAPKKEKAPAASSKPAKSGGGKQKKKKWSKGKQKEKVNNAVLFDQATYDKLLTEVPKYKQITPSVLSERLRINGSLARRAIKDLMERGLIRMVSIHSSQQIFTRATNT

SEQ ID NO: 29310 - protein, 108 aa, Triticum aestivum
MAPKKEKAPAASSKPAKSGGGKQKKKKWSKGKQKEKVNNAVLFDQATYDKLLTEVPKYKQITPSVLSERLRINGSLARRAIKDLMERGLIRMVSIHSSQQIFTRATNT

SEQ ID NO: 29311 - DNA, 1096 bp, Triticum aestivum
gcaaaccaacagctgctactccagcatccacccatccatccatctctcatcttcttcttcttgcaacgaaacgagagcatctagcttacagcgagctaaagattcgaacgatggccgttcttgtggcgaggcaggggcgcgagctgcagcggtacagcgcgagcacccgcgggcgcatcgtggtggggtgcatcccctaccgggtgcgcggcggcggcggcgagggcgagggcgagctggaggtgctggtgatcagctcgcagaaggggcacggcatgatgttccccaagggcgggtgggagctggacgagtccatggacgacgccgcccggcgcgaggccctggaggaggccggcgtccgcggggagatgggcaaggtgctcggctgctggcactaccagagccgccgctaccagaccacctacgagggcatcatgtacccgctccgcgtcaccgacgagctccagcagtggcccgagatggcctcccgcaagcgcacctgggccacggtgcagcaggtcatggagggatgccagcactgctggatgcgggaggcgctcgaggagctcgtcgcccggcacgccaagccgcagtccgccctgtgaacgatcaagcaagcgggcgggtggggtgactggagctcgagcgcgcgcgactctcgcgagaagaggcctggagcgagcaccaacgtccgtccgtccgtcgtcctcgtcgtctctctctcctttcctcggtgcagcggcaggcctgccggcgtgtccggcgtcgtacgacgaccggaccggagcatatatttggccgcccttgccggagagacggactggggacgatggcacgcgcgcgtcaaccctttctcgaggcgtagagtcgtcgtcgtcgtcgccgcggcaaataatagggacgaacttagaaatgtgtagatcgaaagcgaacggggcacgaaaacttgacaaaacaccgcccttcctggtggtacgagcaagctcacgattctttctttaggctcttggagtaaaagatcaatcaaattgtaaattaatttaagtagccgcttttctgtggcacgctcgatcaatcaaacgattactacaatctg

SEQ ID NO: 29312 - protein, 210 aa, Triticum aestivum
QTNSCYSSIHPSIHLSSSSSCNETRASSLQRAKDSNDGRSCGEAGARAAAVQREHPRAHRGGVHPLPGARRRRRGRGRAGGAGDQLAEGARHDVPQGRVGAGRVHGRRRPARGPGGGRRPRGDGQGARLLALPEPPLPDHLRGHHVPAPRHRRAPAVARDGLPQAHLGHGAAGHGGMPALLDAGGARGARRPARQAAVRPVNDQASGRVG

SEQ ID NO: 29313 - protein, 200 aa, Triticum aestivum
KPTAATPASTHPSISHLLLLATKREHLAYSELKIRTMAVLVARQGRELQRYSASTRGRIVVGCIPYRVRGGGGEGEGELEVLVISSQKGHGMMFPKGGWELDESMDDAARREALEEAGVRGEMGKVLGCWHYQSRRYQTTYEGIMYPLRVTDELQQWPEMASRKRTWATVQQVMEGCQHCWMREALEELVARHAKPQSAL

SEQ ID NO: 29314 - protein, 164 aa, Triticum aestivum
MAVLVARQGRELQRYSASTRGRIVVGCIPYRVRGGGGEGEGELEVLVISSQKGHGMMFPKGGWELDESMDDAARREALEEAGVRGEMGKVLGCWHYQSRRYQTTYEGIMYPLRVTDELQQWPEMASRKRTWATVQQVMEGCQHCWMREALEELVARHAKPQSAL

SEQ ID NO: 29315 - DNA, 953 bp, Triticum aestivum
acgagaccactacctagaacatcctaatcgaaaaatgggctgttgaggaggtagcggcgaggtggtagccagccagccgaaagaaacagagcacagccgagccgagagcctgcccgcgagaaggaaggaaggaaggaagatggactcctccgcggtggcggtggcggcgccgctgctggaggccggcggcaaggagatgcggcacctgggccgcaccgcgcacaacatgtcctcctcctccctccgcaagaagtccgacacctcgctcgtccgcaaggtgccctgcgccgcgctccgcggcttcctctccaccctccaggaggtgctcttcggcaccaagctcttcgtcctcttccccgccgtcctcctcgccgtcgtcgccagatacatgcgcttcggccaggtgtggctcttcgtgcttagcttaatcgggctcattcctcttgcggagcgactcagtttcctgacggaacagatcgctttctacaccggtcccactgtcggtggactgttgaatgcgacatttggcaacgtcaccgaggttatcatcgcgctattcgccctgagggaaggcaagataacggtggtgaaatgctccctgctcggctccatcttgtccaacctgctgcttgtcctcgggacctccctcttttttggtgggcttgccaacctcggtgtcgagcagccatacgacagaaagcaagcagatgtcagcacagggcttctgattcttggtgtgctatgccaatcgatgccgctgatgctgaggtatgcagtaagcgccggtgagcatgcagtaaactctgacgattcaggattggtgctatcccgggcatgcagcgttctcatgatcctggcctatggagcctacctttacttccagctgaagacgcatcgccagctctttgaaccacaggaggttgaagatgatggtgatgatttggtctctgaag

SEQ ID NO: 29316 - protein, 271 aa, Triticum aestivum
MDSSAVAVAAPLLEAGGKEMRHLGRTAHNMSSSSLRKKSDTSLVRKVPCAALRGFLSTLQEVLFGTKLFVLFPAVLLAVVARYMRFGQVWLFVLSLIGLIPLAERLSFLTEQIAFYTGPTVGGLLNATFGNVTEVIIALFALREGKITVVKCSLLGSILSNLLLVLGTSLFFGGLANLGVEQPYDRKQADVSTGLLILGVLCQSMPLMLRYAVSAGEHAVNSDDSGLVLSRACSVLMILAYGAYLYFQLKTHRQLFEPQEVEDDGDDLVSE

SEQ ID NO: 29317 - protein, 252 aa, Triticum aestivum
MRHLGRTAHNMSSSSLRKKSDTSLVRKVPCAALRGFLSTLQEVLFGTKLFVLFPAVLLAVVARYMRFGQVWLFVLSLIGLIPLAERLSFLTEQIAFYTGPTVGGLLNATFGNVTEVIIALFALREGKITVVKCSLLGSILSNLLLVLGTSLFFGGLANLGVEQPYDRKQADVSTGLLILGVLCQSMPLMLRYAVSAGEHAVNSDDSGLVLSRACSVLMILAYGAYLYFQLKTHRQLFEPQEVEDDGDDLVSE

SEQ ID NO: 29318 - protein, 242 aa, Triticum aestivum
MSSSSLRKKSDTSLVRKVPCAALRGFLSTLQEVLFGTKLFVLFPAVLLAVVARYMRFGQVWLFVLSLIGLIPLAERLSFLTEQIAFYTGPTVGGLLNATFGNVTEVIIALFALREGKITVVKCSLLGSILSNLLLVLGTSLFFGGLANLGVEQPYDRKQADVSTGLLILGVLCQSMPLMLRYAVSAGEHAVNSDDSGLVLSRACSVLMILAYGAYLYFQLKTHRQLFEPQEVEDDGDDLVSE

SEQ ID NO: 29319 - DNA, 1783 bp, Triticum aestivum
cccgaatccaaatccgccattgcacagccggaccagtgccactcgaaccccacgtaccctctctatcccaaccctagcgcggcggcggcgtcgatggcgtcgatggcgtcgatcccgtctgacgaggtctccgagaacggccacggcaacggaaacggcccatccccgccgcgcgccaagcgcccccgcgcagcgttgatctcggccgcccagatccgcgacgagttcgcgcatcacgaccccgcagttgcccgcgtcaacaacggcagcttcggctgctgcccggcctccgtgctcgaagcgcaggcgcgctggcagcgcctcttcctcgctcagcccgacgccttctacttcgacggccttcagccggggctccgccgctcccgcgcagccgtcgcggcccttgtcaacgctggggacgtctccgagatttccctcgtcgacaacgctaccaccgctgctgcaatcgtgctgcagcatgccgcctggagctttgccgaggggcacttcgctcgtggcgacgctgtgctcatgctccattacgcctacggagcagtaaagaaatctatccaggcctacgttgcccgcgcgggcgccactgtcgtcgaggtacccctcccgttcccggtcacctcccctgacgccattattgcggagttccatgctgcgctcgctgttgccaaggccggtggtcgtaaggtccggcttgctgtcattgatcacatcacctccatgcccagtgttctcattccagtcaaggagctagttgccatttgtcgccatgagggtgtcgacaaagtttttgttgatgctgcacactctgttgggcaagtccctgtcgatgtgcgagacattggggcggatttctacactagcaacctccacaagtggttcttttgccccccggccgtggctttcttacacacccgcaagggtggcccgataacctctcagctccaccaccctgttgtgtcacatgaatatggcaacgggctacctatggagagtggatggattgggacacgggattacagtgcccagatcgtcgttcctgaagctattcactttgtgaaccgatttgaaggtgggattgaggggatacgcagccggaaccatgagaaggtaattgagatggggaggatgcttgccgaagcatgggggacagttcttggatcaccaccagtaatgtgtggaagcatggctatggtagggatgcctagttgtctttgcattgagagtgacgatgatgcactgagagtgcggaccatgttgaggaaggatttcaaagttgaggtgcctatatactacaatagcagacaggttaaagtgcaagagatggcaaaggataatagtagtgatccagtgacggggtatgtaagaatctcacaccaggtttacaatgtcaaggaggagtatgagaggctgagagatgctgtcaataagcttgttgctgaggggttcaccagtgccgaattgaggccagctgagaagcaagaagctctggcttgatgacgtggcatctagccagcactccatccgaagatggattaattagttgtggatctgtgccagaagcctgtgctgcaccgagatcgagttctttggtagcccgctcaatggcatcgccatttgatgtagtgtactttcacatactgacaaatgttgtatttgagcttgcaataacgtgcactggaatggaatgtatgtcttctcccttcacttgcatttttgagctgtaatgtaagaataatgatctgaatgcaaggagacttgcatgctttct

SEQ ID NO: 29320 - protein, 502 aa, Triticum aestivum
PESKSAIAQPDQCHSNPTYPLYPNPSAAAASMASMASIPSDEVSENGHGNGNGPSPPRAKRPRAALISAAQIRDEFAHHDPAVARVNNGSFGCCPASVLEAQARWQRLFLAQPDAFYFDGLQPGLRRSRAAVAALVNAGDVSEISLVDNATTAAAIVLQHAAWSFAEGHFARGDAVLMLHYAYGAVKKSIQAYVARAGATVVEVPLPFPVTSPDAIIAEFHAALAVAKAGGRKVRLAVIDHITSMPSVLIPVKELVAICRHEGVDKVFVDAAHSVGQVPVDVRDIGADFYTSNLHKWFFCPPAVAFLHTRKGGPITSQLHHPVVSHEYGNGLPMESGWIGTRDYSAQIVVPEAIHFVNRFEGGIEGIRSRNHEKVIEMGRMLAEAWGTVLGSPPVMCGSMAMVGMPSCLCIESDDDALRVRTMLRKDFKVEVPIYYNSRQVKVQEMAKDNSSDPVTGYVRISHQVYNVKEEYERLRDAVNKLVAEGFTSAELRPAEKQEALA

SEQ ID NO: 29321 - protein, 471 aa, Triticum aestivum
MASMASIPSDEVSENGHGNGNGPSPPRAKRPRAALISAAQIRDEFAHHDPAVARVNNGSFGCCPASVLEAQARWQRLFLAQPDAFYFDGLQPGLRRSRAAVAALVNAGDVSEISLVDNATTAAAIVLQHAAWSFAEGHFARGDAVLMLHYAYGAVKKSIQAYVARAGATVVEVPLPFPVTSPDAIIAEFHAALAVAKAGGRKVRLAVIDHITSMPSVLIPVKELVAICRHEGVDKVFVDAAHSVGQVPVDVRDIGADFYTSNLHKWFFCPPAVAFLHTRKGGPITSQLHHPVVSHEYGNGLPMESGWIGTRDYSAQIVVPEAIHFVNRFEGGIEGIRSRNHEKVIEMGRMLAEAWGTVLGSPPVMCGSMAMVGMPSCLCIESDDDALRVRTMLRKDFKVEVPIYYNSRQVKVQEMAKDNSSDPVTGYVRISHQVYNVKEEYERLRDAVNKLVAEGFTSAELRPAEKQEALA

SEQ ID NO: 29322 - protein, 468 aa, Triticum aestivum
MASIPSDEVSENGHGNGNGPSPPRAKRPRAALISAAQIRDEFAHHDPAVARVNNGSFGCCPASVLEAQARWQRLFLAQPDAFYFDGLQPGLRRSRAAVAALVNAGDVSEISLVDNATTAAAIVLQHAAWSFAEGHFARGDAVLMLHYAYGAVKKSIQAYVARAGATVVEVPLPFPVTSPDAIIAEFHAALAVAKAGGRKVRLAVIDHITSMPSVLIPVKELVAICRHEGVDKVFVDAAHSVGQVPVDVRDIGADFYTSNLHKWFFCPPAVAFLHTRKGGPITSQLHHPVVSHEYGNGLPMESGWIGTRDYSAQIVVPEAIHFVNRFEGGIEGIRSRNHEKVIEMGRMLAEAWGTVLGSPPVMCGSMAMVGMPSCLCIESDDDALRVRTMLRKDFKVEVPIYYNSRQVKVQEMAKDNSSDPVTGYVRISHQVYNVKEEYERLRDAVNKLVAEGFTSAELRPAEKQEALA

SEQ ID NO: 29323 - DNA, 1282 bp, Triticum aestivum
aggaactcggagtattttggctctacaaagttcatcatcgagcacgcgatttccgtaaaagccacgtgttaagctttccaccaccagttcactcaccatagtccaacggaatctttcttccccctctactactagattgcctagagggtgctgactcgagtgcagtgtactgcgtttccttctcgtcgtcggtcttcttatctcatccccgactccgacgagcccaaccggcgacggatggcggcgacgaagctgagcagcgggcacgagatgccggccgtggggctcggcgtctggcggatggactccgccgccgtccgcggcctcatccactccgccctccgcgccggctaccgccacttcgactgcgccgctgactacaaaaacgaggctgaagttggcgatgcgctggcggaggcattccaaactgggcttgtcaagagggaggatcttttcatcactaccaagttgtggaactcagatcacggtcatgtggttgaagcctgcaaggatagcctgaagaagctgcgattggattatctagatctctaccttattcacttccctgtagctactaagcatactggagttggcacaactggcagtgctcttggtgatgatggtgtgcttgatatcgataccactatctcattggagacaacgtggcatgcaatggaagatcttgtttccatgggacttgttcgtagcataggaattagcaactacgacatattcctcaccagagactgcttggcgtacgccaagataaagcctgcggtcaaccaaatcgagacacacccttacttccagcgtgactctcttgtgaagttctgccagaagcacggaatctgcgtcaccgcacatacccccctgggtggctctaccgccaacaccgagtggttcggctcggtctcatgccttgacgaccctgtcatcaagtctctggctgagaaatacggcaagacgccggcgcagctggtcctccggtggggcctccagaggaacacagtggtcatccccaagacctccaaggtagagaggctggaggagaactttgcggtctccgacttcgacatctctggcgaggacatggagaagatcaaggcccttgaccgcaggtaccgcaccaaccagccggccaagttttggggcatcgacctctacgcttgattccactgcattatttgctacccggacaatagaatcaataatatgagagcttatcattaccttaaacgaacttgagttgtggatgatgtatttgcagcacgaccagtcacaa

SEQ ID NO: 29324 - protein, 310 aa, Triticum aestivum
MAATKLSSGHEMPAVGLGVWRMDSAAVRGLIHSALRAGYRHFDCAADYKNEAEVGDALAEAFQTGLVKREDLFITTKLWNSDHGHVVEACKDSLKKLRLDYLDLYLIHFPVATKHTGVGTTGSALGDDGVLDIDTTISLETTWHAMEDLVSMGLVRSIGISNYDIFLTRDCLAYAKIKPAVNQIETHPYFQRDSLVKFCQKHGICVTAHTPLGGSTANTEWFGSVSCLDDPVIKSLAEKYGKTPAQLVLRWGLQRNTVVIPKTSKVERLEENFAVSDFDISGEDMEKIKALDRRYRTNQPAKFWGIDLYA

SEQ ID NO: 29325 - protein, 299 aa, Triticum aestivum
MPAVGLGVWRMDSAAVRGLIHSALRAGYRHFDCAADYKNEAEVGDALAEAFQTGLVKREDLFITTKLWNSDHGHVVEACKDSLKKLRLDYLDLYLIHFPVATKHTGVGTTGSALGDDGVLDIDTTISLETTWHAMEDLVSMGLVRSIGISNYDIFLTRDCLAYAKIKPAVNQIETHPYFQRDSLVKFCQKHGICVTAHTPLGGSTANTEWFGSVSCLDDPVIKSLAEKYGKTPAQLVLRWGLQRNTVVIPKTSKVERLEENFAVSDFDISGEDMEKIKALDRRYRTNQPAKFWGIDLYA

SEQ ID NO: 29326 - protein, 289 aa, Triticum aestivum
MDSAAVRGLIHSALRAGYRHFDCAADYKNEAEVGDALAEAFQTGLVKREDLFITTKLWNSDHGHVVEACKDSLKKLRLDYLDLYLIHFPVATKHTGVGTTGSALGDDGVLDIDTTISLETTWHAMEDLVSMGLVRSIGISNYDIFLTRDCLAYAKIKPAVNQIETHPYFQRDSLVKFCQKHGICVTAHTPLGGSTANTEWFGSVSCLDDPVIKSLAEKYGKTPAQLVLRWGLQRNTVVIPKTSKVERLEENFAVSDFDISGEDMEKIKALDRRYRTNQPAKFWGIDLYA

SEQ ID NO: 29327 - DNA, 1583 bp, Triticum aestivum
gtgtgcttgccagcagtttgttgctcttcctcctccgccgccgctggaatggcactgccaaacatggccggcgacgccctcagggtagtcgacctcccgggccgcggccgcgcgctcctcgccgcccgcgacatcctcgagggcgaggtgctcctgtcggagtcgcccatcctcctctacccgtcctcgctcgcctccctctcctcctactgctccgcctgcttccgctcgctcccaccgccgccccacaccccctgcccttcctgccgcgccgccgccttctgctcccctgcctgcgccgccgcctcccacccgcgcctcctctgcgccgcgctctccagcggcctcgccgccgcccccgaggcgcaacaggagcccctcctcttcctcctctcggcctactcgctccaggagccctctctcagcgccatcctctctctctcctcggcaccctctccgacccagcagcaagacgccgcgggcctccacgccgcggtggcgtcggtggcgccgccgcacacgctgcccgcgggcttctcgctggacctcacggtggctctcctctccaaggaccggaccaacagcttctcgatcctggagccataccgccccgacgtgccgctggaggtccgcaaggcgcggtgctgcgcggtgtaccctcgcgcgtcactgctcaaccacgactgcctgcccaatgcttgccacttcgattatgccgacaggccggggccagggaacacggacatcgtcgtgcgctctctccatggtataacagaggggaaggaggtttgcatcagctatttcgcggccaattggaggtatgctgacaggcaacgcaggctgctggaggattatgggttccggtgtgagtgtgatcggtgtcagattgagagcaagtggaagtttgatgatgataatgatggtgctgatggggatgacaccatggaagaggagcatggcaaggaggtcgctgaagatggcggtgatgaggggatggagcaggaggaagggagtgacgacgatgacgacgatttcccgcatgccttcttctttgtgaggtatctgtgtgatcgtgaggactgctatggcatgcttgcgccgctgccacccttaccgaacggtgagctgtcccatgtatttgagtgcaatgcctgtgggcaactgaagaaggaggaagacgaggatgagcctgatgctggtgattgcagcatggaccagtaggatgtttgctgctgttttttgggagcacttggtggatggtgatgaaatggatgcaccggtcggcttccgtactttggggctgtttgccttgaagaactggtctaatgcacctgaagtcaggaagacgtatgttgtactgcatgatttcgttcactgaatgtgatttgtaggcaaccttgcctggacctgtacaattattattacgcctatatctatcttggccatgtgaacctggtgtggcgttaggaactgacagtgcaaagtccactcgtcagcgtatggattattgcccctctgtttatcttgcctttgacctgcatcattgcccgttcgttcaggttataaaaatcatctttctttgt

SEQ ID NO: 29328 - protein, 406 aa, Triticum aestivum
VCLPAVCCSSSSAAAGMALPNMAGDALRVVDLPGRGRALLAARDILEGEVLLSESPILLYPSSLASLSSYCSACFRSLPPPPHTPCPSCRAAAFCSPACAAASHPRLLCAALSSGLAAAPEAQQEPLLFLLSAYSLQEPSLSAILSLSSAPSPTQQQDAAGLHAAVASVAPPHTLPAGFSLDLTVALLSKDRTNSFSILEPYRPDVPLEVRKARCCAVYPRASLLNHDCLPNACHFDYADRPGPGNTDIVVRSLHGITEGKEVCISYFAANWRYADRQRRLLEDYGFRCECDRCQIESKWKFDDDNDGADGDDTMEEEHGKEVAEDGGDEGMEQEEGSDDDDDDFPHAFFFVRYLCDREDCYGMLAPLPPLPNGELSHVFECNACGQLKKEEDEDEPDAGDCSMDQ

SEQ ID NO: 29329 - protein, 390 aa, Triticum aestivum
MALPNMAGDALRVVDLPGRGRALLAARDILEGEVLLSESPILLYPSSLASLSSYCSACFRSLPPPPHTPCPSCRAAAFCSPACAAASHPRLLCAALSSGLAAAPEAQQEPLLFLLSAYSLQEPSLSAILSLSSAPSPTQQQDAAGLHAAVASVAPPHTLPAGFSLDLTVALLSKDRTNSFSILEPYRPDVPLEVRKARCCAVYPRASLLNHDCLPNACHFDYADRPGPGNTDIVVRSLHGITEGKEVCISYFAANWRYADRQRRLLEDYGFRCECDRCQIESKWKFDDDNDGADGDDTMEEEHGKEVAEDGGDEGMEQEEGSDDDDDDFPHAFFFVRYLCDREDCYGMLAPLPPLPNGELSHVFECNACGQLKKEEDEDEPDAGDCSMDQ

SEQ ID NO: 29330 - protein, 385 aa, Triticum aestivum
MAGDALRVVDLPGRGRALLAARDILEGEVLLSESPILLYPSSLASLSSYCSACFRSLPPPPHTPCPSCRAAAFCSPACAAASHPRLLCAALSSGLAAAPEAQQEPLLFLLSAYSLQEPSLSAILSLSSAPSPTQQQDAAGLHAAVASVAPPHTLPAGFSLDLTVALLSKDRTNSFSILEPYRPDVPLEVRKARCCAVYPRASLLNHDCLPNACHFDYADRPGPGNTDIVVRSLHGITEGKEVCISYFAANWRYADRQRRLLEDYGFRCECDRCQIESKWKFDDDNDGADGDDTMEEEHGKEVAEDGGDEGMEQEEGSDDDDDDFPHAFFFVRYLCDREDCYGMLAPLPPLPNGELSHVFECNACGQLKKEEDEDEPDAGDCSMDQ

SEQ ID NO: 29331 - DNA, 1777 bp, Triticum aestivum
acgcaaaaagggacgaaaaaccaaacttctcccgcaagactggctcgcaccaaatcgcatcgcccttggagtcgcccctcactgatcccttggcgtcctgcttcccaagccacagcccacaggcccccacgcccagctcctcccgctccgatttcacagcctgcgagctagccatgtcgattcggccgctgttgctgccggagccgccgggcgaggtggatcgggcgccggagatcttcgcgggtggcgtggccgcggtgcgccgcgcagttgtcatcgggaacggctgcgccggcgccgagaaccagtgcctcggcctcgtccgcgccctcggcctggccgaccgcctcacgctctaccgtattatcaggccaaccggaggaatcaacaagtggctgcactttctccctatctccttgcataaaatggtggaccaagtactcagacatatactgtctaacacgacattcacaacactgtttcaaggaaaactgtcggcaccttatcctgtcagtaatgttcaatctcttggattgtcttctgtactggaagcagattccaaaaggatagcgacaatggtccgtgataccttcgagaaggaaggcctggcgatagttgttgcttgtggccgtgataccataccatatgcaagctctgtaaggtgtttagctccagataatgtctttgtcattcagatacaacaccccaggtatcgccttgataggtttgatttggtggtgactcctcgccatgattactacgctttaactgcaaagggacaacaagaagtaccgtggcttttccggagatgaattactccacgagaaccacccggtcctaatgtggtcctgacgtctggagcacttcaccaagcagattctgctgcactacgcattgctgctacaaactggcatgatgaacttgctcccttgccaaagccattggtagtagtaaatattggagaaccaacaagaaactgtaattatggtgtagaccttgccaagcagttggtaagctcactgcacaatgtttcagagacctgtggaagtgtcagaatttcattttccaggagaacgccacaaaacgtgtccgatcttatattgagagagttcagcacacatccaaagttctacatttggggtggtgaagaacctaacccacacctagggcatcttgcatgggccgatgctttcatcataacagcagactcgataagtatgctaagtgaggcgtgcagcactgggaagccggtctatgtcgttggaactgagcattgcaggtggaaattctcagattttcacaacactctgcagaaacgaggggctgttcgtcctttcactggatcagaagatatgtcagacagctggagctaccctcctctgaacgatgccattgatgtggctgcacgggttcgtgaagtgcttgcacaacgtggatggacagtgggttaatagcggtcgaagcagagaaaaagagtgccatttttgctcagttacgttccaagcccagacaattcagagcctgcatttcagttatcttagttgcatctgcatgaggattttttttgccatatgaccgttgcaagacgacatcgcttcttttcaaaagatggctatatttttgggaacatactgtgtaaagttttgagcaatcacacatagacagcagtgtttattcttggcatattcatgcattattgtacctagtgttatgctgtaaagaagccgatagaagtgcgaacggaagttaaaaatctttgtccttggaacgaggtgac

SEQ ID NO: 29332 - protein, 269 aa, Triticum aestivum
AKRDEKPNFSRKTGSHQIASPLESPLTDPLASCFPSHSPQAPTPSSSRSDFTACELAMSIRPLLLPEPPGEVDRAPEIFAGGVAAVRRAVVIGNGCAGAENQCLGLVRALGLADRLTLYRIIRPTGGINKWLHFLPISLHKMVDQVLRHILSNTTFTTLFQGKLSAPYPVSNVQSLGLSSVLEADSKRIATMVRDTFEKEGLAIVVACGRDTIPYASSVRCLAPDNVFVIQIQHPRYRLDRFDLVVTPRHDYYALTAKGQQEVPWLFRR

SEQ ID NO: 29333 - protein, 212 aa, Triticum aestivum
MSIRPLLLPEPPGEVDRAPEIFAGGVAAVRRAVVIGNGCAGAENQCLGLVRALGLADRLTLYRIIRPTGGINKWLHFLPISLHKMVDQVLRHILSNTTFTTLFQGKLSAPYPVSNVQSLGLSSVLEADSKRIATMVRDTFEKEGLAIVVACGRDTIPYASSVRCLAPDNVFVIQIQHPRYRLDRFDLVVTPRHDYYALTAKGQQEVPWLFRR

SEQ ID NO: 29334 - DNA, 1328 bp, Triticum aestivum
acacgcgcgcacccacgcataggtcgctctcctgctccgctctcccttcgcgtccaagcctccctcccatccccgctgcaccgcaagtcaaccgcctttccacctcctccgccccctcgccgtcgcctccttcctggcgcaacgccagtatatagagccgcacaggcattcctttgctgccacgacaaagaggaggcagaggttcgcaaggttgaaactgcaatcccggcgacggcaaaggcttctctttagttagctagcgtagcagacttctattcatatactgttcttgcgtgctctgcacttcttggctagctagctggtcggccatggcggatcaccagaggcagaggatccacccggtggacctggaggcgggccagccgaggccctcggcgccgctggtgccgccggggagctcgttccggtccgacaagggcgaccctgccgcggccccggacaggaggccgccgcaccaccagccgctgcccccgccgaagcggcgcaggggctgctgctgccgcttcatctgctgcgtcctggtgaccgtcatcctgctcgccgtcctcgccgcggtggccctgggcgcgctctacctggtgttccagcccaaggcgccccactactcggtggaccggctgtcggtgtcgcagttccaggtggacccgaccctcacggcgagcgcgcggttcgacgtcacggtgacggcggcgaaccccaacagccgcatcggcatcttctacgagcgcgggtccagcctgagcgtgtggtacgacacccaccggctcgcccagggcgcgctcccggccttctaccagggccgccgcaacacgacggtgctgggcgtggtaatggccgggcaggcgcagctgggcagcgcggtggtggcggcgctgcgcgacgagcagcagacgggcgccgtgccgctggtgttccgcgccgacgtgcccgtgcgggtggagctcggcagcctcaagctgtggacggtcacgtccagggtgcgctgcgacctcgtcgtcgacagcctcctcaacgccagcagccagatcaagatcaaggccagcaactgcaagttcagcttgaagctgtgatcggcccttgtctttcttttcgttcatggtgtagtgtaattctttgggtggttcgttctggggataggtcgatcgagttcttcgccctgtgggcgcgctggattcttttggcagcagagagccgtgccgtgtttgcatcggtgcactcccgccccctagcatatcttttctagtagctccgtgcatgtacatcttgtgtagagttgatattaccttgcgttagagaggagtaataat

SEQ ID NO: 29335 - protein, 253 aa, Triticum aestivum
MADHQRQRIHPVDLEAGQPRPSAPLVPPGSSFRSDKGDPAAAPDRRPPHHQPLPPPKRRRGCCCRFICCVLVTVILLAVLAAVALGALYLVFQPKAPHYSVDRLSVSQFQVDPTLTASARFDVTVTAANPNSRIGIFYERGSSLSVWYDTHRLAQGALPAFYQGRRNTTVLGVVMAGQAQLGSAVVAALRDEQQTGAVPLVFRADVPVRVELGSLKLWTVTSRVRCDLVVDSLLNASSQIKIKASNCKFSLKL

SEQ ID NO: 29336 - DNA, 1196 bp, Triticum aestivum
agaacatcctaatcgaaaactcgatcacatcacatcctcgtgggtgcacgcagcctctgtcggcaggcacagcgggggaacccgcgagcgagctctccaccggccatctgccatgtcagagcccggcgcgaacggcgcccgtcggcggcagcgcaggaggtggcgcctgtactggtgctacgtgtgccgccgcgcgctgcgcacggtgtcgtccccgacctccgacgtcttctgcccgcgctgcctcggccgcttcctccacgagatcgaactccccgtgccgcgcgagcccgtgcacgcgccgaccgagcggctcttccagccgccgccgttgttcccgtacgagggcgccccccgccactgggtcatatacaggggcgaggacgacgacgacgcggccgacacgccaggcccacgtctccgccgcgtcccgtccccgccgccggccccgggaacgcacggcggcttgggcggtgccgatgccggtccaccggcaaccggcatcgacccggcggggttcttcaccggccccaacctgaacgcgctcatcgatggtctgacgcagaacgaccgccccggcccgccgcccgcgccggcgtcggcgatcgactcgctccccacggtgcacgtctcgccggagcacatggcggacggctcgcagtgccccgtgtgcaaggatgagttcgagctcggcgagaccgcgcgcgagctgccgtgcaagcacgcctaccactccgactgcatcgtgccgtggctccggctccacaactcctgccctgtctgccggcaggagctgccaatgccggccggtgatgaatctcccgatggcgcgggcgcaggcgacggaggcgaggagacggttccgccgtggcagctgcttgccggctgggggccactggcttggctgctaacgctgggggaaccggacgtgggcggctgggataatggatctcggcagcgtgggacggaagccgacgccgatgacaccggcggcaatgtcagtcgtggcgccacgattcttcagtcgtttgttctcgtcgctgcgtgctttttctttgtctcctttctcgtttgagaaatggcacattggagactgtcacgtgtgcatatcatttattcggaaaagaaaacccaggtttcacgtgcaccacgcatgatcagacaaaaaaaaaaaaaaaaaagcttatcgataccgt

SEQ ID NO: 29337 - protein, 357 aa, Triticum aestivum
EHPNRKLDHITSSWVHAASVGRHSGGTRERALHRPSAMSEPGANGARRRQRRRWRLYWCYVCRRALRTVSSPTSDVFCPRCLGRFLHEIELPVPREPVHAPTERLFQPPPLFPYEGAPRHWVIYRGEDDDDAADTPGPRLRRVPSPPPAPGTHGGLGGADAGPPATGIDPAGFFTGPNLNALIDGLTQNDRPGPPPAPASAIDSLPTVHVSPEHMADGSQCPVCKDEFELGETARELPCKHAYHSDCIVPWLRLHNSCPVCRQELPMPAGDESPDGAGAGDGGEETVPPWQLLAGWGPLAWLLTLGEPDVGGWDNGSRQRGTEADADDTGGNVSRGATILQSFVLVAACFFFVSFLV

SEQ ID NO: 29338 - protein, 320 aa, Triticum aestivum
MSEPGANGARRRQRRRWRLYWCYVCRRALRTVSSPTSDVFCPRCLGRFLHEIELPVPREPVHAPTERLFQPPPLFPYEGAPRHWVIYRGEDDDDAADTPGPRLRRVPSPPPAPGTHGGLGGADAGPPATGIDPAGFFTGPNLNALIDGLTQNDRPGPPPAPASAIDSLPTVHVSPEHMADGSQCPVCKDEFELGETARELPCKHAYHSDCIVPWLRLHNSCPVCRQELPMPAGDESPDGAGAGDGGEETVPPWQLLAGWGPLAWLLTLGEPDVGGWDNGSRQRGTEADADDTGGNVSRGATILQSFVLVAACFFFVSFLV

SEQ ID NO: 29339 - protein, 178 aa, Triticum aestivum
NILIENSITSHPRGCTQPLSAGTAGEPASELSTGHLPCQSPARTAPVGGSAGGGACTGATCAAARCARCRPRPPTSSARAASAASSTRSNSPCRASPCTRRPSGSSSRRRCSRTRAPPATGSYTGARTTTTRPTRQAHVSAASRPRRRPRERTAAWAVPMPVHRQPASTRRGSSPAPT

SEQ ID NO: 29340 - DNA, 426 bp, Triticum aestivum
acaagcccaccaccattgcactcgaaagcttcagctcaagctcaagctccacatcaacaatggcgagcagcagctcaatgctggccgtcctagccaccctggccctgctgctctccccagccgcctcagccctgtcgtccacgctgtccccggacttccacgcggagacgtgcccgcagctggacggcatcgtgcgcgcggcggtgcaggccgccctcacgagcgaaatcgccatcgccgctggcctcgtccgcatctacttccacgactgcttcccgcagggctgcgacgcctccatcctcctcaactccacctccgcccgcgagacggcgctgggccccaacctcagcatccagccgcgcgccatgcagctcgtcgagtccatccgctccacggcgcacgccgcctgcgggcccgttgtctcct

SEQ ID NO: 29341 - protein, 141 aa, Triticum aestivum
QAHHHCTRKLQLKLKLHINNGEQQLNAGRPSHPGPAALPSRLSPVVHAVPGLPRGDVPAAGRHRARGGAGRPHERNRHRRWPRPHLLPRLLPAGLRRLHPPQLHLRPRDGAGPQPQHPAARHAARRVHPLHGARRLRARCL

SEQ ID NO: 29342 - protein, 141 aa, Triticum aestivum
KPTTIALESFSSSSSSTSTMASSSSMLAVLATLALLLSPAASALSSTLSPDFHAETCPQLDGIVRAAVQAALTSEIAIAAGLVRIYFHDCFPQGCDASILLNSTSARETALGPNLSIQPRAMQLVESIRSTAHAACGPVVS

SEQ ID NO: 29343 - protein, 122 aa, Triticum aestivum
MASSSSMLAVLATLALLLSPAASALSSTLSPDFHAETCPQLDGIVRAAVQAALTSEIAIAAGLVRIYFHDCFPQGCDASILLNSTSARETALGPNLSIQPRAMQLVESIRSTAHAACGPVVS

SEQ ID NO: 29344 - DNA, 1880 bp, Triticum aestivum
acccgacccatccatcctcctaccagtccgcctcctcaaccccgccgacgcccgcgcgtgaagatcgcccgctccccggccggccgccggcgtccagagcagatacatacagatggacagccataattctacgtcgccccatgttcctgaagtaaccatggacatctcatccgcttctggagcagctgggaacaaagcttgcagaggtgctgcttgcgacttctctgacgccagtaacacctcgaaagattcaaaggagaggtctgcatccatgaagaagctcctaattgctgtgatcctttgtgttatattcatggcggttgaagtggttggaggcatcaaagcaaacagtcttgcaatcttgactgatgctgcccatctcctttcggatgttgcagcctttgccatatctttgttctccctatgggcagctggttgggaagcgacacctcagcagtcatatggatttttccgcatagagattcttggggcactggtttccattcagcttatatggctcctcgctggcatacttgtctacgaagctattatgaggctcattaatgaaagtggcgaggtacagggctccctcatgtttgctgtatcagcttttggtttgtttgttaacatcataatggcagtgttgcttggtcatgaccatgggcacggtggacatggacacagccatggtcatggccatggacattcacatgaccacgatcatggtaactcagaggatgaccattcccatcatggagatcatgagcaggggcatgtacatcaccatgagcacagccatggtacttctattaccgttacaactaatcaccactctcattcgagcactggacaacatcaggatgttgagcaaccattgcttaaacatgatggtgattgtgagagtgcccagcctggagccaagcctgctaagaagcctcgccgcaacatcaatgttcacagtgcctatctgcatgtaattggggactccatccagagcatcggcgtaatgattggaggggctctcatctggtacaagcccgaatggaaggttattgatctcatatgcaccctcatcttctctgtgattgtactgttcaccacaatcaagatgattcggaacatacttgaggtccttatggagagcacgccccgcgagatcgacgccaccaggcttgaaagtggtctccgtgagatggaaggtgtgattgctgtccatgagctgcacatctgggctatcacagtggggaaggtgctcttggcatgccatgtgacgatcacgcaggatgctgatgctgataaaatgcttgacaaggtcattgggtacatcaaggcagagtacaacatcagtcatgtgaccattcagattgagcgagagtaaggcacatgtcaggtagttggggataaaggtgtgtgcctgttaacggtctatcatcttaatgcagttaatgttagacttgcacttgcaaaggcgttgcaggttcatctagctgttgcctttggtgctggagaaatattatatgtacgcgttttcgttagcccattagttgaatgaactattcgggtggtcctagtcgtttgtattcacatggatgcaatttccagacaaattttgagccccttgtgagtttatcaacctgcatgtgtagtttcagtgacaccctttcttagcactcttatgtaaagatctgctacggtatggacagtactgggtatggatgtttattcagtttctgttagctttactaagcttgcttccagcagtttttatgtgcgaatttgcaccttgtgccattgtgtgctttctgtcagggatgtaggtcatctggtgcctaaaatgaagtgcactgctgccagttttaatgcatccattccactattgc

SEQ ID NO: 29345 - protein, 421 aa, Triticum aestivum
MDSHNSTSPHVPEVTMDISSASGAAGNKACRGAACDFSDASNTSKDSKERSASMKKLLIAVILCVIFMAVEVVGGIKANSLAILTDAAHLLSDVAAFAISLFSLWAAGWEATPQQSYGFFRIEILGALVSIQLIWLLAGILVYEAIMRLINESGEVQGSLMFAVSAFGLFVNIIMAVLLGHDHGHGGHGHSHGHGHGHSHDHDHGNSEDDHSHHGDHEQGHVHHHEHSHGTSITVTTNHHSHSSTGQHQDVEQPLLKHDGDCESAQPGAKPAKKPRRNINVHSAYLHVIGDSIQSIGVMIGGALIWYKPEWKVIDLICTLIFSVIVLFTTIKMIRNILEVLMESTPREIDATRLESGLREMEGVIAVHELHIWAITVGKVLLACHVTITQDADADKMLDKVIGYIKAEYNISHVTIQIERE

SEQ ID NO: 29346 - protein, 406 aa, Triticum aestivum
MDISSASGAAGNKACRGAACDFSDASNTSKDSKERSASMKKLLIAVILCVIFMAVEVVGGIKANSLAILTDAAHLLSDVAAFAISLFSLWAAGWEATPQQSYGFFRIEILGALVSIQLIWLLAGILVYEAIMRLINESGEVQGSLMFAVSAFGLFVNIIMAVLLGHDHGHGGHGHSHGHGHGHSHDHDHGNSEDDHSHHGDHEQGHVHHHEHSHGTSITVTTNHHSHSSTGQHQDVEQPLLKHDGDCESAQPGAKPAKKPRRNINVHSAYLHVIGDSIQSIGVMIGGALIWYKPEWKVIDLICTLIFSVIVLFTTIKMIRNILEVLMESTPREIDATRLESGLREMEGVIAVHELHIWAITVGKVLLACHVTITQDADADKMLDKVIGYIKAEYNISHVTIQIERE

SEQ ID NO: 29347 - protein, 368 aa, Triticum aestivum
MKKLLIAVILCVIFMAVEVVGGIKANSLAILTDAAHLLSDVAAFAISLFSLWAAGWEATPQQSYGFFRIEILGALVSIQLIWLLAGILVYEAIMRLINESGEVQGSLMFAVSAFGLFVNIIMAVLLGHDHGHGGHGHSHGHGHGHSHDHDHGNSEDDHSHHGDHEQGHVHHHEHSHGTSITVTTNHHSHSSTGQHQDVEQPLLKHDGDCESAQPGAKPAKKPRRNINVHSAYLHVIGDSIQSIGVMIGGALIWYKPEWKVIDLICTLIFSVIVLFTTIKMIRNILEVLMESTPREIDATRLESGLREMEGVIAVHELHIWAITVGKVLLACHVTITQDADADKMLDKVIGYIKAEYNISHVTIQIERE

SEQ ID NO: 29348 - DNA, 1358 bp, Triticum aestivum
atcctaatcaaaaacccatcaaacagccctcgcgaactcaacgggaagcgactcacgcccccctccgccccccgcagatcgcccgctccgccacgcgccgccgacgccgccgccaatggccgccgccgccgacgccgggcccgagctgcggcggagctccagcatcgaccgcatcccggcggaggcgcgccgcatcctgcaccgcctcgccggcgagctctggggcgccgacgtcgaccccgccgcgctcgtcgtgtcccagctcaagggcgccctcaccaacgaggtcttccgcatcacctggcccggcggcgagggcgacccgcgcaaggtgctcgtgcgcatctacggccagggcgtcgaggtcttcttcgaccgcgccgacgaggtccgcaccttcgagtgcatgtcccgccacggccagggcccccgcctcctcggccgcttcccccagggccgcgtcgaggagttcatcaacgccaggacgctctcggcgccggatctgcgcgacccggagatttccggcctgattgccaggaagctgcgggagtttcacgagctcgacatgcctggacccaaggacatctcactctggcagaggctgaggcgttggcttgaggaagctcgcagcaggtgctcgactgaggaggccagggaattgcggttggagacgctcggcgatgagattgcggagctggagaatgtattgtccggggtcgatcagagagtagtattttgccataatgatttgcagtatggcaacattatgatatacgaagagaccagacaagtgaccttaatcgactatgaatacgccagttttaaccctgttgcgttcgacattgcgaatcacttctgtgagatggctgctgattatcatagtgatacaccgcacgtgatggactttacaaaatatcctgacgtggatgaacagcggagatttcttgaggcttaccttagttcttcaggagaaaacacatccgatgtagaagtcgaaacattgcttggcttgattgcaaagtacagtctcacaagccatctcttctggggtctctggggaatagtctcggcgcatgtgaacaagaacatcgactttgagtacaaggagtacgcgaggcatcggttcgaccagtactgggacacgaagcctagaatactgcaagcctgcaacccaaccagctgatcacgcgcatggctcattctttttcttattatagcacccatcgcctctcgagtagctctgtagagtcctgtgactgaatcttgttcatcagccaatttggttgcaaatcgtttaggctagtagttgaccgtgtcgtgtaattaaacctgcgcagaatagtcgattctacggtttt

SEQ ID NO: 29349 - protein, 355 aa, Triticum aestivum
MAAAADAGPELRRSSSIDRIPAEARRILHRLAGELWGADVDPAALVVSQLKGALTNEVFRITWPGGEGDPRKVLVRIYGQGVEVFFDRADEVRTFECMSRHGQGPRLLGRFPQGRVEEFINARTLSAPDLRDPEISGLIARKLREFHELDMPGPKDISLWQRLRRWLEEARSRCSTEEARELRLETLGDEIAELENVLSGVDQRVVFCHNDLQYGNIMIYEETRQVTLIDYEYASFNPVAFDIANHFCEMAADYHSDTPHVMDFTKYPDVDEQRRFLEAYLSSSGENTSDVEVETLLGLIAKYSLTSHLFWGLWGIVSAHVNKNIDFEYKEYARHRFDQYWDTKPRILQACNPTS

SEQ ID NO: 29350 - protein, 258 aa, Triticum aestivum
MSRHGQGPRLLGRFPQGRVEEFINARTLSAPDLRDPEISGLIARKLREFHELDMPGPKDISLWQRLRRWLEEARSRCSTEEARELRLETLGDEIAELENVLSGVDQRVVFCHNDLQYGNIMIYEETRQVTLIDYEYASFNPVAFDIANHFCEMAADYHSDTPHVMDFTKYPDVDEQRRFLEAYLSSSGENTSDVEVETLLGLIAKYSLTSHLFWGLWGIVSAHVNKNIDFEYKEYARHRFDQYWDTKPRILQACNPTS

SEQ ID NO: 29351 - protein, 205 aa, Triticum aestivum
MPGPKDISLWQRLRRWLEEARSRCSTEEARELRLETLGDEIAELENVLSGVDQRVVFCHNDLQYGNIMIYEETRQVTLIDYEYASFNPVAFDIANHFCEMAADYHSDTPHVMDFTKYPDVDEQRRFLEAYLSSSGENTSDVEVETLLGLIAKYSLTSHLFWGLWGIVSAHVNKNIDFEYKEYARHRFDQYWDTKPRILQACNPTS

SEQ ID NO: 29352 - DNA, 754 bp, Triticum aestivum
gtgatcgattccgattccgtgcccgcgcgtcgagcgatcggcccagagagctcgtcgacaaatctcgctcgtgtccatcagatcgccatcgccggcccacctgcccacctgcccaccagtcgatgatggccttcccctctttcacatggccgttccgccgccgagccgccgccggcgccagcggcggagccggcccaagcaaaccctccgccgctgaggggaaggaggaggacgcggaggagctcggcgtcacgccgcagctcctcgacttcctccggacgctctcccccgacgccttcaagtcctccgccctccagctccaccaaggggcctcggcggaggcggcgggagagctctcggactggcagcagcggcacgccgtcctcgtgctcgccagagccaaggaactcgctaaggtccgctatgatttgtgcccacgccacatgaaggacaagcagttctggacaatctacttcctgctcgccaggacctacatcttgccgtacgagttacgtgccatacaaaaagagaaggtaagaaggatggagacagagaacggaaagtcaaaagaagtgattgctgttgaggtggagatgcaggaatcgaaatgcagtagagaatctcaaacgttaccagatgattcagaacctcaggattcatagttgatgttgctgacggcatattaggtaagggctggaagcagctgtatcaaaattgatatttggcttaattcagaactcatttttcccgttgg

SEQ ID NO: 29353 - protein, 219 aa, Triticum aestivum
DRFRFRARASSDRPRELVDKSRSCPSDRHRRPTCPPAHQSMMAFPSFTWPFRRRAAAGASGGAGPSKPSAAEGKEEDAEELGVTPQLLDFLRTLSPDAFKSSALQLHQGASAEAAGELSDWQQRHAVLVLARAKELAKVRYDLCPRHMKDKQFWTIYFLLARTYILPYELRAIQKEKVRRMETENGKSKEVIAVEVEMQESKCSRESQTLPDDSEPQDS

SEQ ID NO: 29354 - protein, 179 aa, Triticum aestivum
MMAFPSFTWPFRRRAAAGASGGAGPSKPSAAEGKEEDAEELGVTPQLLDFLRTLSPDAFKSSALQLHQGASAEAAGELSDWQQRHAVLVLARAKELAKVRYDLCPRHMKDKQFWTIYFLLARTYILPYELRAIQKEKVRRMETENGKSKEVIAVEVEMQESKCSRESQTLPDDSEPQDS

SEQ ID NO: 29355 - protein, 178 aa, Triticum aestivum
MAFPSFTWPFRRRAAAGASGGAGPSKPSAAEGKEEDAEELGVTPQLLDFLRTLSPDAFKSSALQLHQGASAEAAGELSDWQQRHAVLVLARAKELAKVRYDLCPRHMKDKQFWTIYFLLARTYILPYELRAIQKEKVRRMETENGKSKEVIAVEVEMQESKCSRESQTLPDDSEPQDS

SEQ ID NO: 29356 - DNA, 804 bp, Triticum aestivum
gctcggcgcagccgcacccttccgcaagaaagaaaggggaggggaggggagaacagaataaacatcagacccgcaaagaggaggagcgaaacagcatccctgccttcctccacgcccgtagggtttccggatcggaggagcccaagccgccgcagccatggttcgcggatcgctcgggaggttggcgtcgcgcaccctctccgtcgccggcaaatggcagcaccagcagctccgccgcctcaacatccacgagtaccagggcgcggagttgatggggaagttcgggatcaacgtgcccaagggcgccgtggtggggtcagtgcaggaggtcaaggaagttttgaagaacgtcttccccagtgagaaagagatagttgtgaaaagccaaatccttgccggtggccgtggattgggaactttcaaaagtggactaaagggtggtgttcatattgttaaggctgaggaggctgaaagccttgcagctaaaatgcttaaccaggtcctggtaacaaaacaaactggtccacaggggaaggttgtgggcaagctcattatagcttgtgctgagggaggaacgagtattgaagatcttgcagagaagttccctgataagatcgttaaggttcctgttgatgtattcaagggaatcactgatgaggatgagattaggttccggctgaagagtgagaggtggaagactggtaccatttgtatagcttgtgtgataaaaagactagacattttgggtgtacactcctccgtgttggtgttgccacccgtgaacataaacactgcctgtatgtt

SEQ ID NO: 29357 - protein, 215 aa, Triticum aestivum
MVRGSLGRLASRTLSVAGKWQHQQLRRLNIHEYQGAELMGKFGINVPKGAVVGSVQEVKEVLKNVFPSEKEIVVKSQILAGGRGLGTFKSGLKGGVHIVKAEEAESLAAKMLNQVLVTKQTGPQGKVVGKLIIACAEGGTSIEDLAEKFPDKIVKVPVDVFKGITDEDEIRFRLKSERWKTGTICIACVIKRLDILGVHSSVLVLPPVNINTACM

SEQ ID NO: 29358 - protein, 177 aa, Triticum aestivum
MGKFGINVPKGAVVGSVQEVKEVLKNVFPSEKEIVVKSQILAGGRGLGTFKSGLKGGVHIVKAEEAESLAAKMLNQVLVTKQTGPQGKVVGKLIIACAEGGTSIEDLAEKFPDKIVKVPVDVFKGITDEDEIRFRLKSERWKTGTICIACVIKRLDILGVHSSVLVLPPVNINTACM

SEQ ID NO: 29359 - protein, 120 aa, Triticum aestivum
ARRSRTLPQERKGRGGENRINIRPAKRRSETASLPSSTPVGFPDRRSPSRRSHGSRIAREVGVAHPLRRRQMAAPAAPPPQHPRVPGRGVDGEVRDQRAQGRRGGVSAGGQGSFEERLPQ

SEQ ID NO: 29360 - DNA, 1375 bp, Triticum aestivum
acctagaacatcctaatcgaaaagatattttcctcctctccgtgcggacaactccactccactcgtccactcctactaccagcttctcactcccactcccgcaggcgggtgatccatggccacggcgctccgcctcccgtctctcctctcctcccgcgccgcccctaccaccgccgctcgcgctaccatccgagggaatcggacaggatcgttcactcacagggtcgccgcgcagcctgacgacaccaccgccaccacctccacctccaccacgccggctccgcccgccgggttcacgcctccggttcccaagcggttcgaggtcaagcccggccagtcaaacaacatcgccggcgccgccctcgctttgcccttccgcctcggcaccggcgtcttcgtcctaggatatggagtgacacttgttgatgctaacgagatatcaccagatcaatatgctttggatttccaaggtcggaaggtgaaagaaacgtcgaaggtggggcagtgccctcgacctgctaagcctattgaaatatacgagtttgaaggatgtccattttgtcgaaaggtcagagagatggtatccgtcctggaccttgatgttttatattacccttgtcctaaaggcagcccaaccttccggccaaaggttctagagatgggtggaaagaaacagtttccttacatggtcgatccaaacacaggagttgctatgtatgaatcagatgacatcataaattacctggcaaaaacttacggtgatggaagtgttccaattatgctaaaacttggtctattgacaacaataacggcagggcttgcattgagtgggcgtagcgggaaggggtcttcctacagtcctgcaaagcttccatctcagccaatagagatatgggcatacgagggatctcctttctgtaaaatagcgcgtgagacccttgtcgaattggagttgccacacttgctacacagctgtgcgcgtggcagccccaagcgacaggatttttttgagaaatatggtcttttccaggcgccttatatcgaggatcctaacacgggggtaaagatgttcgaaagcgccgacatcgtagagtatctgagggcaacatatgctgcttgagaatccctgtcactgtcttttctcagtaaataactaaatattgagctcatagctgccatgtctcttctcatgtagtagatcacattctttactaggaaaaatggtgcatactagatatgtaaggtgtaaattatattcgctgcagctgagacagcgtctttgctatctaagagacactgaatctgaggccgtagaaaagggaaaaaaaaaaaaaaaaaagcttatcgataccgtcgacctcgagggggggcccgg

SEQ ID NO: 29361 - protein, 334 aa, Triticum aestivum
MATALRLPSLLSSRAAPTTAARATIRGNRTGSFTHRVAAQPDDTTATTSTSTTPAPPAGFTPPVPKRFEVKPGQSNNIAGAALALPFRLGTGVFVLGYGVTLVDANEISPDQYALDFQGRKVKETSKVGQCPRPAKPIEIYEFEGCPFCRKVREMVSVLDLDVLYYPCPKGSPTFRPKVLEMGGKKQFPYMVDPNTGVAMYESDDIINYLAKTYGDGSVPIMLKLGLLTTITAGLALSGRSGKGSSYSPAKLPSQPIEIWAYEGSPFCKIARETLVELELPHLLHSCARGSPKRQDFFEKYGLFQAPYIEDPNTGVKMFESADIVEYLRATYAA

SEQ ID NO: 29362 - protein, 180 aa, Triticum aestivum
MVSVLDLDVLYYPCPKGSPTFRPKVLEMGGKKQFPYMVDPNTGVAMYESDDIINYLAKTYGDGSVPIMLKLGLLTTITAGLALSGRSGKGSSYSPAKLPSQPIEIWAYEGSPFCKIARETLVELELPHLLHSCARGSPKRQDFFEKYGLFQAPYIEDPNTGVKMFESADIVEYLRATYAA

SEQ ID NO: 29363 - DNA, 1410 bp, Triticum aestivum
aacgcaaaccctcaccactctcaaacaaccggcggcggccgttccccattccctcgccgccggccgccgcgccgccatgctccgccacctcctctcgtctccagccacctctccggtatcccctctccaccgcctcctctccgccgtctccaccccgacaaccgggttcgccgtggaggactacctcgtcggcacctgcggcctcacccgggcccaggcactcaaggcctccgccaagctctcccacctcaagtcccccgccaaccccgacgccgtcctcgccttcctcgccggcctcggcctctccgccgccggcgtcgccgccgccgtcgcccgggaccccaagttcctctgcgccggcgtggagagaacactggagcccgtcgtcgcagggctctccggcctcggcgtatcacgttctgaggtcgcgcgcctcgtctctgtttctgccagcctcttccggcatcgatccatcgtctccaatgtcgctctcctgcaagagagtggggtagatgtttgtgatattgccaagctgtgccttgctgtgccacggctgctccgcagcagcccggagcgcgtccaggcggcggtggcgtccgccgaagcactcggtgtgccccgtggatccggaatgttcaggtatgcgctgcaatctgttgcattcttcagcgaggagatgatcgctgccagagtggcctacttgaagaagacgttcaggtggtcggatgccgacgtgagcatcgctgtgtgtagggatccgcctttgcttacaaaatcaaaggaattgctgcggtgcaggtctaaattcctcttctccgaggtggggttagcaccagcctacattgctcgtcggcctgcaatgatctgttacagcctagagggccggttgagacctcggtactacgttgtaaagtttctcaagggaaatggattgctcaagcgcgacccgagctactatactgttttcaaggtgtccgaggatgtttttatggccaagttcatacgccctcacaaggaaattgccccgcaactagctgaagactatgccaccgcttgcggaggagaagtaccttctaatttcagatttacatgaaccaagaacgggctgtgaagtgataatgctggtaatttctgattcggtgttatttgccaaactggatgcttgttgtcaagctggtaatttgattatgtgtcattgaatgctagttacatcattcattcagtagagaagaaagtatagcactgcaatgaacttgtccatcctcattcgtataatactgacacacatactggaactaagagtgtgagagatcagatcagagcattctacaaatgctttcaaatatcggtaaagtgtatgtctgcacactctacctttatgttctcaatggccattgcagttttcaatgc

SEQ ID NO: 29364 - protein, 363 aa, Triticum aestivum
TQTLTTLKQPAAAVPHSLAAGRRAAMLRHLLSSPATSPVSPLHRLLSAVSTPTTGFAVEDYLVGTCGLTRAQALKASAKLSHLKSPANPDAVLAFLAGLGLSAAGVAAAVARDPKFLCAGVERTLEPVVAGLSGLGVSRSEVARLVSVSASLFRHRSIVSNVALLQESGVDVCDIAKLCLAVPRLLRSSPERVQAAVASAEALGVPRGSGMFRYALQSVAFFSEEMIAARVAYLKKTFRWSDADVSIAVCRDPPLLTKSKELLRCRSKFLFSEVGLAPAYIARRPAMICYSLEGRLRPRYYVVKFLKGNGLLKRDPSYYTVFKVSEDVFMAKFIRPHKEIAPQLAEDYATACGGEVPSNFRFT

SEQ ID NO: 29365 - protein, 338 aa, Triticum aestivum
MLRHLLSSPATSPVSPLHRLLSAVSTPTTGFAVEDYLVGTCGLTRAQALKASAKLSHLKSPANPDAVLAFLAGLGLSAAGVAAAVARDPKFLCAGVERTLEPVVAGLSGLGVSRSEVARLVSVSASLFRHRSIVSNVALLQESGVDVCDIAKLCLAVPRLLRSSPERVQAAVASAEALGVPRGSGMFRYALQSVAFFSEEMIAARVAYLKKTFRWSDADVSIAVCRDPPLLTKSKELLRCRSKFLFSEVGLAPAYIARRPAMICYSLEGRLRPRYYVVKFLKGNGLLKRDPSYYTVFKVSEDVFMAKFIRPHKEIAPQLAEDYATACGGEVPSNFRFT

SEQ ID NO: 29366 - DNA, 509 bp, Triticum aestivum
aggaaaatagacattccaacgcagttcccccacccccacctcgcctgagcaggtcgccggcgaccgacaggccttcagctcgcccccaacctccccacccctcccgcgacgacccggggggaggcgccgagcgagcaggggggatggagttcacggaggcgtacaagcagacgggcccgtgctgcttctctcccgacgcccgcttcctcgccgtcgcctgcgactaccgcctcgtggtccgcgacgtcgtcaccctcaaggtggtgcagttgttttcatgtgtagacaagataaactttttggagtgggcaccagattcagaatacattctatgtggactttacaagcggccaatggtgcaggcttggtcgctgagccagcctgactggacctgtaagattgatgaaggatctgcagggattgcttatgctcgctggagtcctgacagtcgtcatatactcactacatcagagttccaactccgtttgactgtatggtctcttgtaaat

SEQ ID NO: 29367 - protein, 169 aa, Triticum aestivum
ENRHSNAVPPPPPRLSRSPATDRPSARPQPPHPSRDDPGGGAERAGGMEFTEAYKQTGPCCFSPDARFLAVACDYRLVVRDVVTLKVVQLFSCVDKINFLEWAPDSEYILCGLYKRPMVQAWSLSQPDWTCKIDEGSAGIAYARWSPDSRHILTTSEFQLRLTVWSLVN

SEQ ID NO: 29368 - protein, 122 aa, Triticum aestivum
MEFTEAYKQTGPCCFSPDARFLAVACDYRLVVRDVVTLKVVQLFSCVDKINFLEWAPDSEYILCGLYKRPMVQAWSLSQPDWTCKIDEGSAGIAYARWSPDSRHILTTSEFQLRLTVWSLVN

SEQ ID NO: 29369 - DNA, 1296 bp, Triticum aestivum
aagatcaacaccaaacctctagatatagctggtatctttacctcgcgccgcccgaagacatggtatccgcgacgacgatgcaccaccggcgccgctccattctccagctggccctcctactactggcggcgtcaccggcggcaatgctggcggccggcggagcctgcgagagagaggagttcccggccggcaggagctacgcgacgtgcgcggatctccctgccctcggcgcctcgctgcactggacgtacgacgcggcggcctcgtcgttgtccctggcattcgcggccaagccgcccggcgcgagcggcgccggctgggtggcttggggggtcaaccccaccggcgatggcatgaagggcgcgcagacgctcctcgccttcaagagcaaaggcgcatacgtcgtcaacacgtacaacctcaccgggtaccgcccgctcagcgcggcgtccacgccgatcgcgttcgaggccaccgagctcgccgccgacgagggcgccgacgggaaggtgcggctctacggcacgctgcagctgcccaagggcatggaggccgtgaaccacatctggcaggtagggtcgacggtggccaatggggtgccggccaagcacgcgttcgcgcaggagaacctcgaggcgaagggcagtcttgtgctcaccggtgccggagcgacggaggccgcgccagctccggtgtttatctctcacgactatctcgattaaccagtagcagtagtgtttgggatacaaaattcaagagagaaagagagagtggggaaggagaaggaagtaggtaaggaagaacagagctggcaacaatctgcaaaaaaaaacacacacacacacacacacaccaatcttggggatgatccgtcgggaaagaaaattaagagtattaagaaaactaagaatactatgagcacttctaattcagatgatttcacaatagttcccccacaaaaaacatcaacatgagtgacaacaatgtgagtgatcatgagcataattttaatttgtctactataaagtatgcaaattcggtgagaaccaatttttgataatatgtgttctgggcgtcaatctccgttcaattgcaatcaaccgcccatattatgcttcaagggttggatgtacaacagtagtgttttttctagagaaaatttggagcgttctccttgtttgggtgatgtaccatgtaaaaaattactttcactgatatatctgcgtacaataaaaatctttatagaggaaaaaacataacaaatgtattttttatgatcaaataatatgttgatac

SEQ ID NO: 29370 - protein, 239 aa, Triticum aestivum
DQHQTSRYSWYLYLAPPEDMVSATTMHHRRRSILQLALLLLAASPAAMLAAGGACEREEFPAGRSYATCADLPALGASLHWTYDAAASSLSLAFAAKPPGASGAGWVAWGVNPTGDGMKGAQTLLAFKSKGAYVVNTYNLTGYRPLSAASTPIAFEATELAADEGADGKVRLYGTLQLPKGMEAVNHIWQVGSTVANGVPAKHAFAQENLEAKGSLVLTGAGATEAAPAPVFISHDYLD

SEQ ID NO: 29371 - protein, 220 aa, Triticum aestivum
MVSATTMHHRRRSILQLALLLLAASPAAMLAAGGACEREEFPAGRSYATCADLPALGASLHWTYDAAASSLSLAFAAKPPGASGAGWVAWGVNPTGDGMKGAQTLLAFKSKGAYVVNTYNLTGYRPLSAASTPIAFEATELAADEGADGKVRLYGTLQLPKGMEAVNHIWQVGSTVANGVPAKHAFAQENLEAKGSLVLTGAGATEAAPAPVFISHDYLD

SEQ ID NO: 29372 - protein, 214 aa, Triticum aestivum
MHHRRRSILQLALLLLAASPAAMLAAGGACEREEFPAGRSYATCADLPALGASLHWTYDAAASSLSLAFAAKPPGASGAGWVAWGVNPTGDGMKGAQTLLAFKSKGAYVVNTYNLTGYRPLSAASTPIAFEATELAADEGADGKVRLYGTLQLPKGMEAVNHIWQVGSTVANGVPAKHAFAQENLEAKGSLVLTGAGATEAAPAPVFISHDYLD

SEQ ID NO: 29373 - DNA, 1096 bp, Triticum aestivum
gagcccaatccgggcactggaaatttctagcatcgcgacggtttaaggaagcatcgcgacgtctaatcgtggcccccctctaacaccttttgccgagacgagattctcttccgcagccgcccccgtcgacgtcgccgtcgccgtcttttgccaccgcgatgcctcggtattattgcgattactgcgacacttatctgacccatgactcgccatctgtccgtaagcaacacaatgctggatataaacacaaggcaaatgttcgtaactactatcagcaattcgaggagcagcaaactcaaagtttgattgatcaaaggataaaggaacacctgggacaagctgcagcgttccaagttggcgctcctttcaaccaacatcttcttcaatatccaggaaatatgccccgtccccgtcttccgattctgcccacacccatgatgcaacatggttatcctcaacatcaacaacctggtgggccatttgcaaggcctcctattttaccagttcctggggctccaggttatcctggtgctccaaccatgccgcagcacgggggccctcctggttcaatgcctatgcaggtggcacctcccccaaggcctccgacactaccacctccaacatttggggccccaggtgcacccatgtccaacaacgcatcacctccaggtcctccaccgatgtatcaaccaaatcaaccaccaactgcaggctcaacttctggcgctccacccctggccccagcggcccctccacaggctgcattctcctatgcacaatcgaatgaaggcaaccactgatctgttccttggtggttatcaaatgagattcgaagaacagccgtaacttggaagttgatgcttcctgcctgtctgtctcctgaatttcggaggcagtctgtctcttgaaatttggagaattgttaagaaaggcttcctgcagtagtattttttgtattttaggtggtgtaacctttacttcttaatacaccgacttcgtattagtttcttgcccttgaaacttgataatggatataacccatggatggcgtacttgatgtagtacatatttgtcattaaaacaaatttatttgttg

SEQ ID NO: 29374 - protein, 213 aa, Triticum aestivum
MPRYYCDYCDTYLTHDSPSVRKQHNAGYKHKANVRNYYQQFEEQQTQSLIDQRIKEHLGQAAAFQVGAPFNQHLLQYPGNMPRPRLPILPTPMMQHGYPQHQQPGGPFARPPILPVPGAPGYPGAPTMPQHGGPPGSMPMQVAPPPRPPTLPPPTFGAPGAPMSNNASPPGPPPMYQPNQPPTAGSTSGAPPLAPAAPPQAAFSYAQSNEGNH

SEQ ID NO: 29375 - protein, 133 aa, Triticum aestivum
MPRPRLPILPTPMMQHGYPQHQQPGGPFARPPILPVPGAPGYPGAPTMPQHGGPPGSMPMQVAPPPRPPTLPPPTFGAPGAPMSNNASPPGPPPMYQPNQPPTAGSTSGAPPLAPAAPPQAAFSYAQSNEGNH

SEQ ID NO: 29376 - protein, 133 aa, Triticum aestivum
MVILNINNLVGHLQGLLFYQFLGLQVILVLQPCRSTGALLVQCLCRWHLPQGLRHYHLQHLGPQVHPCPTTHHLQVLHRCINQINHQLQAQLLALHPWPQRPLHRLHSPMHNRMKATTDLFLGGYQMRFEEQP

SEQ ID NO: 29377 - DNA, 1569 bp, Triticum aestivum
gaaagccggctcttgctcttgttcttcgtcttcctctacactgcatatttacacatgcaagaattgagaagcacaacaaagagcgcgcagagctaattaagctaagctaggtaaacaaggtagtccacttggttgcaggatggcgtgggtgagggacatgaagacgaagctcgaggacgccgagctgccggacaaggtgcagagatggccgaagcactgcattttcagcgtcccaccgcgcttcaagatggtcgacagcagcgtctacaagccgcagactgtgtctctcggcccattccatcatggcgctcaggacctgaaatccatggaggagcacaagttgagggctgtccgtcacctcctggcccgggacagctacataacctcccttgacgaccttgtcagggccgtggaagaggtggccgacgagctggaggactcctacatggacctaagtggagagtggcgtggcaaggagaacaggggcaagttcctcgagatgatgatcacggacggctgcttcctgctggaggtgatgaggacggacgcgacccaaaaggaggactccgttgtaaagggctatgcgcacgaccccgtcttcagctggtatggcatacaacacatcaagccgttcgtccaacgtgacatgctcttggtagagaaccagctgccactcaggttgctccagagaatcgttgccatggaggaaacgcactctccgaggcagaacacagattccataaattgcatggtgctcaagttcctggggcagaaagatgcacagcccagatatgagttgggactccacccgctcgacatctaccggacgagccagttcaggggcatccaagagcatattaacactgccagttgtctgatgatccatcatcaacatatgatgcgggaggagacccatcgtccacagagacccctggcccgatctgcgcgggagctgaccgaggcagggatccggttactgcccatagagacaagccgcctcaacgatttccggttcgataggagtgatgggacgctccaaatgcccaagatccacgtgcatgactccaccgcctacatgttccgcaacatgatggcgttcgaggtgctgcgcgtcggcaccaccaacgacgtgacggcgtacgtcatgtttctcaaggacatcgtcgactccgcctacgatgttcgcctgctggtgaggaacggggtcctggagcacgaccttgccaacgacaacgccgtggtgaggctcttcaacggcctcaccagggacgtgacaaggaactgggagaatcagctggcgtacatgaaggtgcgtgaagacgtggagaactactgcatgacccaccaccgcaccaactgcgtgcgcctctttctcaatcaatcctgggcctacctcatgaccaagtacttgagcaacccctggacattccttggcctcgtcaccgccaccttgctcctcgtcgcagatatcgtgcaggccgtgtatgcagtcaaatcgtacaaagagggcaaatgaatgtattaatcagaagcatttcatacatttgttgtttttattcaattgttttg

SEQ ID NO: 29378 - protein, 458 aa, Triticum aestivum
MAWVRDMKTKLEDAELPDKVQRWPKHCIFSVPPRFKMVDSSVYKPQTVSLGPFHHGAQDLKSMEEHKLRAVRHLLARDSYITSLDDLVRAVEEVADELEDSYMDLSGEWRGKENRGKFLEMMITDGCFLLEVMRTDATQKEDSVVKGYAHDPVFSWYGIQHIKPFVQRDMLLVENQLPLRLLQRIVAMEETHSPRQNTDSINCMVLKFLGQKDAQPRYELGLHPLDIYRTSQFRGIQEHINTASCLMIHHQHMMREETHRPQRPLARSARELTEAGIRLLPIETSRLNDFRFDRSDGTLQMPKIHVHDSTAYMFRNMMAFEVLRVGTTNDVTAYVMFLKDIVDSAYDVRLLVRNGVLEHDLANDNAVVRLFNGLTRDVTRNWENQLAYMKVREDVENYCMTHHRTNCVRLFLNQSWAYLMTKYLSNPWTFLGLVTATLLLVADIVQAVYAVKSYKEGK

SEQ ID NO: 29379 - protein, 452 aa, Triticum aestivum
MKTKLEDAELPDKVQRWPKHCIFSVPPRFKMVDSSVYKPQTVSLGPFHHGAQDLKSMEEHKLRAVRHLLARDSYITSLDDLVRAVEEVADELEDSYMDLSGEWRGKENRGKFLEMMITDGCFLLEVMRTDATQKEDSVVKGYAHDPVFSWYGIQHIKPFVQRDMLLVENQLPLRLLQRIVAMEETHSPRQNTDSINCMVLKFLGQKDAQPRYELGLHPLDIYRTSQFRGIQEHINTASCLMIHHQHMMREETHRPQRPLARSARELTEAGIRLLPIETSRLNDFRFDRSDGTLQMPKIHVHDSTAYMFRNMMAFEVLRVGTTNDVTAYVMFLKDIVDSAYDVRLLVRNGVLEHDLANDNAVVRLFNGLTRDVTRNWENQLAYMKVREDVENYCMTHHRTNCVRLFLNQSWAYLMTKYLSNPWTFLGLVTATLLLVADIVQAVYAVKSYKEGK

SEQ ID NO: 29380 - protein, 422 aa, Triticum aestivum
MVDSSVYKPQTVSLGPFHHGAQDLKSMEEHKLRAVRHLLARDSYITSLDDLVRAVEEVADELEDSYMDLSGEWRGKENRGKFLEMMITDGCFLLEVMRTDATQKEDSVVKGYAHDPVFSWYGIQHIKPFVQRDMLLVENQLPLRLLQRIVAMEETHSPRQNTDSINCMVLKFLGQKDAQPRYELGLHPLDIYRTSQFRGIQEHINTASCLMIHHQHMMREETHRPQRPLARSARELTEAGIRLLPIETSRLNDFRFDRSDGTLQMPKIHVHDSTAYMFRNMMAFEVLRVGTTNDVTAYVMFLKDIVDSAYDVRLLVRNGVLEHDLANDNAVVRLFNGLTRDVTRNWENQLAYMKVREDVENYCMTHHRTNCVRLFLNQSWAYLMTKYLSNPWTFLGLVTATLLLVADIVQAVYAVKSYKEGK

SEQ ID NO: 29381 - DNA, 550 bp, Triticum aestivum
aaaccacacccaaacacgtagtgcacctcctccactaaaagatcatcagccttcagcagagctacactagctccaagccaccgagagaaaaatggccggcttctcgtgcacgagcacgagccatgctgcagttgcactggtttcggcgctgctgctgagcctcgcgcacggcttgctgggggctcatggagccaggaggctcatggagctgtacaagccggaccccagcgagctcctcacttaccacaacggcgccgtgctgcagggcgccatcccggtcaccgtgctctggtacggccgcttcacgccggtccagaaggccgtcgtctccgacttcctcctctcgctcaccgccgcctccccggcgccgaccccgtccgtctcgcagtggtggggcaccatcgcccagctctacctctccaaggccaagggcgccaacgccaagcgcgcgacgcaggtagcgctcgccgggcaggtctccgaagagcgctgctcgctcgggaagagcctcgcgctgcccccaagctcgcggcgctggccgccagggcca

SEQ ID NO: 29382 - protein, 153 aa, Triticum aestivum
MAGFSCTSTSHAAVALVSALLLSLAHGLLGAHGARRLMELYKPDPSELLTYHNGAVLQGAIPVTVLWYGRFTPVQKAVVSDFLLSLTAASPAPTPSVSQWWGTIAQLYLSKAKGANAKRATQVALAGQVSEERCSLGKSLALPPSSRRWPPGP

SEQ ID NO: 29383 - protein, 116 aa, Triticum aestivum
MELYKPDPSELLTYHNGAVLQGAIPVTVLWYGRFTPVQKAVVSDFLLSLTAASPAPTPSVSQWWGTIAQLYLSKAKGANAKRATQVALAGQVSEERCSLGKSLALPPSSRRWPPGP

SEQ ID NO: 29384 - protein, 91 aa, Triticum aestivum
MEPGGSWSCTSRTPASSSLTTTAPCCRAPSRSPCSGTAASRRSRRPSSPTSSSRSPPPPRRRPRPSRSGGAPSPSSTSPRPRAPTPSARRR

SEQ ID NO: 29385 - DNA, 1130 bp, Triticum aestivum
atcccagccctacctgccattttcctccgttcgttcatctccttcgcctcgccaccgtccctcctcctctcttccctccctcatccctcatctcgtgtcggctcgaaagtcgaaaccctagaccaaccaccctcccctagtacgtaggaacagggacagagatgtatgcagaccagatctccaccggccgcaagcgctccatccatgaccgccttgacgccgacctcccctccgaccgcggcggcgcggacgccgccggccgggctcgtaacgcgctgtccaagaggcaacgacaaactgatgataaatggaagcatgatctttaccgggatgatgaatcagcttcaagatcagttgatccacgggatttgcgattcaagcttcagaagaaaagctctcagcaagggtttgctggccaaaagggttccggggtacgtgatctacgtgagatgttatctggaacaatgcacgcacaaccatcaaatgttgaccctcaaaagaggaaaccggtgtcagaggttgtgaaagtcacaaggcgtgaaattgttgatgaaaggcctgtacgcctaagtaagaaagtatcaaaaccatcaacatccaagaagacttctcagccaaaggctgaaagtccactcgacagttttctgaaatcacttggacttgagaagtattctattaccttccaggcggaggaggttgacatggcggccctacgtcacatgactgaaagtgatctcaaggcgttgggcatcccgatgggtcctaggaagaagattacccttgccttggaatccagagcgtagggcaatgtccctggagtacaatgtagaaaagcagggagatgtggtaggtttttgctcatctgcaaatttggcatatcttggaaagcagtggtacaggtaaacaatgcggtgtctcttgtaatggcatgttgctgtaagattattagactgctgttgtttatctggtctgcatgctttcctggccagaccagctgatttaactgatgaggtatccgtgctgttgaagctgcggtgatgttctcgctgtatactattattatgccttttttttcattggaaactggcattattagagtaatagagttgagattcttcagttagtatttc

SEQ ID NO: 29386 - protein, 213 aa, Triticum aestivum; identical to SEQ ID NO: 15297

SEQ ID NO: 29387 - protein, 119 aa, Triticum aestivum; identical to SEQ ID NO: 15298

SEQ ID NO: 29388 - protein, 117 aa, Triticum aestivum; identical to SEQ ID NO: 15299

SEQ ID NO: 29389 - DNA, 875 bp, Triticum aestivum
tatgtatgtttcttggcaagcatagcaattgatcatcgattcgcacaaggtctctcgaaatggcgcaagagagttggaaagaggcagaggatacgggtgtccacgcgcccgaggctccgataatgtgcatcaacaactgtggcttcttcgggaaccggatgacagagaacatgtgctcaaagtgttaccgagacactgtcaaggccaagagcatggcccttctagttgagaacaaaactgccgctgctgttgcatcgtcacccacaccaatggtggcagagatcaaggatgaagcgtctgcctcagccaaagaaggaaaacgagtagccgaggaagaggcgccgaagccacccagcaaccgctgcctgtcgtgccggaagaaggtcgggctgacggggttcaagtgccgctgcggagacaccttctgctcgatgcaccgctacgccgacgcgcacgattgcaagttcgactacaagcaggccggcagggagcagatcgcccagcagaacccggtcgtcaaggctgacaaggtcaccagattctgatggaggttctgctgcaggagccctccagctcgtttattccctctatgatgatgatgatgatgcttggtccgtcaggtttacttcagaattgtgtgtctaccatcctcctggaatgtactttgccgatgaacccgccttcgacaaacaccaccaaccgatgtccgtccgacggccatcaacgggccattgcgccgggctggccgcgccttcaagggctgtataatgttggtgtttgtgtgggaggaacattcattggcacaggtgcacttctgtttatttacatatgaataatgcgaatgtaaatatttatcctttaacagtatgcagtcc

SEQ ID NO: 29390 - protein, 161 aa, Triticum aestivum
MAQESWKEAEDTGVHAPEAPIMCINNCGFFGNRMTENMCSKCYRDTVKAKSMALLVENKTAAAVASSPTPMVAEIKDEASASAKEGKRVAEEEAPKPPSNRCLSCRKKVGLTGFKCRCGDTFCSMHRYADAHDCKFDYKQAGREQIAQQNPVVKADKVTRF

SEQ ID NO: 29391 - protein, 140 aa, Triticum aestivum
MCINNCGFFGNRMTENMCSKCYRDTVKAKSMALLVENKTAAAVASSPTPMVAEIKDEASASAKEGKRVAEEEAPKPPSNRCLSCRKKVGLTGFKCRCGDTFCSMHRYADAHDCKFDYKQAGREQIAQQNPVVKADKVTRF

SEQ ID NO: 29392 - protein, 128 aa, Triticum aestivum
MTENMCSKCYRDTVKAKSMALLVENKTAAAVASSPTPMVAEIKDEASASAKEGKRVAEEEAPKPPSNRCLSCRKKVGLTGFKCRCGDTFCSMHRYADAHDCKFDYKQAGREQIAQQNPVVKADKVTRF

SEQ ID NO: 29393 - DNA, 617 bp, Triticum aestivum
gacgtgcctagcccggatctcagaagcaagctgagcccggcacgaccgcgccctttggcttgtgagaaggcgaattcttttctggctgatagataaaaatccccaccacatccgcaagcgcgaactccctccccggatctgcaactagccggcttccctcccgatccgtctcgccgcggccgagatccttccttcctccggcgagagccaagatgtactcgtgggagatgctgtcgttcaacatccacgacgggttcctggaggcgatcgtgcgggggaaccgctcgggcctcctcacccaagccgattacaacaacctctgccagtgcgagaccctcgacgacatcaagatgcacctctccgccaccgagtacggtccatacctccagaacgaaccttctcccttgcacacgacaacaattgtggagaagtgcactctcaagctggttgatgaatacaaacacatgtatggacacatgatcgataatgttgtacttattgttactgggacattgcatgaaagagatgttaacgaactgttggagaaatgccatccattgggcatgtttgacagcattgcatcacttgcggttgctcaaaatatgcgtgagctttac

SEQ ID NO: 29394 - protein, 135 aa, Triticum aestivum
MYSWEMLSFNIHDGFLEAIVRGNRSGLLTQADYNNLCQCETLDDIKMHLSATEYGPYLQNEPSPLHTTTIVEKCTLKLVDEYKHMYGHMIDNVVLIVTGTLHERDVNELLEKCHPLGMFDSIASLAVAQNMRELY

SEQ ID NO: 29395 - protein, 130 aa, Triticum aestivum
MLSFNIHDGFLEAIVRGNRSGLLTQADYNNLCQCETLDDIKMHLSATEYGPYLQNEPSPLHTTTIVEKCTLKLVDEYKHMYGHMIDNVVLIVTGTLHERDVNELLEKCHPLGMFDSIASLAVAQNMRELY

SEQ ID NO: 29396 - protein, 89 aa, Triticum aestivum
MHLSATEYGPYLQNEPSPLHTTTIVEKCTLKLVDEYKHMYGHMIDNVVLIVTGTLHERDVNELLEKCHPLGMFDSIASLAVAQNMRELY

SEQ ID NO: 29397 - DNA, 812 bp, Triticum aestivum
ctcaacccacttcacttcagagttcagtcccctccagctctcgagttcgacagatcttggctcacttcaccgccggcggacgcagcgaagcgagggaggagcaatggcggaccgcgggggctacgtgcaggtgcagcacgggcagtacggcggcgggcaccacggcgggcagcagcagcacgggcgccagatgggcgagcagatgaagggcatgttccaggagaaggcgctgacggtggcgacgctgttcccgctgggcgggctgctgctggtgctgtccgggctggcgctggcgggcaccgtggtggggctggccgtggccacgcccgtgttcctgctcttcagccccatgctggtcccggccgcgctcaccatcggcctggccgtcaccgggttcctcacctccggcgcgctggggctgggcggcctctcctcgctcaccgtcctcgccaacacggcgcgccaggcgttccagcgcaccccggactacgtggaggaggcgcgccagcgcatggccgatgccgccgcggccgcggggcacaagacgcagcaggccggccacgccatccagagccgcgcggaggacgcgcgcgccggaggaggtggccacaccggcgccaccggcggagcgggcgccggcaccggcaccggcaccagggcgtcgtcgtaagctggagctagcaggccgatgtcagtccgccgcgccgcgtcgtctactacctgatctatgtgtgctagcgccttcgtacgtgtctacacgagcgagtgtgtgtgtgtgttcgtgcgtgtcagtgtgtgtgtgatgtttctac

SEQ ID NO: 29398 - protein, 226 aa, Triticum aestivum
LNPLHFRVQSPPALEFDRSWLTSPPADAAKRGRSNGGPRGLRAGAARAVRRRAPRRAAAARAPDGRADEGHVPGEGADGGDAVPAGRAAAGAVRAGAGGHRGGAGRGHARVPALQPHAGPGRAHHRPGRHRVPHLRRAGAGRPLLAHRPRQHGAPGVPAHPGLRGGGAPAHGRCRRGRGAQDAAGRPRHPEPRGGRARRRRWPHRRHRRSGRRHRHRHQGVVVSWS

SEQ ID NO: 29399 - protein, 222 aa, Triticum aestivum
STHFTSEFSPLQLSSSTDLGSLHRRRTQRSEGGAMADRGGYVQVQHGQYGGGHHGGQQQHGRQMGEQMKGMFQEKALTVATLFPLGGLLLVLSGLALAGTVVGLAVATPVFLLFSPMLVPAALTIGLAVTGFLTSGALGLGGLSSLTVLANTARQAFQRTPDYVEEARQRMADAAAAAGHKTQQAGHAIQSRAEDARAGGGGHTGATGGAGAGTGTGTRASS

SEQ ID NO: 29400 - protein, 188 aa, Triticum aestivum
MADRGGYVQVQHGQYGGGHHGGQQQHGRQMGEQMKGMFQEKALTVATLFPLGGLLLVLSGLALAGTVVGLAVATPVFLLFSPMLVPAALTIGLAVTGFLTSGALGLGGLSSLTVLANTARQAFQRTPDYVEEARQRMADAAAAAGHKTQQAGHAIQSRAEDARAGGGGHTGATGGAGAGTGTGTRASS

SEQ ID NO: 29401 - DNA, 1185 bp, Triticum aestivum
actagagcagaaccacatctcatccatccccaaccccagccccaaaccccccaaagtggaagagaagattgttgcggcggcggatcggagtgagaagaatcaatggcttccgacggcgtggtggccctgtacggcaacaacaaggcggtggtggagccctccgccaagcctgccgccgccaccttctccgtcaaggtgggcctcgcccagatgctgcgcggcggcgtcatcatggacgtggtcaccgccgagcaggcgcgcctcgccgaggaggccggcgcctgcgccgtcatggcgctggagcgcgtgcccgccgacatccgcgcccagggcggcgtggcccgcatgtccgacccggccctcatccgcgacatcaagcgcgccgtcaccatcccggtgatggccaaggcccgcatcgggcacttcgtggaggcccagatcctggaggccatcggcgtggactacgtggacgagagcgaggtcctgaccctcgccgacgacgcccaccacatcaacaagcacaacttccgtgtccccttcgtgtgcggctgccgcgacctgggggaggcgctccgccgcatccgcgagggcgccgccatgatccacaccaagggcgaggccggcaccggtaacgtggtggaggccgtccgccacgtccgctccgtgatgggcgccgtccgcgccctgcgcaacatggacgaggacgaggtcttcagctacgccaagcagatcgccgccccgtacgacctggtgatgcagaccaagcagctgggccgcctcccggtggtgcagttcgccgccggcggcgtggccacccccgcggacgccgccctgatgatgcagctcgggtgcgacggggtgttcgtcggctccggcatcttcaagagcggcgacccggcgcgtcgcgcccgcgccatcgtgcaggccgtgacgcactacagcgacccggagatcctggccaacgtcagcgcggggctcggggaggccatggtggggatcaacctgtccgaccccaacgtggagcgcttcgccgcccgatcccagtagcttcataccttgttgccaagttggtgccatggatcgtcgtcgtaataacttgaatctggctttgcatcatgtgtcgttttgttcctctactctaggtgcatcatcatgtattatccagcagaactatcttgggtgttg

SEQ ID NO: 29402 - protein, 314 aa, Triticum aestivum
MASDGVVALYGNNKAVVEPSAKPAAATFSVKVGLAQMLRGGVIMDVVTAEQARLAEEAGACAVMALERVPADIRAQGGVARMSDPALIRDIKRAVTIPVMAKARIGHFVEAQILEAIGVDYVDESEVLTLADDAHHINKHNFRVPFVCGCRDLGEALRRIREGAAMIHTKGEAGTGNVVEAVRHVRSVMGAVRALRNMDEDEVFSYAKQIAAPYDLVMQTKQLGRLPVVQFAAGGVATPADAALMMQLGCDGVFVGSGIFKSGDPARRARAIVQAVTHYSDPEILANVSAGLGEAMVGINLSDPNVERFAARSQ

SEQ ID NO: 29403 - protein, 278 aa, Triticum aestivum
MLRGGVIMDVVTAEQARLAEEAGACAVMALERVPADIRAQGGVARMSDPALIRDIKRAVTIPVMAKARIGHFVEAQILEAIGVDYVDESEVLTLADDAHHINKHNFRVPFVCGCRDLGEALRRIREGAAMIHTKGEAGTGNVVEAVRHVRSVMGAVRALRNMDEDEVFSYAKQIAAPYDLVMQTKQLGRLPVVQFAAGGVATPADAALMMQLGCDGVFVGSGIFKSGDPARRARAIVQAVTHYSDPEILANVSAGLGEAMVGINLSDPNVERFAARSQ

SEQ ID NO: 29404 - protein, 271 aa, Triticum aestivum
MDVVTAEQARLAEEAGACAVMALERVPADIRAQGGVARMSDPALIRDIKRAVTIPVMAKARIGHFVEAQILEAIGVDYVDESEVLTLADDAHHINKHNFRVPFVCGCRDLGEALRRIREGAAMIHTKGEAGTGNVVEAVRHVRSVMGAVRALRNMDEDEVFSYAKQIAAPYDLVMQTKQLGRLPVVQFAAGGVATPADAALMMQLGCDGVFVGSGIFKSGDPARRARAIVQAVTHYSDPEILANVSAGLGEAMVGINLSDPNVERFAARSQ

SEQ ID NO: 29405 - DNA, 1020 bp, Triticum aestivum
ctcacacagcatctcatccagcaccagcaaccagcagtgcttctctacaaaacttgaactcgaatccagctgaacaatttcttggggcttcgagagagagatcgagcaggatgggcatcgtggacgtggtgtcggagtactgctcgctgccgcggaatcggcggcccatgaagaggctgaagcagttccagacggtggagatgaaggtccggatcgactgcgagggctgcgagcgcaaggtcaagaaggccctcgacgacatgaaaggtaccctcgagctctgttcctttcctctagaaagattagattgattctccaccaccgaccaccagagggatcggattcctcctccctgacccagcacatgtttctccatcgggggaaaggaaatcttgccccggctccttttctttggccagatctatatctggggcggcagctttgctcaaagtgtgtgtgtccatttggttttgcaggcgtgagctcggtggaggtgatcccgaagcagaacaaggtgacggtgacggggtacgtggacccggccaaggtgatgcggcgggtggcatacaagaccggcaagcgggtggagccgtggccctacgtgccgtacgacgtggtggcgcacccctacgcgccgggggcctacgacaagcgcgcccccgccggctacgtccgcaacgtcatgagcgacccctccgccgcgccgctcgcccgggcctcctccaccgaggccaggtacaccgccgcattcagcgacgagaaccccaacgcatgctccgtcatgtagtagtagtaatgtttgtttgtaagagagaccttctctagcttccccgctctgctctgctcatccatggcggcgttgtgttgggatctctagatggtcgctgttggtgttctcttgtacttttgaaactaggctagaagatgaagatgggtctgtattcttgcttcggtttggtttatgtaagatatgttggatttggtgaggaggaagctccatcaatcttgttgtttatgcgc

SEQ ID NO: 29406 - protein, 140 aa, Triticum aestivum
MFLHRGKGNLAPAPFLWPDLYLGRQLCSKCVCPFGFAGVSSVEVIPKQNKVTVTGYVDPAKVMRRVAYKTGKRVEPWPYVPYDVVAHPYAPGAYDKRAPAGYVRNVMSDPSAAPLARASSTEARYTAAFSDENPNACSVM

SEQ ID NO: 29407 - protein, 102 aa, Triticum aestivum
HTASHPAPATSSASLQNLNSNPAEQFLGASRERSSRMGIVDVVSEYCSLPRNRRPMKRLKQFQTVEMKVRIDCEGCERKVKKALDDMKGTLELCSFPLERLD

SEQ ID NO: 29408 - protein, 78 aa, Triticum aestivum
MRRVAYKTGKRVEPWPYVPYDVVAHPYAPGAYDKRAPAGYVRNVMSDPSAAPLARASSTEARYTAAFSDENPNACSVM

SEQ ID NO: 29409 - DNA, 1217 bp, Triticum aestivum
agaaactaatccgagccacacatccccgtttcacaaccaagccaaagctccccactcctccccattccacgccgccgcaccccgaaccctagcgccccatccatccagcgagcggtagccatgccggcggacgcgaagatccggtggggggagctcgaggaggacgacgggggcgacctcgacttccttctcccgccgcgggtggtcatcgggcccgacgagaacggcttcaagaagacgatcgagtaccgcttcgacgacgacggcaacaaggtcaaggtcaccaccaccacccgcgtccgcaagctcgcccgcgcgcgcctctccaaggccgctgtcgagcgccgcaactgggccaagttcggcgacgccgccagcggcgacgacgcctccgcgcgcctcaccgtcgtctccaccgaggagatcctcctcgagcgcccgcgcgccccagggagcaaagctgatgaaccaagtgcttctggtgacccactggcaatggcaagcaagggaggtgctgttctcatggtttgcagaacctgtggtaagaagggtgaccactggacctcaaagtgcccctacaaggacctcgctccaccaactgatgcatcggacatgcctcctacttctgacggccctgcagcactgagtggccctgccaagggctcatacgttgctccaaggctgagggctggtgctgttcataccgatgctgggcacgacatgaggcgcaggaacgatgagaactctgtccgtgttaccaatctgtcggaggacacccgcgagcccgacctccttgagctgttccgcacgtttggcccggtcagccgtgtctacgttgcggtggatcagaagactggaatgagcaggggctttgggttcgtcaacttcgttcacagggaggacgccgagaaggccatcagcaagctcaatgggtatggttatgataacctcatcctccatgtggagatggctgcacctaggcctacttagttactgcctattaagcatccagatttcctacaagtgtcgtatcattatggtctccgaaataccagtacttttgtgtcgtgggcttgtgtcgtgttttgccttgttgagaataactacactctgttgatgaaaaagtgaatttttttaaaaaaaaaaaaaaaaaaaaaaaaaaaaaaaaaaaaaaaaaaaaaaagaaaaaaaaaaaaaaaaaagcttatcgataccgt

SEQ ID NO: 29410 - protein, 289 aa, Triticum aestivum
MPADAKIRWGELEEDDGGDLDFLLPPRVVIGPDENGFKKTIEYRFDDDGNKVKVTTTTRVRKLARARLSKAAVERRNWAKFGDAASGDDASARLTVVSTEEILLERPRAPGSKADEPSASGDPLAMASKGGAVLMVCRTCGKKGDHWTSKCPYKDLAPPTDASDMPPTSDGPAALSGPAKGSYVAPRLRAGAVHTDAGHDMRRRNDENSVRVTNLSEDTREPDLLELFRTFGPVSRVYVAVDQKTGMSRGFGFVNFVHREDAEKAISKLNGYGYDNLILHVEMAAPRPT

SEQ ID NO: 29411 - protein, 164 aa, Triticum aestivum
MASKGGAVLMVCRTCGKKGDHWTSKCPYKDLAPPTDASDMPPTSDGPAALSGPAKGSYVAPRLRAGAVHTDAGHDMRRRNDENSVRVTNLSEDTREPDLLELFRTFGPVSRVYVAVDQKTGMSRGFGFVNFVHREDAEKAISKLNGYGYDNLILHVEMAAPRPT

SEQ ID NO: 29412 - protein, 155 aa, Triticum aestivum
MVCRTCGKKGDHWTSKCPYKDLAPPTDASDMPPTSDGPAALSGPAKGSYVAPRLRAGAVHTDAGHDMRRRNDENSVRVTNLSEDTREPDLLELFRTFGPVSRVYVAVDQKTGMSRGFGFVNFVHREDAEKAISKLNGYGYDNLILHVEMAAPRPT

SEQ ID NO: 29413 - DNA, 556 bp, Triticum aestivum
atcttcatttcacatcaaaatttctcctctttctatccatggccacggacgcacagcaccagcgacacagccgcaacggcggcgtgcacaccggccaccacttcctcatcgtggcctacggcatccagagccacctcaacccgtgccgcgtcctcgcgcaccgcctcgcgcgcctccacggcgtcgacggctccggggccgtcctcgccacggtctccctcccggtgtccgctcaccgccgcatgttcccttcgtccggagacgtcgacaatgatgataaagccaccgacggcgtcgtctcttacgctccatactccgacggcctcgacgacggctccatggccagggacggcgaggcgagggcgcgcagccgccaggccacctttgagagcctgtcagccgtcgtcgccaccctcgccgcacgtggccggccggtgacgtgtgtcgtttgcagcatggttctccccgcggcgctggacgtcgcgcgtgagcacggcatcccgctggccgtgtactggatccaaccggccaccgtgctcgccgcgtactaccacta

SEQ ID NO: 29414 - protein, 184 aa, Triticum aestivum
LHFTSKFLLFLSMATDAQHQRHSRNGGVHTGHHFLIVAYGIQSHLNPCRVLAHRLARLHGVDGSGAVLATVSLPVSAHRRMFPSSGDVDNDDKATDGVVSYAPYSDGLDDGSMARDGEARARSRQATFESLSAVVATLAARGRPVTCVVCSMVLPAALDVAREHGIPLAVYWIQPATVLAAYYH

SEQ ID NO: 29415 - protein, 172 aa, Triticum aestivum
MATDAQHQRHSRNGGVHTGHHFLIVAYGIQSHLNPCRVLAHRLARLHGVDGSGAVLATVSLPVSAHRRMFPSSGDVDNDDKATDGVVSYAPYSDGLDDGSMARDGEARARSRQATFESLSAVVATLAARGRPVTCVVCSMVLPAALDVAREHGIPLAVYWIQPATVLAAYYH

SEQ ID NO: 29416 - protein, 145 aa, Triticum aestivum
IFISHQNFSSFYPWPRTHSTSDTAATAACTPATTSSSWPTASRATSTRAASSRTASRASTASTAPGPSSPRSPSRCPLTAACSLRPETSTMMIKPPTASSLTLHTPTASTTAPWPGTARRGRAAARPPLRACQPSSPPSPHVAGR

SEQ ID NO: 29417 - DNA, 1234 bp, Triticum aestivum
aatgcaccgccactccgcccaagaggcacaggcgatgggtagcaacggaggcggcgccgccgccaagccgccggcgtgggagttccacgccacggggcctcgcaacctctccagccccggccgctctgcctggaaaaatcccaactacagaagaattgcaatatcatgtttagtgcaggccgcgtatgtactggagtttgacaggcaagagaacagaactggtgaaactgccattgctcctaactggtggaagccatttaagtacaagctggtgcgccttctaattgattccagagacggatccatatatggggcacttctagaatgggaccaggttgctgcatatcagactggataatgcggagacctgatggcgctccaaaggctgtcctggcactgaggggaactgtcctgaagcagtcgaccgttgcgagagacttggaggatgacctcaggtactttgcccaggagagcttgaggggttctgtcaggttcgctggaacactggaggttttcaagtcggcaatcgataagcatggaagcaacaatgtgtgcgttgcagggcattccctaggggcaggatatgctatgcaggttggtaagactttggcgaaggacggagtcttcgtagaatgccatttgtttaacccaccatcagtgtcactcggcctgggcctgaggaagcttcaggataaagtcgacaaggtcttgaagcgatacatcagcggcagctcttcgaatgccgttgaaagttctcacccgggacaggaggaaactgtttctgaaattggagaagaaaatctgatcaaggaggtgaagagatgggtgccgaacctgtacatcaacaacagcgactacatttgctgcttctatgttgaccgtagtggcgtaccaactgttactgccgagaagcgcggcgatagtcaccccgtggcgcgtgccaaggtttttgtgattgcgaaagggccacagaagtttctaaaagctcatgggctgcagcaatggtggatggatgattccgagctccatctggctgtgaatgagagcaagctcatgtataagcacctcaagtccctgtatgtgaaagaaacgtagcgaaaccaatgtcattgtgatctctgtctcctgttctctcctgttctgtagtcaagtatgcttttaaaagctttcatgaagctatccagttcctgcaaaccttttagtcagtcgacgcttatcaaaagtaactgtcagt

SEQ ID NO: 29418 - protein, 256 aa, Triticum aestivum
MGPGCCISDWIMRRPDGAPKAVLALRGTVLKQSTVARDLEDDLRYFAQESLRGSVRFAGTLEVFKSAIDKHGSNNVCVAGHSLGAGYAMQVGKTLAKDGVFVECHLFNPPSVSLGLGLRKLQDKVDKVLKRYISGSSSNAVESSHPGQEETVSEIGEENLIKEVKRWVPNLYINNSDYICCFYVDRSGVPTVTAEKRGDSHPVARAKVFVIAKGPQKFLKAHGLQQWWMDDSELHLAVNESKLMYKHLKSLYVKET

SEQ ID NO: 29419 - protein, 245 aa, Triticum aestivum
MRRPDGAPKAVLALRGTVLKQSTVARDLEDDLRYFAQESLRGSVRFAGTLEVFKSAIDKHGSNNVCVAGHSLGAGYAMQVGKTLAKDGVFVECHLFNPPSVSLGLGLRKLQDKVDKVLKRYISGSSSNAVESSHPGQEETVSEIGEENLIKEVKRWVPNLYINNSDYICCFYVDRSGVPTVTAEKRGDSHPVARAKVFVIAKGPQKFLKAHGLQQWWMDDSELHLAVNESKLMYKHLKSLYVKET

SEQ ID NO: 29420 - protein, 168 aa, Triticum aestivum
MQVGKTLAKDGVFVECHLFNPPSVSLGLGLRKLQDKVDKVLKRYISGSSSNAVESSHPGQEETVSEIGEENLIKEVKRWVPNLYINNSDYICCFYVDRSGVPTVTAEKRGDSHPVARAKVFVIAKGPQKFLKAHGLQQWWMDDSELHLAVNESKLMYKHLKSLYVKET

SEQ ID NO: 29421 - DNA, 1342 bp, Triticum aestivum
atcccggtccggggcgcacatccatctcccatgcccgcacctccacctgagctggactccctggtatagcgagcgcgccgaccaactccatagctggggcttctccaatcaatccagccggccagagcgcagctcccgcccacccttccccggtccccgtctcttccgcaaaggagcagccgcgccattgccgtgggaggaagcaatgggggcgacacgcgcggacgccgacgagaaggaggaaggcgtgatggcgacggacttcttttggtcgtacacggacgaaccgcacgcgtcccgccgccgggagatcctggccaagtacccgcagatcaaggagctcttcggctcggatcctctcgccttcatcaagatagccgcagttgtttcgcttcagctatggaccgccacgctcctgcgagatgcaggctggtcgaagatactgccggtcgcttacttcttcggttcctttctgaatcacaatctcttccttgcgatccacgagctcagccacaacctcgccttcgccaccccatccctgaaccgctggctaggcatcttcgcaaacctgcccatcggcgtcccaatgtcggtgacattccagaaataccacctggagcaccaccggttccaaggcgtggacgggatcgacatggacatccccagccagacagaggcgcacgtcgtaaagaacaccgtcagcaaatccatctgggtcgtgctccagctcttcttctacgcgctcaggccgctcttcctgaagccgaagcccccgggcctgtgggagttcaccaacctgacgatccaggtcgcgctcgacgcggcaatggtgtacctctacggctggaagtcgctggcctacctcatcctgtctacgttcctcggtggcggcatgcacccgatggccggccacttcatctcggagcactacgtcttcagcccggagcaggagacctactcgtactacgggccgctgaacctgatgacgtggcacgtcgggtaccacaacgagcaccacgacttccccaggatccccggcgccaagctgcacaaggtgaaggagatcgcgccggagtactatgacagtctgaaatcatacaggtcctggagccaggtgatatacatgtacgtcatggaccagacggtaggccctttcagccggatgaagcggaaggcgcccaagaaagatttgtagaagaaacctctgcctgtaggttaagttttgccacacatagctgttttagatgatgttttgatcccctgggccactgtctcactgaactactgaagtgttaactcgaaggtattttgcttgtgtgttcagggaacttgcacttgttcc

SEQ ID NO: 29422 - protein, 397 aa, Triticum aestivum
SRSGAHIHLPCPHLHLSWTPWYSERADQLHSWGFSNQSSRPERSSRPPFPGPRLFRKGAAAPLPWEEAMGATRADADEKEEGVMATDFFWSYTDEPHASRRREILAKYPQIKELFGSDPLAFIKIAAVVSLQLWTATLLRDAGWSKILPVAYFFGSFLNHNLFLAIHELSHNLAFATPSLNRWLGIFANLPIGVPMSVTFQKYHLEHHRFQGVDGIDMDIPSQTEAHVVKNTVSKSIWVVLQLFFYALRPLFLKPKPPGLWEFTNLTIQVALDAAMVYLYGWKSLAYLILSTFLGGGMHPMAGHFISEHYVFSPEQETYSYYGPLNLMTWHVGYHNEHHDFPRIPGAKLHKVKEIAPEYYDSLKSYRSWSQVIYMYVMDQTVGPFSRMKRKAPKKDL

SEQ ID NO: 29423 - protein, 329 aa, Triticum aestivum
MGATRADADEKEEGVMATDFFWSYTDEPHASRRREILAKYPQIKELFGSDPLAFIKIAAVVSLQLWTATLLRDAGWSKILPVAYFFGSFLNHNLFLAIHELSHNLAFATPSLNRWLGIFANLPIGVPMSVTFQKYHLEHHRFQGVDGIDMDIPSQTEAHVVKNTVSKSIWVVLQLFFYALRPLFLKPKPPGLWEFTNLTIQVALDAAMVYLYGWKSLAYLILSTFLGGGMHPMAGHFISEHYVFSPEQETYSYYGPLNLMTWHVGYHNEHHDFPRIPGAKLHKVKEIAPEYYDSLKSYRSWSQVIYMYVMDQTVGPFSRMKRKAPKKDL

SEQ ID NO: 29424 - protein, 314 aa, Triticum aestivum
MATDFFWSYTDEPHASRRREILAKYPQIKELFGSDPLAFIKIAAVVSLQLWTATLLRDAGWSKILPVAYFFGSFLNHNLFLAIHELSHNLAFATPSLNRWLGIFANLPIGVPMSVTFQKYHLEHHRFQGVDGIDMDIPSQTEAHVVKNTVSKSIWVVLQLFFYALRPLFLKPKPPGLWEFTNLTIQVALDAAMVYLYGWKSLAYLILSTFLGGGMHPMAGHFISEHYVFSPEQETYSYYGPLNLMTWHVGYHNEHHDFPRIPGAKLHKVKEIAPEYYDSLKSYRSWSQVIYMYVMDQTVGPFSRMKRKAPKKDL

SEQ ID NO: 29425 - DNA, 849 bp, Triticum aestivum
acaaccgcaatctattacttcgccgcgcggaatgcgagtgtgtgactaattcctgaagtctgccgctcctttcctaacccgcgtcgctaattctcgtcgcgaacttctcgccggaggagcagaggagctcgccagagaaggccatggggccaccgcagccagccaagggcatcatcagcatcgaggcctgcgcgcggccgatcgccgtcgaccaccgcatcagcctcccctactacttccgcatcgcgggcaccctcctccgccaggccaagatatatcgagatgagaagaacatcctcgacctgtatgtcatcctcctgagatatacgagcttgctgtgtgagaccatccccaagcaccgtgactaccccgtattcaagttgagggaagcagagttcgtcagaaacgccaactcctctacactcattgatgttgtcaatgagcttgagtctctgaagccagttgtgaagcggcagctcgttgagcataacagaaggggtagcccggaagctaatggtctgaatggaacccctgctgcaagtttaaggacggagaagcatcctcgaaccacatattccacacagccatttgtaggttcattgcaaaaattctacccagatgggaggcatcacgtggcatcatggacaagtatccaaattgataggcagatccgcaaacaatttgtaaatctgccttttccaaaagaagagacactggctagacattcaatattagggcctaatgggcttcatggacaatggaatggacctgttgctgcagtcaaggtccaatatccatgcaatcttgaatttacacaaagtgatatgacaagtctagtgccggctatgt

SEQ ID NO: 29426 - protein, 235 aa, Triticum aestivum
MGPPQPAKGIISIEACARPIAVDHRISLPYYFRIAGTLLRQAKIYRDEKNILDLYVILLRYTSLLCETIPKHRDYPVFKLREAEFVRNANSSTLIDVVNELESLKPVVKRQLVEHNRRGSPEANGLNGTPAASLRTEKHPRTTYSTQPFVGSLQKFYPDGRHHVASWTSIQIDRQIRKQFVNLPFPKEETLARHSILGPNGLHGQWNGPVAAVKVQYPCNLEFTQSDMTSLVPAM

SEQ ID NO: 29427 - DNA, 611 bp, Triticum aestivum
cctagaacatcctaatcgaaaactactaacctatccatagcaatcacatatcttaatcagatcaatcagaatggcggcgggcggcggcagtagcaagaggacgtgggtggtggacgtggagaagaagctcaaggaagccgacaagtcggtggagatgtcgcggtgggagcgccactgcatctaccgcgtgccgccctgcatgaccaacatcaagagcaaggcgtaccagccgcaggtagtgtcgctgggccccttccaccacggcgacctcgacctgcggcccatggaggagcacaagtgccgggcgctgcggcagttgctccagcgcgtggagcggaccttcgacgagctcgtcgacggcgtggaggaagtcgcggagcagctggagggcgcgtacatggacctcgacagcgagtggcgcgccgacggcgggtcaagggagcggttcctggccatgatgatcttcgacggctgcttcctgctcgagctgatgaggtgcacggccgctgacgggaagcaggtcggcgactacgcgcataacgaccccatcttcagccgccacgggatactctacatggtgccctacatccggcgagacatgctcatgctcg

SEQ ID NO: 29428 - protein, 180 aa, Triticum aestivum
MAAGGGSSKRTWVVDVEKKLKEADKSVEMSRWERHCIYRVPPCMTNIKSKAYQPQVVSLGPFHHGDLDLRPMEEHKCRALRQLLQRVERTFDELVDGVEEVAEQLEGAYMDLDSEWRADGGSRERFLAMMIFDGCFLLELMRCTAADGKQVGDYAHNDPIFSRHGILYMVPYIRRDMLML

SEQ ID NO: 29429 - protein, 152 aa, Triticum aestivum
MSRWERHCIYRVPPCMTNIKSKAYQPQVVSLGPFHHGDLDLRPMEEHKCRALRQLLQRVERTFDELVDGVEEVAEQLEGAYMDLDSEWRADGGSRERFLAMMIFDGCFLLELMRCTAADGKQVGDYAHNDPIFSRHGILYMVPYIRRDMLML

SEQ ID NO: 29430 - protein, 137 aa, Triticum aestivum
MTNIKSKAYQPQVVSLGPFHHGDLDLRPMEEHKCRALRQLLQRVERTFDELVDGVEEVAEQLEGAYMDLDSEWRADGGSRERFLAMMIFDGCFLLELMRCTAADGKQVGDYAHNDPIFSRHGILYMVPYIRRDMLML

SEQ ID NO: 29431 - DNA, 568 bp, Triticum aestivum
gaggctcggcgtggctcggctggcatttgcttgtcctgtttctcgtggccgcctacttgtaatccgctgccagccaaatcgctagctcactccctccctcgtcagcctccggcagatcctcctccataccgctcgaagctccgccctcctcctcccgacacctcgagatctccgccccggacccatttcttccccaccaaggtccagcgccgtccggccggccctccctgttgcaggcaggcgacgccgccgccgccatgtccaagtcgggagccctggatctcgcgtccggccttggcgggaagatcgacaaggaacaggtcaaatccgcggtcgacgagtatgagaaatatcatggatattacggagggaaggaggaatcgaggaaatccaactacaccgatatggttaataaatactatgatcttgctactagcttctatgagtatggctggggtgaatccttccactttgctcacaggtggaatggggaatctttaagggaaagcatcaaacgacacgagcactttctggccttacagcttgagttgaaaccaggcatgaaggt

SEQ ID NO: 29432 - protein, 166 aa, Triticum aestivum
EARRGSAGICLSCFSWPPTCNPLPAKSLAHSLPRQPPADPPPYRSKLRPPPPDTSRSPPRTHFFPTKVQRRPAGPPCCRQATPPPPCPSREPWISRPALAGRSTRNRSNPRSTSMRNIMDITEGRRNRGNPTTPIWLINTMILLLASMSMAGVNPSTLLTGGMGNL

SEQ ID NO: 29433 - protein, 103 aa, Triticum aestivum
MSKSGALDLASGLGGKIDKEQVKSAVDEYEKYHGYYGGKEESRKSNYTDMVNKYYDLATSFYEYGWGESFHFAHRWNGESLRESIKRHEHFLALQLELKPGMK

SEQ ID NO: 29434 - DNA, 989 bp, Triticum aestivum
accgagaacatttattgccattggtgctgctcgggctattgcgtatcttcaccaccatgagacacccccaataatccatggaagcatcaaatcgaccaatgtgctactagattcagatttccaggcacacgttggggacttcggtcttatgaagctcatctcagatgaaatagatcatgataagataatcggtgaaaatcaacgaggttatcatgctcctgaatacgttatgtttggcaaacctacaacaggttgtgatgtctacagctttggcataatacttctggagcttactagtgggagaaagccagtagaaaaatcaggctcccaaaaaatgctcggggtccgaaactggatgctcccgttggcgaaagagggtagatatgatgaaatcgcagactcaaaactcaatgacaagtattccgagtctgaactaaaaagagtggtgctgatcggactagcgtgcacgcacagagaaccagataagagaccgacgatgctcgaggttgtgtccctgctgaaaggtgaatcgaaagagatgcttctgaggcttgaaaaggaagagctgtttaggccagattcgatggctagttccgtcggaacgactccggaagggagcaccgactgcattcttaagaatgatgaagggctggctggggcttgatgggttggtaccctggcccctaggtattggtagagtggatattcttgctgaattggagcttggtctgcatggtttggcttgactgaaatgtataggattggtttgttatttatgatgaactcctcccttttttgagagagggggagatctagagaggtgagttggctttttatagaaagtgctttttgtgtgcactgggtggaagacccgtatactcccagatgtttgggcatgcgtcatcctgttgtcactgtgttggttactctaaacaaaatttccttctgcatacaactgaatgcagatgtctggatgatcatgttctctc

SEQ ID NO: 29435 - protein, 220 aa, Triticum aestivum
PRTFIAIGAARAIAYLHHHETPPIIHGSIKSTNVLLDSDFQAHVGDFGLMKLISDEIDHDKIIGENQRGYHAPEYVMFGKPTTGCDVYSFGIILLELTSGRKPVEKSGSQKMLGVRNWMLPLAKEGRYDEIADSKLNDKYSESELKRVVLIGLACTHREPDKRPTMLEVVSLLKGESKEMLLRLEKEELFRPDSMASSVGTTPEGSTDCILKNDEGLAGA

SEQ ID NO: 29436 - protein, 171 aa, Triticum aestivum
MKLISDEIDHDKIIGENQRGYHAPEYVMFGKPTTGCDVYSFGIILLELTSGRKPVEKSGSQKMLGVRNWMLPLAKEGRYDEIADSKLNDKYSESELKRVVLIGLACTHREPDKRPTMLEVVSLLKGESKEMLLRLEKEELFRPDSMASSVGTTPEGSTDCILKNDEGLAGA

SEQ ID NO: 29437 - protein, 144 aa, Triticum aestivum
MFGKPTTGCDVYSFGIILLELTSGRKPVEKSGSQKMLGVRNWMLPLAKEGRYDEIADSKLNDKYSESELKRVVLIGLACTHREPDKRPTMLEVVSLLKGESKEMLLRLEKEELFRPDSMASSVGTTPEGSTDCILKNDEGLAGA

SEQ ID NO: 29438 - DNA, 697 bp, Triticum aestivum
actgctgctgcgaacacaggctttttcccagccccacggttggggggtcgcttgcatcacacccacgccgcctccgaaaagcgccgcaaatccgtcccagctgcgcggcttccatggctgccgcggcggctgcaggggactccggcgagcagccgctgctccacctcaagctcgccttcctcgccctggagccccccgcctgcgtcctcaccctcgccagaaaggctggtggaggttctgtcacgccacatgttcaaaattttattttggagaactgtgttggcactaatgtagggggaggtccagattgtacatatgtgaaaactattcttaaaaaggttatagctgaggcggaattatcgtcagatattgtgattgatgaactctatgaggaatttggccgttgtatgtcgtcaagggcaaataacccagagcttagcctggccaagatctacaaggagatatcttttctttctcctgcatatgagaatgtatcctcgaatccagtaagtttggttgctcgattattatgttctactaacatgctcgaaggggatacagggtgctgtctttggccatcaagtttattcttatctgagtttattctttcattcccagaacttttcgccaaaaaaatgctgctttgagctaggttctggtgttggtttggttggtgtatgtctaaaccatgttggtg

SEQ ID NO: 29439 - protein, 214 aa, Triticum aestivum
CCCEHRLFPSPTVGGSLASHPRRLRKAPQIRPSCAASMAAAAAAGDSGEQPLLHLKLAFLALEPPACVLTLARKAGGGSVTPHVQNFILENCVGTNVGGGPDCTYVKTILKKVIAEAELSSDIVIDELYEEFGRCMSSRANNPELSLAKIYKEISFLSPAYENVSSNPVSLVARLLCSTNMLEGDTGCCLWPSSLFLSEFILSFPELFAKKMLL

SEQ ID NO: 29440 - protein, 177 aa, Triticum aestivum
MAAAAAAGDSGEQPLLHLKLAFLALEPPACVLTLARKAGGGSVTPHVQNFILENCVGTNVGGGPDCTYVKTILKKVIAEAELSSDIVIDELYEEFGRCMSSRANNPELSLAKIYKEISFLSPAYENVSSNPVSLVARLLCSTNMLEGDTGCCLWPSSLFLSEFILSFPELFAKKMLL

SEQ ID NO: 29441 - DNA, 1026 bp, Triticum aestivum
aaaacgaaccaccctgcctacccgcacacgccgcaccagtgccagaggccgccaagcaaagcgcccgcacccggcacgcggcggcgatggcggacgacgtcgccccgtgcaccgcatccggctacctcgacccctcctactgggacgggcggttcgggaaggaggagcactacgagtggttcaaggacttctcccacttccgccacctcctcgccccgctcctctccccctccctctccgttctggaggtcggctgcggaaattcgcggctcggggaggagctcttaagggagggcgtcaccggcggcgtcacctgcatcgacctctcgccggtcgccgtccagaggatgcgcgacagactggcggagcagggcaccagtggtgtggatgtggtggtggctgacatgcttgaccttccgttcgagagcgagagcttcgaccttgtgatcgagaaagggaccatgtggtgatccatggaaccccaatcctacaacagtggataatgtaaccaaaatgcttgaaggtatccacaaggttttgaagccaggtggcaaatttgtatcaattacctttggacagccacacttccgtcgtcgatttttcgaagcacctgagtttacatggtctgtcgagtggaacacctttggcgatggcttccattatttcttctacatccttcagaagggcaaaaggtcaccagagtccaacagtcaccaagttacattacctgctgttccaagcttcaatatgctccatgaagagctcgaaagcgaggattacatattctgcacaaatgttgatgagttataagcagtagctcaataagcgagtgcgccggttcggaggtcttgatgctacgcaatacgcatgaaggggctgaccgctaagcaacccagcgagtgatgcgtttacatgccttgttgtgtggtgatgtatcattgcggcccagcaggctagggatctttctaccatcagaactgacaatatacacctgttcccaatgttaaccttcttgcgttatttcgg

SEQ ID NO: 29442 - protein, 155 aa, Triticum aestivum
NEPPCLPAHAAPVPEAAKQSARTRHAAAMADDVAPCTASGYLDPSYWDGRFGKEEHYEWFKDFSHFRHLLAPLLSPSLSVLEVGCGNSRLGEELLREGVTGGVTCIDLSPVAVQRMRDRLAEQGTSGVDVVVADMLDLPFESESFDLVIEKGTMW

SEQ ID NO: 29443 - protein, 133 aa, Triticum aestivum
KRTTLPTRTRRTSARGRQAKRPHPARGGDGGRRRPVHRIRLPRPLLLGRAVREGGALRVVQGLLPLPPPPRPAPLPLPLRSGGRLRKFAARGGALKGGRHRRRHLHRPLAGRRPEDARQTGGAGHQWCGCGGG

SEQ ID NO: 29444 - protein, 127 aa, Triticum aestivum
MADDVAPCTASGYLDPSYWDGRFGKEEHYEWFKDFSHFRHLLAPLLSPSLSVLEVGCGNSRLGEELLREGVTGGVTCIDLSPVAVQRMRDRLAEQGTSGVDVVVADMLDLPFESESFDLVIEKGTMW

SEQ ID NO: 29445 - DNA, 644 bp, Triticum aestivum
ttcacacatgggtgcttatagttatttttgttttatgtatttttatcaacccttctcatagatgaatctgtaatatcttatggtggtcagttataggatttggataattatctgcatttgcctatctgggatgtgatgctagaatatatattatgctaagtctgatttaacaatgtttaagatcttggaggcagccgacaccatgttctatctcctgggatcatgctaatgcttaaatgaactgcagtagaatagcggaagttgaagcaagtaaagaaaaaatcatgctaatgcttatagattctagaaacagtaacgtgatgaaatatgcaccttagtagtcttcacctttcttgttaactactactttcttctttggtctgtgctaattatttactttttggaaaatctttgccatgtttcatcttgctcttctcaacttattacagttggatgatggcttggagttctccttcactgataagaggcgttttgcaaaaatacgattgcttgacaatccagaagctgtccctccaatttctgaacttggaccagatgccctatgcgaaccaatgcagcttgatgattttgtacaatcttttggtagaaagaatgctccaataaatgtttaaacacaataaagt

SEQ ID NO: 29446 - protein, 71 aa, Triticum aestivum
MFHLALLNLLQLDDGLEFSFTDKRRFAKIRLLDNPEAVPPISELGPDALCEPMQLDDFVQSFGRKNAPINV

SEQ ID NO: 29447 - protein, 56 aa, Triticum aestivum
MMAWSSPSLIRGVLQKYDCLTIQKLSLQFLNLDQMPYANQCSLMILYNLLVERMLQ

SEQ ID NO: 29448 - protein, 55 aa, Triticum aestivum
MAWSSPSLIRGVLQKYDCLTIQKLSLQFLNLDQMPYANQCSLMILYNLLVERMLQ

SEQ ID NO: 29449 - DNA, 898 bp, Triticum aestivum
tagaacatcctaatcgaaaactagccgcagctcttccgtctcctcccgccgccgccgcagccgccgcctgcctcgagccgccgtcgccatggggagaagacctgcgaggtgctatcggcagatcaagaacaagccgtaccccaagtcaaggtactgccgtggtgtgcctgaccctaagatcaggatctatgatgttggcatgaagaagaagggtgtcgacgagttctctcactgtgttcaccttgtctcatgggagaaggagaatgtgtccagtgaggctcttgaggctgcccgtattgcttgcaataagtacatgaccaagcatgcaggaaaggatgccttccacctcagggtcagggttcacccgttccatgtgctccgtatcaacaagatgctttcgtgtgccggggctgataggctccagactggtatgaggggtgcttttgggaagccgcagggagtctgtgcccgtgttgccattgggcaggtcctcctttctgtgcggtgcaagcccaacaatgccatccatgccactgaggcccttcgtcgtgccaagttcaagttccctggccgccaaaagatcattgagagcaggaagtggggcttcaccaagttcaaccgcaacgactacctcaagttcaagagtgagggcaggatcttgcctgatggagtcaacgctaagctgctcggatgccatggccgccttgcgaaccgtgcccctggacaagctttcctgtctgccgcataatctagcagaagaagtctatccgttctatcagaacttattttactgtgtggaacttagattccaagtgcctgtggtgctatgttattttgtctgaatgttgtgtcgaaccttgttatggaagatattatctattttgtgatgatggtactc

SEQ ID NO: 29450 - protein, 219 aa, Triticum aestivum
MGRRPARCYRQIKNKPYPKSRYCRGVPDPKIRIYDVGMKKKGVDEFSHCVHLVSWEKENVSSEALEAARIACNKYMTKHAGKDAFHLRVRVHPFHVLRINKMLSCAGADRLQTGMRGAFGKPQGVCARVAIGQVLLSVRCKPNNAIHATEALRRAKFKFPGRQKIIESRKWGFTKFNRNDYLKFKSEGRILPDGVNAKLLGCHGRLANRAPGQAFLSAA

SEQ ID NO: 29451 - protein, 182 aa, Triticum aestivum
MKKKGVDEFSHCVHLVSWEKENVSSEALEAARIACNKYMTKHAGKDAFHLRVRVHPFHVLRINKMLSCAGADRLQTGMRGAFGKPQGVCARVAIGQVLLSVRCKPNNAIHATEALRRAKFKFPGRQKIIESRKWGFTKFNRNDYLKFKSEGRILPDGVNAKLLGCHGRLANRAPGQAFLSAA

SEQ ID NO: 29452 - protein, 144 aa, Triticum aestivum
MTKHAGKDAFHLRVRVHPFHVLRINKMLSCAGADRLQTGMRGAFGKPQGVCARVAIGQVLLSVRCKPNNAIHATEALRRAKFKFPGRQKIIESRKWGFTKFNRNDYLKFKSEGRILPDGVNAKLLGCHGRLANRAPGQAFLSAA

SEQ ID NO: 29453 - DNA, 444 bp, Triticum aestivum
ctaaacatggctgtcggggcgctctgcaaggagggccacccgcgcccggccgcgaaactcgtcgagcggtgccggcgtgagggggagctggcgcccgacgaacggacctacaacatgctcctcgacggctggtccagcgcccgccggctggacaaggtcgggaagctctgggctgagatgcgtgtggccggcgtgcggccgacggtggtctcatacgggactcttatcaaggcggtttgtcggatgcagcagccggaccaggccgtgtctctcctcgacgagatgaggaaggaagggatcgaggcgaatctggttacctgcaaccccatcgtgcacgccctggctcacgccggccgatttcgggacgcatacaacctgctcgagaaatttcctctctacggggtggcgcctaatatctcgacattcaactcgctcgtgttggct

SEQ ID NO: 29454 - protein, 148 aa, Triticum aestivum
LNMAVGALCKEGHPRPAAKLVERCRREGELAPDERTYNMLLDGWSSARRLDKVGKLWAEMRVAGVRPTVVSYGTLIKAVCRMQQPDQAVSLLDEMRKEGIEANLVTCNPIVHALAHAGRFRDAYNLLEKFPLYGVAPNISTFNSLVLA

SEQ ID NO: 29455 - protein, 146 aa, Triticum aestivum
MAVGALCKEGHPRPAAKLVERCRREGELAPDERTYNMLLDGWSSARRLDKVGKLWAEMRVAGVRPTVVSYGTLIKAVCRMQQPDQAVSLLDEMRKEGIEANLVTCNPIVHALAHAGRFRDAYNLLEKFPLYGVAPNISTFNSLVLA

SEQ ID NO: 29456 - protein, 110 aa, Triticum aestivum
MLLDGWSSARRLDKVGKLWAEMRVAGVRPTVVSYGTLIKAVCRMQQPDQAVSLLDEMRKEGIEANLVTCNPIVHALAHAGRFRDAYNLLEKFPLYGVAPNISTFNSLVLA

SEQ ID NO: 29457 - DNA, 918 bp, Triticum aestivum
tcaataaaactgagtttcacgactttcttaatccaagtgattcggagaatcctaaaattatcaacttgctctgcagacaagaattaaggcagagagataaagatggtgatggaaagttaaactttgaagaatactttcatgggctacatgaccatatacatggttatgatgacgagaatgcagctatttctcatattgggaacatgacaattgcaaaggagcggtttgccaagcttgacaaagataatgacgggttcatttcagagcatgaactagaacctgttcttgataagctccatctgtcagaacgctattatgccagacagcaagccacacatgctatttcagaggcagacaaagatcatgatggaaggctaacactggaagagatgatcgagaacccctatgcattttatggtagtgtttacttcagcgatgacgaggactacttccatgaagagttccgctaaggcatctgcagatcataggcatcctaaccatgaaatgggataggcaatctagcaggaaggattccgaatgcatcattactaatcaaaatgttgtgtgaatactcgcaagaatcagcgtgccacggtatcttatctctgtacccttaccgtgccttggcatcgcctgtatctggacagcacacagagttggtatggtgtgacacgggggaatcaggtgctgctttgattctgtgaattgtttagtgaaatgaaatggcatcttactggtgataggagtccaggttagtttagattaagctgagctggcaccgtctcagttttgtaaaacgcacggaaccttggtggtgaagaatgagaaaattaacacttggcagtgatgagcagacgcaagttcgataatacacactggtgtttcgttctgtgaaatgagatcagctgtttgccctcc

SEQ ID NO: 29458 - protein, 155 aa, Triticum aestivum
NKTEFHDFLNPSDSENPKIINLLCRQELRQRDKDGDGKLNFEEYFHGLHDHIHGYDDENAAISHIGNMTIAKERFAKLDKDNDGFISEHELEPVLDKLHLSERYYARQQATHAISEADKDHDGRLTLEEMIENPYAFYGSVYFSDDEDYFHEEFR

SEQ ID NO: 29459 - protein, 88 aa, Triticum aestivum
MTIAKERFAKLDKDNDGFISEHELEPVLDKLHLSERYYARQQATHAISEADKDHDGRLTLEEMIENPYAFYGSVYFSDDEDYFHEEFR

SEQ ID NO: 29460 - DNA, 478 bp, Triticum aestivum
acggcccagggaacgcctgcctgctcatcagggcccgtgcccccccgcccggcccagacccgagcacaggcgggaaccggcggcggcgaccctcggccgtccggcgtcgcaacgagcctcaaccctctctctctctaccaccgtccggcgctagcgcctctcccagatccggccgccgcgcgcccgaagaaccccgcccccctcctcgacggacgcccggcgagatgccgcgcgaccgcgacgagccggcggccgtgcgcgtctacacggtctgcgacgagtccaagtacctcgtcgtccggaacctgccggccctcggatgcggcgacgagctcggctccgtgttcgcggcgtacggcccgctggaagagtgcaagcccatggacgccgaggactgcgaggagtacaccgacgtctacttcatcaagttcgcgcaggtcagcaacgcgaggtttgcaaagaggaagttggccgagtc

SEQ ID NO: 29461 - protein, 159 aa, Triticum aestivum
TAQGTPACSSGPVPPRPAQTRAQAGTGGGDPRPSGVATSLNPLSLYHRPALAPLPDPAAARPKNPAPLLDGRPARCRATATSRRPCASTRSATSPSTSSSGTCRPSDAATSSAPCSRRTARWKSASPWTPRTARSTPTSTSSSSRRSATRGLQRGSWPS

SEQ ID NO: 29462 - protein, 158 aa, Triticum aestivum
GPGNACLLIRARAPPPGPDPSTGGNRRRRPSAVRRRNEPQPSLSLPPSGASASPRSGRRAPEEPRPPPRRTPGEMPRDRDEPAAVRVYTVCDESKYLVVRNLPALGCGDELGSVFAAYGPLEECKPMDAEDCEEYTDVYFIKFAQVSNARFAKRKLAE

SEQ ID NO: 29463 - protein, 84 aa, Triticum aestivum
MPRDRDEPAAVRVYTVCDESKYLVVRNLPALGCGDELGSVFAAYGPLEECKPMDAEDCEEYTDVYFIKFAQVSNARFAKRKLAE

SEQ ID NO: 29464 - DNA, 498 bp, Triticum aestivum
tccccccacactccccggccgccgccgccggcctcgtcagtcgcagatcccccaaccaccagcgaagccgccgctcaccgccgactggcccacatggccgcctctatcgccgccgccgcgtccgtctcccacctcctcctcgggccgaaacccaagcccacaaccccgccccgcctctccctcctcccccgcaggcgctccggagccgccggggccatctccgcctccgcgtccgcggcctccgacttcctcgccccggtcccgtccctcaagtcccgcctcgccgccggcgacaccctctacggcctcttcctcctctccttctcccccacgctcgccgagatcgccgcgctcgccggctacgactacgtggtcgtcgacatggagcacgggccgggcggcatcacggaggccctcgcctgcctccgcgccctcgacgccgcccgcacccccgccgtcctccgcctcccggtgttaaacacaataaagtgggaacgg

SEQ ID NO: 29465 - protein, 166 aa, Triticum aestivum
SPHTPRPPPPASSVADPPTTSEAAAHRRLAHMAASIAAAASVSHLLLGPKPKPTTPPRLSLLPRRRSGAAGAISASASAASDFLAPVPSLKSRLAAGDTLYGLFLLSFSPTLAEIAALAGYDYVVVDMEHGPGGITEALACLRALDAARTPAVLRLPVLNTIKWER

SEQ ID NO: 29466 - protein, 165 aa, Triticum aestivum
PPHSPAAAAGLVSRRSPNHQRSRRSPPTGPHGRLYRRRRVRLPPPPRAETQAHNPAPPLPPPPQALRSRRGHLRLRVRGLRLPRPGPVPQVPPRRRRHPLRPLPPLLLPHARRDRRARRLRLRGRRHGARAGRHHGGPRLPPRPRRRPHPRRPPPPGVKHNKVGT

SEQ ID NO: 29467 - protein, 158 aa, Triticum aestivum
PPTLPGRRRRPRQSQIPQPPAKPPLTADWPTWPPLSPPPRPSPTSSSGRNPSPQPRPASPSSPAGAPEPPGPSPPPRPRPPTSSPRSRPSSPASPPATPSTASSSSPSPPRSPRSPRSPATTTWSSTWSTGRAASRRPSPASAPSTPPAPPPSSASRC

SEQ ID NO: 29468 - protein, 135 aa, Triticum aestivum
MAASIAAAASVSHLLLGPKPKPTTPPRLSLLPRRRSGAAGAISASASAASDFLAPVPSLKSRLAAGDTLYGLFLLSFSPTLAEIAALAGYDYVVVDMEHGPGGITEALACLRALDAARTPAVLRLPVLNTIKWER

SEQ ID NO: 29469 - DNA, 1219 bp, Triticum aestivum
gaaaacccgttcgttccgcagaaattcaaaatccaaatcccacccccacccccacctcccctcgccggcggcgaccgaccgaccgaccgatcgatccatggcgccggccgacgtcaaggacgcgtcccctcctccccgccccccgcctccccccgccgggccggcgctccccggcggcgcggaggagtacgtgcgcggctccatcgaggccgccctcggcctccccgtgccggaccgctctatccgcgccaagctcgcggcctacgaggacctgcgccgccgcctccaggaccgcgtcttcgcgctcgaggaggacctccacgccgccgcccgccgcatcgacctcctcaagaacgagtcggcgatgaacgcggaggggatccggcgctgcgtggaggagaaggaggccgtggcggccgcgcgcgatcagctcgccgcccacgccgccaggctcgagaaggagtgcgggctctacgagcgcgacctcgagcgcgccatggagtcctgcgacgagctcgccagggagagcgacgacctgcgcaaccgcctccgtgacgcccccgaccttactgaacaagtccaagcgctgcagagggacaaggagatactcaagaccaacctgaacaaagcagaggaggaggttaagttgctgtttgaggagaacagagccctcgacgaagcaaacaagaggctgctgtgcttgctggagaaggagcagaagcatcggtccgaaagaaagcactccgccagtaattccaccaagaaacgcaagtcgtcgagcctgaaggacacgagcccggtcagcctggccatcgatttcaacagtgcggacgcgtcgaggcagcccctgttgcccttgcagccaaactctccggactgcagggtgcataagaagtgaagctggccgtcccggcattctcctctggatggcttaaactgaagtgaactgaacaactaccccttagctaggcatcgtcgcttgctgcttgcctgatcgatctgactaacttgctgggttaatttggttggttcttgtcggtagaacctcctcggtcatatgtagttcttcttccgcttgtgttggcagctgcctgtgtctatcatatcatgatcctttcatgacaaaattagtagtattatcttagtagttttgtgtctggtgatgggcgtgtaaggctctgattcgacgcttattgtggccagttcgtcgtgcctctgc

SEQ ID NO: 29470 - protein, 298 aa, Triticum aestivum
KTRSFRRNSKSKSHPHPHLPSPAATDRPTDRSMAPADVKDASPPPRPPPPPAGPALPGGAEEYVRGSIEAALGLPVPDRSIRAKLAAYEDLRRRLQDRVFALEEDLHAAARRIDLLKNESAMNAEGIRRCVEEKEAVAAARDQLAAHAARLEKECGLYERDLERAMESCDELARESDDLRNRLRDAPDLTEQVQALQRDKEILKTNLNKAEEEVKLLFEENRALDEANKRLLCLLEKEQKHRSERKHSASNSTKKRKSSSLKDTSPVSLAIDFNSADASRQPLLPLQPNSPDCRVHKK

SEQ ID NO: 29471 - protein, 266 aa, Triticum aestivum
MAPADVKDASPPPRPPPPPAGPALPGGAEEYVRGSIEAALGLPVPDRSIRAKLAAYEDLRRRLQDRVFALEEDLHAAARRIDLLKNESAMNAEGIRRCVEEKEAVAAARDQLAAHAARLEKECGLYERDLERAMESCDELARESDDLRNRLRDAPDLTEQVQALQRDKEILKTNLNKAEEEVKLLFEENRALDEANKRLLCLLEKEQKHRSERKHSASNSTKKRKSSSLKDTSPVSLAIDFNSADASRQPLLPLQPNSPDCRVHKK

SEQ ID NO: 29472 - protein, 184 aa, Triticum aestivum
ENPFVPQKFKIQIPPPPPPPLAGGDRPTDRSIHGAGRRQGRVPSSPPPASPRRAGAPRRRGGVRARLHRGRPRPPRAGPLYPRQARGLRGPAPPPPGPRLRARGGPPRRRPPHRPPQERVGDERGGDPALRGGEGGRGGRARSARRPRRQAREGVRALRARPRARHGVLRRARQGERRPAQPPP

SEQ ID NO: 29473 - DNA, 575 bp, Triticum aestivum
gcagtcgatttcacgcgatcggatccagccgccccatgccgccgtcccccgccgcgtccgccccggcgagccgccacctgcgactctggtggcgccgccgcggccgggccggcgccgtcgcggccaccttcgccgcggcactcctcgccgcggccctcctcctctcgctctcctacttcgcctccctgcccctcgcgcccgcctcctcctccgccctcgtcggcctcaccctcctccgccgcgccgaggagaagggcgcgctgtgcttggatgggagcgcgccggggtaccatctgcagcgagggtcagggagtggctctcagagctggctcatccacttggagggtggaggctggtgccgaaatttgaaatcatgcgcttcacgccagaaatcgatgttgggttcttcccattacatggaacgtcaggttgagtttgctgggatgttgagcgatgatgaagatcagaatccagattttcacaactggaataaagtgaagataaggtattgtgatggggcatcattttctgggaacgttaaagacgagttgcagaacggcacaaaattctttttc

SEQ ID NO: 29474 - protein, 191 aa, Triticum aestivum
SRFHAIGSSRPMPPSPAASAPASRHLRLWWRRRGRAGAVAATFAAALLAAALLLSLSYFASLPLAPASSSALVGLTLLRRAEEKGALCLDGSAPGYHLQRGSGSGSQSWLIHLEGGGWCRNLKSCASRQKSMLGSSHYMERQVEFAGMLSDDEDQNPDFHNWNKVKIRYCDGASFSGNVKDELQNGTKFFF

SEQ ID NO: 29475 - protein, 180 aa, Triticum aestivum
MPPSPAASAPASRHLRLWWRRRGRAGAVAATFAAALLAAALLLSLSYFASLPLAPASSSALVGLTLLRRAEEKGALCLDGSAPGYHLQRGSGSGSQSWLIHLEGGGWCRNLKSCASRQKSMLGSSHYMERQVEFAGMLSDDEDQNPDFHNWNKVKIRYCDGASFSGNVKDELQNGTKFFF

SEQ ID NO: 29476 - protein, 143 aa, Triticum aestivum
QSISRDRIQPPHAAVPRRVRPGEPPPATLVAPPRPGRRRRGHLRRGTPRRGPPPLALLLRLPAPRARLLLRPRRPHPPPPRRGEGRAVLGWERAGVPSAARVREWLSELAHPLGGWRLVPKFEIMRFTPEIDVGFFPLHGTSG

SEQ ID NO: 29477 - DNA, 974 bp, Triticum aestivum
attacctagaacatcctaatcgaaaaactgcggcttacaccagggaaaggctctcgcatcgctccctccccggggcgacacgggcggcggctcaggcgcccctccaccagaccccctcctcattcccctcccctcgccgtcgccggtgggctccgccgggcgaagcccgcatggatccggcggcggcgggacctcttctacccggcgtcgctcgtgaggggaagacttgcagcggcgggcgacggatgccggacgacgtacggtgctggtgtcggctgcgggcggcggatggggagctggggcggcggcatcggtccgggctccggcgtggcctgggcgtggacggcatgcatgcgcgcggcggcggtcggcttcggatcgtgcgtggggtgcggatcgacgtcgggcgcggcagcggctttcgtctcccggatttcgccgccgcagccgctcaccgcccacgcctcctacccgtcgacgagatgacgaagcgcaccaagaaggctggtattgtcggcaaatatggtacccgttatggtgccagtttgcgtaagcagatcaagaagatggaggtgtctcagcactccaagtacttctgtgagttctgtgggaagtttgctgtgaagaggaaagcagttggaatttggggatgcaaggactgtgggaaggtgaaggctggcggtgcttacactatgaacactgccagtgcggtcactgtcaggagcactatccgtcgtttgagggagcagactgaagcataagttgctactagtgttttgtcctagtgaatcatctgggatttcgcagtttagacgatactttggattcagttccattggctgtttagtcaaggattatctttgtacttggtgcgatgatgttctgttatgttattctcccacccttttgttgcctgattccactctgatttactgtggattaaaaaaaaaaaaaaaaaagcttatcgataccgt

SEQ ID NO: 29478 - protein, 252 aa, Triticum aestivum
YLEHPNRKTAAYTRERLSHRSLPGATRAAAQAPLHQTPSSFPSPRRRRWAPPGEARMDPAAAGPLLPGVAREGKTCSGGRRMPDDVRCWCRLRAADGELGRRHRSGLRRGLGVDGMHARGGGRLRIVRGVRIDVGRGSGFRLPDFAAAAAHRPRLLPVDEMTKRTKKAGIVGKYGTRYGASLRKQIKKMEVSQHSKYFCEFCGKFAVKRKAVGIWGCKDCGKVKAGGAYTMNTASAVTVRSTIRRLREQTEA

SEQ ID NO: 29479 - protein, 196 aa, Triticum aestivum
MDPAAAGPLLPGVAREGKTCSGGRRMPDDVRCWCRLRAADGELGRRHRSGLRRGLGVDGMHARGGGRLRIVRGVRIDVGRGSGFRLPDFAAAAAHRPRLLPVDEMTKRTKKAGIVGKYGTRYGASLRKQIKKMEVSQHSKYFCEFCGKFAVKRKAVGIWGCKDCGKVKAGGAYTMNTASAVTVRSTIRRLREQTEA

SEQ ID NO: 29480 - protein, 171 aa, Triticum aestivum
MPDDVRCWCRLRAADGELGRRHRSGLRRGLGVDGMHARGGGRLRIVRGVRIDVGRGSGFRLPDFAAAAAHRPRLLPVDEMTKRTKKAGIVGKYGTRYGASLRKQIKKMEVSQHSKYFCEFCGKFAVKRKAVGIWGCKDCGKVKAGGAYTMNTASAVTVRSTIRRLREQTEA

SEQ ID NO: 29481 - DNA, 1609 bp, Triticum aestivum
caccttctgatttggaaaggatgatacactgtaaggaggcttgtgtgctagaatctgaggttggggcgtataatgtcatatgggaagctataagagagtggaatcttgacaggaagcttttctgcttgacatctgtaagcgaaataagaaacagtggaagtatctcacctgaaggacatgcttatacagaggaactgtcttcctattagaggtgagctatacaatattgcttgtgtggatgatatggttgacagcgttctttcgaaagggcaaccattgctttatcgtgtcggtgatctgctagagagatttattcaagcacgtgcattttcatcgctgactcagcagcaacttttggaagttgctaacgatgttgatatgaagtgcccccatgaagatgcaaaatggtggcataaaatttactttagacttgaggttcttttgcatttcaagaagttacttccctctgaagaatttgtatctgtggaagaaatgaaaattgttgagcctatctataagattttgagggttttctatcgagtcgttgaagtaatgtctggggctgtttgcctgacagcaaatatgtacttccatgaagtatggaaagttaggacgattttgcaagaagaagcatgtactgaacactccgacgttgctagcatgattagagagatgcaggaagcattcaatgaatattgggcaaagtcgtacttgtggttgtcagtgcctgttgttcttgatccgagattcaaaattacttttatcgatttccgtcttaaacgagcttttggcactgatgcaacaaagtatgtaaatgatgtagctgaaatagtgagggaattgtttcatgaatattgcacccccgtggatcagctgaatgttaagacttcacattgcgaagttcaaaatgttgaaatagatggatttgacagtgatttattggaagattgggatcagcatcttactgcacagacaaggagtcaactattgtcggagcttgacagctatcttgaagatggtcttcttccacggaaggatgattttgatattctaaactggtggatgagtcattcttcgaagtatccaaccctctcaaaaatggtgcaggatgtcttggcaatgccatcatctgctgttcactgcgaggcagcattcagcagtgagggcccagtaattcataagcagtggagcacattaaacatcaagacaattgaagcacttgtgtgtacccgagattggattagctaggtggctccatgttatgctacagaatgctcttcatggagagaaggctatgcgttgtacaaatacccattcttcttctaacattggaggatgctattgctaggacgacttactaacgaaccattctgtttccgtgccggacatagttcacagcgtctcaaacatttctgcattcctctctcaaacaaatgtacacatcggctcgtcgcagaagcttgttcttggggtgtatcatgctatgttgttccctgtgtttagatctggggctcctgcccagacgctcgcgtgcagtgcctatggttcgctcttgttttaacctaacgaggatcagttgtgtaaattgtatggaagacattcgctgttc

SEQ ID NO: 29482 - protein, 356 aa, Triticum aestivum
MLIQRNCLPIRGELYNIACVDDMVDSVLSKGQPLLYRVGDLLERFIQARAFSSLTQQQLLEVANDVDMKCPHEDAKWWHKIYFRLEVLLHFKKLLPSEEFVSVEEMKIVEPIYKILRVFYRVVEVMSGAVCLTANMYFHEVWKVRTILQEEACTEHSDVASMIREMQEAFNEYWAKSYLWLSVPVVLDPRFKITFIDFRLKRAFGTDATKYVNDVAEIVRELFHEYCTPVDQLNVKTSHCEVQNVEIDGFDSDLLEDWDQHLTAQTRSQLLSELDSYLEDGLLPRKDDFDILNWWMSHSSKYPTLSKMVQDVLAMPSSAVHCEAAFSSEGPVIHKQWSTLNIKTIEALVCTRDWIS

SEQ ID NO: 29483 - protein, 334 aa, Triticum aestivum
MVDSVLSKGQPLLYRVGDLLERFIQARAFSSLTQQQLLEVANDVDMKCPHEDAKWWHKIYFRLEVLLHFKKLLPSEEFVSVEEMKIVEPIYKILRVFYRVVEVMSGAVCLTANMYFHEVWKVRTILQEEACTEHSDVASMIREMQEAFNEYWAKSYLWLSVPVVLDPRFKITFIDFRLKRAFGTDATKYVNDVAEIVRELFHEYCTPVDQLNVKTSHCEVQNVEIDGFDSDLLEDWDQHLTAQTRSQLLSELDSYLEDGLLPRKDDFDILNWWMSHSSKYPTLSKMVQDVLAMPSSAVHCEAAFSSEGPVIHKQWSTLNIKTIEALVCTRDWIS

SEQ ID NO: 29484 - protein, 289 aa, Triticum aestivum
MKCPHEDAKWWHKIYFRLEVLLHFKKLLPSEEFVSVEEMKIVEPIYKILRVFYRVVEVMSGAVCLTANMYFHEVWKVRTILQEEACTEHSDVASMIREMQEAFNEYWAKSYLWLSVPVVLDPRFKITFIDFRLKRAFGTDATKYVNDVAEIVRELFHEYCTPVDQLNVKTSHCEVQNVEIDGFDSDLLEDWDQHLTAQTRSQLLSELDSYLEDGLLPRKDDFDILNWWMSHSSKYPTLSKMVQDVLAMPSSAVHCEAAFSSEGPVIHKQWSTLNIKTIEALVCTRDWIS

SEQ ID NO: 29485 - DNA, 1199 bp, Triticum aestivum
attttttattagttctggacgaagcagtggctgtgtacgagtcgagcacgtcacgcacgcggccaggctgtgctgggagcttcgtccccctccactcccgtcagctccccgggcctgccccgccccgcccccactccgccgccgactgcgagagaagcctgtcatgtcaaacattgggaaatcaactaatattctatggcatgactgcccaattggacaaactgagcgacagaaattgctggggcaaaaaggatgtgtcatatggatcacaggactcagcggttcagggaaaagtaccgttgcctgtgcactgagtcgggaattacactacagaggccaccacacgtatgtccttgatggtgacaacctcagacatggcctcaatcgagatctaagcttcaaggcagaagaccgtacagaaaatatacgaagagttggtgaagtggcaaagctttttgcagatgctggtaccatatgcattgctagtttgatatctccatacaggagagaccgtgatgcatgccgagctctacttccagattctagatttattgaagtatttatggatttgccactagaattatgtgaagctcgtgatcctaaagggttatacaagcttgcacgcacaggaaagattaaagggttcaccggagttgatgatccatacgaatcaccagtgaatagtgagatagtaattaagatggaaggtggggaatgcccttcaccgaaagcaatggcccagcaagttctatcctaccttgagaagaatggatatttgcaggcttagcacacatactccagatccagaagattgatcttattcttctgtgtccataactcatggacacaggtacaatccatttggtccatccggaataaaaggtgctgttatcgaagcaacaagctgcctttttcacgaggaaagggacgcagatcgatgatcagtttgattgttcggcattgctcctctcctgtgtgttgtgctattttagctgtagtttatacttactcatttcggctgaaatggtgtgctgtgctgtgtttatctctactcctaatggacgacttggtgaatagtcttcgcgtttttaaaaaaaaaaaaaaaaaaaaaaaaaaaaaaaaaaaaaaaaaaaaaaaaaaaaaagaaaaaaaaaaaaaaaaaggtttatcaataccgtcaacctcaagggggggcccgg

SEQ ID NO: 29486 - protein, 261 aa, Triticum aestivum
FFISSGRSSGCVRVEHVTHAARLCWELRPPPLPSAPRACPAPPPLRRRLREKPVMSNIGKSTNILWHDCPIGQTERQKLLGQKGCVIWITGLSGSGKSTVACALSRELHYRGHHTYVLDGDNLRHGLNRDLSFKAEDRTENIRRVGEVAKLFADAGTICIASLISPYRRDRDACRALLPDSRFIEVFMDLPLELCEARDPKGLYKLARTGKIKGFTGVDDPYESPVNSEIVIKMEGGECPSPKAMAQQVLSYLEKNGYLQA

SEQ ID NO: 29487 - protein, 207 aa, Triticum aestivum
MSNIGKSTNILWHDCPIGQTERQKLLGQKGCVIWITGLSGSGKSTVACALSRELHYRGHHTYVLDGDNLRHGLNRDLSFKAEDRTENIRRVGEVAKLFADAGTICIASLISPYRRDRDACRALLPDSRFIEVFMDLPLELCEARDPKGLYKLARTGKIKGFTGVDDPYESPVNSEIVIKMEGGECPSPKAMAQQVLSYLEKNGYLQA

SEQ ID NO: 29488 - DNA, 1026 bp, Triticum aestivum
cctagaacatactaatcgaaaaatgcacagtcacctcgtaagcaagcagctgctacagcctcaacaatcaaaccttgattcgacatggcgaagtcgcccatggcgatcttggctctcgggctagcagcactagtcctatccggcgccgggctggtggccgcgcagaactgcggctgccagccgaacgagtgctgcagcaagtacggttattgcgggaccgatgccagctactgcggacaagattgtcggtcgggcccgtgcacggcgagcggcggcgggagcggcgatcccgtggagagcgtcgtcaccgacgcgttctttgacgggatcaagtcccaggccgccgacgggtgccccgggaagagcttttacacgcgccagtttttcctggacggcgcccaggcgaaccccgacttcggcaaaggcagcaccagcgacgacggcaagagggagatagccgccttcttcgcccacttcacccacgagaccggacacatgtgctccatcgaggagaacgaaggggcgagcaaggattactgcgacgagacgaacacgcaatggccgtgtaccccggggaaggcgtactacgggcgcgggccgctgcagctgtcgtggaactacaactacggggcggccggggagagcaccgggttcgacgggctcaacagcccggagacggtggcgcaggaccaggcgctaacgttcaaggcggcgttctggttctggatgaccaacgtgcaccaggccgtgcccagtgggttcggcgcgacgaccagggcaatcaacggtgacgtggagtgcgacggcaagaagccagacttggtgagcgcgcgggcgggctactacacggactactgccagcagttcggcgtcgacccagggaacaacctcacttgctaggtgcttggttctgaattgatcgacgcgcaaaaacctttctggcgatgctcctactgctctacctccctgtgtattctgggatatctatatatcctgtatacgtaataaatttacatctctgtattc

SEQ ID NO: 29489 - protein, 271 aa, Triticum aestivum
MAKSPMAILALGLAALVLSGAGLVAAQNCGCQPNECCSKYGYCGTDASYCGQDCRSGPCTASGGGSGDPVESVVTDAFFDGIKSQAADGCPGKSFYTRQFFLDGAQANPDFGKGSTSDDGKREIAAFFAHFTHETGHMCSIEENEGASKDYCDETNTQWPCTPGKAYYGRGPLQLSWNYNYGAAGESTGFDGLNSPETVAQDQALTFKAAFWFWMTNVHQAVPSGFGATTRAINGDVECDGKKPDLVSARAGYYTDYCQQFGVDPGNNLTC

SEQ ID NO: 29490 - protein, 266 aa, Triticum aestivum
MAILALGLAALVLSGAGLVAAQNCGCQPNECCSKYGYCGTDASYCGQDCRSGPCTASGGGSGDPVESVVTDAFFDGIKSQAADGCPGKSFYTRQFFLDGAQANPDFGKGSTSDDGKREIAAFFAHFTHETGHMCSIEENEGASKDYCDETNTQWPCTPGKAYYGRGPLQLSWNYNYGAAGESTGFDGLNSPETVAQDQALTFKAAFWFWMTNVHQAVPSGFGATTRAINGDVECDGKKPDLVSARAGYYTDYCQQFGVDPGNNLTC

SEQ ID NO: 29491 - DNA, 691 bp, Triticum aestivum
ccatgctctcacagttcttcctaagtattagttccatcaaatatgaccatgataaaatgccccaaatcaaccgtgccgtggctcatgtaactgatagcatcttgggcacgaggaacccggaaatcaccatccgcaatctcaaaatcagattcattttgatggatcgtgactctctcaccattggaagatctgtcgcccacgccatgtcaacccagaaggttgaagcagctgagtttgagattataacggagaaggcttataggaactgcactcctgccgatctccgccagaatgctaagctgttcaataattttgttggtgcttgtccggatgcatttgctggcctcaggcgcctgtggctgcgtaatatgaggttcggtgaacaggacatcccaaacatcctcagcacttgcaagctcttggagtctttgcgtttaatccattgcgactcagggatccattctgtgctgcaagtagaacatgctcaacttattgagctcgaggttgaccttgggaaatttgagagagttgagttgatatgtctacccaaactccaacgggtgagctataataattggtgctcttctgaacatcctgtgtattttggtcttgtaccacagctttcaagactgagcctcactaaagttggcgtcagttctgataagattcttgagttaagtcagcttcttgc

SEQ ID NO: 29492 - protein, 229 aa, Triticum aestivum
MLSQFFLSISSIKYDHDKMPQINRAVAHVTDSILGTRNPEITIRNLKIRFILMDRDSLTIGRSVAHAMSTQKVEAAEFEIITEKAYRNCTPADLRQNAKLFNNFVGACPDAFAGLRRLWLRNMRFGEQDIPNILSTCKLLESLRLIHCDSGIHSVLQVEHAQLIELEVDLGKFERVELICLPKLQRVSYNNWCSSEHPVYFGLVPQLSRLSLTKVGVSSDKILELSQLL

SEQ ID NO: 29493 - protein, 211 aa, Triticum aestivum
MPQINRAVAHVTDSILGTRNPEITIRNLKIRFILMDRDSLTIGRSVAHAMSTQKVEAAEFEIITEKAYRNCTPADLRQNAKLFNNFVGACPDAFAGLRRLWLRNMRFGEQDIPNILSTCKLLESLRLIHCDSGIHSVLQVEHAQLIELEVDLGKFERVELICLPKLQRVSYNNWCSSEHPVYFGLVPQLSRLSLTKVGVSSDKILELSQLL

SEQ ID NO: 29494 - protein, 177 aa, Triticum aestivum
MDRDSLTIGRSVAHAMSTQKVEAAEFEIITEKAYRNCTPADLRQNAKLFNNFVGACPDAFAGLRRLWLRNMRFGEQDIPNILSTCKLLESLRLIHCDSGIHSVLQVEHAQLIELEVDLGKFERVELICLPKLQRVSYNNWCSSEHPVYFGLVPQLSRLSLTKVGVSSDKILELSQLL

SEQ ID NO: 29495 - DNA, 1120 bp, Triticum aestivum
atcaggtaaacacacaaccatacacaaggcgcacggttgcaaaacaagggagttatttagaagcaaggagtaaggaaccacctgaagccatgtgtatcgctgcatggatttggcaggctcaccctcagcaccagctcctgctgctgctcaacagagatgagttccatagcaggcctacaaaggcagtaggatggtggggggagggctcaatgaagattcttggtggcagggatgtacttggtggaggaacatggatggggagcaccaaagatggcagacttgccttcctgaccaatgtgctcgagcctgatgtgatgcctggcgcacgcactaggggagacctgcccctcaggttcctgcagggcaacaagagcccactggaggttgcaactgaagtcgcaaaagaagctgatgagtacaatggcttcaaccttatactagctgatctaaccaggaatgtcatggtttatgtgtcaaaccggccaaaggggcagcctgcgacgattcagctcgtctcaccaggactccatgtgttgtccaatgcaaggctagacagcccttggcagaaagcaattcgccttggtaaaaacttcagggagtttataaggaagcatggtgatgatgaagttgaagcgaaggatatagctgatagactaatgactgacaccacgagggctgataaagataggctgccaaacaccggttgtgatcccaactgggagcacggtctgagctccatcttcatcgaggtgcaaactgacgaagggctctatggtacaaggagcacagcagttctttcagtgaactatgatggagaagctagcttatatgagaagtacctcgagagtggtatatggaagaaccacacagtgcattaccagatagaattgccaatgcgcacctaaaggcaggagcctcaaataggaagaaagaatgaatagctaccattgtgcatgctgttatttccacagttgcgctttaagatcacataatgatctctaattatggcaattaaattatttactgtatgcggatctataaattcagagacagatcaagtcaaattgttgaatatatatacataataataatatgatatagtatgtttatttacagactt

SEQ ID NO: 29496 - protein, 300 aa, Triticum aestivum
QVNTQPYTRRTVAKQGSYLEARSKEPPEAMCIAAWIWQAHPQHQLLLLLNRDEFHSRPTKAVGWWGEGSMKILGGRDVLGGGTWMGSTKDGRLAFLTNVLEPDVMPGARTRGDLPLRFLQGNKSPLEVATEVAKEADEYNGFNLILADLTRNVMVYVSNRPKGQPATIQLVSPGLHVLSNARLDSPWQKAIRLGKNFREFIRKHGDDEVEAKDIADRLMTDTTRADKDRLPNTGCDPNWEHGLSSIFIEVQTDEGLYGTRSTAVLSVNYDGEASLYEKYLESGIWKNHTVHYQIELPMRT

SEQ ID NO: 29497 - protein, 271 aa, Triticum aestivum
MCIAAWIWQAHPQHQLLLLLNRDEFHSRPTKAVGWWGEGSMKILGGRDVLGGGTWMGSTKDGRLAFLTNVLEPDVMPGARTRGDLPLRFLQGNKSPLEVATEVAKEADEYNGFNLILADLTRNVMVYVSNRPKGQPATIQLVSPGLHVLSNARLDSPWQKAIRLGKNFREFIRKHGDDEVEAKDIADRLMTDTTRADKDRLPNTGCDPNWEHGLSSIFIEVQTDEGLYGTRSTAVLSVNYDGEASLYEKYLESGIWKNHTVHYQIELPMRT

SEQ ID NO: 29498 - protein, 231 aa, Triticum aestivum
MKILGGRDVLGGGTWMGSTKDGRLAFLTNVLEPDVMPGARTRGDLPLRFLQGNKSPLEVATEVAKEADEYNGFNLILADLTRNVMVYVSNRPKGQPATIQLVSPGLHVLSNARLDSPWQKAIRLGKNFREFIRKHGDDEVEAKDIADRLMTDTTRADKDRLPNTGCDPNWEHGLSSIFIEVQTDEGLYGTRSTAVLSVNYDGEASLYEKYLESGIWKNHTVHYQIELPMRT

SEQ ID NO: 29499 - DNA, 744 bp, Triticum aestivum
gacggggctactttacttcttaagaccatcgaaagtggaaacgatgtactcatggaaactttccgtaaggctgtagcaatacctgtgcactcaccgaatgtgcttacaatcctcaaagcagttactaacttatttgacaactcatgcttacaccaatggttgaaaacccattgtgctgagattattgattctttctcaagctgcaagccgtcttttagcaagagcgctcacttggcatatgccacacttttactgaactattctgttctttcaattgaatcgaaggatgaacaaagtcaggcacagattctttctgcggcccttgaaattgctgaagacgatgcccaagatgccgattcgaaatacagggcgcttgttgccaatcggctctcttatgttgaacggcctggtcaagtccatcgcccttgacctcgacgtgaagagcgtcacaagcagcgcaaaagcttcgatggactcgaagatcgccgaagttggagctgatattgagctgctaacaagatgagagaaaagagtgtcgcagatactacattcgagagaaaaggtgggaacggagggctgggcggagcgttgcagttaagtagtggtagcagcccacatccgcgcaggtggtagcataacttttgcgtgagtgcaggagagtttgctgcaccttgtaatcagtatggtatcgtgcgaatccttcgccctgatcacaaagtttactatttatgcgcacgcaggcga

SEQ ID NO: 29500 - protein, 142 aa, Triticum aestivum
DGATLLLKTIESGNDVLMETFRKAVAIPVHSPNVLTILKAVTNLFDNSCLHQWLKTHCAEIIDSFSSCKPSFSKSAHLAYATLLLNYSVLSIESKDEQSQAQILSAALEIAEDDAQDADSKYRALVANRLSYVERPGQVHRP

SEQ ID NO: 29501 - protein, 125 aa, Triticum aestivum
METFRKAVAIPVHSPNVLTILKAVTNLFDNSCLHQWLKTHCAEIIDSFSSCKPSFSKSAHLAYATLLLNYSVLSIESKDEQSQAQILSAALEIAEDDAQDADSKYRALVANRLSYVERPGQVHRP

SEQ ID NO: 29502 - protein, 78 aa, Triticum aestivum
MNKVRHRFFLRPLKLLKTMPKMPIRNTGRLLPIGSLMLNGLVKSIALDLDVKSVTSSAKASMDSKIAEVGADIELLTR

SEQ ID NO: 29503 - DNA, 626 bp, Triticum aestivum
atttcctggtgatgtccctcgcgtaaatggccaactcgctgtcgcaagggcgttcggtgaccatagcctcaagacacacttgagttcggaacctgacattaggcatgtacccataaactcaagtatagagttcgtcatacttgccagcgatggattatggaaggtgatgaagaaccaggaagctgtggacctcgtgaagtcgacaaaggaccctcaggcagcagcaaagcggctgacgaccgaggcgctcgcaaggaagagcaaggacgacatctcctgcatcgtcatccgcttccgctgctgaatcgaccccattctccgatcatatcaatttctcgatccatgactgatgtggcgtcgtgacctgattctcgccgctccagattgaaattatgtagtgtctgttattgtttgtacttatagtagctgtgaacaggcttgagcttagaacattgcatgggaagacggtggagagtctgaggcttggggctagtagtgagtagtggctagtgtgtgcagggtgtgtcattcatctgtgcatatgttacaccgccataagttccccgccaatctgtggaacatctcgtttgtgtacctggttgattgtgatggtaaattggtaatgg

SEQ ID NO: 29504 - protein, 100 aa, Triticum aestivum
FPGDVPRVNGQLAVARAFGDHSLKTHLSSEPDIRHVPINSSIEFVILASDGLWKVMKNQEAVDLVKSTKDPQAAAKRLTTEALARKSKDDISCIVIRFRC

SEQ ID NO: 29505 - protein, 68 aa, Triticum aestivum
MEGDEEPGSCGPREVDKGPSGSSKAADDRGARKEEQGRHLLHRHPLPLLNRPHSPIISISRSMTDVAS

SEQ ID NO: 29506 - protein, 45 aa, Triticum aestivum
MKNQEAVDLVKSTKDPQAAAKRLTTEALARKSKDDISCIVIRFRC

SEQ ID NO: 29507 - DNA, 1198 bp, Triticum aestivum
aaaaaaaaaaaccaaaggccagacccagaccagaccgctcacgccgcaccgcacgcgctgcacgggcacccaacacaagcccttctccgatcgtgctcgctcgccgccggtactagtctagtagagcagcggggaggagctccgagatgagggcgccgcggaggccgatggcggtggtgctcagctgggtgcggaggcagccgcccaaggtcaaggccttcctcgccgtcgtcgcgggcatgaccgcgctcgtcttcatccgcttcatcgtccacgaccacgacaacctcttcgtcgccgccgaggccgcgcacgcgctcggcatcgccgtgctcatctacaagctcaccaaggagaagacctgcgctggactttcactcaagtctcaggatttgacagcattgttcctggccgttaggttgtattgcagctttgttatggagtatgacatccatacaatactggattcagctacactagtagctactctttttgtcatttacatgattcggttcagactgaggtcaacttatatgctggacaaggacaattttgcattgtactacgtggttgtaccatgttgtgtgctggcatttattgctcatccttcaacatcacatatcatgatcaataggatctgctgggccttctgtgtttacttggaagctgtttcagtgctgccccagttgcgcttgatgcagaatacaaagattgttgaaccattcacagctcattatgtgtttgcgttgggtgtggcaaggttccttagctgtgcacactgggtccttcaggtcttggatactcgtggcagattattgactgctctgggctatggcttttggccatcgatggtgctcctctctgaaatcgtccagacgttcatccttgcagatttctgctactactatgtgaagagtcttgctggcggacaactagtgctgcgacttccttctggggtggtgtaaaatctggtgcacaactcatttgttcggtgctgtgtcttactgttgaacagtggctctgcttctggcgcccaaccttctctcttctcatgtgggatggattcaagagtcttgtttgccttttctttttccagttataaactgtttggtgaaaattgtaccggagactgttggtcgtgaagcttaggctgttgagaatactatctatagctgactatttatccagactagttttc

SEQ ID NO: 29508 - protein, 272 aa, Triticum aestivum
MRAPRRPMAVVLSWVRRQPPKVKAFLAVVAGMTALVFIRFIVHDHDNLFVAAEAAHALGIAVLIYKLTKEKTCAGLSLKSQDLTALFLAVRLYCSFVMEYDIHTILDSATLVATLFVIYMIRFRLRSTYMLDKDNFALYYVVVPCCVLAFIAHPSTSHIMINRICWAFCVYLEAVSVLPQLRLMQNTKIVEPFTAHYVFALGVARFLSCAHWVLQVLDTRGRLLTALGYGFWPSMVLLSEIVQTFILADFCYYYVKSLAGGQLVLRLPSGVV

SEQ ID NO: 29509 - protein, 265 aa, Triticum aestivum
MAVVLSWVRRQPPKVKAFLAVVAGMTALVFIRFIVHDHDNLFVAAEAAHALGIAVLIYKLTKEKTCAGLSLKSQDLTALFLAVRLYCSFVMEYDIHTILDSATLVATLFVIYMIRFRLRSTYMLDKDNFALYYVVVPCCVLAFIAHPSTSHIMINRICWAFCVYLEAVSVLPQLRLMQNTKIVEPFTAHYVFALGVARFLSCAHWVLQVLDTRGRLLTALGYGFWPSMVLLSEIVQTFILADFCYYYVKSLAGGQLVLRLPSGVV

SEQ ID NO: 29510 - protein, 241 aa, Triticum aestivum
MTALVFIRFIVHDHDNLFVAAEAAHALGIAVLIYKLTKEKTCAGLSLKSQDLTALFLAVRLYCSFVMEYDIHTILDSATLVATLFVIYMIRFRLRSTYMLDKDNFALYYVVVPCCVLAFIAHPSTSHIMINRICWAFCVYLEAVSVLPQLRLMQNTKIVEPFTAHYVFALGVARFLSCAHWVLQVLDTRGRLLTALGYGFWPSMVLLSEIVQTFILADFCYYYVKSLAGGQLVLRLPSGVV

SEQ ID NO: 29511 - DNA, 957 bp, Triticum aestivum
cttgggaccgaagccgggctcggctccagtcccccaaattacaacctctctcgccgtctgctcgctcgcccgtcccccaaatccctactcccccaccaaccccagccgaaccccggcggcgtcaccggcgatggagtgcgtcatcggcgtggtcggccgcgacttcgcggtcgtggcggcggacacgtccgccgtgcagagcatcctcgtccacaagacggacgaggacaagatcatgctcctcgactcccacaagctcatgggcgcctccggcgagcccggcgaccgcgtgcagttcaccgagttcatccagaagaacctccacctctaccagttccgcaacaacatgccgctcagcaccgccgccaccgccaacttcacccgcggcgagctcgccaccgccctccgcaagaatccctactctgtaaacatcatacttgcagggttttgataaagacgctggtgcatcgatgtactacattgactacatcgcgacgctccacaagatcgacaagggagcattcgggtatgggtcgtacttctgtttgtcgctgatggacaagttgtaccgccctgacatgactgttgaggaagcggtggaccttgttgacaagtgcatcaaggagatcagactccggctggtcgtcgcgccccagaatttcgccatcaagatcgtggacaaggatggcgccagggactatgctaggcgtgagatcggaggtgacagtcctgcaaccgcaaccgcaacaatagcaacaactgcctgaggtgattggccctgtcggtggtcatttggaggctggagactgaacccttcctgttaattgtttccgagtactgtcactatgtaatcgcaatacgtttcggttcgagaactgtgttgcaaattctcccagctgtggactatagtctgtttatgacccccatttcatggttatatgtttcactgtttcttgc

SEQ ID NO: 29512 - protein, 184 aa, Triticum aestivum
LGTEAGLGSSPPNYNLSRRLLARPSPKSLLPHQPQPNPGGVTGDGVRHRRGRPRLRGRGGGHVRRAEHPRPQDGRGQDHAPRLPQAHGRLRRARRPRAVHRVHPEEPPPLPVPQQHAAQHRRHRQLHPRRARHRPPQESLLCKHHTCRVLIKTLVHRCTTLTTSRRSTRSTREHSGMGRTSVCR

SEQ ID NO: 29513 - protein, 149 aa, Triticum aestivum
LGPKPGSAPVPQITTSLAVCSLARPPNPYSPTNPSRTPAASPAMECVIGVVGRDFAVVAADTSAVQSILVHKTDEDKIMLLDSHKLMGASGEPGDRVQFTEFIQKNLHLYQFRNNMPLSTAATANFTRGELATALRKNPYSVNIILAGF

SEQ ID NO: 29514 - protein, 141 aa, Triticum aestivum
WDRSRARLQSPKLQPLSPSARSPVPQIPTPPPTPAEPRRRHRRWSASSAWSAATSRSWRRTRPPCRASSSTRRTRTRSCSSTPTSSWAPPASPATACSSPSSSRRTSTSTSSATTCRSAPPPPPTSPAASSPPPSARIPTL

SEQ ID NO: 29515 - protein, 106 aa, Triticum aestivum
MECVIGVVGRDFAVVAADTSAVQSILVHKTDEDKIMLLDSHKLMGASGEPGDRVQFTEFIQKNLHLYQFRNNMPLSTAATANFTRGELATALRKNPYSVNIILAGF

SEQ ID NO: 29516 - DNA, 1497 bp, Triticum aestivum
cacccccacccgcatcctcctccctccccccaagctgcaattcacctccgaattcggtcgcccatggcaccgcggctgctctgatcctacccacctaccccctccccctcccctcccctcccctcccagctgctctcccttcccctctcgtttgaaaatggcaatgctggtggatcctccgaatggcatgggaaaccaagggaagcactattactcaatgtggcaaaccttgtttgagattgacaccaagtatgtgcctatcaaacccataggccgaggagcttatggaatagtttgctcatccataaaccgtgagacaaacgagaaagtagcgataaagaagatacataatgtattcgacaaccgtgtggatgcactaaggaccttgcgggagctgaaactcctccggcatctccgccatgagaatgttatttctttgaaggatataatgatgcctgtacaaaggaggagctttaaggatgtgtacttggtttatgagctcatggatacagacctgcatcagataatcaaatcgcctcaggggctttccaacgaccactgccaatattttctttttcagttgcttcgaggactgaaatacctccattcagcagagatactccacagagacctaaaacctgggaacctactggtgaatgcaaactgtgatctgaagatatgcgattttggtcttgcacgtacaaacagtagtaaaggccagtttatgactgaatatgtcgtcacccgctggtatagggctcctgagttgctgctttgctgcgacaactacggcacttccattgatgtttggtctgttggctgcatctttgctgagctacttggccgcaagcctattttccccgggacagagtgcctaaatcagctaaaactgatagtcaatgttcttggcacgatgagcgagtctgacctggagttcatcgacaacccaaaggcccgcagatatatcaagaccctcccctacactcctggtgttccacttgcaagtatgtacccacatgcacaccctctggccatcgatctattacagaagatgctcatcttcgaccctaccaaaagggtcagtgttacccaggcccttgagcacccttacatgtctcctctgtatgacccaagtgcaaaccctcccgcgcaagtgcccatcgatctcgacatagatgagaacatcagctcagagatgatcagggaaatgatgtggcaggagatgcttcactaccaccctgaagccgccacggcagtaaacatgtgacgacgatcttgcagtgccctgggaagaacccggcaggctcactccttttttcctcgaaaagactactgcgattatcgcacctattaagtaaccacgacgtgcagtgtggagaggtatctccgtgtaaatatgcagtgcgataagaaccgcatatggatagttcttgttatggaccactttggtgtatgtatactgttgtgttgttgtataagctcatgaaagaactgttg

SEQ ID NO: 29517 - protein, 421 aa, Triticum aestivum
TPTRILLPPPKLQFTSEFGRPWHRGCSDPTHLPPPPPLPSPPSCSPFPSRLKMAMLVDPPNGMGNQGKHYYSMWQTLFEIDTKYVPIKPIGRGAYGIVCSSINRETNEKVAIKKIHNVFDNRVDALRTLRELKLLRHLRHENVISLKDIMMPVQRRSFKDVYLVYELMDTDLHQIIKSPQGLSNDHCQYFLFQLLRGLKYLHSAEILHRDLKPGNLLVNANCDLKICDFGLARTNSSKGQFMTEYVVTRWYRAPELLLCCDNYGTSIDVWSVGCIFAELLGRKPIFPGTECLNQLKLIVNVLGTMSESDLEFIDNPKARRYIKTLPYTPGVPLASMYPHAHPLAIDLLQKMLIFDPTKRVSVTQALEHPYMSPLYDPSANPPAQVPIDLDIDENISSEMIREMMWQEMLHYHPEAATAVNM

SEQ ID NO: 29518 - protein, 369 aa, Triticum aestivum
MAMLVDPPNGMGNQGKHYYSMWQTLFEIDTKYVPIKPIGRGAYGIVCSSINRETNEKVAIKKIHNVFDNRVDALRTLRELKLLRHLRHENVISLKDIMMPVQRRSFKDVYLVYELMDTDLHQIIKSPQGLSNDHCQYFLFQLLRGLKYLHSAEILHRDLKPGNLLVNANCDLKICDFGLARTNSSKGQFMTEYVVTRWYRAPELLLCCDNYGTSIDVWSVGCIFAELLGRKPIFPGTECLNQLKLIVNVLGTMSESDLEFIDNPKARRYIKTLPYTPGVPLASMYPHAHPLAIDLLQKMLIFDPTKRVSVTQALEHPYMSPLYDPSANPPAQVPIDLDIDENISSEMIREMMWQEMLHYHPEAATAVNM

SEQ ID NO: 29519 - protein, 367 aa, Triticum aestivum
MLVDPPNGMGNQGKHYYSMWQTLFEIDTKYVPIKPIGRGAYGIVCSSINRETNEKVAIKKIHNVFDNRVDALRTLRELKLLRHLRHENVISLKDIMMPVQRRSFKDVYLVYELMDTDLHQIIKSPQGLSNDHCQYFLFQLLRGLKYLHSAEILHRDLKPGNLLVNANCDLKICDFGLARTNSSKGQFMTEYVVTRWYRAPELLLCCDNYGTSIDVWSVGCIFAELLGRKPIFPGTECLNQLKLIVNVLGTMSESDLEFIDNPKARRYIKTLPYTPGVPLASMYPHAHPLAIDLLQKMLIFDPTKRVSVTQALEHPYMSPLYDPSANPPAQVPIDLDIDENISSEMIREMMWQEMLHYHPEAATAVNM

SEQ ID NO: 29520 - DNA, 1618 bp, Triticum aestivum
acataaatcatttgatcagcctctcgcctcttcataaggtagctagctcgctcaatccatactaccactatccctctcgaccgtctccgctttatccaatttaggcacttgtgttcagctatctatcgagaaggataggagtagaaggaaggcgaccatggcaagcagcaccagcatcccagccaccaccttgggcgagatccgtgttgctcagcgtgcggatgggccggcggcgatgctggccatcggcacggctaacccgccccactgcgtgccccaggaagactaccccgactactacttcggcgtcaccaagagcgaccacctcaccgacctcaagcgcaccttcgccaaactatgcgggatgacgggcatcggcaggcgtttcttccaccacacggacgaactgctcgccacacacccggacttgtccctcgacgcccggctggacgtcgtggctactgccgccccagagctcgctgcgtcggctgcggcgaacgccatcgccgagtggggccgtccggcgggcgacatcacccatctcgtcgtcagcacgaacgctgggtcgcatgccccgggcaccgacgtccgcttggtctccctcctcggcctccgccatgatgtcctgcgcactgtgctccagctcaacggctgcgcttccggatgcgccgccctgcgcctagccaaagaccttgccgagaacaaccatggcgcgcgcgtcctcgtggcctgcgtcgagctcactatcaccgccttccgcgggcccgatgaggcggactccttcgacaccctcatcccccaggggctcttcggtgacggtgcaggcgccgccatcgtgggtgctgaaccctacgtccacgagcgcccgctgtttgagatggtgtcagcctcccagtacgtgataccagacaccgagcacatgctcaccatgcagctcggcagcggtggcatcggcgggaccattgccaccggactgccaagactggcggcgggcatcgttgagaagtgcttgctggatgcgtttggcgaccgcctagccggcatcggaggtgtcgtcgaatggaacaacctcttctgggccgtgcatcccggcagcagtgcgatgttggaccacatcgtcagggcactccggcttgctccggcgaagctggcggcgagcagaaccgtggtgagagagtacgggaacatgctgggcgccacggtgatcttcgtgctcgatgaggtcaggcgccaaagagaagatcctgaaggagagggagctagccatgatgaaggttggggggttatgatgggatttggaccggggttcactgtggagacgatgctgctgcatgccgctacctaggtaattagaaagaaggaataaaaaaacacatagcatatatatgttcaataaagtgcatgcaatgcaaccttttatatttccatatccacatatcacctatatatacgtacgtgtaagagatgtgaacatgtggtgtgacagtggtcaagtcctgtaagagtgatctgcagtatatggttataaataccacttcagctacttgtaggtttcaaaaaaaaaaaaaaaaaaaaaaaaaaccaaaaaaaaaaaaaaaaaagcttatcgataccgtcg

SEQ ID NO: 29521 - protein, 395 aa, Triticum aestivum
MASSTSIPATTLGEIRVAQRADGPAAMLAIGTANPPHCVPQEDYPDYYFGVTKSDHLTDLKRTFAKLCGMTGIGRRFFHHTDELLATHPDLSLDARLDVVATAAPELAASAAANAIAEWGRPAGDITHLVVSTNAGSHAPGTDVRLVSLLGLRHDVLRTVLQLNGCASGCAALRLAKDLAENNHGARVLVACVELTITAFRGPDEADSFDTLIPQGLFGDGAGAAIVGAEPYVHERPLFEMVSASQYVIPDTEHMLTMQLGSGGIGGTIATGLPRLAAGIVEKCLLDAFGDRLAGIGGVVEWNNLFWAVHPGSSAMLDHIVRALRLAPAKLAASRTVVREYGNMLGATVIFVLDEVRRQREDPEGEGASHDEGWGVMMGFGPGFTVETMLLHAAT

SEQ ID NO: 29522 - protein, 369 aa, Triticum aestivum
MLAIGTANPPHCVPQEDYPDYYFGVTKSDHLTDLKRTFAKLCGMTGIGRRFFHHTDELLATHPDLSLDARLDVVATAAPELAASAAANAIAEWGRPAGDITHLVVSTNAGSHAPGTDVRLVSLLGLRHDVLRTVLQLNGCASGCAALRLAKDLAENNHGARVLVACVELTITAFRGPDEADSFDTLIPQGLFGDGAGAAIVGAEPYVHERPLFEMVSASQYVIPDTEHMLTMQLGSGGIGGTIATGLPRLAAGIVEKCLLDAFGDRLAGIGGVVEWNNLFWAVHPGSSAMLDHIVRALRLAPAKLAASRTVVREYGNMLGATVIFVLDEVRRQREDPEGEGASHDEGWGVMMGFGPGFTVETMLLHAAT

SEQ ID NO: 29523 - protein, 326 aa, Triticum aestivum
MTGIGRRFFHHTDELLATHPDLSLDARLDVVATAAPELAASAAANAIAEWGRPAGDITHLVVSTNAGSHAPGTDVRLVSLLGLRHDVLRTVLQLNGCASGCAALRLAKDLAENNHGARVLVACVELTITAFRGPDEADSFDTLIPQGLFGDGAGAAIVGAEPYVHERPLFEMVSASQYVIPDTEHMLTMQLGSGGIGGTIATGLPRLAAGIVEKCLLDAFGDRLAGIGGVVEWNNLFWAVHPGSSAMLDHIVRALRLAPAKLAASRTVVREYGNMLGATVIFVLDEVRRQREDPEGEGASHDEGWGVMMGFGPGFTVETMLLHAAT

SEQ ID NO: 29524 - DNA, 1039 bp, Triticum aestivum
cattttcagtttcctcagtctggaagcataaatctttcagaagtagttcccacagcaagtgaagacgcgctgaaccttatttcgtggctttgctcatgggacccacgtaaaaggccaaccgcagtggaggttttgcagcatcccttctttcagccatgcttctatgtccccccttcacttcgttttagatcgaccggatatgcaacaacaccaccatcagttggggctaaaggagctatggaccagaagaatgctaggagataccctgtggggactttatccaacgggagaccggcagtcaataactcgtacctgagcaccaacgccccagcaagagcagctggcgtgcaaaggaagctagagttggatcatcaggtgaaaccaatgggagaccataagctgacgaaggagaacgccatgaaccagccctggtccagactaccaccagcaccagtgaggagcaacgggaactacctcgccccgaaggagcacatccctcgcggcggcggcgcgcctgacatagccgagaagctgtcccagctgtcgatggcctccaccaccaaccgggcgccgacggtgccttccgacaggtttgctgacctgaagggcactagtagagcccaccaaccggagcccgtgaggcggcccgtgcctctgggacccagggacacgtggcacgcccggaacgaccccttccggcgcacctacgagatgccgggcgagagggccctcctccagaggaagctcgtcagctgaggaccatcccaccgactcccgcccgccacaataatccagcggcctccttcccgggtggtcgccgccgccaagtttatgtctctttcatcgttcgtgttgtgattgaaaataaaagccagtccccggccctcgcgtctgctcggaggcggcggggagactgaagagtagtgccgtgtttcctttgggctctcgagtttgagaaacgtggatgatgattatatgctcttgtgatttgtgtgcgaaccaacgatcgcttgcgcagattatgtgactttgtggagtc

SEQ ID NO: 29525 - protein, 251 aa, Triticum aestivum
HFQFPQSGSINLSEVVPTASEDALNLISWLCSWDPRKRPTAVEVLQHPFFQPCFYVPPSLRFRSTGYATTPPSVGAKGAMDQKNARRYPVGTLSNGRPAVNNSYLSTNAPARAAGVQRKLELDHQVKPMGDHKLTKENAMNQPWSRLPPAPVRSNGNYLAPKEHIPRGGGAPDIAEKLSQLSMASTTNRAPTVPSDRFADLKGTSRAHQPEPVRRPVPLGPRDTWHARNDPFRRTYEMPGERALLQRKLVS

SEQ ID NO: 29526 - protein, 172 aa, Triticum aestivum
MDQKNARRYPVGTLSNGRPAVNNSYLSTNAPARAAGVQRKLELDHQVKPMGDHKLTKENAMNQPWSRLPPAPVRSNGNYLAPKEHIPRGGGAPDIAEKLSQLSMASTTNRAPTVPSDRFADLKGTSRAHQPEPVRRPVPLGPRDTWHARNDPFRRTYEMPGERALLQRKLVS

SEQ ID NO: 29527 - DNA, 575 bp, Triticum aestivum
  misc_feature (306)..(308): n is a, c, g, or t
  misc_feature (314)..(316): n is a, c, g, or t
  misc_feature (508)..(510): n is a, c, g, or t
agagcttgcatccaggcacatataccgagtacaccaatcagcaaccttcaagtatcctagtttaatctcgccgcgagcccgcgaagatgaagatggtgcttaaggtgccgatggtctgcaagaagtgcaagtcttgcgtccttacgattgtgtccaaggtcaaaggggtcaagtcgatggcatacgacgaggagaagagcacgctgacggtggtgggggatgtggacgtggtggtggtcgtcgacgcgctgcgcaaggggaagcacccggcgacggtggtgacggtgggcgacgagaagaaggagnnngaggannngaagaagaaggaggaagaggagaagaagaagaaggaggccgaggagaagaagaaaaaggaatgcatgcagaagcactgcctcaaggcttgctcgccgccactctactgccccaaggcttgctcgccgccacgccactgcccgccgccaccccactgcccgccgcaatcctactgctacgtcgacgactcggnnncctgcaccatcatgtgagcgagagggcagatcatcgacccggcgccgccgtatatatacagccga

SEQ ID NO: 29528 - protein, 146 aa, Triticum aestivum
  misc_feature (74)..(74): Xaa can be any naturally occurring amino acid
  misc_feature (76)..(77): Xaa can be any naturally occurring amino acid
  misc_feature (141)..(142): Xaa can be any naturally occurring amino acid
MKMVLKVPMVCKKCKSCVLTIVSKVKGVKSMAYDEEKSTLTVVGDVDVVVVVDALRKGKHPATVVTVGDEKKEXEXXKKKEEEEKKKKEAEEKKKKECMQKHCLKACSPPLYCPKACSPPRHCPPPPHCPPQSYCYVDDSXXCTIM

SEQ ID NO: 29529 - protein, 144 aa, Triticum aestivum
  misc_feature (72)..(72): Xaa can be any naturally occurring amino acid
  misc_feature (74)..(75): Xaa can be any naturally occurring amino acid
  misc_feature (139)..(140): Xaa can be any naturally occurring amino acid
MVLKVPMVCKKCKSCVLTIVSKVKGVKSMAYDEEKSTLTVVGDVDVVVVVDALRKGKHPATVVTVGDEKKEXEXXKKKEEEEKKKKEAEEKKKKECMQKHCLKACSPPLYCPKACSPPRHCPPPPHCPPQSYCYVDDSXXCTIM

SEQ ID NO: 29530 - protein, 138 aa, Triticum aestivum
  misc_feature (66)..(66): Xaa can be any naturally occurring amino acid
  misc_feature (68)..(69): Xaa can be any naturally occurring amino acid
  misc_feature (133)..(134): Xaa can be any naturally occurring amino acid
MVCKKCKSCVLTIVSKVKGVKSMAYDEEKSTLTVVGDVDVVVVVDALRKGKHPATVVTVGDEKKEXEXXKKKEEEEKKKKEAEEKKKKECMQKHCLKACSPPLYCPKACSPPRHCPPPPHCPPQSYCYVDDSXXCTIM

SEQ ID NO: 29531 - DNA, 591 bp, Triticum aestivum
tatgtgcaagatttcagaagatgtaacaccaccagcactagtgttgaaggcattgagcatattatcatgccttcttcccgaagcaaagttatttccgcaaaaggacataggagatttgggattcagggatccagtgaaaagaaaattatgtgagtacaacgcgatatcatataatgaccagatgaggttgaggacagcagttgaacttttgaaggctaccaaggacatcgaatcccaattggaaaaaatttgttctccattgttgattcttcatggagcagcagaccaggtaacagaccctcatgtgagtcaatttctgtacgagaaggccaacacgaaagacaagaccctgaagctctatgaaggtgcctaccactctatcctagagggagagcctgacgaccggatttcaaccgccatcaaggacatcatttcgtggctggattcacactgttgaataccattgtgcattgtctcgttttttttttttggcaaatgcgtggtttcgctgattggcaccattctgatccacttaacattggatgaatcaaataagagatgatactcggtgtctgaggccttcactgcgtt

SEQ ID NO: 29532 - protein, 151 aa, Triticum aestivum
MCKISEDVTPPALVLKALSILSCLLPEAKLFPQKDIGDLGFRDPVKRKLCEYNAISYNDQMRLRTAVELLKATKDIESQLEKICSPLLILHGAADQVTDPHVSQFLYEKANTKDKTLKLYEGAYHSILEGEPDDRISTAIKDIISWLDSHC

SEQ ID NO: 29533 - protein, 91 aa, Triticum aestivum
MRLRTAVELLKATKDIESQLEKICSPLLILHGAADQVTDPHVSQFLYEKANTKDKTLKLYEGAYHSILEGEPDDRISTAIKDIISWLDSHC

SEQ ID NO: 29534 - DNA, 992 bp, Triticum aestivum
atcgttccctcctcctcccgttcgtttcctcagcgcctccaccacacactcagcgcccgatacccatcaccagccccgagtcgctgctttgcctccccgccatggccacctctgcttcctcccctccgtcgccggccggtcaccagcaagggcccgcaaccgcaaccgcgcccatggtcgctgttgcctcgtgcctcctcgcgcgcacccatagagcttcgccgcgccacctcgctcatgtcttgccggcttcctccgcctctgaactcgtcggccgtcgcgcctccagccgccagcacccctctgccgcaggccccgtgctccctccgctcgtctattcctcgccctcgccgcacttcgcgggtagccgcaccgcactggaccagcgcgccaccaggtgcagccatgggcaccgttttcctcaagcaacagccgccgttcggcctcgggccggtaagatcctgcaaccccacgtcgaggtcgccgttcccggccttcccctcacccgtcatcgccgcatccgacgggagctggccagaggccgccctttctcgcgtcagcctcctctgcattgagcgccgctgcctccgccccgtgccgttgacctcctatagcctcttgtttgttgtgtgcatcgctgcccacgactccggtagcaccttcgggtcctccttcgtcgaagggcactccccaacatcgtttcttcgttttggatcatgccaagtccgactacgacctgaacgactacacgatgaccccgaagaacatggattcgtcaagttctctttgacatgagtaccactaccgccgcccgaacaactacaaaccgaaatgccatgttcctctccgaacgtgtacgactaccgatgagtacctctaccgatgtcgtgtagcactactttcgtctgcactgcatcaaactcgtccgccccgaattgcacgcttcgaaggtataaacccgagacaacgccgaacaaatacatatgtgttgt

SEQ ID NO: 29535 - protein, 264 aa, Triticum aestivum
IVPSSSRSFPQRLHHTLSARYPSPAPSRCFASPPWPPLLPPLRRRPVTSKGPQPQPRPWSLLPRASSRAPIELRRATSLMSCRLPPPLNSSAVAPPAASTPLPQAPCSLRSSIPRPRRTSRVAAPHWTSAPPGAAMGTVFLKQQPPFGLGPVRSCNPTSRSPFPAFPSPVIAASDGSWPEAALSRVSLLCIERRCLRPVPLTSYSLLFVVCIAAHDSGSTFGSSFVEGHSPTSFLRFGSCQVRLRPERLHDDPEEHGFVKFSLT

SEQ ID NO: 29536 - protein, 190 aa, Triticum aestivum
RSLLLPFVSSAPPPHTQRPIPITSPESLLCLPAMATSASSPPSPAGHQQGPATATAPMVAVASCLLARTHRASPRHLAHVLPASSASELVGRRASSRQHPSAAGPVLPPLVYSSPSPHFAGSRTALDQRATRCSHGHRFPQATAAVRPRAGKILQPHVEVAVPGLPLTRHRRIRRELARGRPFSRQPPLH

SEQ ID NO: 29537 - protein, 185 aa, Triticum aestivum
MSCRLPPPLNSSAVAPPAASTPLPQAPCSLRSSIPRPRRTSRVAAPHWTSAPPGAAMGTVFLKQQPPFGLGPVRSCNPTSRSPFPAFPSPVIAASDGSWPEAALSRVSLLCIERRCLRPVPLTSYSLLFVVCIAAHDSGSTFGSSFVEGHSPTSFLRFGSCQVRLRPERLHDDPEEHGFVKFSLT

SEQ ID NO: 29538 - protein, 157 aa, Triticum aestivum
MATSASSPPSPAGHQQGPATATAPMVAVASCLLARTHRASPRHLAHVLPASSASELVGRRASSRQHPSAAGPVLPPLVYSSPSPHFAGSRTALDQRATRCSHGHRFPQATAAVRPRAGKILQPHVEVAVPGLPLTRHRRIRRELARGRPFSRQPPLH

SEQ ID NO: 29539 - DNA, 625 bp, Triticum aestivum
acacagatgcgccgctgccattccttgctcggcccaatcgccgactcccactccccactgcggccacagctccggcgagagggaatcgccggtcccggccatgcgggtgctcccgctggccctcgccgccgccatcttctccggcgtcacggccatcctcatctacctcaccgggctctcctcatatggcggcgcggggctctcggaggcggacctggcggcgctcgccgcgctgcagggagggttcagcaagtgcgtggatgctaatggtctaggactgcaagcgtttggcggagaagattactgtcgtgttgttatacagtacccgagtgacacggtttctaaatggacagatccaaaaactggagagtctgaagggttggcatttgagttcaatctctgcgaagctgtggcctcataggagcaggttcgcaacagtaccacaatactcacaaaagagtacattgatgcattaccaaatggctgggaggagtatgcatggcgcaggatcaacaaaggaatccttctgaataagtgcaagaacaggactctttgcatggagaagctttcattggttctccctgacacatcaccatatgtacctcagcaatttggtagctgtgcc

SEQ ID NO: 29540 - protein, 139 aa, Triticum aestivum
HRCAAAIPCSAQSPTPTPHCGHSSGERESPVPAMRVLPLALAAAIFSGVTAILIYLTGLSSYGGAGLSEADLAALAALQGGFSKCVDANGLGLQAFGGEDYCRVVIQYPSDTVSKWTDPKTGESEGLAFEFNLCEAVAS

SEQ ID NO: 29541 - protein, 106 aa, Triticum aestivum
MRVLPLALAAAIFSGVTAILIYLTGLSSYGGAGLSEADLAALAALQGGFSKCVDANGLGLQAFGGEDYCRVVIQYPSDTVSKWTDPKTGESEGLAFEFNLCEAVAS

SEQ ID NO: 29542 - protein, 90 aa, Triticum aestivum
TDAPLPFLARPNRRLPLPTAATAPARGNRRSRPCGCSRWPSPPPSSPASRPSSSTSPGSPHMAARGSRRRTWRRSPRCREGSASAWMLMV

SEQ ID NO: 29543 - DNA, 1686 bp, Triticum aestivum
atcgcgtcgcatatcccctccctcccctctcatcacccacacccacgcggcagccggcttcaatttttccatctgctccccgtgctcttaatgggctttccctccctccgacatggccggcgacccccgcacccgcgccgccggtgaccactccctctccccctcctcccccgccgccgtcctcgtgcccgggggcggcctccgcctggggccctccaggctcttcctccacctgctcctcctccactcgctcttataaccccgcgcccccccgccgccaggccatggccgccgtcttctaccaccacgtcgtcggcgacctcaccgtcggcaagcccgagatcgccgagctcagcgacgcggacacgcttgacgacgcggcgcgggccatcgccggcagccccgagggcgccgtgcccgtctggcgcgcgcgggccgcccccgacgacccgccctccggggcccggttcctcggcatgatctccgccgtcgacatcgccgccttcctcgccggcgccggcgccggcgaccgcgccatgcgcgccgccgtcggcgaggtcgtgcagcccaaccaggacctgctccgggaggtcgatcccggcaccaggttgattgatgcgctggagttgatgaggaatggagtgaagcgcttccttgtccgcaagaacggctcctggacaggcatcaccaagcggttttctatgctttacaatgggaaatggatgaagaactcggaatcgggatccccaagctcagctggcagcagcagcatgcagttgtccccatttatcagttgcgcggagaggttttgctgcctgtcaagggaagacatcctccggttcctgatcgggtgcctcggcgccctcgcgcccatcccactgtctccaatctgtaccctcggagctatcaacccgcactactgccacgtcgaggcgtctgcgccagccatggaggcgatccagaagatccctggggacccctgcggcgtggccgtggttgagacgacatcggacggggtccgcaagatcatcggggacatctctgcctacaagctgtggaagtgtgactacgtggcggccgcgtgggcgctggcgaacctgtcggcggggcagtttgtcatcggcgccgacgagaacgggtcgacccccatctccgccttcccgctgccttccatcagctcgtcgttgtcggaggaggccaccgagcccgggcgctctcccaggctgcttaagaagttcagcagcaggaacatcgggttcctgaacagccaggcgaaccaggtgcggagcatgtaccggggccggagctcgccgctgatgtgccggagcacgagctccctggccgccgtcatggcgcagatgctgtcccaccgggcgactcacgtgtgggtgacggacgcggaggctgaggaggatgacgtcctcgttggcgtggtcgggtacacggacatctttgccgccgtcacccggagcagcgcctgaccgtcgacgacgtcctgatggcggtggcgtgtgtttgggtggtgtactataatttggggttagtttggtggttgtccagagctgagaactttgttttgggtgtgtgggcgtgtgagactgaatgggttgtgtattgttggatgtgcattcgttgttgatggtcctataataaggtagactcgggcctatttatgcctgggagtcc

SEQ ID NO: 29544 - protein, 492 aa, Triticum aestivum
RVAYPLPPLSSPTPTRQPASIFPSAPRALNGLSLPPTWPATPAPAPPVTTPSPPPPPPPSSCPGAASAWGPPGSSSTCSSSTRSYNPAPPRRQAMAAVFYHHVVGDLTVGKPEIAELSDADTLDDAARAIAGSPEGAVPVWRARAAPDDPPSGARFLGMISAVDIAAFLAGAGAGDRAMRAAVGEVVQPNQDLLREVDPGTRLIDALELMRNGVKRFLVRKNGSWTGITKRFSMLYNGKWMKNSESGSPSSAGSSSMQLSPFISCAERFCCLSREDILRFLIGCLGALAPIPLSPICTLGAINPHYCHVEASAPAMEAIQKIPGDPCGVAVVETTSDGVRKIIGDISAYKLWKCDYVAAAWALANLSAGQFVIGADENGSTPISAFPLPSISSSLSEEATEPGRSPRLLKKFSSRNIGFLNSQANQVRSMYRGRSSPLMCRSTSSLAAVMAQMLSHRATHVWVTDAEAEEDDVLVGVVGYTDIFAAVTRSSA

SEQ ID NO: 29545 - protein, 398 aa, Triticum aestivum
MAAVFYHHVVGDLTVGKPEIAELSDADTLDDAARAIAGSPEGAVPVWRARAAPDDPPSGARFLGMISAVDIAAFLAGAGAGDRAMRAAVGEVVQPNQDLLREVDPGTRLIDALELMRNGVKRFLVRKNGSWTGITKRFSMLYNGKWMKNSESGSPSSAGSSSMQLSPFISCAERFCCLSREDILRFLIGCLGALAPIPLSPICTLGAINPHYCHVEASAPAMEAIQKIPGDPCGVAVVETTSDGVRKIIGDISAYKLWKCDYVAAAWALANLSAGQFVIGADENGSTPISAFPLPSISSSLSEEATEPGRSPRLLKKFSSRNIGFLNSQANQVRSMYRGRSSPLMCRSTSSLAAVMAQMLSHRATHVWVTDAEAEEDDVLVGVVGYTDIFAAVTRSSA

SEQ ID NO: 29546 - protein, 334 aa, Triticum aestivum
MISAVDIAAFLAGAGAGDRAMRAAVGEVVQPNQDLLREVDPGTRLIDALELMRNGVKRFLVRKNGSWTGITKRFSMLYNGKWMKNSESGSPSSAGSSSMQLSPFISCAERFCCLSREDILRFLIGCLGALAPIPLSPICTLGAINPHYCHVEASAPAMEAIQKIPGDPCGVAVVETTSDGVRKIIGDISAYKLWKCDYVAAAWALANLSAGQFVIGADENGSTPISAFPLPSISSSLSEEATEPGRSPRLLKKFSSRNIGFLNSQANQVRSMYRGRSSPLMCRSTSSLAAVMAQMLSHRATHVWVTDAEAEEDDVLVGVVGYTDIFAAVTRSSA

SEQ ID NO: 29547 - DNA, 707 bp, Triticum aestivum
atatttgctaaatgagtggttggtttatgtatttcctggtcctctattttctctttgctctctgtttgctttgatcctaatgttgctgttgattattggttatttggtataggcatagtttgaaggaagtattggacactccaggtgtgatgtcactgataaaagatacaaaagcggcacaggaggtgcaagctttgaaggagttcttcgctatgcttactaatcccgagcgtgttatggacctaagcacgttgaggtcgcacatgaacgtcttgcaatacaaactcttctgatgacagatactttgtttcggaacacggacattgctagcaggagaaagtatgtgaacctggttgagtcagtcaagaaatatggtggtacagtgcacatattttcttcgatgcatgtctctggtgaccaattggcgcagttgacaggaatagcagctatacttcgtttccctctgccagatttggaggacatcgagatgtgattagtccagccctgtctgcagctgcctaacattgtttgtaccaagctgttaacttatagctgatcaagtgtaataacaatataacagttggttctatgtaggtagcaacagaaagaaatcctgactacattttaagtatatccttgttgtaaatggttagctatgccacatctattggttattcttgacttaataacaagggccctctccattt

SEQ ID NO: 29548 - protein, 66 aa, Triticum aestivum
MTDTLFRNTDIASRRKYVNLVESVKKYGGTVHIFSSMHVSGDQLAQLTGIAAILRFPLPDLEDIEM

SEQ ID NO: 29549 - protein, 47 aa, Triticum aestivum
MSLIKDTKAAQEVQALKEFFAMLTNPERVMDLSTLRSHMNVLQYKLF

SEQ ID NO: 29550 - protein, 36 aa, Triticum aestivum
YLLNEWLVYVFPGPLFSLCSLFALILMLLLIIGYLV

SEQ ID NO: 29551 - DNA, 1044 bp, Triticum aestivum
cattgtattctcataggctccccttctctgagctagccgtaataacctactatcactagccatcaaaccgtgcagacgcataggttagtatatctaagatgtcgtcacgctctacctccgtcatcgtcgccagagcagtgagcgggcaccatttgctcaagatcgatgggtactcgcaaaccaaggtggtcacccatggtagaggcatcaaatcctacacttttaaggtcggaggccacagttggcttctccagtattaccccaatggcgagccctcgggtcctgacacttacatagatgatgtcttcattcagcttgtcagtgtaagcagggacatgccggtcaagcctgacaagggcatctcagctcaaggctcgctcagtttactggacagggctgggaagccagtgccatcatataccagcaccttcaatagaagtttcacaaccactgggatcttggtctggtacacctcaaggacgaccctagagaactcaggttatctcaaggacgattgcttcactctcaggtgcgacatcaccgtcacggagctgcgtgccgagaaaacagaggattgcgatttcgcctatctcctgtggaaggagggggcagatgtggccttccatgtgggaggtgagacaaccgccgcccatcaatgggtgctggctgcccggtctccgatcttgaaggcagcagccgaagcagagctccttggcgtgccagaaagggagaagaaagacgcccacggccaccgtaaggattgacgacatggaggcaaaagtgttcaaggctttgatccactacatatatattgatgcattgcctgatgagatagacaagggctgagactgggagaagcaaggataccatgatcacggtcatggtggccatttctatttgtcaatgctgtgttggtcaatgtaagaagtactactggtgacaatcaactatgctccatactaataatatgctgatgtacattcgtttatgtttggggattgtagttgtatttgctatacaattataatgcttatgatttctttt

SEQ ID NO: 29552 - protein, 221 aa, Triticum aestivum
MSSRSTSVIVARAVSGHHLLKIDGYSQTKVVTHGRGIKSYTFKVGGHSWLLQYYPNGEPSGPDTYIDDVFIQLVSVSRDMPVKPDKGISAQGSLSLLDRAGKPVPSYTSTFNRSFTTTGILVWYTSRTTLENSGYLKDDCFTLRCDITVTELRAEKTEDCDFAYLLWKEGADVAFHVGGETTAAHQWVLAARSPILKAAAEAELLGVPEREKKDAHGHRKD

SEQ ID NO: 29553 - protein, 142 aa, Triticum aestivum
MPVKPDKGISAQGSLSLLDRAGKPVPSYTSTFNRSFTTTGILVWYTSRTTLENSGYLKDDCFTLRCDITVTELRAEKTEDCDFAYLLWKEGADVAFHVGGETTAAHQWVLAARSPILKAAAEAELLGVPEREKKDAHGHRKD

SEQ ID NO: 29554 - DNA, 1270 bp, Triticum aestivum
ccaaggccaggcgcggcaccgccactcccgcgcctccctcccctatggcacgtcctccctcccaggcctcggctgtcttctccgtcggcggcgagggcgccgcactcttcctctccgtcgccggcgagggcgccgcgccctaaactccgaggctactgagaacttcacagtatataacttgattgggagaggaagctgcggttcagtgtacagagcaaagctaaaccaaaaacagatggttgtggcagtgaaagtttttgaccttgacatgcaaggcgcggataaaagtttcatctcagaatgtaaagcactgagaaacattcggcaccgtaatcttcttccaattctgactgcatgctcaacaattgataaccaaggccgggatttcaaagctctagtctaccagttcatgcccaacggcaacctggacacttggctgcacccggcaggagatggaaaagccccaaagcaactggacctctctcaaagaatgaaaatagctgttgatatagccgatgcattgcaatatatacaccatgactgtgagaatcctattgttcactgtgatttgaagcccagcaatatcctcctagattatgatatgacagctcgtttgggggactttggcatcgcaaggttgtacatcaaatccaaatcagcggcagctggaggttcgagttcaatgggtacaataactctgaggggcacgattggatatattgctccagagtatgcgggaggtggctacctatcgacgtctggagacgcgtacagttttgggatagtgctgctggagatgctgacaggaagaaggccgaccgaccctatgttctgcgaggggcttgacatcgtgaactttgtcaagaggaactttccggatcagatacttgatatccttgacgcttctctccgagaagaatgtcaagactgttctcaggataatctggaaggagaaaacgaagtccaccggtgcctgctgtccttgctgaaagtggcactttcttgcgcaagccaggatcctaacgaacgaatgaacatgagagaagcagctactgaattgcacgcgatcgacacattgtatgtgtcttgaagcggatgctatgtgctagagctgtatcatacatacataccagctgatgtgaagcgtgtaactagagctgtatcgtacgttcgtactatagtggccgtgtagaacttttgtactcgaaaaatttatttgttgggctgtggctttgttcctagcctttgaaatgctcatctttttgcaaag

SEQ ID NO: 29555 - protein, 362 aa, Triticum aestivum
QGQARHRHSRASLPYGTSSLPGLGCLLRRRRGRRTLPLRRRRGRRALNSEATENFTVYNLIGRGSCGSVYRAKLNQKQMVVAVKVFDLDMQGADKSFISECKALRNIRHRNLLPILTACSTIDNQGRDFKALVYQFMPNGNLDTWLHPAGDGKAPKQLDLSQRMKIAVDIADALQYIHHDCENPIVHCDLKPSNILLDYDMTARLGDFGIARLYIKSKSAAAGGSSSMGTITLRGTIGYIAPEYAGGGYLSTSGDAYSFGIVLLEMLTGRRPTDPMFCEGLDIVNFVKRNFPDQILDILDASLREECQDCSQDNLEGENEVHRCLLSLLKVALSCASQDPNERMNMREAATELHAIDTLYVS

SEQ ID NO: 29556 - protein, 284 aa, Triticum aestivum
MVVAVKVFDLDMQGADKSFISECKALRNIRHRNLLPILTACSTIDNQGRDFKALVYQFMPNGNLDTWLHPAGDGKAPKQLDLSQRMKIAVDIADALQYIHHDCENPIVHCDLKPSNILLDYDMTARLGDFGIARLYIKSKSAAAGGSSSMGTITLRGTIGYIAPEYAGGGYLSTSGDAYSFGIVLLEMLTGRRPTDPMFCEGLDIVNFVKRNFPDQILDILDASLREECQDCSQDNLEGENEVHRCLLSLLKVALSCASQDPNERMNMREAATELHAIDTLYVS

SEQ ID NO: 29557 - protein, 273 aa, Triticum aestivum
MQGADKSFISECKALRNIRHRNLLPILTACSTIDNQGRDFKALVYQFMPNGNLDTWLHPAGDGKAPKQLDLSQRMKIAVDIADALQYIHHDCENPIVHCDLKPSNILLDYDMTARLGDFGIARLYIKSKSAAAGGSSSMGTITLRGTIGYIAPEYAGGGYLSTSGDAYSFGIVLLEMLTGRRPTDPMFCEGLDIVNFVKRNFPDQILDILDASLREECQDCSQDNLEGENEVHRCLLSLLKVALSCASQDPNERMNMREAATELHAIDTLYVS

SEQ ID NO: 29558 - DNA, 1259 bp, Triticum aestivum
  misc_feature (1223)..(1223): n is a, c, g, or t
cagaattttatgaagtgtgtaaaacaatacacgtagcacgtggtgagaagttcttgaaaattgaacagcctccggcatcattcatgcaaactatggaggaatatgtgagggatgctcccgcgatgaaagataaggccatactggctatagaatacaacaaagagccagaggaggaagtcaagccaacttcaccgcctccggtttcagaacccgaagtggaacaagagccggagcccgaaccagaaccagagccagtaaaagaggaagcacctgctgctgaaccaacagacttgctgggtctgaatgaaacacaccctgctgtggccgagatagacgagaggaacgctctagcgctggcaattgttccaatagatgacgtgcccaaggccgctcctgcttttgaaaatggagtcacaggctgggaactggcccttgtcactgcacccagttcaaatgaaactgctgtcgcttcaggcaaaaaattggctggtggactggacttgctcacccttgacagcctatacgaagacgcgaaccgacgagcgagccagcccgcaagttacaacccctgggagaccaccggtgccgccccggccccgatgatgcaacaaccagcagcaatgcaggacccgttctacggctcgaacgggtacgcagcaccccatgctgtgcagatggcagccatggcccagcagcagcaggctttcatgcttcagcagcagatgatgatggccagccaccaccctcaggcacaacaataccaccaggcacaggcggccccagcgaacccattcggcgcgaacccgtttgcgcccgccggtgctcaacacccttacggtggtgctggcactgggatgatgcccctccacgctgtccagggcaatgcgtatactgggctgatctagccggtggcccacagatgaaaactttgttctgctcatgttcatttttcttggctgccattgtgacggctttgtagctcaggtaggaaggggggagtgacacggccgttgaacgggagcaaaggagtgtagctggttcgtcagattcggatcggtccgtgtaggcgcttgtgtattttgtatatggcgtttttcgtatgtgcaggtgagtctgggggatatatatacatcaggggattggattattcatggatgtttggtgcgatgatgaacaataatgtgacgattctttgtagtgtaattggaagaactgtgatgttnttgtgcaacatatattttgcctcttgttgctctgcg

SEQ ID NO: 29559 - protein, 300 aa, Triticum aestivum
EFYEVCKTIHVARGEKFLKIEQPPASFMQTMEEYVRDAPAMKDKAILAIEYNKEPEEEVKPTSPPPVSEPEVEQEPEPEPEPEPVKEEAPAAEPTDLLGLNETHPAVAEIDERNALALAIVPIDDVPKAAPAFENGVTGWELALVTAPSSNETAVASGKKLAGGLDLLTLDSLYEDANRRASQPASYNPWETTGAAPAPMMQQPAAMQDPFYGSNGYAAPHAVQMAAMAQQQQAFMLQQQMMMASHHPQAQQYHQAQAAPANPFGANPFAPAGAQHPYGGAGTGMMPLHAVQGNAYTGLI

SEQ ID NO: 29560 - protein, 273 aa, Triticum aestivum
MQTMEEYVRDAPAMKDKAILAIEYNKEPEEEVKPTSPPPVSEPEVEQEPEPEPEPEPVKEEAPAAEPTDLLGLNETHPAVAEIDERNALALAIVPIDDVPKAAPAFENGVTGWELALVTAPSSNETAVASGKKLAGGLDLLTLDSLYEDANRRASQPASYNPWETTGAAPAPMMQQPAAMQDPFYGSNGYAAPHAVQMAAMAQQQQAFMLQQQMMMASHHPQAQQYHQAQAAPANPFGANPFAPAGAQHPYGGAGTGMMPLHAVQGNAYTGLI

SEQ ID NO: 29561 - protein, 270 aa, Triticum aestivum
MEEYVRDAPAMKDKAILAIEYNKEPEEEVKPTSPPPVSEPEVEQEPEPEPEPEPVKEEAPAAEPTDLLGLNETHPAVAEIDERNALALAIVPIDDVPKAAPAFENGVTGWELALVTAPSSNETAVASGKKLAGGLDLLTLDSLYEDANRRASQPASYNPWETTGAAPAPMMQQPAAMQDPFYGSNGYAAPHAVQMAAMAQQQQAFMLQQQMMMASHHPQAQQYHQAQAAPANPFGANPFAPAGAQHPYGGAGTGMMPLHAVQGNAYTGLI

SEQ ID NO: 29562 - DNA, 1292 bp, Triticum aestivum
ctcgcgggtccggtccacaatttttttcctcgcataaatcatcctccgtcaccggcggggcgagggagacgcggtcggcgggcgagacgccagagacaaacccaacggagtttcccccccctgccgccgaccccaaaccctagccgctcctaccagccccagcctctcctaccgaccccagccagccgcgccggaattctcctgggtgttctattggcttttctcaagcctgtagcttcatcgcggcagcatgagctctgctggttctgcaagggttccaaagaggagacggactaccaagacgtcggaggctgcagaccggcaacttcaggagcgacagtttctggacctaaacttgtttccagctgttgaagtagccagcactgggggttcactctccatcaatgagcctgtctcacacaggcagccccctcctacggtggctgccctgctttacgagaccacacaggtcatggtgtcatctgctgctgcagagtcaaacattggcatgaatagtttccccatcaacgtggaagtgattgatgatgatgttgtgatttatacctcagggccgccccctcaagctaggcaacagtcgtccaggacaggacctatcactgtgataatagatgatgattctgaaactactgctggaccagcaggggaaggtcttgatgagcatgtgaacactctgctgtctctggggatgaaccctaggcacaatccctcgagagcacaacccaacaccgaccttgtaataaacatagtagacacacctgaaaccaacagcataccgcccaaggtggcgcaggctgtccctgaacctgtgaaggagatcccaaaggaaacaaagttcagctgcccagtctgcatgaatgagctggtcaatgcatcatcgaccatctgcggccacatcttctgccagaaatgcatcaaggcctccattcaggctcagaagaagtgccctacctgccggaggaagctgaccatgagcaacttccaccgggtctacctcccgacggcagataattaaacctatccgcaatacttggagctttagagccgtggcagctgtgacccttttttggcactggcattgtggtgattgtatctgagctattcttcacagggtcatcatgaacattcagttttccccccaacaatttaacaagtgctcgagacgtgattaccaatctgcatacctggtggtagtggacactgttagtagtcttccttgtgggaaagtggaaacctgtgcttggtactgtgagattaatgcttgaaaatatttg

SEQ ID NO: 29563 - protein, 260 aa, Triticum aestivum
MSSAGSARVPKRRRTTKTSEAADRQLQERQFLDLNLFPAVEVASTGGSLSINEPVSHRQPPPTVAALLYETTQVMVSSAAAESNIGMNSFPINVEVIDDDVVIYTSGPPPQARQQSSRTGPITVIIDDDSETTAGPAGEGLDEHVNTLLSLGMNPRHNPSRAQPNTDLVINIVDTPETNSIPPKVAQAVPEPVKEIPKETKFSCPVCMNELVNASSTICGHIFCQKCIKASIQAQKKCPTCRRKLTMSNFHRVYLPTADN

SEQ ID NO: 29564 - protein, 186 aa, Triticum aestivum
MVSSAAAESNIGMNSFPINVEVIDDDVVIYTSGPPPQARQQSSRTGPITVIIDDDSETTAGPAGEGLDEHVNTLLSLGMNPRHNPSRAQPNTDLVINIVDTPETNSIPPKVAQAVPEPVKEIPKETKFSCPVCMNELVNASSTICGHIFCQKCIKASIQAQKKCPTCRRKLTMSNFHRVYLPTADN

SEQ ID NO: 29565 - protein, 174 aa, Triticum aestivum
MNSFPINVEVIDDDVVIYTSGPPPQARQQSSRTGPITVIIDDDSETTAGPAGEGLDEHVNTLLSLGMNPRHNPSRAQPNTDLVINIVDTPETNSIPPKVAQAVPEPVKEIPKETKFSCPVCMNELVNASSTICGHIFCQKCIKASIQAQKKCPTCRRKLTMSNFHRVYLPTADN

SEQ ID NO: 29566 - DNA, 1014 bp, Triticum aestivum
acctcgactcaccgccggtcacgcgcgctcacccccgtccgcacgagccgcccgccgtcctccgccgtcagcttcaaccccaacagtgctcttacatctcttgtagctagctggaaaagcgagcttgcattatggacgactcttcaactaggagccatgtttctgaggggaatcggctgggctatgtaagaagtgaatccatggattccgctggccatccttcggctgctaggtcaggctcactgctaagcaggagaagtagcaggcccagttcaaggggatccattagcctctctcgcgagatgggcgactcgatcctcaactcaatgaggcattcccttcagtcagcagaccagttgctaggtgatgctgatggctcggctttggctcaggtcattgacagtggtgaccgagtgctagccttggaagatgaggatgatgaagatgcggcaaatacattggatcaacataagttcggtcctgtccgagataatcgaatccatggctacagctcacatggcacaggtctgccagcacctgagtcttctgtggagcaaaagggcgagagctcatcaggcaaggttgaagaatatatgctttctcggaggctagattacgcttcttacctgatccatttagctgcctttgggttatttggggtatttacaaggtatgggctccaaaagctgttcggcccaggctgcctggcactcacctccaaccaaagcccgttgtaccttgatcttccatcaaacatgctaggatccttcctgatggcctggtttgggatcatctttaagactgacattcggcacatatctgaacatctcattgttggaatcacaaccggatacatgggaagccttactaccttcagtgggtggaatcaagcgatggttagcatgtcttccaaagaccattgggcatatgccatagctggcatagtattaggaatgttcatcgtcaatgagtccatcagggtgggcgccgaaacaggtgagcgcctacgaagct

SEQ ID NO: 29567 - protein, 294 aa, Triticum aestivum
MDDSSTRSHVSEGNRLGYVRSESMDSAGHPSAARSGSLLSRRSSRPSSRGSISLSREMGDSILNSMRHSLQSADQLLGDADGSALAQVIDSGDRVLALEDEDDEDAANTLDQHKFGPVRDNRIHGYSSHGTGLPAPESSVEQKGESSSGKVEEYMLSRRLDYASYLIHLAAFGLFGVFTRYGLQKLFGPGCLALTSNQSPLYLDLPSNMLGSFLMAWFGIIFKTDIRHISEHLIVGITTGYMGSLTTFSGWNQAMVSMSSKDHWAYAIAGIVLGMFIVNESIRVGAETGERLRS

SEQ ID NO: 29568 - protein, 271 aa, Triticum aestivum
MDSAGHPSAARSGSLLSRRSSRPSSRGSISLSREMGDSILNSMRHSLQSADQLLGDADGSALAQVIDSGDRVLALEDEDDEDAANTLDQHKFGPVRDNRIHGYSSHGTGLPAPESSVEQKGESSSGKVEEYMLSRRLDYASYLIHLAAFGLFGVFTRYGLQKLFGPGCLALTSNQSPLYLDLPSNMLGSFLMAWFGIIFKTDIRHISEHLIVGITTGYMGSLTTFSGWNQAMVSMSSKDHWAYAIAGIVLGMFIVNESIRVGAETGERLRS

SEQ ID NO: 29569 - protein, 237 aa, Triticum aestivum
MGDSILNSMRHSLQSADQLLGDADGSALAQVIDSGDRVLALEDEDDEDAANTLDQHKFGPVRDNRIHGYSSHGTGLPAPESSVEQKGESSSGKVEEYMLSRRLDYASYLIHLAAFGLFGVFTRYGLQKLFGPGCLALTSNQSPLYLDLPSNMLGSFLMAWFGIIFKTDIRHISEHLIVGITTGYMGSLTTFSGWNQAMVSMSSKDHWAYAIAGIVLGMFIVNESIRVGAETGERLRS

SEQ ID NO: 29570 - DNA, 708 bp, Triticum aestivum
ggtaacatcactggtgtcattgtttagtaaccggaaagtcagagcagacactgcaatgacaggagagatgactcttaggggcctagtgttgccagttggtggtgttaaggataaggtgcttgctgcgcatcgatatggcatcaagagagtaatattaccagaaagaaacttgaaggacttggctgagattccagctccgatcctcgctggcattgagattctgctcgtgaagcgcattgaggaagtacttggccatgcttttgagaatggattccctttgaggctacactccagtctatagcacgggcaaataccaattggcgcctgatgtggcatttcctcggtggccatttactcgttttgaagattcgtcgctattcaccgcccagatatctacaaatgagcgttgagcgtaggcgagcaattgctccgttggagcgaaatctcatgacgccagcgttgctcgtccaactcagttaagctaatatgcggaatgtgtatatggatacttgctatccacaaaagcggcagggagatctgctctggtctttgtgattgtatttatagagggatgctcatctatctatgctcggtttgctatggtagcaaggaggtccacctgttgttgtcggtttgggtgtatatgtaacctatttcagccagggagaattgaatgttgcagtatcataaataaaaaagagatagcac

SEQ ID NO: 29571 - protein, 99 aa, Triticum aestivum
VTSLVSLFSNRKVRADTAMTGEMTLRGLVLPVGGVKDKVLAAHRYGIKRVILPERNLKDLAEIPAPILAGIEILLVKRIEEVLGHAFENGFPLRLHSSL

SEQ ID NO: 29572 - protein, 81 aa, Triticum aestivum
MTGEMTLRGLVLPVGGVKDKVLAAHRYGIKRVILPERNLKDLAEIPAPILAGIEILLVKRIEEVLGHAFENGFPLRLHSSL

SEQ ID NO: 29573 - protein, 77 aa, Triticum aestivum
MTLRGLVLPVGGVKDKVLAAHRYGIKRVILPERNLKDLAEIPAPILAGIEILLVKRIEEVLGHAFENGFPLRLHSSL

SEQ ID NO: 29574 - DNA, 1324 bp, Triticum aestivum
cccccctttcctccatttcttcccagcatgaagcatgatcttgcctggcctcctcgtggtagtctcgtagcgtagtcctggttggatcgcgcgttgttgcgcctcgatttggaggccggacgcgtgttttcttgcgattgttcctgttcttggcgcgagtttggtggtagtgtagatccttcagtgcttagatatggcgtagattgcaggagatgctcagggatggctttctatttcagacgtagttgcttgctgcaccgatgtttgaaatggatcgttgccgcgtcagtgtttagatccagttctgggccttcagagcccttggttgaagggaacatatctgcaaccgatggtctcgcctttgtcagatgccttcgcctgtagcttccatctagagtttttgttctagggttttagtctgttgactgttctcttcacatggcgccttccttttatttcgggcctgtagagctgttgtattggtacaaatcttgagtgaagcatcgtccgcgcggttgcatctcccagggcaattgaatagtcgattgcaaagttcatcgattgctcgtgttgttcatcttgggtcagttgatagatataatcagtgtttacctctgaagtaacatcgtgtgacgggggcatcttgcgtgtggctgtcatgcatttctagattattaatttggttttatgtactgaagatgcttgcggttgttctcttgcctaaatgtgttcttgtgtctgcttgttcttgaactgcagggcgtggaggttccgctggaaacaagttccggatgtcgctgggtctgccggtggcagccactgtcaactgcgctgacaacactggtgccaagaacctgtacatcatctccgtcaagggaatcaaggggcgcctcaacaggcttccttccgcctgcgttggtgacatggttatggccactgtcaagaagggaaagcctgacctcaggaagaaggtcatgccggctgtcatcgtcaggcagcgcaagccatggcgccgaaaggacggtgtcttcatgtactttgaagacaatgctggagtcattgtgaacccaaagggagagatgaaaggttctgccatcactggaccgatcgggaaggagtgcgccgacctgtggcccaggattgccagcgccgcgaatgccatcgtctgatctgatcgctggagcagctagatgatcaaagctttgatagcatgtccctcttttcttctagcttattacttgtggcacttttcctggattatgtaatgctgctggattatggtctgttagctttcttaagattttgcactgtggtttggctactg

SEQ ID NO: 29575 - protein, 125 aa, Triticum aestivum
MSLGLPVAATVNCADNTGAKNLYIISVKGIKGRLNRLPSACVGDMVMATVKKGKPDLRKKVMPAVIVRQRKPWRRKDGVFMYFEDNAGVIVNPKGEMKGSAITGPIGKECADLWPRIASAANAIV

SEQ ID NO: 29576 - protein, 81 aa, Triticum aestivum
MVMATVKKGKPDLRKKVMPAVIVRQRKPWRRKDGVFMYFEDNAGVIVNPKGEMKGSAITGPIGKECADLWPRIASAANAIV

SEQ ID NO: 29577 - protein, 79 aa, Triticum aestivum
MATVKKGKPDLRKKVMPAVIVRQRKPWRRKDGVFMYFEDNAGVIVNPKGEMKGSAITGPIGKECADLWPRIASAANAIV

SEQ ID NO: 29578 - DNA, 1554 bp, Triticum aestivum
tgtgctatggtggaatggatattggtggtggtgctatggtacttggtgcaatgcctggccctcctgacatggtatacacacattcaaacgctgtccgcagcccatattacaacattgagttgaaggaaatacatgttgctggaaagccattgcgggtagacccaaggatctttgacggcaaacatgggactgtcttggatagtgggaccacatatgcatacctcccagaacaagcttttgtagcttttaaagatgctgtgacaagcaaggtccatcccctcaagaaaatccgtggacctgacccaaattacaaggacatctgctttgcaggtgctggaaggaacgtctcccagttatcagaggtatttccaaaggttgacatggtatttggaaatggacagaagctctcactttcacctgaaaattatttattccggcactccaaagtcgaaggggcttattgcctgggtgtgttccaaaatgggaaagatccaacaactctattaggtggaatcgttgttcgtaatacccttgtaacctatgaccgccacaatgaaaagattggattttggaaaactaactgttcagagttgtgggagagactccagagtggtggggctccttcaccagcaccttcaagtgatccaggttcacaagcagatttatcgcctgctcctgctccaagtggtttgccagaatatgatgttggtctcatcgctgtttatatgtcgataaatgttacgtatccaaacctgaaacctcacctacatgagttggctgagctgttggctaaagagctggagatagattccagtcaggtccgacttatgaatgttactgggcagggaaactctactctaatcagatgggatattttcccagctggatcttctaattctatgtctaatgcaacagcaatgggtatcatttatcggctgactcaacatcatgttcagttgcctgaacatcttggcagttatcagttactcgagtggaatgtgcagcaacctgtatcgagaaggtcatggttgcaagaacatgttgtctccatactggttggagttttgctagttgttttcctgtctttatcggcctttttaggactgtatctctggagaaagaaatttagaggtcaagctgcatatagacctgtgggctcagtggggcctgaacaagaactccaaccgctataatattgaagctctttgactgggcaacaaataggtaattctttggtagagatactattatgcgggctaccatattgcggcggtacacatctgctgttggagtagcccttttcctttgtatgtaacacaaagcatctagcttacagaagaagcacatgatgacatgacttgttggttcaaaagttagagagttagttcataaactatctagcaattcagatcaagagctccctcttgaggcttactgtagaagaaggttttgttcatgtaatgtagattaaatagaatagaccagacacaaatcgcactggtggtgcaatgttgtaatatctatttgataagagccgaagaccttttttgcttc

SEQ ID NO: 29579 - protein, 396 aa, Triticum aestivum
CYGGMDIGGGAMVLGAMPGPPDMVYTHSNAVRSPYYNIELKEIHVAGKPLRVDPRIFDGKHGTVLDSGTTYAYLPEQAFVAFKDAVTSKVHPLKKIRGPDPNYKDICFAGAGRNVSQLSEVFPKVDMVFGNGQKLSLSPENYLFRHSKVEGAYCLGVFQNGKDPTTLLGGIVVRNTLVTYDRHNEKIGFWKTNCSELWERLQSGGAPSPAPSSDPGSQADLSPAPAPSGLPEYDVGLIAVYMSINVTYPNLKPHLHELAELLAKELEIDSSQVRLMNVTGQGNSTLIRWDIFPAGSSNSMSNATAMGIIYRLTQHHVQLPEHLGSYQLLEWNVQQPVSRRSWLQEHVVSILVGVLLVVFLSLSAFLGLYLWRKKFRGQAAYRPVGSVGPEQELQPL

SEQ ID NO: 29580 - protein, 392 aa, Triticum aestivum
MDIGGGAMVLGAMPGPPDMVYTHSNAVRSPYYNIELKEIHVAGKPLRVDPRIFDGKHGTVLDSGTTYAYLPEQAFVAFKDAVTSKVHPLKKIRGPDPNYKDICFAGAGRNVSQLSEVFPKVDMVFGNGQKLSLSPENYLFRHSKVEGAYCLGVFQNGKDPTTLLGGIVVRNTLVTYDRHNEKIGFWKTNCSELWERLQSGGAPSPAPSSDPGSQADLSPAPAPSGLPEYDVGLIAVYMSINVTYPNLKPHLHELAELLAKELEIDSSQVRLMNVTGQGNSTLIRWDIFPAGSSNSMSNATAMGIIYRLTQHHVQLPEHLGSYQLLEWNVQQPVSRRSWLQEHVVSILVGVLLVVFLSLSAFLGLYLWRKKFRGQAAYRPVGSVGPEQELQPL

SEQ ID NO: 29581 - protein, 385 aa, Triticum aestivum
MVLGAMPGPPDMVYTHSNAVRSPYYNIELKEIHVAGKPLRVDPRIFDGKHGTVLDSGTTYAYLPEQAFVAFKDAVTSKVHPLKKIRGPDPNYKDICFAGAGRNVSQLSEVFPKVDMVFGNGQKLSLSPENYLFRHSKVEGAYCLGVFQNGKDPTTLLGGIVVRNTLVTYDRHNEKIGFWKTNCSELWERLQSGGAPSPAPSSDPGSQADLSPAPAPSGLPEYDVGLIAVYMSINVTYPNLKPHLHELAELLAKELEIDSSQVRLMNVTGQGNSTLIRWDIFPAGSSNSMSNATAMGIIYRLTQHHVQLPEHLGSYQLLEWNVQQPVSRRSWLQEHVVSILVGVLLVVFLSLSAFLGLYLWRKKFRGQAAYRPVGSVGPEQELQPL

SEQ ID NO: 29582 - DNA, 1518 bp, Triticum aestivum
agaacatcctaatcgaaaagtaccatctgggctggggaggggaaggagcagaggggatgagcggcggcggcggcggcggagtgctgggcgccggctcgtcgtaccagagcttcgtccgcaccgcgctggaacagacccgcctccgcaccgccctcacgccccacccctcgcaggaaaagttcaggctcatacgagccaacgacgatgctgctgttttggacgctctctcattcagcacccccaagatcagactgcttcgcagcttgacggttgagaagaaaaactcggttcaggttcttgactttgctgctttctctgaacctgaatatgatcttcctatattttgcgccaacgcttttacgactcctgcacagagtatcgttgtcttggacctcaatccgctatacgatataactgaagacaaggattacaaagataaatactacaggaatttgatgcctcttatacacaagtatagtgaggtgcttggatcttatccttcaccccaaatatattaccccagtcttcttctattagctttatacatagagtgctatctttatttagagaaaatgcagcttctgccatggggtggcaagattacgagcgaatctctgagattcttctctccaatcgtgatctggactatatttgagcccactgaacgtaaccatcatgttctgtattcagctttgatggattactataaggtttggcttcagttaacggatcaagcaactgaagaaaatgacacaacgaaagttgttcgtaacagagaagcgcaacatagatatctcacatggagggctgaaaaggatcctgggtttccacttctgaagaagttgattggtgaaagccatgccaaggatttggtgactgagttcctgttcgaaggagtgcattctcttggaactaaatctttcctggactattttcgcgagtacgcatgtgacgacgggacagtaaacaagaagaggagtatgatcgggaaatctttcgaagataggccttgggatgctacgggagaattcattggtggcaaggatgcaggatgagatcttttgatgcaggatgatatcttttgcagtaggatccacatgggcattcttagggttttgctgagctcctagcgattcacggcactcttgcttctcaggtttcattttaacgttcttcgttacacgctgtccgggctaatttgcatccatgtaatttcatctgagttctctgtgtagcttagaaaacatgtgtaatatttgattgaccctgataagtttttatggcaagtttagcgacgcgagaatggcaactttagttgtcaagcaagtcaacttcttttcggatggtacgttttagttttttttcgggtttgtttttttcaatttggatagcaactttaattgtaaaaaaaatatcagggccggagtgcttcgtgctacacgtgtggcacttatcatttgggtatattaaattgagtgcattatcaataataccttgcagtgatattatacactggcc

SEQ ID NO: 29583 - protein, 350 aa, Triticum aestivum
NILIEKYHLGWGGEGAEGMSGGGGGGVLGAGSSYQSFVRTALEQTRLRTALTPHPSQEKFRLIRANDDAAVLDALSFSTPKIRLLRSLTVEKKNSVQVLDFAAFSEPEYDLPIFCANAFTTPAQSIVVLDLNPLYDITEDKDYKDKYYRNLMPLIHKYSEVLGSYPSPQIYYPSLLLLALYIECYLYLEKMQLLPWGGKITSESLRFFSPIVIWTIFEPTERNHHVLYSALMDYYKVWLQLTDQATEENDTTKVVRNREAQHRYLTWRAEKDPGFPLLKKLIGESHAKDLVTEFLFEGVHSLGTKSFLDYFREYACDDGTVNKKRSMIGKSFEDRPWDATGEFIGGKDAG

SEQ ID NO: 29584 - protein, 332 aa, Triticum aestivum
MSGGGGGGVLGAGSSYQSFVRTALEQTRLRTALTPHPSQEKFRLIRANDDAAVLDALSFSTPKIRLLRSLTVEKKNSVQVLDFAAFSEPEYDLPIFCANAFTTPAQSIVVLDLNPLYDITEDKDYKDKYYRNLMPLIHKYSEVLGSYPSPQIYYPSLLLLALYIECYLYLEKMQLLPWGGKITSESLRFFSPIVIWTIFEPTERNHHVLYSALMDYYKVWLQLTDQATEENDTTKVVRNREAQHRYLTWRAEKDPGFPLLKKLIGESHAKDLVTEFLFEGVHSLGTKSFLDYFREYACDDGTVNKKRSMIGKSFEDRPWDATGEFIGGKDAG

SEQ ID NO: 29585 - protein, 199 aa, Triticum aestivum
MPLIHKYSEVLGSYPSPQIYYPSLLLLALYIECYLYLEKMQLLPWGGKITSESLRFFSPIVIWTIFEPTERNHHVLYSALMDYYKVWLQLTDQATEENDTTKVVRNREAQHRYLTWRAEKDPGFPLLKKLIGESHAKDLVTEFLFEGVHSLGTKSFLDYFREYACDDGTVNKKRSMIGKSFEDRPWDATGEFIGGKDAG

SEQ ID NO: 29586 - DNA, 1395 bp, Triticum aestivum
gtcactctcctccctcccccgcccacagcccccacaccagaccagcgcggcagccgccatggatccaccaaccagcgctgcccaccacagccccgacgacgaggcggccgccttcttccgcgcggcgccgcccctccgcgaccgcgacgccgtcgccgccagcctcgccgccttcgtcgcccgccaccgcgcacgctccgccgccggcgccggcgcaggaggaggaggagggcccccggcggtggcgggggtggtctgcgtcacctccggcggcaccacggtgcccctggagcagcgctgcgtgcgctacatcgacaacttcagctccggccagcgcggggccgcgtccaccgagtatttcctaaaggccggttacgccgtcatcttcgtccaccgccgcgggagcaagcagccttactgcaggtttcttccggaggactcttttctcgaccttttcgagctcggcgaaggatcagagatccaagtcccagagtctcacaccacggtggtcaagacagcgatcagcagttatcgcaaggcaatcgatgaaggtctacttctgaaacttcctttcaccacaatttttgagtaccttcagttactgcagcttgtatccactgctatgaattgcttggagcgccatggaatgttttattgtgcagctgcagtgtctgacttctatgttccatgggagagtatggctaaacataaaatccagtcagcaggtggccctttgaacatgcagctcagtcaagttcctaagatgcttttcatcctcagaaaccattgggccccttctgcattttgtgtatccttcaagctcgagacggatccagacatccttatacagaaggcagaggcggctttgagaaagtatggtatgaatgtggtggtggcgaatgagctagcgaactacaaagacgtggttgtcatggtcacaagcagcgggaagacgaccgtgagcaggcggagcaaggaagatgacctggaagagcagctcattggtctcctggttaagatgcattcagatcacactaagcagtccaatccggaccaagagaaatgagctgttgtcttgatgaataaggagttgctacaagttattgtgctcattggtctcctggtttaattcacgtaccagtaagtggagtagcattctctcttgagaatcgcacgcgcgatcatctcccttatcccttatgttgtgctacaccgtctgtgatgcctgtctttatcgacgtcggcggtggtttggattggacaagtctcaccaattcaaaccccaaatctgaaatgtgtatattttgagagattcaaatttgattaatgggaatctaggctccttcgcctggactgcataatctaccataggtaggttacagcagcttcaaatgg

SEQ ID NO: 29587 - protein, 354 aa, Triticum aestivum
SLSSLPRPQPPHQTSAAAAMDPPTSAAHHSPDDEAAAFFRAAPPLRDRDAVAASLAAFVARHRARSAAGAGAGGGGGPPAVAGVVCVTSGGTTVPLEQRCVRYIDNFSSGQRGAASTEYFLKAGYAVIFVHRRGSKQPYCRFLPEDSFLDLFELGEGSEIQVPESHTTVVKTAISSYRKAIDEGLLLKLPFTTIFEYLQLLQLVSTAMNCLERHGMFYCAAAVSDFYVPWESMAKHKIQSAGGPLNMQLSQVPKMLFILRNHWAPSAFCVSFKLETDPDILIQKAEAALRKYGMNVVVANELANYKDVVVMVTSSGKTTVSRRSKEDDLEEQLIGLLVKMHSDHTKQSNPDQEK

SEQ ID NO: 29588 - protein, 335 aa, Triticum aestivum
MDPPTSAAHHSPDDEAAAFFRAAPPLRDRDAVAASLAAFVARHRARSAAGAGAGGGGGPPAVAGVVCVTSGGTTVPLEQRCVRYIDNFSSGQRGAASTEYFLKAGYAVIFVHRRGSKQPYCRFLPEDSFLDLFELGEGSEIQVPESHTTVVKTAISSYRKAIDEGLLLKLPFTTIFEYLQLLQLVSTAMNCLERHGMFYCAAAVSDFYVPWESMAKHKIQSAGGPLNMQLSQVPKMLFILRNHWAPSAFCVSFKLETDPDILIQKAEAALRKYGMNVVVANELANYKDVVVMVTSSGKTTVSRRSKEDDLEEQLIGLLVKMHSDHTKQSNPDQEK

SEQ ID NO: 29589 - protein, 182 aa, Triticum aestivum
VTLLPPPPTAPTPDQRGSRHGSTNQRCPPQPRRRGGRLLPRGAAPPRPRRRRRQPRRLRRPPPRTLRRRRRRRRRRRAPGGGGGGLRHLRRHHGAPGAALRALHRQLQLRPARGRVHRVFPKGRLRRHLRPPPREQAALLQVSSGGLFSRPFRARRRIRDPSPRVSHHGGQDSDQQLSQGNR

SEQ ID NO: 29590 - DNA, 541 bp, Triticum aestivum
aagctcactcaaacacagccacacaacactatcactcaaacaaagccgcacaagttagactatctccttgccagtactattacaagagcctcccagttaacaatgacaaagtgcctcgccgtcgcgcttctgctactggtggcgctcgcgtactgtgacggcagggagctgaaccagaaggatcaggcactagcaacgccacgcggtgccggtgccggtggtgccgtcgacgagtcgaaggtgctggggctgccagacctgccggtcgtcggaaccgttaccggtaccagcaccattaccggcccgctggtggtgcttccagggatccctgctcacccatgatcatctcgagttcatgtgcttacaagatgaagctgtccttgtggcttcagactttaggctctagctagcaccgtccggaggaaaaacgctggcgtttcgctcatgcccatgctccttaatgggcgtctgtatcaaccatcctgtcatctgtatttctttgcagttctttgttccagtaattttcgttccttgatgtgcc

SEQ ID NO: 29591 - protein, 113 aa, Triticum aestivum
KLTQTQPHNTITQTKPHKLDYLLASTITRASQLTMTKCLAVALLLLVALAYCDGRELNQKDQALATPRGAGAGGAVDESKVLGLPDLPVVGTVTGTSTITGPLVVLPGIPAHP

SEQ ID NO: 29592 - protein, 79 aa, Triticum aestivum
MTKCLAVALLLLVALAYCDGRELNQKDQALATPRGAGAGGAVDESKVLGLPDLPVVGTVTGTSTITGPLVVLPGIPAHP

SEQ ID NO: 29593 - DNA, 956 bp, Triticum aestivum
aagggcatttgtgctataccacctgaaaaactttttcttggtcaagacggagaaggacagagaagaggcaatggatccgggcagcatctgtttttactggtctgagcctcgaatacagctatatttcttgcttggtcttgtgtatgctgcagtgacaccgctcttgctaccttttatactggtattctttgcgctgggatacgttgtctaccgccaccagatcataaatgtctaccatcaacggtacgagagtggggcgcagttctggcccaacgtgcatctacgcataatcgtagccttgatcgcatcgcagctgcttctccttgggctcttgagcacaaaaggtttggaggaggcgacgccagttctcctcgttcttccaatattaaccttttggttccacaagtactgcacgcaccggtacaagcccgcgtttgtgaggaacccgctgcaggaggcgatgaggaaggacacgctggagcacgcgagggagcccaacttcgacctcaagtcgtacctggcggactcgtacctgcacccagtgttcaagagcgacgacgtcgacaagttctacgtcgccgaggaccctggcgcggaggaggtgattgtagcgaccaagcggcagtcgaggaggaccacgcccgtgcagagcaagtacgacggctccgacaggctctccgtgccggactccatacccgaaaggtagcacttgctcttgccggcaagcttgctagccgccatgggaggagtgcatattggttctttaggctgttagtgtgtacagagagagacagcgagggggggaatggaattctgctcgatgatggatggatgtcacacggctggggatgttggctgcacttgcttgcagacttgcaatgcacacggcacaccagtacacctgtttttccactggtatttgaaccgaatacgatccagagatgcacattgcagtg

SEQ ID NO: 29594 - protein, 234 aa, Triticum aestivum
RAFVLYHLKNFFLVKTEKDREEAMDPGSICFYWSEPRIQLYFLLGLVYAAVTPLLLPFILVFFALGYVVYRHQIINVYHQRYESGAQFWPNVHLRIIVALIASQLLLLGLLSTKGLEEATPVLLVLPILTFWFHKYCTHRYKPAFVRNPLQEAMRKDTLEHAREPNFDLKSYLADSYLHPVFKSDDVDKFYVAEDPGAEEVIVATKRQSRRTTPVQSKYDGSDRLSVPDSIPER

SEQ ID NO: 29595 - protein, 211 aa, Triticum aestivum
MDPGSICFYWSEPRIQLYFLLGLVYAAVTPLLLPFILVFFALGYVVYRHQIINVYHQRYESGAQFWPNVHLRIIVALIASQLLLLGLLSTKGLEEATPVLLVLPILTFWFHKYCTHRYKPAFVRNPLQEAMRKDTLEHAREPNFDLKSYLADSYLHPVFKSDDVDKFYVAEDPGAEEVIVATKRQSRRTTPVQSKYDGSDRLSVPDSIPER

SEQ ID NO: 29596 - DNA, 825 bp, Triticum aestivum
cccggtatagttccaactctgtggctgccattgccttcagtgttccttggccctaacatcgctggccttctatccctagtgggactcgactgcatctttaacatgggagcaatgctgttcttccttatggccgacgcgtgcgggcgtccagagaacaattcgttcgacctgacaaggcagatcccaacttcttacagaatgtggaatctaatcgccagcgtactaggcttcgttgctcctctggccctgcttttcgcgtctcatcagggagctctgcagccgcatctaccattcattccgttcttggtgctgcttgggccatacctgttactactttcagtgcagatgctgaccgagacgcttacatggcactggaaatcgcctgtctggttggtggcccccgtcgtttacgagggctatcgggtgctgcagctgatgaggggcctccagctggccggcgagatcgctgcgcccgggtggatggtgcagagccttcgtggcttggtgtcctggtgggtgctggtccttgggattcagttgatgcgcgttgcctggttcgctgggctcagtttcgcaagcaatccgagctacggagtgagcgatgatgtgaacagataggtttcttcgtgctgctgtgcttctgctgctcactgcacgatagaatgggtgccatgttagttctggtgcatctgcatctgtcagatgcagtgcacgtagaataaaaagtgttttgaccgatagaaacttcgaatcgtgcatctgctgtggtatacagataaaatggaaattgtacatcaccgtgatgctgaacagcggtgaataaga

SEQ ID NO: 29597 - protein, 205 aa, Triticum aestivum
PGIVPTLWLPLPSVFLGPNIAGLLSLVGLDCIFNMGAMLFFLMADACGRPENNSFDLTRQIPTSYRMWNLIASVLGFVAPLALLFASHQGALQPHLPFIPFLVLLGPYLLLLSVQMLTETLTWHWKSPVWLVAPVVYEGYRVLQLMRGLQLAGEIAAPGWMVQSLRGLVSWWVLVLGIQLMRVAWFAGLSFASNPSYGVSDDVNR

SEQ ID NO: 29598 - protein, 171 aa, Triticum aestivum
MGAMLFFLMADACGRPENNSFDLTRQIPTSYRMWNLIASVLGFVAPLALLFASHQGALQPHLPFIPFLVLLGPYLLLLSVQMLTETLTWHWKSPVWLVAPVVYEGYRVLQLMRGLQLAGEIAAPGWMVQSLRGLVSWWVLVLGIQLMRVAWFAGLSFASNPSYGVSDDVNR

SEQ ID NO: 29599 - protein, 168 aa, Triticum aestivum
MLFFLMADACGRPENNSFDLTRQIPTSYRMWNLIASVLGFVAPLALLFASHQGALQPHLPFIPFLVLLGPYLLLLSVQMLTETLTWHWKSPVWLVAPVVYEGYRVLQLMRGLQLAGEIAAPGWMVQSLRGLVSWWVLVLGIQLMRVAWFAGLSFASNPSYGVSDDVNR

SEQ ID NO: 29600 - DNA, 1393 bp, Triticum aestivum
accacacactgccctccctccccctccctccccccaccccactcctccccgccgccgccgccgccgccccgctccgatccgccccgcgccgcgcggatcgccgcgccatggaccagtacgagaaggtggagaagatcggggagggcacgtacggggtggtgtacaaggccaaggaccgctacaccaacgagacgatcgcgctcaagaagatccggctggagcaggaggacgagggcgtcccctccaccgccatccgcgagatctccctcctcaaggagatgcagcaccggaacatcgtcaggctgcaggacgtggtgcacaacgagaagtgcatatacctcgtcttcgagtacctcgacctcgacctcaagaagcacatggactcctccgcggacttcaagaaccaccacatagtcaagtccttcctctaccagatcctgcacggcatcgcctactgccactcgcaccgtgtgcttcacagggatctcaagccccagaacctgctgatagatcgccgtaccaattcattgaagcttgctgacttcggattggcgagggcgttcggcattcctgtccggacatttactcacgaggtggtgacattatggtatagagcaccagaaattcttctgggtgcgaggcagtattctacccctgttgatgtgtggtcggttggttgcattttcgccgaaatggtgaatcagaaacctctatttcctggtgattctgagattgatgaactcttcaagattttcagaattatgggcactcctaatgaagaaacctggccaggtgtttcttcgttacctgactacaaatcagctttccccaagtggccatccgtggatcttgcaactgtggttccaacactcgaacctttgggacttgatcttctctctaaaatgctctgcttagatccaaccagaagaatcaacgcccgaaccgccctcgagcacgagtacttcaaggatctggacgtatcctcgtagatcacttgccctgctcctctgtaaattaagatcgcgtcgactgatcgatagcttcctggatcatgtactgtgtgctcctttctctcccattctttctgactctggctgtgtagagagaaatgagaacggaagcgcctccggattcacccttccttgtagtccaagccaattgaaaaatgatcctgatgctctgggagctctgcattgcgatttcgcccgtatttatatggacatcgacgccggcaccagacttgttcatgtacgatggattttggagtagtggcagatagtcaaggggctgcagtgtttcatgaactaccaactgatgtgacaatgtttgggagtgtactactacttgtacttggtaaacatcattatcatcatgaatggaatcagttgtggac

SEQ ID NO: 29601 - protein, 328 aa, Triticum aestivum
HTLPSLPLPPPTPLLPAAAAAAPLRSAPRRADRRAMDQYEKVEKIGEGTYGVVYKAKDRYTNETIALKKIRLEQEDEGVPSTAIREISLLKEMQHRNIVRLQDVVHNEKCIYLVFEYLDLDLKKHMDSSADFKNHHIVKSFLYQILHGIAYCHSHRVLHRDLKPQNLLIDRRTNSLKLADFGLARAFGIPVRTFTHEVVTLWYRAPEILLGARQYSTPVDVWSVGCIFAEMVNQKPLFPGDSEIDELFKIFRIMGTPNEETWPGVSSLPDYKSAFPKWPSVDLATVVPTLEPLGLDLLSKMLCLDPTRRINARTALEHEYFKDLDVSS

SEQ ID NO: 29602 - protein, 293 aa, Triticum aestivum
MDQYEKVEKIGEGTYGVVYKAKDRYTNETIALKKIRLEQEDEGVPSTAIREISLLKEMQHRNIVRLQDVVHNEKCIYLVFEYLDLDLKKHMDSSADFKNHHIVKSFLYQILHGIAYCHSHRVLHRDLKPQNLLIDRRTNSLKLADFGLARAFGIPVRTFTHEVVTLWYRAPEILLGARQYSTPVDVWSVGCIFAEMVNQKPLFPGDSEIDELFKIFRIMGTPNEETWPGVSSLPDYKSAFPKWPSVDLATVVPTLEPLGLDLLSKMLCLDPTRRINARTALEHEYFKDLDVSS

SEQ ID NO: 29603 - protein, 236 aa, Triticum aestivum
MQHRNIVRLQDVVHNEKCIYLVFEYLDLDLKKHMDSSADFKNHHIVKSFLYQILHGIAYCHSHRVLHRDLKPQNLLIDRRTNSLKLADFGLARAFGIPVRTFTHEVVTLWYRAPEILLGARQYSTPVDVWSVGCIFAEMVNQKPLFPGDSEIDELFKIFRIMGTPNEETWPGVSSLPDYKSAFPKWPSVDLATVVPTLEPLGLDLLSKMLCLDPTRRINARTALEHEYFKDLDVSS

SEQ ID NO: 29604 - DNA, 1464 bp, Triticum aestivum
tccgagagaaagaaacagagggcacagcggcctgcagcacacttgtttgtaaactctgtccagtccactagaatacagattgagatctccatcgccagcggcggcaaagcaggcagctttcctctcctcctctcctccacgaaggaagattccccgccccaagatggccggcgacctgcgccaccgtcgccccgcgggggctgctgacgccggcggggaggatgaggggggcggaggagcggaggcggcggccaaggcgggcccgccgtccggcggcgaggaggcggggcgggggcggaaggaggcgctggggtggctggagtggagccgcgggtggatgggcgtcgtgggggagttcttcttccagcggatcgccgccagccacctcgccaacccgctcgagctgcccccgctcgacggcgtctccataatcgtcaccggcgccaccagcggcatcggcctcgagatcgcaagacaactcgcacaagcaggggcccatcttgtgatggcagttaggagacccaaggtggcgcgtgagctgatacaaaaatggcagaatgaacaaacagaagtttccatgccacttaacattgaggtaatggagcttgacctgatctcccttgactcggttgcaagatttgctgatacttggaatgctcgtatggcacccctacacgtattgatcaacaatgctggcattttcaccataggagatgcacactataggtttcgtcgatgctgaagatatgaaccttacatctggaaagcacaagtacagaagttggttgggatactcaaatagcaagttagcacagaggctggtgtccatactgtctgtgcctctcctgggattgtccacacaaatgttgcacgggacctccctaagattcttgtagctgggtatcgtctcattccatacttcatatttgatcctcaagaaggttcaagaagtacattgtttgcagcatctgatccccaagttccggaatactgcgagacgttgaagtctgaagactggcctgtttgtgcttgcatcaactacgactgtaatccgatgaatgcctctgaagaagcacacaacctcgaaacatcgcagcttgtttgggagaagaccctcgagatgatcggcctcccatcagatgccctggagaagctcatcgaaggggaacccgttcagtgccggtatggtcaacagaaggctgaataggaaggagaataggcaggctatctcaaaacacatgatcatgatcagccattcaggctgatccaatttgctgttaatttgctagtttggaggtggtacttacatagtcagggtacctttgtattttagcacatttggttaagttcttaccaaaaaagtggaggacaacaaacttggaagtgtgcttgttcagagtaatagaagtaccttctatggcagaagagctgtagagttttgagttaaaaaacactttttttgtc

SEQ ID NO: 29605 - protein, 192 aa, Triticum aestivum
MAGDLRHRRPAGAADAGGEDEGGGGAEAAAKAGPPSGGEEAGRGRKEALGWLEWSRGWMGVVGEFFFQRIAASHLANPLELPPLDGVSIIVTGATSGIGLEIARQLAQAGAHLVMAVRRPKVARELIQKWQNEQTEVSMPLNIEVMELDLISLDSVARFADTWNARMAPLHVLINNAGIFTIGDAHYRFRRC

SEQ ID NO: 29606 - protein, 134 aa, Triticum aestivum
MGVVGEFFFQRIAASHLANPLELPPLDGVSIIVTGATSGIGLEIARQLAQAGAHLVMAVRRPKVARELIQKWQNEQTEVSMPLNIEVMELDLISLDSVARFADTWNARMAPLHVLINNAGIFTIGDAHYRFRRC

SEQ ID NO: 29607 - DNA, 1511 bp, Triticum aestivum
tctcccacgaccaccgtgtcccccacgaacccccgcttcacgtcgcacactccccatccccgcctcgtcgcctcctacccccgcaccaccgccccgcctccttccccagcgccgcctcctaccctcgcgccgccatgacgcctccttgccccgcgccatctccactgggatccactccagcattctcctacgagcccgccaccagatccatccatgggaaggaggggggtgaccacgctggatcaggccggctctaccgccaccgactgtcaccagaggtgcatcgggcacccatccgcccccaagatccgccgaagatgccctggatccgttgacctcccccatttcccccacctagcctattctgagagcatgagtgggagagggatggcgctcggggccgcctccttggtcctcctcgtcgtcctctcccatggtggtggcatggcgtggctctctagtggccagctccattaatatttctttcttctgccactcccctatccctgtcatggcctgcatcggggtctctgccatcgtcgtatctcggcatccccgaccctgcaggacggataacagctttaatgaactgtcccctgcatgaagtgcagtctgttcacttgcggagaccagaggtgattcattgatacgcatccctcccccagtttcatttctatgcttgatccattcgtgcgtgcgtgtagcttaggtgtttgctgaattgatgtttccttgccggttcttgttcattgaccgctgttaattaaatacatgcttgcgacgactaacctgtgtctagtctttttagtggatcgcatccatatgcccaggtccaatgtgccctgctatagccacatttctaaatatatttgtcgacaaagttgctattgtttattttattttttctaatgttttttagaaaaactgataagtgaattgggtgcagtgctgttcagaagcttccgttgagtatattttccagtgtgttgatgcagttcattgagggtgagccctcacggtctccggcatgtgtcatgcagtgcggtgcacgcgttcgtgcagtccggtggaagtgccgatgtaagaagtgcggtgagctccttgccgttgtcgcgggctcctcaacgacactggagtggatggattacgggtccaggttggcaatggctctggttctccagggcgagggggccctctttgcagcccattgaagtttattttacagctcgctgaaagtttgttttgtagctcgcttgctgttatagtgcatgggcaacgcctccgtgcagttcaagcaatcgcgtgcgtgcaatgcggcgagtgtgtgcggttcggcgacgcaaagtatttgcattctcgctatgttaatacgtggggttcagtgcattttataagggcgactgctacaaatcatccggcagatttcctagggaaatcagtcaggtcaagcaccgttataggtgttgttgtttgtgggttttttgtgtgtctatcgaatgtatcaagttggc

SEQ ID NO: 29608 - protein, 110 aa, Triticum aestivum
SHDHRVPHEPPLHVAHSPSPPRRLLPPHHRPASFPSAASYPRAAMTPPCPAPSPLGSTPAFSYEPATRSIHGKEGGDHAGSGRLYRHRLSPEVHRAPIRPQDPPKMPWIR

SEQ ID NO: 29609 - protein, 87 aa, Triticum aestivum
MGRRGVTTLDQAGSTATDCHQRCIGHPSAPKIRRRCPGSVDLPHFPHLAYSESMSGRGMALGAASLVLLVVLSHGGGMAWLSSGQLH

SEQ ID NO: 29610 - protein, 76 aa, Triticum aestivum
LPRPPCPPRTPASRRTLPIPASSPPTPAPPPRLLPQRRLLPSRRHDASLPRAISTGIHSSILLRARHQIHPWEGGG

SEQ ID NO: 29611 - DNA, 612 bp, Triticum aestivum
attgctttctgtaatctcaaaatcgattaaccgtatccgtctccacctttaagctttccaatggcggaaccctaagctaattccacgcctcccacctcgcgcagcgcgcatggaccagccggcgtcggacgccggcggctttctcgaggtccgcctcttctacgtgcgcctatcgccccgcggctccggagctgccgccccgccacggctctcgctggccatccaccacgccggggccgaggcctccccctcctcgctccctctccgcctcgaccgccgcgacccagtctctggcgaggccacctacgtctccaccgcggccgcgcgcctccccccacccgacgcctccttcgaggttgcagaccaccgcgacgccgccctcctccgaggcacccttcgacggtgccctgacgccaaggccgattcccctgcctgggcgatcgactgcgtccccgccgatgcagcggtggcctcagcctcggcctttgaggtctatgttgccgggtactgtgcaggcgaacccgccgttctcacgcgagccctgcggctggccaccccggaagaggctgctggcgggttggttcgccggcgatgtttaaacacaataaagtg

SEQ ID NO: 29612 - protein, 167 aa, Triticum aestivum
MDQPASDAGGFLEVRLFYVRLSPRGSGAAAPPRLSLAIHHAGAEASPSSLPLRLDRRDPVSGEATYVSTAAARLPPPDASFEVADHRDAALLRGTLRRCPDAKADSPAWAIDCVPADAAVASASAFEVYVAGYCAGEPAVLTRALRLATPEEAAGGLVRRRCLNTIK

SEQ ID NO: 29613 - DNA, 536 bp, Triticum aestivum
ccttcgcagggttttgagcccacggcgtgtcgaagagctgaggtctattttcccaaacgagaaatttctgctcacccaaaaaagcgacaaggcgtacatggttcttgagcagagcgcaaccggggaggatgcgctgagggggtggctggtcgctgccttcgcttcggagatggagagatcaggcgctggaccacgtgacacggtcctgaacgacgcctatcagaagatggagagcgtgttccccgtgttcgtttcggaagtcaagagcaggggctggtacacaggccagttcttggatggaaatcacagtcggatcgcgtacgcgaaatctgaatgaccgtgctggaggaagagcactatcgaccacgacgcatgcggtgcatcccgcctgcgatttttttcagagttgcagagtttgatctgtttggtgctttgttatgaatctgtttatcatcgcaactaccgcttgtacgccaccgccgctcttcctgtacggaatctgttttctatgttatgaatctattttctatgttatg

SEQ ID NO: 29614 - protein, 111 aa, Triticum aestivum
LRRVLSPRRVEELRSIFPNEKFLLTQKSDKAYMVLEQSATGEDALRGWLVAAFASEMERSGAGPRDTVLNDAYQKMESVFPVFVSEVKSRGWYTGQFLDGNHSRIAYAKSE

SEQ ID NO: 29615 - protein, 79 aa, Triticum aestivum
MVLEQSATGEDALRGWLVAAFASEMERSGAGPRDTVLNDAYQKMESVFPVFVSEVKSRGWYTGQFLDGNHSRIAYAKSE

SEQ ID NO: 29616 - protein, 55 aa, Triticum aestivum
MERSGAGPRDTVLNDAYQKMESVFPVFVSEVKSRGWYTGQFLDGNHSRIAYAKSE

SEQ ID NO: 29617 - DNA, 1434 bp, Triticum aestivum
cccttctgacctacccaagctccagtccaccgccgctgtgccctagaactgccgccgcgcccgccctcgtcgctggcgccctccctgtctcgtagcgtccctgctctcttccccccacgcgcaatcttgaacttcggttttgagatccgcccctgctgtcggttgcaggtttgcagagggctcgtcgacatgtcttgggcgccaatcgagaatgaccctggtgtttttacggagctgttgcaacagttgcaattgaagggtctccaagttgatgaactctactcacttgatcttgatgccctcaatgatcttcagccaatttatgggcttatagttctgtacaaatggcgacctccagaaaaagatgagcgccctgttatcaaggatgcagtcccaaatctgttctttgctaatcagataattaacagtgcatgtgcaacccaagctattgtttctgttctgttgaactcttctggcatcacccttagcgaggacctaaaaaagctcaaggagtttgcaaaggacatgccgccagagctcaaaggattggctatagtgaattgtgaaagcattcgtatgaccagtaactcatttgcaaagtcagatgactactctgaggaacagaaatccaaggatgatgatgtctaccatttcattagctatgttcctgttgacggcgtcctgtatgagcttgatggactaaaggaaggaccgattagcctgggaaaatgcccaggtggtattggggagatggggtggctgaagatggtgcagcctgtcatccaggaacgcgttgataagttctctcagaatgagataaggttcagtgtcatggctatcacaaagaaccggaaggaaattttcatcatggagctcaaggaacttcagaggaagagggagaacctcttatcacaaatgggtgatccttctgccaatcggcaaaggccatccattgagcggtcactcgcagaggttgctgctcagattgaggctgtgaccgagaagatcataatggaggaagagaaggcaaagaagtggaagacagagaacatcaggaggaagcacaactacgtgcctttcttgttcaatttcctcaagatcctcgaggagaagcagcaactgaagcccctgatagagaaggcgaaacagaattctcacagccgtaaccctaagtgaaacctgcgttgtaaattttttatcgtcttggttgttttggttttgtgtagagatggctgactgactttgtttcctagctgaatgggccttgtagttctagtcctagacaggccatatatcgataccgtcctggtttattcaggcagatcttaaaccattcatgtaggggggacactctgactccttatcagaattatatgtgcatcagagggttttttccctgtctaattcttcccaagctttaactgaaagtttgac

SEQ ID NO: 29618 - protein, 328 aa, Triticum aestivum
MSWAPIENDPGVFTELLQQLQLKGLQVDELYSLDLDALNDLQPIYGLIVLYKWRPPEKDERPVIKDAVPNLFFANQIINSACATQAIVSVLLNSSGITLSEDLKKLKEFAKDMPPELKGLAIVNCESIRMTSNSFAKSDDYSEEQKSKDDDVYHFISYVPVDGVLYELDGLKEGPISLGKCPGGIGEMGWLKMVQPVIQERVDKFSQNEIRFSVMAITKNRKEIFIMELKELQRKRENLLSQMGDPSANRQRPSIERSLAEVAAQIEAVTEKIIMEEEKAKKWKTENIRRKHNYVPFLFNFLKILEEKQQLKPLIEKAKQNSHSRNPK

SEQ ID NO: 29619 - protein, 216 aa, Triticum aestivum
MPPELKGLAIVNCESIRMTSNSFAKSDDYSEEQKSKDDDVYHFISYVPVDGVLYELDGLKEGPISLGKCPGGIGEMGWLKMVQPVIQERVDKFSQNEIRFSVMAITKNRKEIFIMELKELQRKRENLLSQMGDPSANRQRPSIERSLAEVAAQIEAVTEKIIMEEEKAKKWKTENIRRKHNYVPFLFNFLKILEEKQQLKPLIEKAKQNSHSRNPK

SEQ ID NO: 29620 - protein, 199 aa, Triticum aestivum
MTSNSFAKSDDYSEEQKSKDDDVYHFISYVPVDGVLYELDGLKEGPISLGKCPGGIGEMGWLKMVQPVIQERVDKFSQNEIRFSVMAITKNRKEIFIMELKELQRKRENLLSQMGDPSANRQRPSIERSLAEVAAQIEAVTEKIIMEEEKAKKWKTENIRRKHNYVPFLFNFLKILEEKQQLKPLIEKAKQNSHSRNPK

SEQ ID NO: 29621 - DNA, 622 bp, Triticum aestivum
atctgaattattcacaaactagaagtattattattcttccatttccattaaaaagaaaatatcataaatgggtattttcacattcgaggacgaaatcacctcccctgtggctcctgctactctttacaaagctctagttacagatgccgacaacatcatcccaaaggctcttgattccttcaagagtgttgaaaacgttgagggaaatggtggccctggaacaatcaagaagataactttcgttgaggatggagaaaccaagtttgtactgcacaagatagaagcagttgatgaggcaaacttgggatatagctacagcgtagtgggtggtgctgcgttgccagacacagcggagaagatcacattccactccaaattggctgctggtcccaatggaggctctgctggcaagctcactgtcgaataccaaaccaaaggagatgctcagcccaaccaagaccaactcaaaactggaaaagccaaggctgatgctctcttcaaggccattgaggcttaccttttggccaatcccgattacaactaatccaattcgatcaacttcatcattatcatcactatctctcttgctttttctgagacttcatatatctgtatctcactc

SEQ ID NO: 29622 - protein, 158 aa, Triticum aestivum
MGIFTFEDEITSPVAPATLYKALVTDADNIIPKALDSFKSVENVEGNGGPGTIKKITFVEDGETKFVLHKIEAVDEANLGYSYSVVGGAALPDTAEKITFHSKLAAGPNGGSAGKLTVEYQTKGDAQPNQDQLKTGKAKADALFKAIEAYLLANPDYN

SEQ ID NO: 29623 - DNA, 1224 bp, Triticum aestivum
tatttaagatctatcagtcgatgcaagaaatggggagcacaaggtggcaaaagtaatgtgttctttgcaaaatctctggatgatagatttattataaagcaggtcacaaaaacagagcttgaatcattccttcagttcggcccagattattttaagtatttgtcagagtccataagcactggaagccctacatgccttgcaaagattctgggaatctatcaggttacaattaagcatctgaaaggtggcaaggaatcaaaaatggatttgctcgtgatggaaaatctcttatttggacggaatattacgaggctttatgatctcaagggatcttcaaggtcaaggtataatgcagactccagcaggaacaaggtcctgcttgaccagaacttaattgaggcaatgccaaagtcaccaatttttgttgggaacaaggcgaagcgccttcttgaaagagctgtttggaatgacacttcttttctagcaggaattgatgtaatggattattccttgcttgtgggtgttgatgaggagaaacatgagcttgtcctgggaataattgatttcatgaggcagtatacatgggacaagcaccttgaaacatgggtcaaatcttctggcattctaggtgggcctaagaatgccgctccaactgttgtctcaccgatgcagtacaagaagcggtttaggaaagcaatgtctgcttattttattgtgattcctgagcaatggatgcctgcaataatcaatccagaccagtccttgtcaaatatttgtgaagacgattctcaaaatgcttcaccggagtagcacggcgctcggcgtgttattgatggatggtggttgccggatttggtcctactgcagtcatgagaaatgattaatttggtactcggccggcattgaaatgatcttcaggctgggcactgtattctcctgtggtcatttgcacagatcagattgaaactcgccggtttccatctaatataaaaaaaaccatcacatgtgtatattcttgcgactgcaattgtgattagtttttcctgtgttgcctatatggtacatatatcaagtgtaagtgccttctcgtgtcttgtaggtggttttcattttggctagatgtgaacatcaggaatttgtgtaagtggttgttgtgtgtctgttgatttttagaggggctatccccgtttgtggtgtatataataacaaaataaaagttgagtc

SEQ ID NO: 29624 - protein, 269 aa, Triticum aestivum
YLRSISRCKKWGAQGGKSNVFFAKSLDDRFIIKQVTKTELESFLQFGPDYFKYLSESISTGSPTCLAKILGIYQVTIKHLKGGKESKMDLLVMENLLFGRNITRLYDLKGSSRSRYNADSSRNKVLLDQNLIEAMPKSPIFVGNKAKRLLERAVWNDTSFLAGIDVMDYSLLVGVDEEKHELVLGIIDFMRQYTWDKHLETWVKSSGILGGPKNAAPTVVSPMQYKKRFRKAMSAYFIVIPEQWMPAIINPDQSLSNICEDDSQNASPE

SEQ ID NO: 29625 - protein, 182 aa, Triticum aestivum
MDLLVMENLLFGRNITRLYDLKGSSRSRYNADSSRNKVLLDQNLIEAMPKSPIFVGNKAKRLLERAVWNDTSFLAGIDVMDYSLLVGVDEEKHELVLGIIDFMRQYTWDKHLETWVKSSGILGGPKNAAPTVVSPMQYKKRFRKAMSAYFIVIPEQWMPAIINPDQSLSNICEDDSQNASPE

SEQ ID NO: 29626 - protein, 177 aa, Triticum aestivum
MENLLFGRNITRLYDLKGSSRSRYNADSSRNKVLLDQNLIEAMPKSPIFVGNKAKRLLERAVWNDTSFLAGIDVMDYSLLVGVDEEKHELVLGIIDFMRQYTWDKHLETWVKSSGILGGPKNAAPTVVSPMQYKKRFRKAMSAYFIVIPEQWMPAIINPDQSLSNICEDDSQNASPE

SEQ ID NO: 29627 - DNA, 981 bp, Triticum aestivum
aacgacctaatggcgaaaaaaggcaaggccgccgccgcagcgtccgactcgggggcgtcgagcccccagggctccgtcgagggcggcggggagaaggagggcagcttcctgctgggccagccgacctgggaggacgccggcggcgggcggtggcggtgcgcggagacggggcacgagctgccggagcgggagaaggacgcctacgcgcggtcccgcgcctgccgcctcgcgctcatcgaccacggcgtcgcgcacaagaagccgccgctcaacgccttcaagccccaccctgagcacaagtccaagctcatatgcaacattaccggggacaccataaacaagtcggaggagcacatctggaagcatgtaaatgggaagaggttcctgaataaactagaaaagctagaggaaaagatggcatcaggtgagacaggcaaagtagaaggtgaacagtcaaatgaagtcgcaaagaaatccaagtctaccaagaagaaggacaagaagaaggagaagaaggagaagaagaaagctgctgttgccaacccttctttgccacgagaacctgaaccagaaattgatgattcagatgattcggaattttgggtgcctcctgttggaagtcgttgggatgatgatgacgggaaagaccgatgggagtcctctccggggaaggatgatatagcagaggatgaaggtgcatccgatgacgaggacgacgatgaaatggctgacaaggatgatgaagtgtcggaggaactggcttcaagcaggacaaagcgattgtcagtggaagctgttggaccaagtagtttcgctacaaggaagaaaaagccccgaaaggacgagtagacgattatttctgatttattctgttagctatgcatgaacttgtttcaccttgcttcatttggagccgcaaacttcactttctttgttctccccgtggaggctttgggttggctaatcaatggccgattttgt

SEQ ID NO: 29628 - protein, 282 aa, Triticum aestivum
NDLMAKKGKAAAAASDSGASSPQGSVEGGGEKEGSFLLGQPTWEDAGGGRWRCAETGHELPEREKDAYARSRACRLALIDHGVAHKKPPLNAFKPHPEHKSKLICNITGDTINKSEEHIWKHVNGKRFLNKLEKLEEKMASGETGKVEGEQSNEVAKKSKSTKKKDKKKEKKEKKKAAVANPSLPREPEPEIDDSDDSEFWVPPVGSRWDDDDGKDRWESSPGKDDIAEDEGASDDEDDDEMADKDDEVSEELASSRTKRLSVEAVGPSSFATRKKKPRKDE

SEQ ID NO: 29629 - protein, 279 aa, Triticum aestivum
MAKKGKAAAAASDSGASSPQGSVEGGGEKEGSFLLGQPTWEDAGGGRWRCAETGHELPEREKDAYARSRACRLALIDHGVAHKKPPLNAFKPHPEHKSKLICNITGDTINKSEEHIWKHVNGKRFLNKLEKLEEKMASGETGKVEGEQSNEVAKKSKSTKKKDKKKEKKEKKKAAVANPSLPREPEPEIDDSDDSEFWVPPVGSRWDDDDGKDRWESSPGKDDIAEDEGASDDEDDDEMADKDDEVSEELASSRTKRLSVEAVGPSSFATRKKKPRKDE

SEQ ID NO: 29630 - protein, 144 aa, Triticum aestivum
MASGETGKVEGEQSNEVAKKSKSTKKKDKKKEKKEKKKAAVANPSLPREPEPEIDDSDDSEFWVPPVGSRWDDDDGKDRWESSPGKDDIAEDEGASDDEDDDEMADKDDEVSEELASSRTKRLSVEAVGPSSFATRKKKPRKDE

SEQ ID NO: 29631 - DNA, 1062 bp, Triticum aestivum
ccattacctagaacatcctaatcgaaaaatgttccatctcatctcgcccctccctttccaccatctccagtaagtttgggcctcgctttccttcccgacccgacccagctcgcaatcgcaagccacacgcatcgggtttccctcagcgcagcgatctcacctccctgacccgctccctcctcccgcgtcacgtgtcctcacagctcaccccgccggcggccggccgcagcggcgcgcccccgacccccgacccccgaccaggcggagcgcggccagggcaggcgagatggtcttcgtctggctcgccgccttcttcctcgtcgtcacgctcatcgtgctcgtcatcttccagttgatgtgcttggcagatctggagttcgattatatcaacccgtttgattcatcctctcgaatcaataaagtggttatgccagaatttatagtgcaagcacttctaagtgcattattcctcttatctgggcactgggcgatgtttctgctttctgccccaatggtgtactataattatacattgtacgagcggcggcagcatcttgtagatgtgacagagatatttaaccatctttcacgggagaagaagcgccgtctttttaagatagctgctcttatcgtcctcctattcttgtccttgttctggatgatttggagtgtactggaggagcacgagtagaatgagagaaaacactgtgattgtgatagctcaacctggttctgcagccgttagttaggtattacgacgtggtcctcgtggcctgctgaacacctactccgatgccgttattgttcatatgaaagcccttttggataaatttagggtgtcatggagaaacgatgcaagcagaagggcgaagactacgtgtccgaggtgctgtttgttgctcgcgcctagtgtgaaatctcctgctgttgtagcgtgtaacataacatgtaagttaggagccactccctcctgtttatttgatcgtgcatccgttcatatggggcaaagtaactgctgcgcccaactgtgcatggttttattatgaccgacattctgtgttt

SEQ ID NO: 29632 - protein, 134 aa, Triticum aestivum
MVFVWLAAFFLVVTLIVLVIFQLMCLADLEFDYINPFDSSSRINKVVMPEFIVQALLSALFLLSGHWAMFLLSAPMVYYNYTLYERRQHLVDVTEIFNHLSREKKRRLFKIAALIVLLFLSLFWMIWSVLEEHE

SEQ ID NO: 29633 - protein, 111 aa, Triticum aestivum
MCLADLEFDYINPFDSSSRINKVVMPEFIVQALLSALFLLSGHWAMFLLSAPMVYYNYTLYERRQHLVDVTEIFNHLSREKKRRLFKIAALIVLLFLSLFWMIWSVLEEHE

SEQ ID NO: 29634 - protein, 87 aa, Triticum aestivum
MPEFIVQALLSALFLLSGHWAMFLLSAPMVYYNYTLYERRQHLVDVTEIFNHLSREKKRRLFKIAALIVLLFLSLFWMIWSVLEEHE

SEQ ID NO: 29635 - DNA, 1507 bp, Triticum aestivum
gttacgtagcactctgtctgacgcatcaatagccccccagccacttcctacaccacttcgtctccctccacttccttccctccctagtctgagtctctacccgagaccagagctcgcacgcgtcgccggcgcgccgatcagtcaagaagccgcgcaacggcgttggcgcattgccccggagaggccggccggccgatgaagccgctgtacctgcggggcagcggcagcttcaagaggctgctgctctccctctcgccccaccgcgccaagcgcgtccacgcgccccccggggacgcgcacgccgagtcgccgcagtcaccgccgccgacggagcggaggcccgagtgggagtgcttctcgtacgaggaggtccggcgcgccacggacggcttccgcgcggccaacctggtgggccggggcgggtcgtcggaggtgtaccgcggcgagctggcggacgggcgcgccgtggcggtgaagcggctcatgggcgcgtccgcctgcgagcgccgggagcgggacttcctggcggagctcggcaccgtgggccacgccaggcaccccaacgtgtgcccgctcctcggctgctgcgtcgaccgcgacctctacctcgtcttcgccttctccgcccgcggctccgtctccgccaacctccacgacggcgaggagggggcgccggcgatggggtgggaggcgcggtacggcgtggcggtgggcacggcgagggggctggagtacctgcacaaggggtgccggcggcggatcatccaccgggacatcaaggcctccaacgtgctgctcaccgacgacttccagccccagatctccgacttcgggctggccaagtggctgccgacggagtggacgcaccgggcgatcgcgccgatcgagggcaccttcgggtgcctggcgccggagtactacacgcgcggcatcgtggacgagaagacggacgtgttcgccttcggcgtcttcctgctggagctcatggccggccggaagccggtggacggcacccacaggagcctcctcggctgggcgaggcccctgctcaacgagggcaagacggaggcgctgctggacccgaggatcgtcgccggcggcgatggcggctacgacgccgagcaggcccggcggctggcgttcgtggcgtcgctctgcgtccgcgcgtcggcgacgtggaggccgtccatgacagaggtcctggagctgctggagggcgtggagatcaaggaggagcggtgggcgatgccggagccggcggccggcgacgacgagggggaggaaatgtggggcttcgacgacctcgacgacgacgacgatgaggaatccggcacgccgtcccctttgtcaacatcctcagccttgagcacttagcacgggctaagattgcgtcagacgagtgtgatgcttgctgaaatttttgctccttcccacctgccccgccccacatgtaaaggcttttcgttgtcgaggttgtgaatacaaaggttatctgtgagaggcaagt

SEQ ID NO: 29636 - protein, 392 aa, Triticum aestivum
MKPLYLRGSGSFKRLLLSLSPHRAKRVHAPPGDAHAESPQSPPPTERRPEWECFSYEEVRRATDGFRAANLVGRGGSSEVYRGELADGRAVAVKRLMGASACERRERDFLAELGTVGHARHPNVCPLLGCCVDRDLYLVFAFSARGSVSANLHDGEEGAPAMGWEARYGVAVGTARGLEYLHKGCRRRIIHRDIKASNVLLTDDFQPQISDFGLAKWLPTEWTHRAIAPIEGTFGCLAPEYYTRGIVDEKTDVFAFGVFLLELMAGRKPVDGTHRSLLGWARPLLNEGKTEALLDPRIVAGGDGGYDAEQARRLAFVASLCVRASATWRPSMTEVLELLEGVEIKEERWAMPEPAAGDDEGEEMWGFDDLDDDDDEESGTPSPLSTSSALST

SEQ ID NO: 29637 - protein, 296 aa, Triticum aestivum
MGASACERRERDFLAELGTVGHARHPNVCPLLGCCVDRDLYLVFAFSARGSVSANLHDGEEGAPAMGWEARYGVAVGTARGLEYLHKGCRRRIIHRDIKASNVLLTDDFQPQISDFGLAKWLPTEWTHRAIAPIEGTFGCLAPEYYTRGIVDEKTDVFAFGVFLLELMAGRKPVDGTHRSLLGWARPLLNEGKTEALLDPRIVAGGDGGYDAEQARRLAFVASLCVRASATWRPSMTEVLELLEGVEIKEERWAMPEPAAGDDEGEEMWGFDDLDDDDDEESGTPSPLSTSSALST

SEQ ID NO: 29638 - protein, 231 aa, Triticum aestivum
MGWEARYGVAVGTARGLEYLHKGCRRRIIHRDIKASNVLLTDDFQPQISDFGLAKWLPTEWTHRAIAPIEGTFGCLAPEYYTRGIVDEKTDVFAFGVFLLELMAGRKPVDGTHRSLLGWARPLLNEGKTEALLDPRIVAGGDGGYDAEQARRLAFVASLCVRASATWRPSMTEVLELLEGVEIKEERWAMPEPAAGDDEGEEMWGFDDLDDDDDEESGTPSPLSTSSALST

SEQ ID NO: 29639 - DNA, 1344 bp, Triticum aestivum
ccattacctagaacatcctagtcgaaaattcgaccaaacctcccacctcgcacctcgccgcccgatccgacgcgccggcgacccgccgccgctctcgagcgtcgccgatccgcggcgcagatccctcacgaggttttctcaccttattagctcgctggtgcaggactgccacggctcgccggctcttgaatttcagcgcacgcggatctggtgggaggagccccgtgggcgccgctgccttggcgatgtcgagggtccgggacaggacggaggacttcaaggagtccgttcgcgtcgccgcgctctcccatggctacacggagtcgcaattggccgcgctcatgtcgtctttcatcatccggaagccgtcgcccaaatcgccgttcacaaatgcagcaatcaagacgcttgagagcatcagggagctcgagaagtttatagtgaagcacaggagggactatgtggacatgcatcgcaccacggagcaagagagggacaacattgagcatgaagttggtatttttgtaaaagcatgcaaggaacagatagatatcctaaagaacaggatccttgaagatgagaggaatagaagagcgaacacatggcttggcacaagagatgagacttcccggttagacttgatagctcaccagcatggtgtggttttgattttgagcgagcgtctccactcagtaactgcacaatttgatcgccttaggtccctgcgctttcaagaagctattaatagggtgatgccaagaaagaagattaagaagaagccagaaataaaacctactgaaccatccaagtcaaaccttgtattgaaatctgatgtctcgaaggttgaagatcgggaggtatcaactgcgcccttaagagttcaagaacaactcttggacgatgaaacacgagctctccagatggagttgaccaatcttcttgatactgtccaagaaacggagacaaagatgatagagatgtcagcacttaatcatcttatgtcaacacatgttctacagcaagctcagcagattcaatatttatacgaccaggcagtggaagcaacgaacaacgtggagcgtgggaacaaggagctatcccaggcgatccagcggaacaacagcagtagaacctttctcctgcttttcttctttgttcttactttctctgttctgtttcttgactggtacaaaaactgaattagcagctcatgtaaccgtactattgcgcaaatggattgagctattgatgtgtcatctcttgtgggatgattatcacttgtcatgcatattggtcagtgttactctgttaagattctaagattttgccgccgttggcaaacat

SEQ ID NO: 29640 - protein, 317 aa, Triticum aestivum
MSRVRDRTEDFKESVRVAALSHGYTESQLAALMSSFIIRKPSPKSPFTNAAIKTLESIRELEKFIVKHRRDYVDMHRTTEQERDNIEHEVGIFVKACKEQIDILKNRILEDERNRRANTWLGTRDETSRLDLIAHQHGVVLILSERLHSVTAQFDRLRSLRFQEAINRVMPRKKIKKKPEIKPTEPSKSNLVLKSDVSKVEDREVSTAPLRVQEQLLDDETRALQMELTNLLDTVQETETKMIEMSALNHLMSTHVLQQAQQIQYLYDQAVEATNNVERGNKELSQAIQRNNSSRTFLLLFFFVLTFSVLFLDWYKN

SEQ ID NO: 29641 - protein, 285 aa, Triticum aestivum
MSSFIIRKPSPKSPFTNAAIKTLESIRELEKFIVKHRRDYVDMHRTTEQERDNIEHEVGIFVKACKEQIDILKNRILEDERNRRANTWLGTRDETSRLDLIAHQHGVVLILSERLHSVTAQFDRLRSLRFQEAINRVMPRKKIKKKPEIKPTEPSKSNLVLKSDVSKVEDREVSTAPLRVQEQLLDDETRALQMELTNLLDTVQETETKMIEMSALNHLMSTHVLQQAQQIQYLYDQAVEATNNVERGNKELSQAIQRNNSSRTFLLLFFFVLTFSVLFLDWYKN

SEQ ID NO: 29642 - protein, 243 aa, Triticum aestivum
MHRTTEQERDNIEHEVGIFVKACKEQIDILKNRILEDERNRRANTWLGTRDETSRLDLIAHQHGVVLILSERLHSVTAQFDRLRSLRFQEAINRVMPRKKIKKKPEIKPTEPSKSNLVLKSDVSKVEDREVSTAPLRVQEQLLDDETRALQMELTNLLDTVQETETKMIEMSALNHLMSTHVLQQAQQIQYLYDQAVEATNNVERGNKELSQAIQRNNSSRTFLLLFFFVLTFSVLFLDWYKN

SEQ ID NO: 29643 - DNA, 759 bp, Triticum aestivum
cttagaggtttaccgagtatcggacatggagctggtaagagttcttcctagtgctgaagatgaagtcaatgttgcatgctttcatccttcccctggaggtggtcttgtttatgggactaaggaagggaagctcaggatcctacaacacaatggcgcagacgctgcaagcatggcgctgaattgctttatcgaggaaaatatgcttgaggttcagaggtatgcgttggaaggctgaatgatcatttgcgtcatgagcttatatgtgtccttccctgcaggaacttttgtctgcaagctccatttttgtttaggagagcctcatggactaaattacaagatatcatcagggcctccgactaaatctttcgagcggcagatgattctccacgagtttgttcaagtgcaatgtactgatctattgctggtttccagagaatgctgtgggccgactctaatcgtgcatcgttttgcaacttttaactcaggtctgtgcacaggcggtgtgatgatgtaaatttggcatggtcatcgttgctgtcaagttcccacgaccctgtaattataaaactgtacatgtaatctccaatcagcttaaaacaaccgctgttgtattttagaaagctcgcaatcctaatcctcaagtttcttttacgtgggaaatgtttgtactatttctgtcctgaccaatgccagtgatttgcattaagatgaatgaaaaaaaaaaaaaccaaccgctaccaaagaaggaagagaatgacg

SEQ ID NO: 29644 - protein, 92 aa, Triticum aestivum
MIICVMSLYVSFPAGTFVCKLHFCLGEPHGLNYKISSGPPTKSFERQMILHEFVQVQCTDLLLVSRECCGPTLIVHRFATFNSGLCTGGVMM

SEQ ID NO: 29645 - protein, 87 aa, Triticum aestivum
MSLYVSFPAGTFVCKLHFCLGEPHGLNYKISSGPPTKSFERQMILHEFVQVQCTDLLLVSRECCGPTLIVHRFATFNSGLCTGGVMM

SEQ ID NO: 29646 - protein, 77 aa, Triticum aestivum
LEVYRVSDMELVRVLPSAEDEVNVACFHPSPGGGLVYGTKEGKLRILQHNGADAASMALNCFIEENMLEVQRYALEG

SEQ ID NO: 29647 - DNA, 1510 bp, Triticum aestivum
acgcactaccaattaccaaataccaatccacgcatcagagctcagaagctaggccagcgccatgggagaagctgcagctgttgtcgccgcctcgcgcgacggcttcttcggcctgggcgagtgcaagggccaggtggtgatcgacggcgagcaggtgccactggtcctgacgccgggcagcgaggaggtgagcggccacgaccacaaggcgctggtggcggccctggtggccaaccgagagtgggtggaggagaaggtggtggccaacagcggcgtgctgctgcgcggcttcggcgtccgcgacgccgtggagttcgacgccatcgtggacgcgctcgggtggccggacatccggtacgtcggccccgccccgcgcacccacgtccacggccgcatctggaccgccaacgagggccccctcgaggagttcatctactaccaccacgagatggtcctcatcaaggagttcccggggaaggtgatcctgttctgcgaggtgccgccgccggagggcggggagacgccgttcgtgccgagcttccgggtgacggagcgcgcgctgcaggagttcccggacatggtggaggagctggacgccaaggggctccgctacaccttcaccgcgctgagcaaggacgacaccaagtccatgcgggggcgagggtgggaggacgccttcgccaccaccgacaaggccgtggccgagcagagagcccgcgcgctggggatggacgtggagtggctgccggaggaaggcggcgtgaggaccatcctcgggccgaggcagctgacgcgggtgttcccgggccggaagggccggcggatgtggttcaacacggtggtggggatgcacggcaaggagctcagctccgccacgttcgccgacggctccgagataccggcggacttcgtgcgccggtgcggcgagatcatcgaggaggagagcatccagttccggtgggagaagggcgacgtgctcatcctcgacaacctcgcaacgctccacggccgccggccgtcgctggcgcccaggagggtcctcgtcgccacatgcaagtgatctcatttcatgcatcacccaccttaactaattggttagttaattaagcttgagggtggacctggcttgattaactaattaatcttagttggtgctggggatgctgcatttggctcttctataataagctgccttgagttactacggtaaaatggctttgtgcattgtgatgcagaagctgggtactcccttttcagaaaaaaaaaagttactacggtaaaataagagctgaaggtttgattaagtcagtcggcttaatacttattacagccaaagaggggtgcggtagtttctcccttataattagtaattttgcatccatcattatgctttttcttttatatttcatccatcattatgctgggtgacatgcattacgacatgtaaggcttatttccttcgagtgatatattaagagatgcatgcagcagtgttatgcatcttctcttt

SEQ ID NO: 29648 - protein, 368 aa, Triticum aestivum
THYQLPNTNPRIRAQKLGQRHGRSCSCCRRLARRLLRPGRVQGPGGDRRRAGATGPDAGQRGGERPRPQGAGGGPGGQPRVGGGEGGGQQRRAAARLRRPRRRGVRRHRGRARVAGHPVRRPRPAHPRPRPHLDRQRGPPRGVHLLPPRDGPHQGVPGEGDPVLRGAAAGGRGDAVRAELPGDGARAAGVPGHGGGAGRQGAPLHLHRAEQGRHQVHAGARVGGRLRHHRQGRGRAESPRAGDGRGVAAGGRRREDHPRAEAADAGVPGPEGPADVVQHGGGDARQGAQLRHVRRRLRDTGGLRAPVRRDHRGGEHPVPVGEGRRAHPRQPRNAPRPPAVAGAQEGPRRHMQVISFHASPTLTNWLVN

SEQ ID NO: 29649 - protein, 332 aa, Triticum aestivum
MGEAAAVVAASRDGFFGLGECKGQVVIDGEQVPLVLTPGSEEVSGHDHKALVAALVANREWVEEKVVANSGVLLRGFGVRDAVEFDAIVDALGWPDIRYVGPAPRTHVHGRIWTANEGPLEEFIYYHHEMVLIKEFPGKVILFCEVPPPEGGETPFVPSFRVTERALQEFPDMVEELDAKGLRYTFTALSKDDTKSMRGRGWEDAFATTDKAVAEQRARALGMDVEWLPEEGGVRTILGPRQLTRVFPGRKGRRMWFNTVVGMHGKELSSATFADGSEIPADFVRRCGEIIEEESIQFRWEKGDVLILDNLATLHGRRPSLAPRRVLVATCK

SEQ ID NO: 29650 - protein, 203 aa, Triticum aestivum
MVLIKEFPGKVILFCEVPPPEGGETPFVPSFRVTERALQEFPDMVEELDAKGLRYTFTALSKDDTKSMRGRGWEDAFATTDKAVAEQRARALGMDVEWLPEEGGVRTILGPRQLTRVFPGRKGRRMWFNTVVGMHGKELSSATFADGSEIPADFVRRCGEIIEEESIQFRWEKGDVLILDNLATLHGRRPSLAPRRVLVATCK

SEQ ID NO: 29651 - DNA, 719 bp, Triticum aestivum
agttcttgtacccttccttagcccgcaagcagagtatgcattccttccttgtccctcgccgacgcatccaccgccaagcaacctcgctacatatgcgccgttccttcgtctacccccattgttctaccaaactcgtcggccggtgagcccatacatacacacgcacaggtcggatcagaggtcggagctcgtgcacagtttgatagctgcagcctggaggctggtggcgagaggatcatcggtagccatgaacgggggcatcgggggcacggcggagggggcgcctcgcccgagcacggactggggcccgatcatcgtggcggtgatcctgttcgtggtgctgtcgccggggctgctgttccagctgccggccaggacccgggtggtggagctcggcaacatggccaccagcgccatcgccatcctcgtccacgccgtcatcttcttctgcatcctcaccctcgtcgtcgtggccatcggcgtccacgtgtacgccgcctagctatctcatatagtactccagatcaagatgggttttgtctttcttcagtgctgccctgcccctgtttgcctgtttgatttggccggctgtaaactgcggaaacactgctggctgaaaacagtacgtatataattgtgttcttggatgaggaattagttgcttgtaattacttctctgtgtcgataattgatgaaatgcctttgaaattgattccggc

SEQ ID NO: 29652 - protein, 166 aa, Triticum aestivum
VLVPFLSPQAEYAFLPCPSPTHPPPSNLATYAPFLRLPPLFYQTRRPVSPYIHTHRSDQRSELVHSLIAAAWRLVARGSSVAMNGGIGGTAEGAPRPSTDWGPIIVAVILFVVLSPGLLFQLPARTRVVELGNMATSAIAILVHAVIFFCILTLVVVAIGVHVYAA

SEQ ID NO: 29653 - protein, 84 aa, Triticum aestivum
MNGGIGGTAEGAPRPSTDWGPIIVAVILFVVLSPGLLFQLPARTRVVELGNMATSAIAILVHAVIFFCILTLVVVAIGVHVYAA

SEQ ID NO: 29654 - DNA, 1057 bp, Triticum aestivum
ataatatcctgactttgaagtcattttttcatttacatcagcccagcctatgcaaactccattctgtgatggatgaaatatccattatatttaaggctgtattgtcttgttattttttgttttcatacctataatttacatccagattactacatcggattttgttcaactctgctgaacatctgtaacacttattttcttcacaggtgaagactatatatgtgaagaacctgccggagaatgtttctaaagagaaagttaaggatctctttgaagttcatggagaggtcacaaaaattgttttaccgcctgctaaggccgggcataagagggattttgggtttgttcactttgctgaaagatcaagtgcactgaaggcagttaaaggaagtgaaaaatacgaaatcgatgggcaagtgcttgaagtttccatggccaaacctttgagtgataagaaacctgaccactcgttcaagcctggtggagctcccagctatcctcttccaccttatggtggctacatgggagacccatatggtgcctatggtggcggccctggattcaaccagcctatgatctatggtagaggaccagcaccagctggaatgaggatggtgccgatggtgctccctgatggtcgccttggctatgttctgtaagactttttttctgcatactagtgtcgatgcatacacatcttcagttccttgacaacgtgttactaatgttgataggcaacaacctggtggaatgccgcctccaccccctccgcgacgtggtgaccggcgggatggcggtggccgaggtggcgaaggaagccagcggcgttatcggccctactagtttgtcccttgccttgcatttttcgtcgtgctaggtgatggatttgttaactttgatggagtgcgtttaggagcgtgtgttgtttttgccctgtaagacttctatagccttagacttggtactcttctgttttgttatttgataaacacccgagacgtgtactgttgcgccgtccttttcaataacttgtgtatcatgcagtgctcgtgactcc

SEQ ID NO: 29655 - protein, 75 aa, Triticum aestivum
MAKPLSDKKPDHSFKPGGAPSYPLPPYGGYMGDPYGAYGGGPGFNQPMIYGRGPAPAGMRMVPMVLPDGRLGYVL

SEQ ID NO: 29656 - protein, 63 aa, Triticum aestivum
MHTHLQFLDNVLLMLIGNNLVECRLHPLRDVVTGGMAVAEVAKEASGVIGPTSLSLALHFSSC

SEQ ID NO: 29657 - protein, 50 aa, Triticum aestivum
MLIGNNLVECRLHPLRDVVTGGMAVAEVAKEASGVIGPTSLSLALHFSSC

SEQ ID NO: 29658 - DNA, 554 bp, Triticum aestivum
aatcacaatcaccgtcgccacaacccttctcccccaatccgctcgtcgtcgtttcgccgcaccgtcttcgacagcaatcgtcgccccgccaagatgcagatctttgtcaagaccctcacaggcaagactatcactcttgaggtcgagagttcagataccattgacaatgttaaagccaagattcaggacaaggagggcattcctccggaccaacagaggctcatatttgctggcaagcagctagaggatggccggacattggccgattacaacatccaagggcctctttgattcgtaggatttccaaaacgcaggaatagaaagaacatgggattagagtggaatgtcgtctggaatcctacaggatggtacgagtgtttgattgtgcatagaaaaaacccaggattctttcaaagaggtttgagtggatgggatgtttcctatgaaatctagtgcaaatgaatcatatggaaaaattcctatggtttacaatcctacgaatcaaacaaccaagataggaaaaattcctaaggattagaatcctccaaaattcc

SEQ ID NO: 29659 - protein, 96 aa, Triticum aestivum
NHNHRRHNPSPPIRSSSFRRTVFDSNRRPAKMQIFVKTLTGKTITLEVESSDTIDNVKAKIQDKEGIPPDQQRLIFAGKQLEDGRTLADYNIQGPL

SEQ ID NO: 29660 - protein, 80 aa, Triticum aestivum
ITITVATTLLPQSARRRFAAPSSTAIVAPPRCRSLSRPSQARLSLLRSRVQIPLTMLKPRFRTRRAFLRTNRGSYLLASS

SEQ ID NO: 29661 - protein, 65 aa, Triticum aestivum
MQIFVKTLTGKTITLEVESSDTIDNVKAKIQDKEGIPPDQQRLIFAGKQLEDGRTLADYNIQGPL

SEQ ID NO: 29662 - DNA, 899 bp, Triticum aestivum
atcgaaaaactcgcgcacctcacaacacccctccatccaccttttgccagcgtgagagcttcttctttcttgcgagggagaggacagcgagcaaccagggagctaggcgtcaatggcgaccatagccacgatgaccatgctcaagcccgccaagatcacggccaggtcggcgccttcctcgccgtcgttcagcgccaaggtggcgtcgccgagcatctcgctgcgcagcctgcagaagaacgcggccaagaagggagccctggccgtgtcgccggcggccgcggccatggcgagcgccttcttcacctcgctggcctcgtcggacgccgcgatggcgtcgcagcggatcgcggacgtggcggcggtggcgcccgcggacgacaaccggggcctgctgctgctcttcgtggtggcgcccgcgctcgggtgggtgctctacaacatcctccagccggcgctgaaccagctcaataagatgcggtccgagaaggcgctcgtcgccgggctcggcatcagcgccgccgcggccgccggcctggccgccgcgccggagccggcctccgccgccgtgcaggagctcgccgcgctggcggcggtagcgcccgccgacgacaaccggggcctgctgctgctcttcgtggtggcgcccgccctcggatgggtgctctacaacatcctgcagccggcgctgaaccagctcaacaaaatgcggtccaactgagcgtcgtcgtcgtcgtggcatcgcatgcggtccggccgagtgggttcgtatgtgtgtgttcgtctattaagagtcgtggtagtagcgtggaacgtggtgtgagtgcctgcttgcatactctctaatcttgttccttccattgatcaaatgcagtacagctcttcttgttttctcttcg

SEQ ID NO: 29663 - protein, 202 aa, Triticum aestivum
MATIATMTMLKPAKITARSAPSSPSFSAKVASPSISLRSLQKNAAKKGALAVSPAAAAMASAFFTSLASSDAAMASQRIADVAAVAPADDNRGLLLLFVVAPALGWVLYNILQPALNQLNKMRSEKALVAGLGISAAAAAGLAAAPEPASAAVQELAALAAVAPADDNRGLLLLFVVAPALGWVLYNILQPALNQLNKMRSN

SEQ ID NO: 29664 - protein, 196 aa, Triticum aestivum
MTMLKPAKITARSAPSSPSFSAKVASPSISLRSLQKNAAKKGALAVSPAAAAMASAFFTSLASSDAAMASQRIADVAAVAPADDNRGLLLLFVVAPALGWVLYNILQPALNQLNKMRSEKALVAGLGISAAAAAGLAAAPEPASAAVQELAALAAVAPADDNRGLLLLFVVAPALGWVLYNILQPALNQLNKMRSN

SEQ ID NO: 29665 - protein, 194 aa, Triticum aestivum
MLKPAKITARSAPSSPSFSAKVASPSISLRSLQKNAAKKGALAVSPAAAAMASAFFTSLASSDAAMASQRIADVAAVAPADDNRGLLLLFVVAPALGWVLYNILQPALNQLNKMRSEKALVAGLGISAAAAAGLAAAPEPASAAVQELAALAAVAPADDNRGLLLLFVVAPALGWVLYNILQPALNQLNKMRSN

SEQ ID NO: 29666 - DNA, 1750 bp, Triticum aestivum
gcaaccaaaatcaccatgaaatcttactaattaagcagacaatattattgcaccagtgcagatcatgttcatatatataagctctatatagaaggcagtgagcaagcaaaccctaggtcaccgtcgtcgactgttcgtagtcgccggtatgcatgcatgcacagagtagaaggcgcgcgcgccaatggcacctactgccacgccgacacggacagcagcggccgcgtctgccacccgaggaagcacgcgccgcgggactcctgcaccaggtatccctccgacgggtagtgcagccgcagcagtagccgcgcctgggaaacggcgaacgcgctgagcggccgcgcggcgaacccagtgccgcgtgcggcggtagcccaccgctcgagcccgcgccaccacctcccgcctgtcccgcccaccgcggcctcgatctccctgccgaggacctcctgctccaccgccagcctctcccggctccccggcggcaccgtcgcctcaagcgcctcgaacaccgccgaatagtgatccatggccacaccaacacggcgcgggagctcgtcgatggggtcgatctctcctccgctcgcctccctctcggcgacggtcaccacggcgggggccatggccttcacccacttgaggaacgctgcgagctcgtcctgcccgccgagcttgtgcaagaacagcacgcagttcacggccagcgtctcgtcgggatgtagctccaggctcgtgacagcggtgctcggggtggtgctcgtgccggcgacgtggtgcgtgctggcggcgcaggagaggaggagcggggtgaagtggaaagggaggtggatcgagcgggcgaaagcgcgtagccggttgcctgtacgaaggagtgtgtcgcggtcggcgccagcgccggtgatgcggacctcgggcgggcccagcgccgggtcggctcgttcggcgatcgcctggaggagtggcggccactgcacgccgtgcgccgcgtcgaggtcgaggatgtggacgcggcgcgaaccctccacggcctcgaggatggcctggttggccgtcaggtgggcgaaccgcaggaacggcgcgatctggttgaacgccaggtacgccccggacggtgccggcgctgtcccagctggcggccgcggggagaacggcagcccggccttggagtccacgcggagcacgagcgcgcgcgcgaagtggtacgcgaggcggtcggtggcgtcgccgcgcggggacgccgcggagaggaggatctcggcagcgcggcgcgcggcggcgaggtccccgcgctgcagcaggtcggcgcaggccagcacgaggtcccgcgtggacggtgccgccgcgagcgcacgcccgccgccgcccagcaaggcagcgtcgcccccgccctcgccgctgctgttcctgaggtcggcgttgctgttgttgtcggtgtcggaggacgaggaagagtggagtgagctgatcatgtcttcttcttcgctcgcggcgccctgggactaggatcgtcgtgagcggccggaggtggaggagaagacggagacggagacggagcatgagggcgcgcatctctgggggggtttaatagggacgatgagggcgcacgtccagcagcatctgggctcgcagcttccttgacaggacatcatctgccaaaaatacacaagtatgctgctgctgctagctagcttgtgtgagtgagtgagaggggagaacccagcagcaccatcttttcgattaggatgttcta

SEQ ID NO: 29667 - protein, 324 aa, Triticum aestivum
MATPTRRGSSSMGSISPPLASLSATVTTAGAMAFTHLRNAASSSCPPSLCKNSTQFTASVSSGCSSRLVTAVLGVVLVPATWCVLAAQERRSGVKWKGRWIERAKARSRLPVRRSVSRSAPAPVMRTSGGPSAGSARSAIAWRSGGHCTPCAASRSRMWTRREPSTASRMAWLAVRWANRRNGAIWLNARYAPDGAGAVPAGGRGENGSPALESTRSTSARAKWYARRSVASPRGDAAERRISAARRAAARSPRCSRSAQASTRSRVDGAAASARPPPPSKAASPPPSPLLFLRSALLLLSVSEDEEEWSELIMSSSSLAAPWD

SEQ ID NO: 29668 - protein, 313 aa, Triticum aestivum
MGSISPPLASLSATVTTAGAMAFTHLRNAASSSCPPSLCKNSTQFTASVSSGCSSRLVTAVLGVVLVPATWCVLAAQERRSGVKWKGRWIERAKARSRLPVRRSVSRSAPAPVMRTSGGPSAGSARSAIAWRSGGHCTPCAASRSRMWTRREPSTASRMAWLAVRWANRRNGAIWLNARYAPDGAGAVPAGGRGENGSPALESTRSTSARAKWYARRSVASPRGDAAERRISAARRAAARSPRCSRSAQASTRSRVDGAAASARPPPPSKAASPPPSPLLFLRSALLLLSVSEDEEEWSELIMSSSSLAAPWD

SEQ ID NO: 29669 - protein, 293 aa, Triticum aestivum
MAFTHLRNAASSSCPPSLCKNSTQFTASVSSGCSSRLVTAVLGVVLVPATWCVLAAQERRSGVKWKGRWIERAKARSRLPVRRSVSRSAPAPVMRTSGGPSAGSARSAIAWRSGGHCTPCAASRSRMWTRREPSTASRMAWLAVRWANRRNGAIWLNARYAPDGAGAVPAGGRGENGSPALESTRSTSARAKWYARRSVASPRGDAAERRISAARRAAARSPRCSRSAQASTRSRVDGAAASARPPPPSKAASPPPSPLLFLRSALLLLSVSEDEEEWSELIMSSSSLAAPWD

SEQ ID NO: 29670 - DNA, 660 bp, Triticum aestivum
ccttccacggcgcagcacccccacaatccatccaagagagaagcccaaccaaccccaacagacagacagagcgagagagagaggatgtcggccatggagacggacgcccccgacgcgccgccgccggccgccccggcccccgccgccgacgccggcgccgggtcttcgtcctcgtcgtcccgcaagccgggcaagcgcttcgagatcaagaagtggaacgccgtcgcgctctgggcgtgggacatcgtggtggacaactgcgccatctgccgtaaccacatcatggatttatgcatcgagtgccaggccaaccaggccagcgccaccagcgaggagtgcaccgtcgcatggggtgtctgtaatcatgctttccacttccactgcatcagcaggtggctcaagactcgccaagtgtgcccactagacaacagcgaatgggagttccagaaatacggccactagaccaccctcctccgccactgggcggcggcatgttacttgcctactaccaccccaccagaagcccaggcctatctcttgtcgagcgtcgttatctccgcctactttagaacatttgcgtctacatctcctgtttgatgagtttgtataaaggattcatgtacttgcgcaactaatgctatcgtattaagggattccccc

SEQ ID NO: 29671 - protein, 153 aa, Triticum aestivum
PSTAQHPHNPSKREAQPTPTDRQSERERMSAMETDAPDAPPPAAPAPAADAGAGSSSSSSRKPGKRFEIKKWNAVALWAWDIVVDNCAICRNHIMDLCIECQANQASATSEECTVAWGVCNHAFHFHCISRWLKTRQVCPLDNSEWEFQKYGH

SEQ ID NO: 29672 - protein, 140 aa, Triticum aestivum
LPRRSTPTIHPREKPNQPQQTDRARERGCRPWRRTPPTRRRRPPRPPPPTPAPGLRPRRPASRASASRSRSGTPSRSGRGTSWWTTAPSAVTTSWIYASSARPTRPAPPARSAPSHGVSVIMLSTSTASAGGSRLAKCAH

SEQ ID NO: 29673 - protein, 125 aa, Triticum aestivum
MSAMETDAPDAPPPAAPAPAADAGAGSSSSSSRKPGKRFEIKKWNAVALWAWDIVVDNCAICRNHIMDLCIECQANQASATSEECTVAWGVCNHAFHFHCISRWLKTRQVCPLDNSEWEFQKYGH

SEQ ID NO: 29674 - DNA, 888 bp, Triticum aestivum
ttgggtaccgggccccccctcgaggtcgacggtatcgataagcttttttttttttttttttatttttttttttcccaacaagcaaaagccaatctatcccatccaaactgataactgaagtctccaaacctcaacatcaaaaactcggccaacaccctgacagcaaacaaggtctcaatccaaagaaaacggtcacccgtatactgctaggcaatcctgtggaacaaattcatactcacttgttgcatcatgtcctaacctactgttctattcaattgctgtcggtaaaatcagcgtctatgacgtcaccaccatcgcctgtcttctcagatgggcctgggcctgtagagtcagcagcgccgtcagctccaggggtagggcccgacccctgctgctggtagagggactgaccaagctgcatcacttcttggttcaacgcagctagtgcatcctttatcgtctgtgtcgatccaccagcaacggcatcctggagttccttgagcttcccctccaccttctccttgacatcgcctgggaccttgtctccgagctccttcagttgtttctcagtctggtacatcacagactctgcctggttcttggtgtcaattgcgtccctcttctccttgtcctccgccgcaaatttttcagcttcttccaccatcttctctacctcatcctttggcagtgtgctggctccagtgatcgtaatgtcctgcttcttcccagtgcccttatccatggggatcggagcggaggacggtgggagcagcaggtaggtaggtggtgggatttttcgattacgatgttctaggtaatggtctcgtgcgaattcctgcagcccgggggatccactagttctagagcggccgccaccgcggggagctc

SEQ ID NO: 29675 - protein, 38 aa, Triticum aestivum
WVPGPPSRSTVSISFFFFFFIFFFPNKQKPIYPIQTDN

SEQ ID NO: 29676 - protein, 36 aa, Triticum aestivum
LGTGPPLEVDGIDKLFFFFFYFFFSQQAKANLSHPN

SEQ ID NO: 29677 - protein, 33 aa, Triticum aestivum
MTSPPSPVFSDGPGPVESAAPSAPGVGPDPCCW

SEQ ID NO: 29678 - DNA, 1349 bp, Triticum aestivum
atcggttagatattttctaggccacaaaaaaaaggttggtcgcaaaattagagaaggttgaggcgggcgtctggcatggaggcggaggcaaaggcgacctgggcggcggcgcctggctcgggagcggcgactgccgacgggggcttccctgtagatccggtgtgcagcgaaggttgccaatcttcccaggcgtggcggtctcggcgggttcggtccaagatgaagtcagcgatggtgctggctggaggagacgttgggttgttgcctcttctgtggctgcccatgacagctgtgccgccggcgctgccgaatgcagtggagagagcgccccagcggagtcgggagagtcagctgtgaaacctgatccgaaatctgtaggctggataagaagggtgcgagtgggcgcaaatccgatagagcgtatgccttgccctggcaggatgggagcgcttgagaagactatcaggggcttcgtggacagggagggtgatgaagtagtcaagccagagttagggaccactttcgattccctgacagaggcttatgatttttacaatatgtattcgtgggaacatggcttcggcattagatacgggaaaaccaggctaaatcctgataagaggaagaccatgcaggagattgtgtgcggatgctcggggaaaccccttcgagaaaatacaagaccgtgtaggtgcaagtgccctgcaatgattaggctgttgaggacatcggacaacgggtggtacatcacagagcatcgtgtcaagcataatcatgtcatgacgccaaattgtggtgaaatgttgcactggccgtcacacaagcacattgacgtgtacacgagagaccttgttcgtaacctaaggaagaacaacatcaacctgagcaaggtgtacaacataattggagggttctttgggacagtggagaatgtgccttttacgaaaagatctcttcggagcctgtgtgggcaaattagcagggacgaggcagaggacgacgtgaggaatacaagttttcgatgaactaggtgcaaaggacccggctaaatggcccaactccgcgatggacggccctcttaaacaccgtaacgggaggaccgtactgaaccttgcccccctgggcctcatcaatgagtacagacaacacactcatgcactgttcaaaaaagcctgcactaattgaatacatgggccaatacattcatgagctcgaatctccaggaggaccaaccgctgggataatagtaccatatgccagtacaacccatatgtaattttcgtatttgttgacatataaacaaactattgagacgataacgttctaaaagcatgtagtcaaacttttgt

SEQ ID NO: 29679 - protein, 200 aa, Triticum aestivum
MPCPGRMGALEKTIRGFVDREGDEVVKPELGTTFDSLTEAYDFYNMYSWEHGFGIRYGKTRLNPDKRKTMQEIVCGCSGKPLRENTRPCRCKCPAMIRLLRTSDNGWYITEHRVKHNHVMTPNCGEMLHWPSHKHIDVYTRDLVRNLRKNNINLSKVYNIIGGFFGTVENVPFTKRSLRSLCGQISRDEAEDDVRNTSFR

SEQ ID NO: 29680 - protein, 194 aa, Triticum aestivum
MGALEKTIRGFVDREGDEVVKPELGTTFDSLTEAYDFYNMYSWEHGFGIRYGKTRLNPDKRKTMQEIVCGCSGKPLRENTRPCRCKCPAMIRLLRTSDNGWYITEHRVKHNHVMTPNCGEMLHWPSHKHIDVYTRDLVRNLRKNNINLSKVYNIIGGFFGTVENVPFTKRSLRSLCGQISRDEAEDDVRNTSFR

SEQ ID NO: 29681 - protein, 155 aa, Triticum aestivum
MYSWEHGFGIRYGKTRLNPDKRKTMQEIVCGCSGKPLRENTRPCRCKCPAMIRLLRTSDNGWYITEHRVKHNHVMTPNCGEMLHWPSHKHIDVYTRDLVRNLRKNNINLSKVYNIIGGFFGTVENVPFTKRSLRSLCGQISRDEAEDDVRNTSFR

SEQ ID NO: 29682 - DNA, 802 bp, Triticum aestivum
ccgtgtcctttttgaagaggaacaatcagcatataaccaagccatgcttcagaatatttgtgatgggaagatgcacccacttacatctatgcaccatacctccacatataatgcttctctatgcaaactgatggaatactgcttgagccctgctataactgtgcttcaggaccgtgtgaaagaaaacgaacttcggttagctatgctagtggaggaggctaaacaactggaggccgagcagagcacgaaaactggctctcctcgccgtgcgatgcccggagggactaccagtggcatcacttcgccaaggggccaggacaagtacccttccggcagacaagggggccctataagccctagcagcagcggccggaggaaggctccttgactcggaccttgctcgccattatgtcatgatggatagtccgattctgggccctgcctgatgctttctggaaccccaaacctgtcccttggcgcgaggggtgaagtcgcaatgcaaatgtacatacccatctcctttcagtgcctcgccgccgccgacgtcgacgtcgacggtatgttgcccgtcgtcgactagctcccgagacgctcgcatactacagtagcacaggatggatcatttaactgtgtgatggattcatctgtaacaatgttctaaattatgttcgtttgcgttttattctcagaagaagcgaacctgcgcagtgtgctagagccagcgtcgtcaattcgtcatgtttcgtagatagtgtctgtaatgatgtaatttctgtctctttttccaaggaaagacctaaat

SEQ ID NO: 29683 - protein, 128 aa, Triticum aestivum
RVLFEEEQSAYNQAMLQNICDGKMHPLTSMHHTSTYNASLCKLMEYCLSPAITVLQDRVKENELRLAMLVEEAKQLEAEQSTKTGSPRRAMPGGTTSGITSPRGQDKYPSGRQGGPISPSSSGRRKAP

SEQ ID NO: 29684 - protein, 114 aa, Triticum aestivum
MLQNICDGKMHPLTSMHHTSTYNASLCKLMEYCLSPAITVLQDRVKENELRLAMLVEEAKQLEAEQSTKTGSPRRAMPGGTTSGITSPRGQDKYPSGRQGGPISPSSSGRRKAP

SEQ ID NO: 29685 - protein, 105 aa, Triticum aestivum
MHPLTSMHHTSTYNASLCKLMEYCLSPAITVLQDRVKENELRLAMLVEEAKQLEAEQSTKTGSPRRAMPGGTTSGITSPRGQDKYPSGRQGGPISPSSSGRRKAP

SEQ ID NO: 29686 - DNA, 955 bp, Triticum aestivum
aaaagaaaacaagtaagggcccaaatgcaaacgaggaaaccaacctcctcctcccctgtaacaactccgccgcgcgcccacctcccctcgccggtatcgtgtcctcgttcacgcccaacccaacccaccccatttccccgacctccgatgccggagcgccgcaacgtagccggagacccgccgtactggtgatccccggataacaacgatggaccgcctcttgctgtcccgccccccgatgcccacccccgtccacggcgctgccacggccgcagatggcgacctcctcgagctcgacgtcctctggcccgcctcttcagctccgggactcctcgccgcgcttcccgatgacgaggctaagaagaagcagaagcgcgcgggcggccctgccgtccgatccgccgcccgcgccgtcccggagaaggccgcgttgaccccgtcttcggtggcgaggtcggctccggtgcgcataccttcggatgctgcggcgcggagagggaggtggccccacgtcgtcggtggcggcgacgacggggacgccatggtcccgccgcacgagatcgtcgcgcggcgcgcggcagcgcacagctcggtgctggagggagccgggaggacgctcaagggccgcgacctccgccgcgtacgcaacaccgtcctgcgccgcaccggcttcctcgactgagaggcggaggcgagtcgcctcgtcgctttcgcgataaagttttgacttctgttaattcctccctttagttccatccgttgcgtttccggcagttttgatttcattccccgatgggaaggggatgaaaagtaaagtggtgaggtgagatgagtgaccgaggattataacacgacaataacagtgctgttccattccatcacattatatatatggaatttttggccattaaaaaaaaaataaaaaaaaaaaaaaaaaagcttatcgataccgtcg

SEQ ID NO: 29687 - protein, 157 aa, Triticum aestivum
MDRLLLSRPPMPTPVHGAATAADGDLLELDVLWPASSAPGLLAALPDDEAKKKQKRAGGPAVRSAARAVPEKAALTPSSVARSAPVRIPSDAAARRGRWPHVVGGGDDGDAMVPPHEIVARRAAAHSSVLEGAGRTLKGRDLRRVRNTVLRRTGFLD

SEQ ID NO: 29688 - protein, 147 aa, Triticum aestivum
MPTPVHGAATAADGDLLELDVLWPASSAPGLLAALPDDEAKKKQKRAGGPAVRSAARAVPEKAALTPSSVARSAPVRIPSDAAARRGRWPHVVGGGDDGDAMVPPHEIVARRAAAHSSVLEGAGRTLKGRDLRRVRNTVLRRTGFLD

SEQ ID NO: 29689 - protein, 79 aa, Triticum aestivum
MLRRGEGGGPTSSVAATTGTPWSRRTRSSRGARQRTARCWREPGGRSRAATSAAYATPSCAAPASSTERRRRVASSLSR

SEQ ID NO: 29690 - DNA, 1258 bp, Triticum aestivum
caatgtagcgatgtatgacccttcgctaaacaagtggcaccacccttctgttccccttgctcctgcaaacatagtaatgccagtggcatctgcaggtggccttgtgtgcttattggatcttagccacaggaacttctacatatgcaaccctcttacacaatcactaaaggaaattcctcccaggtcagtccaggcatggtcaagagtgtcagtggggatggtgctgaatggaagaagttctaatgagggttacaaagtgatgtggttgcgaaatgatggaaatcatgaagtttacgactcagtgcagaatatgtggtctcagccaggcgagtttcctccaagcatcaagctcccacttgctctaaatttcaggtcacagccagtcgcggttggcagcacgctgtacttcatgtgctcagaacccgagggtgttttgtcatatgatgtaagcactgggatttggattcatttcatcatcccgctgccgctgcatctgactgaccacacacttgccgagttccaggggaagatcatgcttgtgggtctgctgtgcaagaacgcagcaacctgcgtctgcatctgggagttgcagaagatgactctcctctggaaggaggtggacagaatgccaaatatctggtgcttagagttctacggtaagcacatgaggatgacctgcctgggcaacagcggcttgctcatgctctccttgaaggcgaagcggatgaaccgcctcgtgatgtacaaccttgtgagcaaagagtggcagaaggttcctgactgcatgctcccttgcagccgcaagaagcagtggatagcatgtggcacggcattcggtccgtgcccctctgcctcgccctgacggttctcagcaaaggttgacattgtcgctttcattttgttacacatttccgtgtcgtcgcgacttggcgagaaggttatctgttatgttattgtacaaattcatgtcaaagtggttgttttcgttacttgctgaagcaatcggaccgttttgttactgtcggttttatcatccgcgagaatttgtgtcggtgcaatggcaactgatcagttgaactgaatctgttaaggttactgcgatcaaaaggctgaagagcagacatctgttactgtattagaacttttatttgttccgttgttgtgtcatgttcagtatgtaatatttgtactaaatctcgggtcgtctcctcagcaaaactgagcctactctataataataacaactggagttgtattt

SEQ ID NO: 29691 - protein, 286 aa, Triticum aestivum
NVAMYDPSLNKWHHPSVPLAPANIVMPVASAGGLVCLLDLSHRNFYICNPLTQSLKEIPPRSVQAWSRVSVGMVLNGRSSNEGYKVMWLRNDGNHEVYDSVQNMWSQPGEFPPSIKLPLALNFRSQPVAVGSTLYFMCSEPEGVLSYDVSTGIWIHFIIPLPLHLTDHTLAEFQGKIMLVGLLCKNAATCVCIWELQKMTLLWKEVDRMPNIWCLEFYGKHMRMTCLGNSGLLMLSLKAKRMNRLVMYNLVSKEWQKVPDCMLPCSRKKQWIACGTAFGPCPSASP

SEQ ID NO: 29692 - protein, 283 aa, Triticum aestivum
MYDPSLNKWHHPSVPLAPANIVMPVASAGGLVCLLDLSHRNFYICNPLTQSLKEIPPRSVQAWSRVSVGMVLNGRSSNEGYKVMWLRNDGNHEVYDSVQNMWSQPGEFPPSIKLPLALNFRSQPVAVGSTLYFMCSEPEGVLSYDVSTGIWIHFIIPLPLHLTDHTLAEFQGKIMLVGLLCKNAATCVCIWELQKMTLLWKEVDRMPNIWCLEFYGKHMRMTCLGNSGLLMLSLKAKRMNRLVMYNLVSKEWQKVPDCMLPCSRKKQWIACGTAFGPCPSASP

SEQ ID NO: 29693 - protein, 261 aa, Triticum aestivum
MPVASAGGLVCLLDLSHRNFYICNPLTQSLKEIPPRSVQAWSRVSVGMVLNGRSSNEGYKVMWLRNDGNHEVYDSVQNMWSQPGEFPPSIKLPLALNFRSQPVAVGSTLYFMCSEPEGVLSYDVSTGIWIHFIIPLPLHLTDHTLAEFQGKIMLVGLLCKNAATCVCIWELQKMTLLWKEVDRMPNIWCLEFYGKHMRMTCLGNSGLLMLSLKAKRMNRLVMYNLVSKEWQKVPDCMLPCSRKKQWIACGTAFGPCPSASP

SEQ ID NO: 29694 - DNA, 1410 bp, Triticum aestivum
aactcgggcacgcctccaaaacaggaaggagacaaaaataaaaaataaaacgccgccgagttcttctccggcgacggcggcggcggcgggaaaaccctagggttgggagcccctgcgtgatcccatcgtacgccgatcccccgccatcgcgcccccccccccccccccccgcgccccgcggcgggcagagatgcggaaggcgatggggagcgtggacgatctgatcgaggaggccaaggtgcgcaccgtggcctgggctctcggcatcttcgccatctcctacttcctcacacatacaagtaaatcaatgtggacaaatgtccccatgtcgattcttatacttgcatttctccgttacgtctccttcaaagtggagttccgttggagaagtcagcctgtatctaagcagacatatttgtctcaagcgtcaaaacgacagttgtctgctaacgatcatcggatttcaactgtgccaccagtttcaagatggagaaggaaagttgattcgcctgctgttgaggctgcttttgaaagtttcattgataatgttctccgggactttgtcatggacttgtggtattctgatattactcctgatagagaggccccagaactgatacgtggcttaatactccatgcccttggtgaagtatcaggcagggcaaaggagatgaacctagttgacttgctaacaagggatatgtctgatttgattggaaaacatgtggatatgttccgaaaaaaccagtctgaaattggtgttgatgtcatgggaacattgtcttccgaggaaagagatgagcgactgaaacaacacctaatagtttcacaggaacttcaccctgcattgttatcttcggagcacgaatacaaggttcttcaagaactagttgggggcattatggccctagtgttgagaccacaagatgcacagagtccattggttcgctgcttctccagggaacttctgacttgcttagtcttgcagccagtgatgaacttcgcaagtcctatttatgtgaacgagctaattatctactttctaaacaacaaagacacaaacattggaggcagcgtaaacaagactagtactgtagtcacagtaacaaatgatcattcatcttataaaggaggttcgcagggtcatcaaatggaatcacaaaagttgtctgcagaatcaagtggctcagtactagcaagtagctccgggctgacttcccttgagggcgataagtcaaaagtgttagtggatgaccatgggaagaccgtccagcctcgtcaggcagattgggcactggtattagatgcagctactaaaaggcggtctcaggttcttgctccggagaatcttgagaacatgtgggctattgggagaaactaccaaaagaatatggtgaaagtggaacgtcc

SEQ ID NO: 29695 - protein, 406 aa, Triticum aestivum
MRKAMGSVDDLIEEAKVRTVAWALGIFAISYFLTHTSKSMWTNVPMSILILAFLRYVSFKVEFRWRSQPVSKQTYLSQASKRQLSANDHRISTVPPVSRWRRKVDSPAVEAAFESFIDNVLRDFVMDLWYSDITPDREAPELIRGLILHALGEVSGRAKEMNLVDLLTRDMSDLIGKHVDMFRKNQSEIGVDVMGTLSSEERDERLKQHLIVSQELHPALLSSEHEYKVLQELVGGIMALVLRPQDAQSPLVRCFSRELLTCLVLQPVMNFASPIYVNELIIYFLNNKDTNIGGSVNKTSTVVTVTNDHSSYKGGSQGHQMESQKLSAESSGSVLASSSGLTSLEGDKSKVLVDDHGKTVQPRQADWALVLDAATKRRSQVLAPENLENMWAIGRNYQKNMVKVER

SEQ ID NO: 29696 - protein, 402 aa, Triticum aestivum
MGSVDDLIEEAKVRTVAWALGIFAISYFLTHTSKSMWTNVPMSILILAFLRYVSFKVEFRWRSQPVSKQTYLSQASKRQLSANDHRISTVPPVSRWRRKVDSPAVEAAFESFIDNVLRDFVMDLWYSDITPDREAPELIRGLILHALGEVSGRAKEMNLVDLLTRDMSDLIGKHVDMFRKNQSEIGVDVMGTLSSEERDERLKQHLIVSQELHPALLSSEHEYKVLQELVGGIMALVLRPQDAQSPLVRCFSRELLTCLVLQPVMNFASPIYVNELIIYFLNNKDTNIGGSVNKTSTVVTVTNDHSSYKGGSQGHQMESQKLSAESSGSVLASSSGLTSLEGDKSKVLVDDHGKTVQPRQADWALVLDAATKRRSQVLAPENLENMWAIGRNYQKNMVKVER

SEQ ID NO: 29697 - protein, 367 aa, Triticum aestivum
MWTNVPMSILILAFLRYVSFKVEFRWRSQPVSKQTYLSQASKRQLSANDHRISTVPPVSRWRRKVDSPAVEAAFESFIDNVLRDFVMDLWYSDITPDREAPELIRGLILHALGEVSGRAKEMNLVDLLTRDMSDLIGKHVDMFRKNQSEIGVDVMGTLSSEERDERLKQHLIVSQELHPALLSSEHEYKVLQELVGGIMALVLRPQDAQSPLVRCFSRELLTCLVLQPVMNFASPIYVNELIIYFLNNKDTNIGGSVNKTSTVVTVTNDHSSYKGGSQGHQMESQKLSAESSGSVLASSSGLTSLEGDKSKVLVDDHGKTVQPRQADWALVLDAATKRRSQVLAPENLENMWAIGRNYQKNMVKVER

SEQ ID NO: 29698 - DNA, 1479 bp, Triticum aestivum
accgagcttttccttcttcaagcaacataggagtagtcttcgctctgctcctcctctcccccaccagctctcgtgctcgccgccagccccggacagcgccgccccagctcaccgggagggcagcaagcaatggagcggagcctcccccccgtccccgtccccgcggcgcgcgtgtagcgttttgatccgcgaggatggcgatggcggcctacagcaaccaagcgcaggcgatgatgagggactacctgctcgccgacccgctcgtcccctacacctccgtgctcatcggcgttttcctctgcaagatggcttatgacctcacacggatattgagctcattctacttcaagggctattcttctttgacaaaaatacagcgtgttgaatggaacaacaggggtatgtccagtgcacatgcgatctttatcgcagcagtatcagtatatcttgttgcatctacagatcttttctctgatcgccttaatgggcctattacattccgcagttcgatcatctccacctctgcattaggggtttctgtgggttacttcatcactgatcttgcaatgatcttctggttgtttccttcccttggtggaatggaatatgtactccatcatactctttctctggttgcaatagcctacacaatgttgtcaggggaggggcagttttacacatacatgattcttatttcagaaacaaccacccctgaaatcaacatgagatggttccttgacaccgctggattgaagaagtcgagcgcctacctgattaatggtattttgatatttgttgtatggctggtggcaaggatatttttgttcctgtatgtattttaccacatctatttgcactacagccagataatgaagatgcacgcatttggttattacctgacactgaccgtgccgtcggtgctctttgtcatgaacgcaatgtggtttacgaagattttgaaaggggtaatgaaaacactgtcgaaatggtcgtaatcggagtaggctttgcggaccagaagtgcaacataactgggtgttcctgccgtgctgcactgcgtgtgacttgaatatgtaaagttatgaatatatgaattaggctttgcagaccggaagtacaacgccaacttggttggtgttcctgcagtgctgcttgagaccttgatgtgcaaagttatgaacatatcggcgtaactagggaaagtgaatatgtaaaatactagcaaacaagttagattaggctaaatcgcgctattttccatgagctgggatttcctggccagtttggcactgtactgaagttcctattccaatcctgcaatctgtgtataccaggccaggagataattccattgcatctcttattcatactaaatttgataatctaatttgagatattatatataagctgttgttattccaagaaaaaaaaaaaaaaaaaagcttatcgataccgtcgacctcgagggggggcccggta

SEQ ID NO: 29699 - protein, 266 aa, Triticum aestivum
MAMAAYSNQAQAMMRDYLLADPLVPYTSVLIGVFLCKMAYDLTRILSSFYFKGYSSLTKIQRVEWNNRGMSSAHAIFIAAVSVYLVASTDLFSDRLNGPITFRSSIISTSALGVSVGYFITDLAMIFWLFPSLGGMEYVLHHTLSLVAIAYTMLSGEGQFYTYMILISETTTPEINMRWFLDTAGLKKSSAYLINGILIFVVWLVARIFLFLYVFYHIYLHYSQIMKMHAFGYYLTLTVPSVLFVMNAMWFTKILKGVMKTLSKWS

SEQ ID NO: 29700 - protein, 264 aa, Triticum aestivum
MAAYSNQAQAMMRDYLLADPLVPYTSVLIGVFLCKMAYDLTRILSSFYFKGYSSLTKIQRVEWNNRGMSSAHAIFIAAVSVYLVASTDLFSDRLNGPITFRSSIISTSALGVSVGYFITDLAMIFWLFPSLGGMEYVLHHTLSLVAIAYTMLSGEGQFYTYMILISETTTPEINMRWFLDTAGLKKSSAYLINGILIFVVWLVARIFLFLYVFYHIYLHYSQIMKMHAFGYYLTLTVPSVLFVMNAMWFTKILKGVMKTLSKWS

SEQ ID NO: 29701 - protein, 254 aa, Triticum aestivum
MMRDYLLADPLVPYTSVLIGVFLCKMAYDLTRILSSFYFKGYSSLTKIQRVEWNNRGMSSAHAIFIAAVSVYLVASTDLFSDRLNGPITFRSSIISTSALGVSVGYFITDLAMIFWLFPSLGGMEYVLHHTLSLVAIAYTMLSGEGQFYTYMILISETTTPEINMRWFLDTAGLKKSSAYLINGILIFVVWLVARIFLFLYVFYHIYLHYSQIMKMHAFGYYLTLTVPSVLFVMNAMWFTKILKGVMKTLSKWS

SEQ ID NO: 29702 - DNA, 1077 bp, Triticum aestivum
gaaaagaccccacagccgggaggaggagcccatcccgtcccaccccaccgccgcggccaaaaaccaatcacgcctcccggcggcggcccgcgcggcgccggccatggcggacgccgtcaagcagccgctcctccaccaccagcagccctacgcgtacccgtcgcacgccgcgtcggcctcctcccccgcgctcccctccgtgccccactccgggaccgccacccccacccccggggccgggggcgccgcctccgcctccttcgccgggggccgccgcttcccgggcggccttgacgtgcccaacctcaagaagcgcggcggcggcacgcgcagctggatccgcgtcgaggccgccacggcctccgtgcagacgctggaggtcgacaaggccaccatgatgcgccgctgcgagctccccgcccgcgacctccgcctcctcgacccgctcttcgtctacccctccaccgtcctcggccgcgagcgcgccatcgtcgtcaacctcgagcagatccgctgcgtcatcaccgccgacgaggtgctcctcctcaactccctcgacagctacgtcttccagtacgccgccgagctgcagcgccgcctcctccagcgcgccgagggcgacgagctccccttcgagttccgcgccctcgagctcgccctcgaggccgcctgctccttcctcgacgcccaggcagcagaattggaaattgaagcatatcccttactggatgagctaacatcaaaaattagtactctaaatctgaaacgtgttcggcggctaaaaagtagactagttgctctgaccagaagagtccagaaggtcagggatgaaatagaacagctaatggatgatgatggagatatggctgagatgtatcttaccgagaaaaagatgaggatggaatcatcatctgtgtttggtgatcaatcattggcgaccttcaacgcggcagccgctgggacttcagtttcagctcctgtgtctccagtgtcttcacccacagaatcacggaaattggagaaaacctacagcttgtgtagatgtttaaacacaataaagttggaactggagggggg

SEQ ID NO: 29703 - protein, 358 aa, Triticum aestivum
KRPHSREEEPIPSHPTAAAKNQSRLPAAARAAPAMADAVKQPLLHHQQPYAYPSHAASASSPALPSVPHSGTATPTPGAGGAASASFAGGRRFPGGLDVPNLKKRGGGTRSWIRVEAATASVQTLEVDKATMMRRCELPARDLRLLDPLFVYPSTVLGRERAIVVNLEQIRCVITADEVLLLNSLDSYVFQYAAELQRRLLQRAEGDELPFEFRALELALEAACSFLDAQAAELEIEAYPLLDELTSKISTLNLKRVRRLKSRLVALTRRVQKVRDEIEQLMDDDGDMAEMYLTEKKMRMESSSVFGDQSLATFNAAAAGTSVSAPVSPVSSPTESRKLEKTYSLCRCLNTIKLELEG

SEQ ID NO: 29704 - protein, 324 aa, Triticum aestivum
MADAVKQPLLHHQQPYAYPSHAASASSPALPSVPHSGTATPTPGAGGAASASFAGGRRFPGGLDVPNLKKRGGGTRSWIRVEAATASVQTLEVDKATMMRRCELPARDLRLLDPLFVYPSTVLGRERAIVVNLEQIRCVITADEVLLLNSLDSYVFQYAAELQRRLLQRAEGDELPFEFRALELALEAACSFLDAQAAELEIEAYPLLDELTSKISTLNLKRVRRLKSRLVALTRRVQKVRDEIEQLMDDDGDMAEMYLTEKKMRMESSSVFGDQSLATFNAAAAGTSVSAPVSPVSSPTESRKLEKTYSLCRCLNTIKLELEG

SEQ ID NO: 29705 - protein, 227 aa, Triticum aestivum
MMRRCELPARDLRLLDPLFVYPSTVLGRERAIVVNLEQIRCVITADEVLLLNSLDSYVFQYAAELQRRLLQRAEGDELPFEFRALELALEAACSFLDAQAAELEIEAYPLLDELTSKISTLNLKRVRRLKSRLVALTRRVQKVRDEIEQLMDDDGDMAEMYLTEKKMRMESSSVFGDQSLATFNAAAAGTSVSAPVSPVSSPTESRKLEKTYSLCRCLNTIKLELEG

SEQ ID NO: 29706 - DNA, 840 bp, Triticum aestivum
atatgttcttcattgtctccacactgattcttgtttttgtatttgctattgttgcgctgtacccaaaggtcaatggaagcttgctgcctgcatcagttataggcctttactgcacatacttgtgctacagcggactctccagtgagccaagggattatgagtgcaacgggcttcacaatcactccaaagctatgtcaactggtagccttacgttgggattatgtaccaccatcctttctgtggtctactctgctgttcgtgctggctcttctgcaaccgtgctctcagcaccagactcaccacgcgccggtgccgacaagccactgctgcccttcagcaaggcggacgaggaggagactaaggacgtgccaaagccggtgacgtactcctactcattcttccacctcatcttctccctggcgagcatgtactcagcgatgctcctgactggctggtcgacctcggttggcgagagcggtaagcttgtcgatgtcgggtggccgtctgtctgggtcaggatcgcgacccagtgggcaacggcaggtctgttcatctggtccctcgttgctcccctcctgttcccagacagggagttctagatcgacctggttacctgctaagagtgcatcatccgtttggagcacctacttatcgtatcgaacgtgtttcggctgtgatgatagctaagctgactatctgtatctggtctgtaatattgtgtgagcaaacccatggcaaggagctggtgtttgtgtgacgttgtcgagtctggtttgcataatgtgtgacctaaggcattgttgccagtatttcaacagtgaagatacgctctttggttgt

SEQ ID NO: 29707 - protein, 198 aa, Triticum aestivum
MFFIVSTLILVFVFAIVALYPKVNGSLLPASVIGLYCTYLCYSGLSSEPRDYECNGLHNHSKAMSTGSLTLGLCTTILSVVYSAVRAGSSATVLSAPDSPRAGADKPLLPFSKADEEETKDVPKPVTYSYSFFHLIFSLASMYSAMLLTGWSTSVGESGKLVDVGWPSVWVRIATQWATAGLFIWSLVAPLLFPDREF

SEQ ID NO: 29708 - protein, 135 aa, Triticum aestivum
MSTGSLTLGLCTTILSVVYSAVRAGSSATVLSAPDSPRAGADKPLLPFSKADEEETKDVPKPVTYSYSFFHLIFSLASMYSAMLLTGWSTSVGESGKLVDVGWPSVWVRIATQWATAGLFIWSLVAPLLFPDREF

SEQ ID NO: 29709 - DNA, 687 bp, Triticum aestivum
accactctcccattcccgtataacccccgcagccgccgccgctcctccccctctcttcctcccttggccaaattttgcgggaaacgcgacgccacccggagaaaccctcctcccgcacctcgcctcccaccctgccaaaaccctcgcccctcctcctcctcctcctcctacgatggccgcgccgacgcctccgcccgccgccgcccccgccgcggcgccaggaccgacgccgccggcgcaagtggtgggcaacgccttcgtgcagcagtactacaacatcctccaccagtcaccggagctcgtcttccgcttctaccaggaggccagccgcatcggccgccccgccaccaccggcgccgacatggacaccgtcaccaccatggaggcgattaacgagaagatcatgtccatggacatcgcgcgggcggagatcaggggggtggacgcgcaggagtcgctatgtggcggtgtgaccgtgctcgtcacgggccacctcacagggaaggacgacgtctgccgcgagttcgcgcagtccttcttcctcgcgccgcaggagaagggttacttcgtgctcaacgacatactacgttatgtcgggcagggtgaggccgacccgtcattgccgccacctcagcagcagccgccggcaccggagttggatgcagtggttgcccctgctgccgcctt

SEQ ID NO: 29710 - protein, 228 aa, Triticum aestivum
PLSHSRITPAAAAAPPPLFLPWPNFAGNATPPGETLLPHLASHPAKTLAPPPPPPPTMAAPTPPPAAAPAAAPGPTPPAQVVGNAFVQQYYNILHQSPELVFRFYQEASRIGRPATTGADMDTVTTMEAINEKIMSMDIARAEIRGVDAQESLCGGVTVLVTGHLTGKDDVCREFAQSFFLAPQEKGYFVLNDILRYVGQGEADPSLPPPQQQPPAPELDAVVAPAAA

SEQ ID NO: 29711 - protein, 171 aa, Triticum aestivum
MAAPTPPPAAAPAAAPGPTPPAQVVGNAFVQQYYNILHQSPELVFRFYQEASRIGRPATTGADMDTVTTMEAINEKIMSMDIARAEIRGVDAQESLCGGVTVLVTGHLTGKDDVCREFAQSFFLAPQEKGYFVLNDILRYVGQGEADPSLPPPQQQPPAPELDAVVAPAAA

SEQ ID NO: 29712 - protein, 130 aa, Triticum aestivum
TTLPFPYNPRSRRRSSPSLPPLAKFCGKRDATRRNPPPAPRLPPCQNPRPSSSSSSYDGRADASARRRPRRGARTDAAGASGGQRLRAAVLQHPPPVTGARLPLLPGGQPHRPPRHHRRRHGHRHHHGGD

SEQ ID NO: 29713 - DNA, 1211 bp, Triticum aestivum
atcccacactacattcctcttttcctctctggatctcttcctccagcctgctagctagctcacagaggcacgttgagagatcctcctgccatagcatccatgatgagcatgatggccgatttgagctgcggagcttccggtgtgaccgcgaatgatcatcagctggccgctccggctccggaggactcggcggtggcggggagcgagaagatggggaggggccggatcgagatcaagcgcatcgagaacaccaccaaccggcaggtcaccttctgcaagcgccgcaacggcctcctgaagaaggcgtacgagctctcggtgctctgcgacgccgaggtggccctcatcgtcttctccagccggccgcctctacgagtactccaacaacagtgtgaaagccaccattgagaggtacaaaaaggccaacagtgacacatccaactctggcacggttgcagaagtcaatgcccagtactaccagcaggagtcctccaagctgcgccagcagatcagtagcttgcaaaactcaaacagtaggtcactggtgagggattctgtcagcaccatgaccctgagggatcttaagcagctagaagggaggctggagaaaggcatagccaagataagagctagaaagaatgagctgatgtatgctgaagttgagtatatgcagaagagggaaatggagctacataacgataacatttacctgaggagcaaggtgtctgagaatgagaggggtcagcagccgatgaacatgatggcgtcgggatcgacgagcagcgaatacgatcacatggtcccgccgtatgattccagaaacttcctgcaggcgaacatcctgcagcagcagcagcagcagcagcagcattactcccaacagctgcagccaactgcccttcagctcggccagcagtacttcaactagttttgctccacacgctgcatgcagttcacacacgctagataatactgtcgccgtgctgtgtgcctgcaatgtcgttgctcgttctacggtggtaaaacagtagtaaccggaatttgtggatcaggtgcatgtggtacttgtaatgtaccgtatatctgtatttgctcatgagcaactaggtgctgctagtcgatctccacacaaaatggtagacttcggcgtgtaccattgtgttgcctatcttccccatgtattaattaattaccagcaatttgatttgtgt

SEQ ID NO: 29714 - protein, 120 aa, Triticum aestivum
MTLRDLKQLEGRLEKGIAKIRARKNELMYAEVEYMQKREMELHNDNIYLRSKVSENERGQQPMNMMASGSTSSEYDHMVPPYDSRNFLQANILQQQQQQQQHYSQQLQPTALQLGQQYFN

SEQ ID NO: 29715 - protein, 102 aa, Triticum aestivum
MMSMMADLSCGASGVTANDHQLAAPAPEDSAVAGSEKMGRGRIEIKRIENTTNRQVTFCKRRNGLLKKAYELSVLCDAEVALIVFSSRPPLRVLQQQCESHH

SEQ ID NO: 29716 - protein, 101 aa, Triticum aestivum
MSMMADLSCGASGVTANDHQLAAPAPEDSAVAGSEKMGRGRIEIKRIENTTNRQVTFCKRRNGLLKKAYELSVLCDAEVALIVFSSRPPLRVLQQQCESHH

SEQ ID NO: 29717 - DNA, 844 bp, Triticum aestivum
  misc_feature (556)..(556): n is a, c, g, or t
gcaacacagcacgccccaacaaccccaccgcccaagaacacgccacaggaaagagaagaatctccggcccgtcctgtcctaatcgcaccggcgagaacgcgggcgggctagctagctagctccggcgaggccggagacgggagacgcccatggagtacaagaggtcatcgcatgtggaggaggacgaggagctggaggaggaggaagaggaagaggaggacgatgaggaggaggaggacgaggagggggcgatgcgggaccgtcggcaccagcaccagcaccagcacccgcaccatcatcgccaccactacaccatggcgccggccgcggccgcgcccccgcagcacctgcacatgcagggccaggctccgcaggttcttggctcgcctgccgcggctgcctcctcgccctcctccttgatggaggccgcggctttctccaggcccctcctgcctcccaactcctccctcgtctcctcgccgccgccaccgcaggcgccgcccggcttcctccagccccagcaccagcatccccaccgtgagaagggtggaccgcngagagggagcgggagaggacggtggaggcgcctggggaggcccaccgtcagcagcagcagcagccgcagccgcagcaccagcagcgccatcaggagccggcgaggaatggcgtgcttggcggtggcaccatgcctcccccgccgcctacgcttgccatcgtgaccggcggcgccacaagggcgccgggcgagcacggtggcgcctcgggcccggagcccctgccgtgtaggtacagggagtgcctgcggaaccacgccgcgcggatgggcgcgcacgtgctcgacggc

SEQ ID NO: 29718 - protein, 189 aa, Triticum aestivum
  misc_feature (136)..(136): Xaa can be any naturally occurring amino acid
MEYKRSSHVEEDEELEEEEEEEEDDEEEEDEEGAMRDRRHQHQHQHPHHHRHHYTMAPAAAAPPQHLHMQGQAPQVLGSPAAAASSPSSLMEAAAFSRPLLPPNSSLVSSPPPPQAPPGFLQPQHQHPHREKGGPXRGSGRGRWRRLGRPTVSSSSSRSRSTSSAIRSRRGMACLAVAPCLPRRLRLPS

SEQ ID NO: 29719 - protein, 155 aa, Triticum aestivum
  misc_feature (102)..(102): Xaa can be any naturally occurring amino acid
MRDRRHQHQHQHPHHHRHHYTMAPAAAAPPQHLHMQGQAPQVLGSPAAAASSPSSLMEAAAFSRPLLPPNSSLVSSPPPPQAPPGFLQPQHQHPHREKGGPXRGSGRGRWRRLGRPTVSSSSSRSRSTSSAIRSRRGMACLAVAPCLPRRLRLPS

SEQ ID NO: 29720 - protein, 134 aa, Triticum aestivum
  misc_feature (81)..(81): Xaa can be any naturally occurring amino acid
MAPAAAAPPQHLHMQGQAPQVLGSPAAAASSPSSLMEAAAFSRPLLPPNSSLVSSPPPPQAPPGFLQPQHQHPHREKGGPXRGSGRGRWRRLGRPTVSSSSSRSRSTSSAIRSRRGMACLAVAPCLPRRLRLPS

SEQ ID NO: 29721 - DNA, 1644 bp, Triticum aestivum
atccaattccaaaaccacgcactagtcgacgacggccacctcgccgccgccgtaacgcgcacggtctcaccttaccactcattaccgcgcttccagttccgtacgcctcatgccgccggccgcgcgggtcaaacctcccaaaacatgaaactcggtgcaatggggtcgtgccgcttgcccccggccatcgcggccgccgcgctggccgcggctgcgctgctggtgctcttccgcgcctccccgtacgggctcgcctacccccgcgcgggcgtccagccagggccgccgctcgtggcgaggggtcccgggagcccgccctccttcgcgtactggatatccggcacgggcggagagggccgcagggtcctcaggctgctcagggcggtgtatcacccgaggaaccggtacctgctgcacctggacgcgggggcgtcgcgggacgagcggacggagctggccgccgctgcgcgggacgaggcggcgtggagggagttctcaaacgtcgacgtggtaggggagagctacgcggtagacaggacgggctcctcggtgctcgccgcggcgctgcacggcgccgccgtgctgctcaggattggggctgactgggactggttcgtcacgctcagctcctgggactatcctctcgtcacgcaggacgatctcttttatgcattttcttctgtaccaaggcacctcaactttattgatcacacaagtaacctcggatggaaagagcatgaaaggtttgaaaaacttattgtcgacgcaagtctatatatggacaagaatacccagccctttcctgcgacagaaacaagacaaatgcctgaggcattcaagatattcacaggctctccatgggtaattctgagtaggaacttcactgaacattgcgtgcatggctgggacaacctcccccgcaggctactgatgtactttgccaacgctgcttactccatggaatcatatttccagactgtcatatgcagttcatctgactttagaaacaccactgtcaacggcgatctacgtttctttgtttgggacgatcctcctgggctggagccgcgtattcttgatgaaacgcatctcgataacatggtgaacagcagcgctgccttcgcaaggcggtttgtggaggaagcaccagtgctgaagaaggttgatgatgagctactgaaccgttcttcggcccagttggttcctggtgtgtggtgccggaatttgggtgaaaagcaaggaggcggggatgtggaggcgtgctcggaatggggcgacattaacgttgtcaggcctgggcgtgctggagagcggttgaggcgcttcatatctgagatcattcatataagaggatgcacggtcgcagcagctagctgaaagccgaacccaccacaagtctggaattctttgtcaagagagcagttaaacaaagaatttaaggaacacattcttcgctgcaggtaaagcacgcgttgctgcagtcgacagttctaccaggctgcataataccactgacgctccttctacacaaactaggtacaagtattttcgaacgaagggaactgtataaagctgtaactgatttgccctttttttaaccatatggataggacatagaataggttacactgcagtagttacagt

SEQ ID NO: 29722 - protein, 458 aa, Triticum aestivum
IQFQNHALVDDGHLAAAVTRTVSPYHSLPRFQFRTPHAAGRAGQTSQNMKLGAMGSCRLPPAIAAAALAAAALLVLFRASPYGLAYPRAGVQPGPPLVARGPGSPPSFAYWISGTGGEGRRVLRLLRAVYHPRNRYLLHLDAGASRDERTELAAAARDEAAWREFSNVDVVGESYAVDRTGSSVLAAALHGAAVLLRIGADWDWFVTLSSWDYPLVTQDDLFYAFSSVPRHLNFIDHTSNLGWKEHERFEKLIVDASLYMDKNTQPFPATETRQMPEAFKIFTGSPWVILSRNFTEHCVHGWDNLPRRLLMYFANAAYSMESYFQTVICSSSDFRNTTVNGDLRFFVWDDPPGLEPRILDETHLDNMVNSSAAFARRFVEEAPVLKKVDDELLNRSSAQLVPGVWCRNLGEKQGGGDVEACSEWGDINVVRPGRAGERLRRFISEIIHIRGCTVAAAS

SEQ ID NO: 29723 - protein, 410 aa, Triticum aestivum
MKLGAMGSCRLPPAIAAAALAAAALLVLFRASPYGLAYPRAGVQPGPPLVARGPGSPPSFAYWISGTGGEGRRVLRLLRAVYHPRNRYLLHLDAGASRDERTELAAAARDEAAWREFSNVDVVGESYAVDRTGSSVLAAALHGAAVLLRIGADWDWFVTLSSWDYPLVTQDDLFYAFSSVPRHLNFIDHTSNLGWKEHERFEKLIVDASLYMDKNTQPFPATETRQMPEAFKIFTGSPWVILSRNFTEHCVHGWDNLPRRLLMYFANAAYSMESYFQTVICSSSDFRNTTVNGDLRFFVWDDPPGLEPRILDETHLDNMVNSSAAFARRFVEEAPVLKKVDDELLNRSSAQLVPGVWCRNLGEKQGGGDVEACSEWGDINVVRPGRAGERLRRFISEIIHIRGCTVAAAS

SEQ ID NO: 29724 - protein, 405 aa, Triticum aestivum
MGSCRLPPAIAAAALAAAALLVLFRASPYGLAYPRAGVQPGPPLVARGPGSPPSFAYWISGTGGEGRRVLRLLRAVYHPRNRYLLHLDAGASRDERTELAAAARDEAAWREFSNVDVVGESYAVDRTGSSVLAAALHGAAVLLRIGADWDWFVTLSSWDYPLVTQDDLFYAFSSVPRHLNFIDHTSNLGWKEHERFEKLIVDASLYMDKNTQPFPATETRQMPEAFKIFTGSPWVILSRNFTEHCVHGWDNLPRRLLMYFANAAYSMESYFQTVICSSSDFRNTTVNGDLRFFVWDDPPGLEPRILDETHLDNMVNSSAAFARRFVEEAPVLKKVDDELLNRSSAQLVPGVWCRNLGEKQGGGDVEACSEWGDINVVRPGRAGERLRRFISEIIHIRGCTVAAAS

SEQ ID NO: 29725 - DNA, 664 bp, Triticum aestivum
tttattagttttctagttttcttgttcacagggtgcatctaaagtcgaatgtagaaagtccatggcccgcaccgcacacaagcctcttcgtatcttcgagagagaaaaaaaatcatccttcgagagatttcgcgggggcgcgggttcgtgaggagctagggtttgggagggagcagcggagaagatgatcgaggtggtgctgaacgacaggctggggaagaaggtgcgggtgaagtgcaacgaggacgacaccatcggcaacctgaagaagctcgtcgcggcgcagacggggaccaggcccgagaagatccgcatccagaagtggtacaccatctacaaggaccacatcaccctcggcgactacgagatccacgacggcatgggcctcgagctctactacaactagagtctagaagtcccgctgtcttaagaaactatctggaatccaacgaaccatacaagactgctggatgtaccaatgactgccgacctgaaatcctgaatgcagccatattatcaaccggcaaatgtgatgtgatgtgacgctacttgtacactacatataacataatgtttgtgacctttgtgtgataaccgctgtattttttagttatggcaagttcgttctgcttacgatttgtactgcatcagaggtgtgttgccc

SEQ ID NO: 29726 - protein, 73 aa, Triticum aestivum
MIEVVLNDRLGKKVRVKCNEDDTIGNLKKLVAAQTGTRPEKIRIQKWYTIYKDHITLGDYEIHDGMGLELYYN

SEQ ID NO: 29727 - DNA, 851 bp, Triticum aestivum
gaacccccagcagttcactccactcctagtcctgctaccaccagcaagaggctggctgtgggctgatccatgaggcgcctcgtgttcgcggagctcgtggtcctcctcgccgcggcgctcctgctccccgtcgtgatctgctgccggcgctcgagcggcggcgccacgcggccgctgcccgtctcggagcagcccggcgccggtgccaacgccagcaggaagaagcgccgcgtcgagcggctgcggcgggcgctccacgccctgcgcgtctggtgccgccgctcccgcgtcgagccggcggcctccgcgtccgcgtctccggacgacggcgcgcaggcgcagggggaggttcagctggagcagatcgccgccccggcggcggcggcggagcaggcggggcacgaggaggagggtgtggcggcgtggcgcgagcgctggttcggcggccccgggtcgcgcgcgctctacaccatcgaggaggcgtcggagacggagggcgacgtggagagccagtacggcgccgagcccgagacgccgttctacacgccgccggcctcgccgccgcacgatggagagcaagcagaccagccggagcacggcgaggccagttagttagccggcgatgcgccgctcgttccctgtgtgtcatagattcgacaattttctttgggttctttcgcgcatcagcagcagcagaaagcagcggctgttgaagcaaggcgtgcatgataggattggctagtcagtactaattctttctttcccctccttgtttccggaggcaggagtggatggatggacatgcatgcagattaatactactacggcgaatctgcatgtattaatctgct

SEQ ID NO: 29728 - protein, 180 aa, Triticum aestivum
MRRLVFAELVVLLAAALLLPVVICCRRSSGGATRPLPVSEQPGAGANASRKKRRVERLRRALHALRVWCRRSRVEPAASASASPDDGAQAQGEVQLEQIAAPAAAAEQAGHEEEGVAAWRERWFGGPGSRALYTIEEASETEGDVESQYGAEPETPFYTPPASPPHDGEQADQPEHGEAS

SEQ ID NO: 29729 - DNA, 1066 bp, Triticum aestivum
atcaagaagaggaagcgaggagccaagaaccacacaccctcctaaacgcctccgcctcctccccacgggcgcacccgagctccagccctagcatttccgctcccccctctctcccttgtttctccttctgcaggaaatggaggtggtggatttggtgtcgtccgactccgaggacgaggcgtgcgcgcactcgcctgatcggaagcgtcccgcctgggagcccgcggatccatcccgcggccccgggagtcttcccgagcagacaagcagaatggcctggccgccgcagcagccaagcagaatggcctggccgccgcagcagccaagtcaggcggtgaagaaggacaaggagaaggcaggcgagggggggagcgcgtgggcagcaggacccccttcgctcaggggaggatcgcatgcttctagtgccggtatcttgggagctaggcctgcggggtgggattcatggagtgcagcggcacacaaatctagagatgaaagaagtgaaacgcccgagtgttgttggggaccttggggtgatgagatttgcagatcagtctgtgtgcccaaggaagatggtgctgcgatgcctggacagagctgtatggccattcctgagctactgatggaagacagtagcgcatggctgtcgaggatcaaggggctccatttcccacttcctgatgagagccagttgaaggccaggcaaattcattcagatgagatgcttgctcttaagcttcaagagcagttcaaccaggaacagccaggctcgcaatcttcccagcaggttgatacgactctagcttggacactgcaagagcaagatgctgcgcgtgccagaatcgctgcgagagagggccaatctagttctaggcagagggaccgcttaatggcacacttgtattcgtatggctggcgctcgcaagttcaaggttatccttcatggccacctagtgacacatcagctccaataacaagcagacggtggttgccaagaaacagcagcccaggatcagagcaacaaaatatgatatctctcaattgaccaaagggtgttttggacaag

SEQ ID NO: 29730 - protein, 302 aa, Triticum aestivum
MEVVDLVSSDSEDEACAHSPDRKRPAWEPADPSRGPGSLPEQTSRMAWPPQQPSRMAWPPQQPSQAVKKDKEKAGEGGSAWAAGPPSLRGGSHASSAGILGARPAGWDSWSAAAHKSRDERSETPECCWGPWGDEICRSVCVPKEDGAAMPGQSCMAIPELLMEDSSAWLSRIKGLHFPLPDESQLKARQIHSDEMLALKLQEQFNQEQPGSQSSQQVDTTLAWTLQEQDAARARIAAREGQSSSRQRDRLMAHLYSYGWRSQVQGYPSWPPSDTSAPITSRRWLPRNSSPGSEQQNMISLN

SEQ ID NO: 29731 - protein, 257 aa, Triticum aestivum
MAWPPQQPSRMAWPPQQPSQAVKKDKEKAGEGGSAWAAGPPSLRGGSHASSAGILGARPAGWDSWSAAAHKSRDERSETPECCWGPWGDEICRSVCVPKEDGAAMPGQSCMAIPELLMEDSSAWLSRIKGLHFPLPDESQLKARQIHSDEMLALKLQEQFNQEQPGSQSSQQVDTTLAWTLQEQDAARARIAAREGQSSSRQRDRLMAHLYSYGWRSQVQGYPSWPPSDTSAPITSRRWLPRNSSPGSEQQNMISLN

SEQ ID NO: 29732 - protein, 247 aa, Triticum aestivum
MAWPPQQPSQAVKKDKEKAGEGGSAWAAGPPSLRGGSHASSAGILGARPAGWDSWSAAAHKSRDERSETPECCWGPWGDEICRSVCVPKEDGAAMPGQSCMAIPELLMEDSSAWLSRIKGLHFPLPDESQLKARQIHSDEMLALKLQEQFNQEQPGSQSSQQVDTTLAWTLQEQDAARARIAAREGQSSSRQRDRLMAHLYSYGWRSQVQGYPSWPPSDTSAPITSRRWLPRNSSPGSEQQNMISLN

SEQ ID NO: 29733 - DNA, 1951 bp, Triticum aestivum
aactccaaaagagcagataagcccctcttcgtcccgcggtgcttcggctccgaaggcagccaccccgcaccgccggcggagccaccaacgccaccatcccaccgcaccgcccccatggcctccgccgcctccctcgccgtctcccaccacctcctccccgccgcgcccgcccgctcgcagccccgtccgcccgcccgcctcgtccgcctcccccgcacccgcctccgggtcgccgccatctcctcgtccccctcgcccccctcgcggcgcgaccgcgccgcggccggcctcgagcggtgcctggccgcgactccggcgccggccttcgccccgccggagatgaagggcgggagccagcgcgggtcgttcggggccgccacgctccagaaggccaagctcgacctctcccaaaagaggctcaaaggcgtccagcccgagctggcatctggtggtggtggtggagacaatgggaaacgaattggctatggtggtggtaatagtggagatgatgatggtgatgatgatgattacttcgaagactctgacgatggagatgaagaaagtggatttttcagaaggcgtataattatacaagagctttttaagagggagtttgttgatgccgttcttcaagagtggtacaaaacaatgagtaatttgccagctggtttgcgtcaagctcatgagatgggtttggtcagctcttctcagatggtcaaatatttgtcaatgtttggaaggcccacaaaggctagatatttctctcgagcctttccggacttcttctcaagagaccttgttggaagaatgcttgcagatccatctttcctgcataagatgacctttgagttgctagctaccgttagtacatctgtttgttgggagatgaaaaatcgcaaggagaggttccaagaagaatgggatttggtgtttctcaatgtagttactgccacagtttgcaatttagctgttttcagttcacttgcgccatgccgctcatatatgatccagaaacttcccaataacatatttgagaagagctatcctttcatgagacagtttggtcttctaagaagaacccagtccctcttcagcaaggctgctgagctttgcctaggtgggctaattgttggctccattcaaggtggtctatcgaatatcctttctgctggaagagaaagacggttgtcgatgactgttccttctatcagcaacaatgctcttagttatggagcttattatgggctttatgcaaatctgcggtatcaaattttatgtggtcttgatagatcaatggcaaaccattttgatgtccttggtgttacaatctttttcggcacagcgatgaggttgctgaatattcaaattggggagctatcgagacgtgcctggcttggtgagggagcagatctgcttaactcggataatttgttgagaacatacaatggcccagcagcagagcttggcatcaatcaacaggcagagtggttcatgtccaagaatgcaattgtatctggcttagaacttctaggcatcaagtatggtgcacctaaagatgcctctccaaagcttcggcgaaaaagaattgtccgaaagaagtagggtggatgagggaaagcctaactatacaaacgctgagctcgatggttttgatacccatgctggaacagttttgcctcagttccgccatgccttgtgttgcctatcgaagtaggatggatgaggggaaaattgtaacttgtgttctagttgcaatttggggccaagatcaaaggctttcaattttttactcggaggcgattcggccggttcgctgaaggtccttaccattcttctgtattgttttgagcaaaagtagacctccaaagttctaactgtaatttctagattatagatagtatgttattcactatatattttcttcattctttttgaaatggtgttttacttc

SEQ ID NO: 29734 - protein, 533 aa, Triticum aestivum
NSKRADKPLFVPRCFGSEGSHPAPPAEPPTPPSHRTAPMASAASLAVSHHLLPAAPARSQPRPPARLVRLPRTRLRVAAISSSPSPPSRRDRAAAGLERCLAATPAPAFAPPEMKGGSQRGSFGAATLQKAKLDLSQKRLKGVQPELASGGGGGDNGKRIGYGGGNSGDDDGDDDDYFEDSDDGDEESGFFRRRIIIQELFKREFVDAVLQEWYKTMSNLPAGLRQAHEMGLVSSSQMVKYLSMFGRPTKARYFSRAFPDFFSRDLVGRMLADPSFLHKMTFELLATVSTSVCWEMKNRKERFQEEWDLVFLNVVTATVCNLAVFSSLAPCRSYMIQKLPNNIFEKSYPFMRQFGLLRRTQSLFSKAAELCLGGLIVGSIQGGLSNILSAGRERRLSMTVPSISNNALSYGAYYGLYANLRYQILCGLDRSMANHFDVLGVTIFFGTAMRLLNIQIGELSRRAWLGEGADLLNSDNLLRTYNGPAAELGINQQAEWFMSKNAIVSGLELLGIKYGAPKDASPKLRRKRIVRKK

SEQ ID NO: 29735 - protein, 495 aa, Triticum aestivum
MASAASLAVSHHLLPAAPARSQPRPPARLVRLPRTRLRVAAISSSPSPPSRRDRAAAGLERCLAATPAPAFAPPEMKGGSQRGSFGAATLQKAKLDLSQKRLKGVQPELASGGGGGDNGKRIGYGGGNSGDDDGDDDDYFEDSDDGDEESGFFRRRIIIQELFKREFVDAVLQEWYKTMSNLPAGLRQAHEMGLVSSSQMVKYLSMFGRPTKARYFSRAFPDFFSRDLVGRMLADPSFLHKMTFELLATVSTSVCWEMKNRKERFQEEWDLVFLNVVTATVCNLAVFSSLAPCRSYMIQKLPNNIFEKSYPFMRQFGLLRRTQSLFSKAAELCLGGLIVGSIQGGLSNILSAGRERRLSMTVPSISNNALSYGAYYGLYANLRYQILCGLDRSMANHFDVLGVTIFFGTAMRLLNIQIGELSRRAWLGEGADLLNSDNLLRTYNGPAAELGINQQAEWFMSKNAIVSGLELLGIKYGAPKDASPKLRRKRIVRKK

SEQ ID NO: 29736 - protein, 420 aa, Triticum aestivum
MKGGSQRGSFGAATLQKAKLDLSQKRLKGVQPELASGGGGGDNGKRIGYGGGNSGDDDGDDDDYFEDSDDGDEESGFFRRRIIIQELFKREFVDAVLQEWYKTMSNLPAGLRQAHEMGLVSSSQMVKYLSMFGRPTKARYFSRAFPDFFSRDLVGRMLADPSFLHKMTFELLATVSTSVCWEMKNRKERFQEEWDLVFLNVVTATVCNLAVFSSLAPCRSYMIQKLPNNIFEKSYPFMRQFGLLRRTQSLFSKAAELCLGGLIVGSIQGGLSNILSAGRERRLSMTVPSISNNALSYGAYYGLYANLRYQILCGLDRSMANHFDVLGVTIFFGTAMRLLNIQIGELSRRAWLGEGADLLNSDNLLRTYNGPAAELGINQQAEWFMSKNAIVSGLELLGIKYGAPKDASPKLRRKRIVRKK

SEQ ID NO: 29737 - DNA, 724 bp, Triticum aestivum
atgtccatcaaccatcaaggcaataatccacgtacggttgtgagcggttcaccagcaagatacatagaggttacagagaagccagcagcagcaagcaagattgagcattcacggatggtggccggggccgtggtgcaggcgtcatcggtgttcgccgccttcgacaaggacggcgacggcaaggtgtcggccgccgagctgcgcggctccatgatggcggcgctgggcgaggaggtttccgaggaggaggccgcggcgatcctggccacggtggacgccgacggcgacgggctgctggaccaggaggagttctcccggctcgggctcggcgccgccggagacaacggtggggcggccggagacgacgacgacgacgaggtgaggcggcggtgcctgaaggaggcgttcgccatgtacgcgacggggggcggcgaggagggcgccaggatcacgccggcgagcctgaggcggatgctgggcaagctgctggggtccgagaagatggggctggaggagtgcagggccatgatctgcaggtttgacctcaacggcgacggcgtcctctccttcgacgagttcagggtcatgatgatggccaatttgtaaaggaaggatggtttcatttcattcgttcgcttttctcttctgtatttttgacatgtggttgcagttgttcacatgatggacgtttcaattgtatgttgaggcttgggtgtgatgcttg

SEQ ID NO: 29738 - protein, 201 aa, Triticum aestivum
MSINHQGNNPRTVVSGSPARYIEVTEKPAAASKIEHSRMVAGAVVQASSVFAAFDKDGDGKVSAAELRGSMMAALGEEVSEEEAAAILATVDADGDGLLDQEEFSRLGLGAAGDNGGAAGDDDDDEVRRRCLKEAFAMYATGGGEEGARITPASLRRMLGKLLGSEKMGLEECRAMICRFDLNGDGVLSFDEFRVMMMANL

SEQ ID NO: 29739 - protein, 163 aa, Triticum aestivum
MVAGAVVQASSVFAAFDKDGDGKVSAAELRGSMMAALGEEVSEEEAAAILATVDADGDGLLDQEEFSRLGLGAAGDNGGAAGDDDDDEVRRRCLKEAFAMYATGGGEEGARITPASLRRMLGKLLGSEKMGLEECRAMICRFDLNGDGVLSFDEFRVMMMANL

SEQ ID NO: 29740 - protein, 131 aa, Triticum aestivum
MMAALGEEVSEEEAAAILATVDADGDGLLDQEEFSRLGLGAAGDNGGAAGDDDDDEVRRRCLKEAFAMYATGGGEEGARITPASLRRMLGKLLGSEKMGLEECRAMICRFDLNGDGVLSFDEFRVMMMANL

SEQ ID NO: 29741 - DNA, 810 bp, Triticum aestivum
catccccaactggcaacgtgccaccatcccgccctcaaccggcgaccggagacgccgccccgccccgccaccggccgccgccgttcccgccgcatcatcgaccgcgccgctgccgccccgccaccgaccgctgtcgccgccgcccaccatcgaccgccgttgccgccccgtccccaacaggagacgctgccgccgccggagacccgctacaccgcgccacctacggaggccctgttttctgtgccgtcgcgcctccaatggccaggatccgcgccgccacgcctccattggcctggatccgcaccgccgcgcaccgaaacagggcccgtccacctctgccgcaacagtctaccctcccgcagctgggggcgcgtgtgatggctgccatcggtggcagcgtgcccagatgcctccctcccccacggtgcagcaagctcgaggccgtcaccagactcccacctggtcgtggacatctcccctcctgccgctgcacgggctccaccatggacgcccccactcctccaccccccgagatttctgcacctacatacggccgtgatctgctgcccacccgtggttgcgtcgagcaacatcttgtgctccccaacgcgtgaggtgctgctgcctgctagtgctacaagcacgcgagttacgtaccctacctctctctcggatcagtgcaacaaggagcctcgtactttgatgatgaattagttgtacacgagcgtgttgtccatgagtacgttggtgcagatctcatgtgcttttgtatgcacgtgtgatgatgaattggttgagcattgcacccct

SEQ ID NO: 29742 - protein, 203 aa, Triticum aestivum
SPTGNVPPSRPQPATGDAAPPRHRPPPFPPHHRPRRCRPATDRCRRRPPSTAVAAPSPTGDAAAAGDPLHRATYGGPVFCAVAPPMARIRAATPPLAWIRTAAHRNRARPPLPQQSTLPQLGARVMAAIGGSVPRCLPPPRCSKLEAVTRLPPGRGHLPSCRCTGSTMDAPTPPPPEISAPTYGRDLLPTRGCVEQHLVLPNA

SEQ ID NO: 29743 - protein, 185 aa, Triticum aestivum
IPNWQRATIPPSTGDRRRRPAPPPAAAVPAASSTAPLPPRHRPLSPPPTIDRRCRPVPNRRRCRRRRPATPRHLRRPCFLCRRASNGQDPRRHASIGLDPHRRAPKQGPSTSAATVYPPAAGGACDGCHRWQRAQMPPSPTVQQARGRHQTPTWSWTSPLLPLHGLHHGRPHSSTPRDFCTYIRP

SEQ ID NO: 29744 - protein, 125 aa, Triticum aestivum
HPQLATCHHPALNRRPETPPRPATGRRRSRRIIDRAAAAPPPTAVAAAHHRPPLPPRPQQETLPPPETRYTAPPTEALFSVPSRLQWPGSAPPRLHWPGSAPPRTETGPVHLCRNSLPSRSWGRV

SEQ ID NO: 29745 - protein, 118 aa, Triticum aestivum
MARIRAATPPLAWIRTAAHRNRARPPLPQQSTLPQLGARVMAAIGGSVPRCLPPPRCSKLEAVTRLPPGRGHLPSCRCTGSTMDAPTPPPPEISAPTYGRDLLPTRGCVEQHLVLPNA

SEQ ID NO: 29746 - DNA, 1725 bp, Triticum aestivum
attactacgactgcctttcccttcttccaagcaaaccgctcttcgcgtctcaggttcctccgcacaccgctccgccacagtcgacggatcggaaccgcagacccgcccccgccaccaaaccctagcccgccgccccgccgcccgcgatgtcggccgcggccgtcgcgccgagccctgcggcgccgctcccgtcggcgcccccgccgtcctaccccgcggcgccccccgccccctccgccgaggacgacgacgacctctacggccgcctcaagtccctccagcgccacatggagttcgtcgagatccaggaggagtacgtcaaggacgagcagaagaacctgaagcgcgagctgctgcgcgcgcaggaggaggtcaagcggatccagtccgtgccgctcgtcatcggccagttcatggagatggtcgacggcaacaacggcatcgtcggctccaccaccggcagcaactactacgtgcgcatcctcagcaccatcaaccgcgagctgctcaagccctccgcctccgtcgccctgcaccgccactccaacgccctcgtcgacgtgctgccccccgaggccgactccagcatctcgctcctcgcctcgtcggagaagcccaacgtcctgtactcggacattggaggatgtgatatccaaaaacaagaaattcgggaggcagttgagctaccattgacacaccatgaattgtacaagcagattggtattgatccaccaagaggggtgctgctctatggtcctccaggcactggcaagaccatgcttgctaaagctgtggcgcatcacactactgctgcttttatcagagtggttggttcagagtttgtgcagaagtacttgggtgagggcccaaggatggttcgagatgtattccgcttagctaaagagaatgccccggctataatattcattgatgaggttgatgctatagccactgctcgattcgatgctcagaccggggctgaccgagaagttcagcgtattctgatggagctactgaatcagatggatggatttgatcaaacagtgaatgtgaaggttataatggcaaccaatcgggcagatactctagatcctgctctgttgcgtccaggaagactggacaggaaaatcgagttccccctgccggaccggaggcagaagaggcttgttttccaagtttgtactgctaagatgaacttgagtgacgaggttgatttggaagattatgtctccagacctgataaaatcagtgctgctgatatcactgctatttgccaggaagctggcatgcatgctgtccgcaaaaatcggtatgttatcctccccaaggacttcgagaagggttaccgaaccaacgtcaagaagcctgagtcagactttgacttctacaaataaggcagcaaacttttaaagaggatgctttatttcctacaggcgacatgattaacactctagatgaatttgtggatagtcgcctgatagtaatatcgttgtatccccgtgctcgtgtagtttgcacgttcagtctcaccagtgttgttaagctacttgtctgtacaattccttcctaaagtttcgcttgaccattttgcgcttttggaggctgtgatttgtcttccaaaggagaatcgagtacccccttttcgttcttaaagtttaaagtgcattaatctttttgattgaatttcgaaaaaaaaaaaaaaaaaagcttatcgataccgtcgac

SEQ ID NO: 29747 - protein, 415 aa, Triticum aestivum
MSAAAVAPSPAAPLPSAPPPSYPAAPPAPSAEDDDDLYGRLKSLQRHMEFVEIQEEYVKDEQKNLKRELLRAQEEVKRIQSVPLVIGQFMEMVDGNNGIVGSTTGSNYYVRILSTINRELLKPSASVALHRHSNALVDVLPPEADSSISLLASSEKPNVLYSDIGGCDIQKQEIREAVELPLTHHELYKQIGIDPPRGVLLYGPPGTGKTMLAKAVAHHTTAAFIRVVGSEFVQKYLGEGPRMVRDVFRLAKENAPAIIFIDEVDAIATARFDAQTGADREVQRILMELLNQMDGFDQTVNVKVIMATNRADTLDPALLRPGRLDRKIEFPLPDRRQKRLVFQVCTAKMNLSDEVDLEDYVSRPDKISAADITAICQEAGMHAVRKNRYVILPKDFEKGYRTNVKKPESDFDFYK

SEQ ID NO: 29748 - protein, 368 aa, Triticum aestivum
MEFVEIQEEYVKDEQKNLKRELLRAQEEVKRIQSVPLVIGQFMEMVDGNNGIVGSTTGSNYYVRILSTINRELLKPSASVALHRHSNALVDVLPPEADSSISLLASSEKPNVLYSDIGGCDIQKQEIREAVELPLTHHELYKQIGIDPPRGVLLYGPPGTGKTMLAKAVAHHTTAAFIRVVGSEFVQKYLGEGPRMVRDVFRLAKENAPAIIFIDEVDAIATARFDAQTGADREVQRILMELLNQMDGFDQTVNVKVIMATNRADTLDPALLRPGRLDRKIEFPLPDRRQKRLVFQVCTAKMNLSDEVDLEDYVSRPDKISAADITAICQEAGMHAVRKNRYVILPKDFEKGYRTNVKKPESDFDFYK

SEQ ID NO: 29749 - protein, 326 aa, Triticum aestivum
MEMVDGNNGIVGSTTGSNYYVRILSTINRELLKPSASVALHRHSNALVDVLPPEADSSISLLASSEKPNVLYSDIGGCDIQKQEIREAVELPLTHHELYKQIGIDPPRGVLLYGPPGTGKTMLAKAVAHHTTAAFIRVVGSEFVQKYLGEGPRMVRDVFRLAKENAPAIIFIDEVDAIATARFDAQTGADREVQRILMELLNQMDGFDQTVNVKVIMATNRADTLDPALLRPGRLDRKIEFPLPDRRQKRLVFQVCTAKMNLSDEVDLEDYVSRPDKISAADITAICQEAGMHAVRKNRYVILPKDFEKGYRTNVKKPESDFDFYK

SEQ ID NO: 29750 - DNA, 704 bp, Triticum aestivum
gaaatcatttgggcgctaatatggattattttatgatttctttctgtaattatgatgagtgctggacttcttactttgactggcaattgatttaatgtaggaatgggcttcagagcactgctctgcacatttccgggcacctgaattatgggagtgcccaccccatgccgatattgatgagaggacagatgtatggtctttgggatgcaccctttatgctatgatgtatggaaagtcaccatttgattatgagctcgatgaatctgctggcgaaagcttagtaacagtcattaaaagtgcacaggtgaagtggcctactgagacgggttcgtcctatcctgatactctccgccagtttgtaacctggatgctgcagccacatcctgcagttcgtcccaatattgatgatattatcatccacgttgataaactcattgcgaagcactcgacttgacgggtaaatggaactgcttcaacagaaagaagaaaaggaattcatatgtaagtttatagaacatctgcttgattcattaaaagtgacatggtccttgatagtcattgtatggaaggaaaaaagaggatgttttctgtagcaggcttcaccgatttaagagctggctgttcctgatgtctgtagatgtatgtattttttgtgccaaagtgagattctggggtcaataaatgatatcatcattctcgtggtt

SEQ ID NO: 29751 - protein, 77 aa, Triticum aestivum
MMYGKSPFDYELDESAGESLVTVIKSAQVKWPTETGSSYPDTLRQFVTWMLQPHPAVRPNIDDIIIHVDKLIAKHST

SEQ ID NO: 29752 - protein, 76 aa, Triticum aestivum
MYGKSPFDYELDESAGESLVTVIKSAQVKWPTETGSSYPDTLRQFVTWMLQPHPAVRPNIDDIIIHVDKLIAKHST

SEQ ID NO: 29753 - protein, 43 aa, Triticum aestivum
MELLQQKEEKEFICKFIEHLLDSLKVTWSLIVIVWKEKRGCFL

SEQ ID NO: 29754 - DNA, 910 bp, Triticum aestivum
aacaagccctctctaactgaggaagagaagaagattaaggcacaagagctgagggaccgtgctcgtaaaaagaaagaagaagaagaaaaaaggatggagagagaaagggaaaaggagcgcataaggattggtaaggagcttcttgaagccaaaaaaatggaggagttaaatgaaaggaaacgcatcatagaattgagaaggcttgagaaagaggaggagaaaagagccagagaaaagattcgccagaaacttgaagaggacaaggctgaacgtagaagaaaacttggattgccggcagaagccccagctgcatccaagccaagtgcgccaccgcctgttgaagagaagaagagtgcatttttacctgtcagaccagccacaaaggcagagcggatgagggattgcttacgaaatatcaagcagcagaacaaggaggaggatgctaaagtaaagagggcttttcagacactcctcacctacatcggaaacgtggttaaaaaccctgacgaggagaaattcagaaagatcagacttaccaatgctacattccaggagagagttgggagccttggaggcatagagtttctcgagctgtgcgggtttgagaaaccggaaggcgaggagatcttgtttctggcaagggacaaggttgacaaggctgtcctgaatgtagctggagccgagctcaactccgccatcaccaatcctttctttggagtcctctgaatcgggaaatccccgttgtatcccttcctggaaatccgtagtctgaatcgggaatgtagcgaagaattgtccaattaaactgtaaaaaagttcaatcttgcttatgagaaatatgtacaagacaacacaggaaaattttcacacaggggaactggtcctatccaaagaaatctttccgaagtct

SEQ ID NO: 29755 - protein, 241 aa, Triticum aestivum
NKPSLTEEEKKIKAQELRDRARKKKEEEEKRMEREREKERIRIGKELLEAKKMEELNERKRIIELRRLEKEEEKRAREKIRQKLEEDKAERRRKLGLPAEAPAASKPSAPPPVEEKKSAFLPVRPATKAERMRDCLRNIKQQNKEEDAKVKRAFQTLLTYIGNVVKNPDEEKFRKIRLTNATFQERVGSLGGIEFLELCGFEKPEGEEILFLARDKVDKAVLNVAGAELNSAITNPFFGVL

SEQ ID NO: 29756 - protein, 210 aa, Triticum aestivum
MEREREKERIRIGKELLEAKKMEELNERKRIIELRRLEKEEEKRAREKIRQKLEEDKAERRRKLGLPAEAPAASKPSAPPPVEEKKSAFLPVRPATKAERMRDCLRNIKQQNKEEDAKVKRAFQTLLTYIGNVVKNPDEEKFRKIRLTNATFQERVGSLGGIEFLELCGFEKPEGEEILFLARDKVDKAVLNVAGAELNSAITNPFFGVL

SEQ ID NO: 29757 - protein, 189 aa, Triticum aestivum
MEELNERKRIIELRRLEKEEEKRAREKIRQKLEEDKAERRRKLGLPAEAPAASKPSAPPPVEEKKSAFLPVRPATKAERMRDCLRNIKQQNKEEDAKVKRAFQTLLTYIGNVVKNPDEEKFRKIRLTNATFQERVGSLGGIEFLELCGFEKPEGEEILFLARDKVDKAVLNVAGAELNSAITNPFFGVL

SEQ ID NO: 29758 - DNA, 1563 bp, Triticum aestivum
acacaaccacctgcttcacactaccaaggcaagtacacagcagcaatacgtagtagatttcccgagtgaggagctcagcgcaagatggagaaccaggcacacatcgccggcgagaagaagggcatcatggagaagatcaaggagaagctccccggcggccacggcgaccacaaggagaccgctggtacccacgggcacgccggcacggcgacgcatggtgccccggccactggtggtgcctacgggcagcagggtcacgctggaaccaccggcacggggttgcatggcgcccacgccggcgagaagaagggcgtcatggagaacatcaaggacaagctccctggtggccaccaggaccaccagcagactggtggtacctatgggcagcagggacacaccggcacggcgacgcatggcaccccggcgaccggtggcacctatgggcagcagggacataccggcacagcgacgcatggcaccccggcgaccggtggcacctatggggagcagggacacaccggagtgactggcacggggacgcacggcaccggcgagaagaagggcctcatggagaacatcaaggagaagctccctggtggccacggtgaccaccagcagaccggtggtacctacgggcagcagggacacaccggcacggcgacgcatggcaccccggccgggggcggcacctatgagcagcacggacacaccgggatgaccggcacagggacacacggcactggcgagaagaaaggcgtcatggagaacatcaaggacaagctccctggtggccacggagatcaccagcagaccggtggcacctacgggcagcagggacacaccggcacggcgacacagggcaccccggccggcggcggcacctatgagcagcatggacacaccgggatgaccggcgcggggacacacagcactggcgagaagaagggcgtcatggagaacatcaaggaaaagctccctggtggccacagtgaccaccagcagaccggtggagcctacgggcagcagggacacaccggcacgcgacacatggcacccctgccggcgggcacctacgggcagcatggacacgctggagtgatcggcacggagacgcatggcaccacggccaccggcggcacccatgggcagcacggacacaccggaacgactggcactgggacacacggctccgacgggatcggcgagaagaagagcctcatggacaagatcaaggataagctgcctggacagcactgagcccggtctgcccgcggccgctacccttgcagaataataaccccaccgtgtataagttaattgagtctagttcacctagctcacttggtcgttggaggagagaatgtattatgtatcttggtttaagttttcacggacaacagtgtgttcacagttttcttctgtttacactctgtagtgcaaattcgtttaagttttcacggacaacagtgtgttcacagttttcttctgtttacactctgtagtgcaaatttcgtttttgttctttttttttttgtccatcttatccaagagacagacgcagcg

SEQ ID NO: 29759 - protein, 390 aa, Triticum aestivum
MENQAHIAGEKKGIMEKIKEKLPGGHGDHKETAGTHGHAGTATHGAPATGGAYGQQGHAGTTGTGLHGAHAGEKKGVMENIKDKLPGGHQDHQQTGGTYGQQGHTGTATHGTPATGGTYGQQGHTGTATHGTPATGGTYGEQGHTGVTGTGTHGTGEKKGLMENIKEKLPGGHGDHQQTGGTYGQQGHTGTATHGTPAGGGTYEQHGHTGMTGTGTHGTGEKKGVMENIKDKLPGGHGDHQQTGGTYGQQGHTGTATQGTPAGGGTYEQHGHTGMTGAGTHSTGEKKGVMENIKEKLPGGHSDHQQTGGAYGQQGHTGTRHMAPLPAGTYGQHGHAGVIGTETHGTTATGGTHGQHGHTGTTGTGTHGSDGIGEKKSLMDKIKDKLPGQH

SEQ ID NO: 29760 - protein, 376 aa, Triticum aestivum
MEKIKEKLPGGHGDHKETAGTHGHAGTATHGAPATGGAYGQQGHAGTTGTGLHGAHAGEKKGVMENIKDKLPGGHQDHQQTGGTYGQQGHTGTATHGTPATGGTYGQQGHTGTATHGTPATGGTYGEQGHTGVTGTGTHGTGEKKGLMENIKEKLPGGHGDHQQTGGTYGQQGHTGTATHGTPAGGGTYEQHGHTGMTGTGTHGTGEKKGVMENIKDKLPGGHGDHQQTGGTYGQQGHTGTATQGTPAGGGTYEQHGHTGMTGAGTHSTGEKKGVMENIKEKLPGGHSDHQQTGGAYGQQGHTGTRHMAPLPAGTYGQHGHAGVIGTETHGTTATGGTHGQHGHTGTTGTGTHGSDGIGEKKSLMDKIKDKLPGQH

SEQ ID NO: 29761 - protein, 313 aa, Triticum aestivum
MENIKDKLPGGHQDHQQTGGTYGQQGHTGTATHGTPATGGTYGQQGHTGTATHGTPATGGTYGEQGHTGVTGTGTHGTGEKKGLMENIKEKLPGGHGDHQQTGGTYGQQGHTGTATHGTPAGGGTYEQHGHTGMTGTGTHGTGEKKGVMENIKDKLPGGHGDHQQTGGTYGQQGHTGTATQGTPAGGGTYEQHGHTGMTGAGTHSTGEKKGVMENIKEKLPGGHSDHQQTGGAYGQQGHTGTRHMAPLPAGTYGQHGHAGVIGTETHGTTATGGTHGQHGHTGTTGTGTHGSDGIGEKKSLMDKIKDKLPGQH

SEQ ID NO: 29762 - DNA, 846 bp, Triticum aestivum
gagacttcatcggggaaatggaggaggaggagataaatctggccggcgccggcggaggggaggtgaagcaggaggtgggggaggaggaggagatcgagttcgagccgacggaggacgagctggtgctgcacttcctgcggccgcagctgcgcgggttcgcgccgcgcgtggcgggcgcggtggtggaggcggacccgtgcgcgtcgcccccctgggagctgctggcgcggcacggcctgctgcggcgcgggcacggctacttcttcgcggcgcggcggcgcgggaaggtgcggcgcaccccggagggcggcggcggcgcgtggatgcacagcggcaacaaggaggaccgccggtccgtgacggagctgggcgtggtggcgcgctggaccatgacgcggtactgcttctacctccgcggcggcgacggggcgcagcaggggcggcggagcaccgggtgggtgatgtccgagtacgagatcacggacccgcggtgctaccgccgcgccgacgacggcgaggaggaccagtactgggtgctctgccacgtccgccgcagcatcagggagaacgtcaagccgcgctcccgcaggcggtagcgggtcagtattactcagcaggctgccgcgcctcggctcggtcgccggccggcgcaagcccgtgtcagttcgtcctcgtcgttcgtcgctaagtcgccatgtgtgtgatctgatctgccatgtccgtctgtcggtgcgcggcacactgtctgtatttaagcagaatttggtcccttggattttgctggcttttgccagagtgtactgctctgccgtttgcaagtctaaaaatatgtcaaattttttcccc

SEQ ID NO: 29763 - protein, 228 aa, Triticum aestivum
RLHRGNGGGGDKSGRRRRRGGEAGGGGGGGDRVRADGGRAGAALPAAAAARVRAARGGRGGGGGPVRVAPLGAAGAARPAAARARLLLRGAAAREGAAHPGGRRRRVDAQRQQGGPPVRDGAGRGGALDHDAVLLLPPRRRRGAAGAAEHRVGDVRVRDHGPAVLPPRRRRRGGPVLGALPRPPQHQGERQAALPQAVAGQYYSAGCRASARSPAGASPCQFVLVVRR

SEQ ID NO: 29764 - protein, 197 aa, Triticum aestivum
DFIGEMEEEEINLAGAGGGEVKQEVGEEEEIEFEPTEDELVLHFLRPQLRGFAPRVAGAVVEADPCASPPWELLARHGLLRRGHGYFFAARRRGKVRRTPEGGGGAWMHSGNKEDRRSVTELGVVARWTMTRYCFYLRGGDGAQQGRRSTGWVMSEYEITDPRCYRRADDGEEDQYWVLCHVRRSIRENVKPRSRRR

SEQ ID NO: 29765 - protein, 192 aa, Triticum aestivum
MEEEEINLAGAGGGEVKQEVGEEEEIEFEPTEDELVLHFLRPQLRGFAPRVAGAVVEADPCASPPWELLARHGLLRRGHGYFFAARRRGKVRRTPEGGGGAWMHSGNKEDRRSVTELGVVARWTMTRYCFYLRGGDGAQQGRRSTGWVMSEYEITDPRCYRRADDGEEDQYWVLCHVRRSIRENVKPRSRRR

SEQ ID NO: 29766 - DNA, 947 bp, Triticum aestivum
aattggaaaaccaacaagctgccgtggtgactgtaagcgaagcacacgactgcctgtcctttccccaataatgcgcggcatcgcctccgccggaacgctccgccccgggccatccgcagctgtccgatcaaaatccaacgcgggagaccgccccaccctccaccgacgacccctcatccacctccggcgatcgccggaaccctctctgccgtccatccgccgcagccgccgcctcatgcctcctcttaccgcggcctcccgggccaccagcagcggcggcgacgccttcagcgagttggcctctgccgccgacttcgccggcatcgcctctcccgacggcctcatctccgtcatcggcttcggctcccttctttccgagcggagcgcgaggagcacgttcccggagctggaggggttccgtgtggcggcgctgcgagggttccggcgcgtcttcgcccacgccgcccccatcttcttcgagcgcggcatcgccattgaggccactaaggagttctcaagcttaagcgtggagcattgtgagggagaaatgatagttgtcactgtgtttgaaatcaaggaggaggaggtgccagccttcatcgagagggaactcgagttcagatttcttgctgtggtccctgaaggactggatggagtgccttttccaaatccagctgtaagggcctgtattttgggactgaatttctagcttaattttttgtttgatctgcctgcaatgcagttattattcatcttcatggaatttattggttcaggttgtctgtgcacgctatagcgatgaagagtatttccaagtgagatgcaaaggttgaatctatatgacactcaaatttctttcagtcctgcatttcactttaatgacttttctactgactttgtaatgttattgacattgggttatcagcatatcagttgtccgtttgact

SEQ ID NO: 29767 - protein, 235 aa, Triticum aestivum
IGKPTSCRGDCKRSTRLPVLSPIMRGIASAGTLRPGPSAAVRSKSNAGDRPTLHRRPLIHLRRSPEPSLPSIRRSRRLMPPLTAASRATSSGGDAFSELASAADFAGIASPDGLISVIGFGSLLSERSARSTFPELEGFRVAALRGFRRVFAHAAPIFFERGIAIEATKEFSSLSVEHCEGEMIVVTVFEIKEEEVPAFIERELEFRFLAVVPEGLDGVPFPNPAVRACILGLNF

SEQ ID NO: 29768 - protein, 212 aa, Triticum aestivum
MRGIASAGTLRPGPSAAVRSKSNAGDRPTLHRRPLIHLRRSPEPSLPSIRRSRRLMPPLTAASRATSSGGDAFSELASAADFAGIASPDGLISVIGFGSLLSERSARSTFPELEGFRVAALRGFRRVFAHAAPIFFERGIAIEATKEFSSLSVEHCEGEMIVVTVFEIKEEEVPAFIERELEFRFLAVVPEGLDGVPFPNPAVRACILGLNF

SEQ ID NO: 29769 - protein, 157 aa, Triticum aestivum
MPPLTAASRATSSGGDAFSELASAADFAGIASPDGLISVIGFGSLLSERSARSTFPELEGFRVAALRGFRRVFAHAAPIFFERGIAIEATKEFSSLSVEHCEGEMIVVTVFEIKEEEVPAFIERELEFRFLAVVPEGLDGVPFPNPAVRACILGLNF

SEQ ID NO: 29770 - DNA, 1470 bp, Triticum aestivum
aaaactacttccccatttatcttttcctttcctatctatctggttcctgcagattcaagatctcgagttttgctctgctccaagcaaagccatggcctccgaacagatggtgcatatgagtcaaggacaaggggaaactagctatgctcgcaactccagtttccagaaggctgagcagaacaggatgaaatccctcatagaagcggtcatcgccgacttatgcggcagcagcagtaccttgttgcatggaaaggtagtaatcgcggacttgggatgctcctccggcccaaatgcgctagcactggtatcaactgccatcaatgccatccacagccaatgccttcacttacagcagccaccacctgaagtatgcgtgctactcaacgacctgcctgacaatgacttcaacacggtggtgaagagcttggtcacgctccttcaaagcaaggatcctgttgtcctgaccggtgtcataccggggtcgttttacgagcggctctttactagtgactccttgcatcttgtatgcgcgtccaacagcttgcaatggctctcaaaggctcctgaggatctaacgagaaatcgcatcccagcgttcgatactgatgaacatgttaggcatgaaaggctcccaatcgtccgtgaggcttatgcacatcagttcagggaagatttcacacttttcctgcagctgagagccaaagaattggtctcgggaggccgaatggttatttccctagtagggacgcgttctaatgtaattgcttccaaattctttcttttcccaggaattgtagctcaaattctaagtgtcatggtcactgagggtgtgatcgacaaagaaaagtttgattctttctatgtgcccgtgcatggaccttccggcgaagaggtgagagaaatcattgaagaagagggctccttttccaccagggagatgcgggtgcacgaccctacgaccgaaatgaacactgctctgagcaccccaaggaagttcgtcaataatctgagagccttattcgagccgataatagtccagcattttggagacattatggatgaatttgtgaggactgcggagctgcactggagcctggatccggatgggagcttgcaagaggagcgggccagaacctctcgagctacgctggttgtatccctcgcaaaggtgtcatgatgaagtaaaggtgcctgaagattacatgcaccgaatttcataaaattgtactattgcttactttgaagcaacaatgtgtgcccatttaattgtgtgaactactgtagtagtggtgttccgtgaatgtactcatggatgcaccaaatgaacttccatctcgcatataaataagcaaaatgccgttgcgtgtgcaatgtggtgtgatgtatggtgtgcacaaattcagccagacatttgtgtcatgtatctgttttagtaagatctgcaatgagagtgaagcagccagaaattcc

SEQ ID NO: 29771 - protein, 391 aa, Triticum aestivum
KLLPHLSFPFLSIWFLQIQDLEFCSAPSKAMASEQMVHMSQGQGETSYARNSSFQKAEQNRMKSLIEAVIADLCGSSSTLLHGKVVIADLGCSSGPNALALVSTAINAIHSQCLHLQQPPPEVCVLLNDLPDNDFNTVVKSLVTLLQSKDPVVLTGVIPGSFYERLFTSDSLHLVCASNSLQWLSKAPEDLTRNRIPAFDTDEHVRHERLPIVREAYAHQFREDFTLFLQLRAKELVSGGRMVISLVGTRSNVIASKFFLFPGIVAQILSVMVTEGVIDKEKFDSFYVPVHGPSGEEVREIIEEEGSFSTREMRVHDPTTEMNTALSTPRKFVNNLRALFEPIIVQHFGDIMDEFVRTAELHWSLDPDGSLQEERARTSRATLVVSLAKVS

SEQ ID NO: 29772 - protein, 361 aa, Triticum aestivum
MASEQMVHMSQGQGETSYARNSSFQKAEQNRMKSLIEAVIADLCGSSSTLLHGKVVIADLGCSSGPNALALVSTAINAIHSQCLHLQQPPPEVCVLLNDLPDNDFNTVVKSLVTLLQSKDPVVLTGVIPGSFYERLFTSDSLHLVCASNSLQWLSKAPEDLTRNRIPAFDTDEHVRHERLPIVREAYAHQFREDFTLFLQLRAKELVSGGRMVISLVGTRSNVIASKFFLFPGIVAQILSVMVTEGVIDKEKFDSFYVPVHGPSGEEVREIIEEEGSFSTREMRVHDPTTEMNTALSTPRKFVNNLRALFEPIIVQHFGDIMDEFVRTAELHWSLDPDGSLQEERARTSRATLVVSLAKVS

SEQ ID NO: 29773 - protein, 356 aa, Triticum aestivum
MVHMSQGQGETSYARNSSFQKAEQNRMKSLIEAVIADLCGSSSTLLHGKVVIADLGCSSGPNALALVSTAINAIHSQCLHLQQPPPEVCVLLNDLPDNDFNTVVKSLVTLLQSKDPVVLTGVIPGSFYERLFTSDSLHLVCASNSLQWLSKAPEDLTRNRIPAFDTDEHVRHERLPIVREAYAHQFREDFTLFLQLRAKELVSGGRMVISLVGTRSNVIASKFFLFPGIVAQILSVMVTEGVIDKEKFDSFYVPVHGPSGEEVREIIEEEGSFSTREMRVHDPTTEMNTALSTPRKFVNNLRALFEPIIVQHFGDIMDEFVRTAELHWSLDPDGSLQEERARTSRATLVVSLAKVS

SEQ ID NO: 29774 - DNA, 1019 bp, Triticum aestivum
atcttcttcctatccgctactctgtatctccgctttcccctcttctcatctacagaactatgtgttcttgtgactgaatcctttgtgtgacacaaagcgattgctactaatctctgtgggttcgtagcaattggaatcagagccaccgatctttcggcatcatttcccaccgattttttttcccagccacgacggggaaatctgcgcgcccaacgttgacggacaggatgggggcggcagagctgaccatctctgagctgcagaaattgatccaagcgacggtgattcagagcaaggccgtctccgacgcgggggtccgcaactccgagcggatcgacgagctccgcaccacggttgactccttctctgaatcgaccaccaaggctctctccgatctcaccagctccacggcgacggcgacccagcgtgtcgagactacgctggaccgcataatcacggcccacaacaagctcgacaagacagccgacgagttgaagttgtcgatggaggcggtggcgcgccgcgtcgatttcctcgagcgggggcagcctccttccacgaccccggcgcagccgcatcagcgaccgggtgtgcttcggccccatgggcaccgtgaagaactgcatcaccagggtgctgtttctggagagattcgaacctccggacacgccctggtcgggggtgagcaatcgcaaacccgtgaccaccttacttctgctatgtatggttcagcagagagagatgatgatcgtaccactgcatatccgcatcagccctacagtcatagtggtccgcggttgcccaaatcagatttcccaaaattcaccggtgataatcccaaatggtggaaggaacaatgcgaaaagtattttaaaatgtaccatgttaatcctgagttgtgggtggattttgccactatgcatttcaccggcaatgctgccctgtggttgcaaactttcgaagccatgcattcagtggatagctggcctgccttgtgtgtaggagtgtttgctaagttc

SEQ ID NO: 29775 - protein, 264 aa, Triticum aestivum
MGAAELTISELQKLIQATVIQSKAVSDAGVRNSERIDELRTTVDSFSESTTKALSDLTSSTATATQRVETTLDRIITAHNKLDKTADELKLSMEAVARRVDFLERGQPPSTTPAQPHQRPGVLRPHGHREELHHQGAVSGEIRTSGHALVGGEQSQTRDHLTSAMYGSAERDDDRTTAYPHQPYSHSGPRLPKSDFPKFTGDNPKWWKEQCEKYFKMYHVNPELWVDFATMHFTGNAALWLQTFEAMHSVDSWPALCVGVFAKF

SEQ ID NO: 29776 - protein, 172 aa, Triticum aestivum
MEAVARRVDFLERGQPPSTTPAQPHQRPGVLRPHGHREELHHQGAVSGEIRTSGHALVGGEQSQTRDHLTSAMYGSAERDDDRTTAYPHQPYSHSGPRLPKSDFPKFTGDNPKWWKEQCEKYFKMYHVNPELWVDFATMHFTGNAALWLQTFEAMHSVDSWPALCVGVFAKF

SEQ ID NO: 29777 - protein, 132 aa, Triticum aestivum
MGTVKNCITRVLFLERFEPPDTPWSGVSNRKPVTTLLLLCMVQQREMMIVPLHIRISPTVIVVRGCPNQISQNSPVIIPNGGRNNAKSILKCTMLILSCGWILPLCISPAMLPCGCKLSKPCIQWIAGLPCV

SEQ ID NO: 29778 - DNA, 480 bp, Triticum aestivum
  misc_feature (374)..(374): n is a, c, g, or t
gctgggtctgcccaccttcttcctccgcctccgtccgtttctcttctctacgaacgcagcacgcaacgtggtcgagactacacaacctagaaaaaatcccatcgatctgctccagctttgcggcgcggcagccagccagccagcacccatggcggtggaagggataaccgagggcgtgaggggcctcaaggtggaggacggcgagggggcggcgggcgccgcggccgacgcgccggccgccgccgccgccggcggggaggggcagaggcggggcgccagcgccagcagcaaccgcatccaggtgtccaacacgamsaagcccctcttcttctacgtcaacctcgccaagaggtatatgcagcagcacggcgacntcgagctctcggcgctcgggatggccattgcgactgttgtaactgtggcggagattctgaagaacaacggcctcgctgttgagaagaagattagaacatccacggt

SEQ ID NO: 29779 - protein, 159 aa, Triticum aestivum
  misc_feature (105)..(105): Xaa can be any naturally occurring amino acid
  misc_feature (125)..(125): Xaa can be any naturally occurring amino acid
LGLPTFFLRLRPFLFSTNAARNVVETTQPRKNPIDLLQLCGAAASQPAPMAVEGITEGVRGLKVEDGEGAAGAAADAPAAAAAGGEGQRRGASASSNRIQVSNTXKPLFFYVNLAKRYMQQHGDXELSALGMAIATVVTVAEILKNNGLAVEKKIRTST

SEQ ID NO: 29780 - protein, 110 aa, Triticum aestivum
  misc_feature (56)..(56): Xaa can be any naturally occurring amino acid
  misc_feature (76)..(76): Xaa can be any naturally occurring amino acid
MAVEGITEGVRGLKVEDGEGAAGAAADAPAAAAAGGEGQRRGASASSNRIQVSNTXKPLFFYVNLAKRYMQQHGDXELSALGMAIATVVTVAEILKNNGLAVEKKIRTST

SEQ ID NO: 29781 - DNA, 549 bp, Triticum aestivum
atccaaacgttgcgagctgccaagcgactccaacagtcgaactaggtggagcagtcgaggtcggcgcgagcgagcaaccaatggaggagaagctgtcagaggcgtcgaagcgggcggccccgtcgcccatccagcagctctcccacctcgcgcagcgcgtcggggccgtcaacctcgccgaggggttccccgacttccccgcgcccgcccacgtcaaggccgccgccgccgccgccatcgccgccgacctcaaccagtacaggcatgtgcagggagtctgcgacgtcctcgcggcgaccatgaaacgggaccacggcttcgatgtcgaccccctcacggacttcgccatctgctgcgggcaatccgaggcctttgccgcggcagtatttgcaattatagacccaggggatgaggttctcctctttgacccggcttacgaaacgtatcaaacatgcattgagctggcccggggcgtccctgtgtatgtgccattggatccaccttcttggacactggatgcggataaatttctgaagtggtttactagtc

SEQ ID NO: 29782 - protein, 182 aa, Triticum aestivum
PNVASCQATPTVELGGAVEVGASEQPMEEKLSEASKRAAPSPIQQLSHLAQRVGAVNLAEGFPDFPAPAHVKAAAAAAIAADLNQYRHVQGVCDVLAATMKRDHGFDVDPLTDFAICCGQSEAFAAAVFAIIDPGDEVLLFDPAYETYQTCIELARGVPVYVPLDPPSWTLDADKFLKWFTS

SEQ ID NO: 29783 - protein, 156 aa, Triticum aestivum
MEEKLSEASKRAAPSPIQQLSHLAQRVGAVNLAEGFPDFPAPAHVKAAAAAAIAADLNQYRHVQGVCDVLAATMKRDHGFDVDPLTDFAICCGQSEAFAAAVFAIIDPGDEVLLFDPAYETYQTCIELARGVPVYVPLDPPSWTLDADKFLKWFTS

SEQ ID NO: 29784 - protein, 136 aa, Triticum aestivum
SKRCELPSDSNSRTRWSSRGRRERATNGGEAVRGVEAGGPVAHPAALPPRAARRGRQPRRGVPRLPRARPRQGRRRRRHRRRPQPVQACAGSLRRPRGDHETGPRLRCRPPHGLRHLLRAIRGLCRGSICNYRPRG

SEQ ID NO: 29785 - DNA, 576 bp, Triticum aestivum
accaccaattaagttcgcgccaaattaggcaagctagcgcgcactgcacgtacgcgtgggcgcgctctgtctgctgccaaaaggcgtgcaaaccaaagcttgattagtagcggaggccggcgatgaggccacggccgccggctctcgtgagcagcctcctcctcctcctcctactattcgcggtgccgaggcatgccgccgcggcgggaggggacggcggtggcatggtgcgggtggacggcacgcggttcgtggcgggggacggcgaccggacggtgtacctcagcgggttcaacgcctactggctcatggagatggcctccgacccgtcccggcggggcggggtggtgtcggcgttccggcaggcggccgcgcacggcctcaacctcgcgcgcacctgggccttcagcgacggcggcgaccgaccgctgcagtcctcgccgggcgtctaccacgaggacatgttccagggcctggacttcgtcatcgccgaggcgaggcggcacgggatatacctcctcctctgcctcaccaacaacttcgacgacttcggcggcaagcgccagtacgtccagt

SEQ ID NO: 29786 - protein, 151 aa, Triticum aestivum
MRPRPPALVSSLLLLLLLFAVPRHAAAAGGDGGGMVRVDGTRFVAGDGDRTVYLSGFNAYWLMEMASDPSRRGGVVSAFRQAAAHGLNLARTWAFSDGGDRPLQSSPGVYHEDMFQGLDFVIAEARRHGIYLLLCLTNNFDDFGGKRQYVQ

SEQ ID NO: 29787 - protein, 128 aa, Triticum aestivum
MPPRREGTAVAWCGWTARGSWRGTATGRCTSAGSTPTGSWRWPPTRPGGAGWCRRSGRRPRTASTSRAPGPSATAATDRCSPRRASTTRTCSRAWTSSSPRRGGTGYTSSSASPTTSTTSAASASTSS

SEQ ID NO: 29788 - protein, 117 aa, Triticum aestivum
MVRVDGTRFVAGDGDRTVYLSGFNAYWLMEMASDPSRRGGVVSAFRQAAAHGLNLARTWAFSDGGDRPLQSSPGVYHEDMFQGLDFVIAEARRHGIYLLLCLTNNFDDFGGKRQYVQ

SEQ ID NO: 29789 - DNA, 1440 bp, Triticum aestivum
gccggacgcagaagcagaagcagcagcgcagccagcagcaaagaatcacgaggagatggcggcggcgacggcgacggcgacggtgcaagcgcagccaggactcgacgcgcgcgagtgggacgaggcggcgtaccggcggggcatcctgcgggagcgcgacctctcctgccgcaccctcttccgcgccgtcttctacgaccagcgcgacgaacccgacccggacgtcctcctcgccgccgcctccagcgacggatccctcgcgtccttctcgctgtcctcctgcatcgcctcctccgcctccgcccacgccgccccacagttggctgccgccgcgctggtcgaccccgtctgcatcgtccaagcgcacagcggccccgtctacgacgccaagttctacaacgatccgattcagccgctgctcttcagctgcggggatgacggccacatccggggttggagatggcacgagatgcagagctgccttctgccactctctctgcaaggggatcatgttgaaccaatacttgacttggttaaccctcagcatgaaggcccttggggtgcacggtctccaataccagaaaataatgccattgcaattagcaaacaggatggatctcttttcgcggcagcgggtgatgcatgtgcttattgctgggatgtggaaagtggaaagtgtaaaatgacctttaaggggcatactgactatttgcatagtatcgcagttcgtgaggcaaaccaccaggtggtaactggatcagaggatgggacagcccgtatctgggattgcagaagtgggaagtgtacgcagacgatacgtccagtacagaacaagaaatttgagggctcgtgggtcggttgcattgccattgatgcgagtgaaagttggctggcttgtggtacttcttgtggtatatcagtttggagtcttctttcaaatgagtgcatcttcaacgcagattgtggtgctcctgttcaagatttgttgtttgacaaaaatcaaattttagcggttggcgctgaacctgcgctctcccgtttcacgatcaacggggttgttgtttcgcaaataaagtgcgctcctccgtcggcattttccgtctccatgcattcatctgggatggcagctgttgctgggcatggaggtctggtggatgtcatctctggattcgggagccatctttgcgcgtttcgttgccgtggcctggataggtaatcagttaccgagtgctgatgaagcgttactgtgcaatttccatttgccactcccacattagtcagtggagcgcgaaactgtatttcttttcccccctcactgttgtaatacttgtttcagttcagtctgcggaatgatttcctgacaaggatagattctttgtaaatgtccttgttctagatattctgttggaggtttcaatacaatccgtctcaatctgtttc

SEQ ID NO: 29790 - protein, 404 aa, Triticum aestivum
PDAEAEAAAQPAAKNHEEMAAATATATVQAQPGLDAREWDEAAYRRGILRERDLSCRTLFRAVFYDQRDEPDPDVLLAAASSDGSLASFSLSSCIASSASAHAAPQLAAAALVDPVCIVQAHSGPVYDAKFYNDPIQPLLFSCGDDGHIRGWRWHEMQSCLLPLSLQGDHVEPILDLVNPQHEGPWGARSPIPENNAIAISKQDGSLFAAAGDACAYCWDVESGKCKMTFKGHTDYLHSIAVREANHQVVTGSEDGTARIWDCRSGKCTQTIRPVQNKKFEGSWVGCIAIDASESWLACGTSCGISVWSLLSNECIFNADCGAPVQDLLFDKNQILAVGAEPALSRFTINGVVVSQIKCAPPSAFSVSMHSSGMAAVAGHGGLVDVISGFGSHLCAFRCRGLDR

SEQ ID NO: 29791 - protein, 386 aa, Triticum aestivum
MAAATATATVQAQPGLDAREWDEAAYRRGILRERDLSCRTLFRAVFYDQRDEPDPDVLLAAASSDGSLASFSLSSCIASSASAHAAPQLAAAALVDPVCIVQAHSGPVYDAKFYNDPIQPLLFSCGDDGHIRGWRWHEMQSCLLPLSLQGDHVEPILDLVNPQHEGPWGARSPIPENNAIAISKQDGSLFAAAGDACAYCWDVESGKCKMTFKGHTDYLHSIAVREANHQVVTGSEDGTARIWDCRSGKCTQTIRPVQNKKFEGSWVGCIAIDASESWLACGTSCGISVWSLLSNECIFNADCGAPVQDLLFDKNQILAVGAEPALSRFTINGVVVSQIKCAPPSAFSVSMHSSGMAAVAGHGGLVDVISGFGSHLCAFRCRGLDR

SEQ ID NO: 29792 - protein, 248 aa, Triticum aestivum
MQSCLLPLSLQGDHVEPILDLVNPQHEGPWGARSPIPENNAIAISKQDGSLFAAAGDACAYCWDVESGKCKMTFKGHTDYLHSIAVREANHQVVTGSEDGTARIWDCRSGKCTQTIRPVQNKKFEGSWVGCIAIDASESWLACGTSCGISVWSLLSNECIFNADCGAPVQDLLFDKNQILAVGAEPALSRFTINGVVVSQIKCAPPSAFSVSMHSSGMAAVAGHGGLVDVISGFGSHLCAFRCRGLDR

SEQ ID NO: 29793 - DNA, 761 bp, Triticum aestivum
aggctgataatagcttaaagtttgtagcaaggtaccaggttcatgaaacaaacatcaattccccatcgcataggcatctctaataaagtagtagtaataacaatagataatccccaatgaaatgccaaaatagcagcactcctcggtggatcaaggctcggggtcagcaccttactcctccgtggggggcggagcagtcaccgacgaaccctccgactcttcaccgctcggttccgcgggggtctctggagctgcggcggcggcagcggcgcgcgacttggcgagctcgaggaggcggcggctgacctccttggagtaggcctggaggacctcgatcccgtcctccagggaggcgggggaggcggcggcggactccgaggcggcggcgaaggcctcggcctcgacggcggctgcggcgacctcggcctcgggctcggggatggcgccgtagcgctgagagaggacgctgggcgcggacagggtctgcacgacgcgccggacaacggcgtcgcgtgtgcgctgcgacggcggccagatgctgagcgacgggagcagcgtctccgacgaggacttctctgccgacgccgaaggggcagctgcgtcggcgaaggattcagtgggcgcggggtggatgtcctcagcgccggcgttgggggcgtcctcggccatggcgtggagagcggagagcaagggggagggggcggagagggagagatctgtggcgtggagtgggaggagagcgaggtgtgcttctgtgggtt

SEQ ID NO: 29794 - protein, 75 aa, Triticum aestivum
MLSDGSSVSDEDFSADAEGAAASAKDSVGAGWMSSAPALGASSAMAWRAESKGEGAERERSVAWSGRRARCASVG

SEQ ID NO: 29795 - protein, 62 aa, Triticum aestivum
MKCQNSSTPRWIKARGQHLTPPWGAEQSPTNPPTLHRSVPRGSLELRRRQRRATWRARGGGG

SEQ ID NO: 29796 - protein, 43 aa, Triticum aestivum
MSSAPALGASSAMAWRAESKGEGAERERSVAWSGRRARCASVG

SEQ ID NO: 29797 - DNA, 922 bp, Triticum aestivum
atcgcctcgccacacaaactccagaagaaaatggcggcttgtgctgcgcccccttgcgtccgcatctcctgctccacaccttcaccgaccgctctccgccggccacgccgccggcgcgtcgcctccgcccgatgctccctcgccgcagcccccggtctccgggcgccgccggagctcgtcgactccatcctctccaaggtgaaggggactgaccggggcgtgctgctgccggaggaaggccaccaggaggtcgccgacgtcgcgcagcagctggggaagtactgcatcgacgagcccgtcaagtccccgcttatattcggagactgggacgtggtgtattgctcggtgccgacatcccccggagggatttaccgcacccctctcggacggctggtgttcaagaccgacgacatggttcaggtggtggaagcccccgacatcgtcaggaacaaggtctccttctccatctttggcctcgatggcgcggtgtctctgacaggcaagctgaatgtattggacagtaagtggattcaggtcatatttgagcccccggaactgaaggtaggctccttgggtttccgatatggtggcgagagtgaggtcaagctggaaatcacctatgtcgatgagaagatcaggctcgggaaaggatcccgaggctcgcttttcgtcttcctgagacaagattagaagggtaggttgcatattttgcatgtgctcgacgccacaagggatatcggccatatgggcgtctacgcaactgcttgcagatgtaaattcagagataaagcccacaaagtagttttttatgatattcatttctaccttaagcagattgccttgttgtgagcgaaaatgtttgcggtactcatgctgatcttgtttctggatgtacttatgataatactggggtttgagcagg

SEQ ID NO: 29798 - protein, 229 aa, Triticum aestivum
IASPHKLQKKMAACAAPPCVRISCSTPSPTALRRPRRRRVASARCSLAAAPGLRAPPELVDSILSKVKGTDRGVLLPEEGHQEVADVAQQLGKYCIDEPVKSPLIFGDWDVVYCSVPTSPGGIYRTPLGRLVFKTDDMVQVVEAPDIVRNKVSFSIFGLDGAVSLTGKLNVLDSKWIQVIFEPPELKVGSLGFRYGGESEVKLEITYVDEKIRLGKGSRGSLFVFLRQD

SEQ ID NO: 29799 - protein, 219 aa, Triticum aestivum
MAACAAPPCVRISCSTPSPTALRRPRRRRVASARCSLAAAPGLRAPPELVDSILSKVKGTDRGVLLPEEGHQEVADVAQQLGKYCIDEPVKSPLIFGDWDVVYCSVPTSPGGIYRTPLGRLVFKTDDMVQVVEAPDIVRNKVSFSIFGLDGAVSLTGKLNVLDSKWIQVIFEPPELKVGSLGFRYGGESEVKLEITYVDEKIRLGKGSRGSLFVFLRQD

SEQ ID NO: 29800 - DNA, 575 bp, Triticum aestivum
gagacgccacacagagttcgattctcgccaaaccacaccacgcacacaccaacacgcggccatgtaccgggcggcggcggcggccatttcgcggtcctcctcctcggcgttgcggcggcagctcgcgcgcggcggcggcggggagcagcggcagtgggcgcgcgggtacgcggcgaaggaggtcaccttcggcgtcggcgcgcgcgccgccatgctgcggggcgtcaacgacctcgcggacgccgtcaaggtcaccatgggccccaagggccgcaatgtggttatcgagagaccgaacagatcccccaaggtcaccaaggacggggtcaccgttgccaagagcatagagttcgaggacagcgccaagaatgttggggcgagcctggtgaagcaggtcgccgatgccactaacaaggcagcaggagatggtaccacttgtgcaactgtgcttacacaggcaattctcacggaaggatgcaaggctgtggcagcaggggtcaatgttatggatttgcggaaaggcataaacaaggctataagcgccgtcactgctcacctcaaaagtaaagcatgtg

SEQ ID NO: 29801 - protein, 191 aa, Triticum aestivum
RRHTEFDSRQTTPRTHQHAAMYRAAAAAISRSSSSALRRQLARGGGGEQRQWARGYAAKEVTFGVGARAAMLRGVNDLADAVKVTMGPKGRNVVIERPNRSPKVTKDGVTVAKSIEFEDSAKNVGASLVKQVADATNKAAGDGTTCATVLTQAILTEGCKAVAAGVNVMDLRKGINKAISAVTAHLKSKAC

SEQ ID NO: 29802 - protein, 171 aa, Triticum aestivum
MYRAAAAAISRSSSSALRRQLARGGGGEQRQWARGYAAKEVTFGVGARAAMLRGVNDLADAVKVTMGPKGRNVVIERPNRSPKVTKDGVTVAKSIEFEDSAKNVGASLVKQVADATNKAAGDGTTCATVLTQAILTEGCKAVAAGVNVMDLRKGINKAISAVTAHLKSKAC

SEQ ID NO: 29803 - protein, 136 aa, Triticum aestivum
ETPHRVRFSPNHTTHTPTRGHVPGGGGGHFAVLLLGVAAAARARRRRGAAAVGARVRGEGGHLRRRRARRHAAGRQRPRGRRQGHHGPQGPQCGYRETEQIPQGHQGRGHRCQEHRVRGQRQECWGEPGEAGRRCH

SEQ ID NO: 29804 - DNA, 1515 bp, Triticum aestivum
cccccctcccgttccaactttattgtgtttaaacatcccccagccgcgccgcaacgtaaagacgcagaacagcttccgaaatcctgacctccgtagcctctctcctcgtcagcgccggccagaccacacaccggcagccagccagcagcaatggagaccgttgcggctgccggctacgcgcgcggggccgccacgcgctcccccgcctgctgcgccgccatgtccttctcgcagtcctacaggcccaaggctgccaggccggcgaccacgttctacggcgagtcgctgcgggcgaacacggcgaggacgtcgttcccggcggggaggcagtccaaggcggcgagccgggcggcgctcaccacccggtgcgcgatcggcgacagcctggaggagttcctgaccaaggcgacgccggacaagaacctcatcaggctgctgatctgcatgggggaggcgatgaggacgatcgccttcaaggtccggaccgcgtcctgcggcggcacggcctgcgtcaactccttcggcgacgagcagctcgccgtcgacatgctcgccgacaagctcctcttcgaggcgttggagtactcccatgtctgcaagtacgcgtgctctgaggaagtccccgagctgcaggacatgggtggcccggtcgaaggcggattcagcgtcgcgttcgacccccttgatggttccagcattgtggacaccaacttcaccgtcggaaccatcttcggtgtctggcctggcgacaagctgacgggcgtcaccggcggtgaccaagttgccgctgccatgggcatctacggccctcgcaccactttcgttgttgccctcaaggactgccctggaacacacgaattccttcttctcgacgaaggtaaatggcagcatgtcaaggacacaacaaccattggagaagggaagatgttctcccctggtaacttgagggccacatttgataaccctgattacgacaagcttgtcaactactatgtcaaggagaagtacacgctgcgttacaccggaggcatggtccctgatgtcaaccagatcatcgtgaaggagaagggcatcttcacgaacgtgacgtcgccgacggccaaggcgaagctgcggctgctgttcgaggtggcgccgctggggttcttgatagagaaggccggcgggcacagcagcgacggcaagcagtcggtgctggacaaggtgatctcccaactcgacgagcggacccaggtggcctacggctccaagaacgagatcatccgcttcgaggagaccctctacggctcctccagactcgccgccagcgccaccgtcggcgccaccgcctgataatcttcttcttcttcttcttcttctttttttacgtttttctcaacctgaaaaacaaggtgtccgttatagagtctgaagcatgttgttgtcttgtgatgatgcgaactggtaatgcagacatgcagtgggcagacgggctcgcgtctgccgcccttgtcttcactgcgaggtgattgtcgt

SEQ ID NO: 29805 - protein, 393 aa, Triticum aestivum
METVAAAGYARGAATRSPACCAAMSFSQSYRPKAARPATTFYGESLRANTARTSFPAGRQSKAASRAALTTRCAIGDSLEEFLTKATPDKNLIRLLICMGEAMRTIAFKVRTASCGGTACVNSFGDEQLAVDMLADKLLFEALEYSHVCKYACSEEVPELQDMGGPVEGGFSVAFDPLDGSSIVDTNFTVGTIFGVWPGDKLTGVTGGDQVAAAMGIYGPRTTFVVALKDCPGTHEFLLLDEGKWQHVKDTTTIGEGKMFSPGNLRATFDNPDYDKLVNYYVKEKYTLRYTGGMVPDVNQIIVKEKGIFTNVTSPTAKAKLRLLFEVAPLGFLIEKAGGHSSDGKQSVLDKVISQLDERTQVAYGSKNEIIRFEETLYGSSRLAASATVGATA

SEQ ID NO: 29806 - protein, 370 aa, Triticum aestivum
MSFSQSYRPKAARPATTFYGESLRANTARTSFPAGRQSKAASRAALTTRCAIGDSLEEFLTKATPDKNLIRLLICMGEAMRTIAFKVRTASCGGTACVNSFGDEQLAVDMLADKLLFEALEYSHVCKYACSEEVPELQDMGGPVEGGFSVAFDPLDGSSIVDTNFTVGTIFGVWPGDKLTGVTGGDQVAAAMGIYGPRTTFVVALKDCPGTHEFLLLDEGKWQHVKDTTTIGEGKMFSPGNLRATFDNPDYDKLVNYYVKEKYTLRYTGGMVPDVNQIIVKEKGIFTNVTSPTAKAKLRLLFEVAPLGFLIEKAGGHSSDGKQSVLDKVISQLDERTQVAYGSKNEIIRFEETLYGSSRLAASATVGATA

SEQ ID NO: 29807 - protein, 295 aa, Triticum aestivum
MGEAMRTIAFKVRTASCGGTACVNSFGDEQLAVDMLADKLLFEALEYSHVCKYACSEEVPELQDMGGPVEGGFSVAFDPLDGSSIVDTNFTVGTIFGVWPGDKLTGVTGGDQVAAAMGIYGPRTTFVVALKDCPGTHEFLLLDEGKWQHVKDTTTIGEGKMFSPGNLRATFDNPDYDKLVNYYVKEKYTLRYTGGMVPDVNQIIVKEKGIFTNVTSPTAKAKLRLLFEVAPLGFLIEKAGGHSSDGKQSVLDKVISQLDERTQVAYGSKNEIIRFEETLYGSSRLAASATVGATA

SEQ ID NO: 29808 - DNA, 617 bp, Triticum aestivum
attttttccagtggagctatcatgtttcttttccagaagtagccaccattccgctcatcctcttgaaaagattgcaagagcagacaacgattgagtccctccgccgtcctgttaaacgaatgatagaccaggtgagcgagaacagggattttgtgcaaaggaagagggaggtggtctctttctcaccaaatgatgcgtcgtcagtcgagagcttcctccaggaggaggagatgaatggagacgcttccttcacgcagttctacgcatcagtggcaaagagtcgtcaatcgagagggagaaaattggtgtagagggcgatgctagggtgtgatagttgttgattggctagaggattatcacatggacgacaaactgaggaactgactccaatgtgcatgcagtggtatcgatgaccgacgtcggagtttatggttttcttgctgtttgtcggtgtagctctcaagtttgtcgaaacttgtaccgattgagtagatttggcgtgtgaatcgaaggatctttgtagcgcatggaattctgcagctgtttgttatgagtatattgttccagctcatttatgttgcccaaaatttagtattgactattatttacccttgtcc

SEQ ID NO: 29809 - protein, 102 aa, Triticum aestivum
FFQWSYHVSFPEVATIPLILLKRLQEQTTIESLRRPVKRMIDQVSENRDFVQRKREVVSFSPNDASSVESFLQEEEMNGDASFTQFYASVAKSRQSRGRKLV

SEQ ID NO: 29810 - protein, 63 aa, Triticum aestivum
MIDQVSENRDFVQRKREVVSFSPNDASSVESFLQEEEMNGDASFTQFYASVAKSRQSRGRKLV

SEQ ID NO: 29811 - DNA, 715 bp, Triticum aestivum
aaacgagtggtcagggttttgtccttcctcgccaaggtcgagtgaggtctccaactctccattacatacttccccacccatccaccaaaggcgcagagaggggagaagaagaagaagaagaagcggagggggaggaagatgccttgcctgaacgtgtcgacgaacgtgaacctggagggggtggacacctccgccgtcctcgccgacgcctccagcaccgtcgcaaccatcatcggcaagccggaggcctatgtgatggttgttctcaagggttcagtgcccatggcatttggaggtacccaggagcctgcagcctacggcgagctggtttccatcggagggctgaacgctgatgtgaacaagaagctgagcgccggcattgcttccatcctggagtcaaagctgtccatccccaagtcccgcttctacctcaagttccacgattcaaagcgctcagactttggatggaatggatccaccttttagacgcatcatatggcatggagccttgcatgaactccagagttcctaatattctgtccattgcctatttaaggagaaactgctgcagtaagacatcgtgtcagtttaatggccagtgtttatgagtgccggagtacttgtgtgatctagttggtttggtttcggacttgccatggcaagggaatgttgcaactgcttggttcgattcgtaatcatgaaccctttgtggtgt

SEQ ID NO: 29812 - protein, 116 aa, Triticum aestivum
TSGQGFVLPRQGRVRSPTLHYILPHPSTKGAERGEEEEEEAEGEEDALPERVDEREPGGGGHLRRPRRRLQHRRNHHRQAGGLCDGCSQGFSAHGIWRYPGACSLRRAGFHRRAER

SEQ ID NO: 29813 - protein, 115 aa, Triticum aestivum; identical to SEQ ID NO: 15019

SEQ ID NO: 29814 - protein, 76 aa, Triticum aestivum
MVVLKGSVPMAFGGTQEPAAYGELVSIGGLNADVNKKLSAGIASILESKLSIPKSRFYLKFHDSKRSDFGWNGSTF

SEQ ID NO: 29815 - DNA, 991 bp, Triticum aestivum
cttcgctcccgttccgcgctgtccgtctcacacaggatggcgtccgccatggagctctccctcctcaaccccgcaatgcaccaccacggcatcgcggccaagacggcctcccacctccctgttctccccgcgcgccggggcgccgtccgcttccgcgtgagggccgccgccgcggcgccgcctgcacccgccgcgaagcccggctcgcccaagaagcggggcaagacggaggtcaacgagtcgctgctcacgccgcgcttctacaccacggacttcgacgagatggagcagctgttcaacgccgagattaacaagcagctcaaccaggacgagttcgacgcgctgctgcaggagttcaagacggactacaaccagacccacttcatccgcaaccccgagttcaaggaggccgccgacaagatgcagggcccgctccgccagatcttcgtcgagttcctcgagcgctcctgcaccgccgagttctccgggttcctcctctacaaggagctcggccgcaggctcaagaaaaccaacccggtggtggctgagatcttctcgctcatgtccagggacgaggccaggcacgctgggttcttgaacaaggggctgtccgatttcaacctggctctggacctcggcttcttgaccaaggctaggaagtacaccttcttcaagccaaagttcatcttctacgccacgtacctgtccgagaagatcggctactggaggtacatcaccatcttcaggcacctcaaggccaacccggagtaccaggtgtaccccatcttcaagtacttcgagaactggtgccaggacgagaaccggcacggcgatttcttctccgcgctgctcaaggcgcagccgcagttcctcaatgactggaaggccaagctctggtcacgcttcttctgcctctcggtgtatataaccatgtacctgaatgactgccaacgtagtgccttctacgaaggaattggtctcaacaccaaag

SEQ ID NO: 29816 - protein, 330 aa, Triticum aestivum
LRSRSALSVSHRMASAMELSLLNPAMHHHGIAAKTASHLPVLPARRGAVRFRVRAAAAAPPAPAAKPGSPKKRGKTEVNESLLTPRFYTTDFDEMEQLFNAEINKQLNQDEFDALLQEFKTDYNQTHFIRNPEFKEAADKMQGPLRQIFVEFLERSCTAEFSGFLLYKELGRRLKKTNPVVAEIFSLMSRDEARHAGFLNKGLSDFNLALDLGFLTKARKYTFFKPKFIFYATYLSEKIGYWRYITIFRHLKANPEYQVYPIFKYFENWCQDENRHGDFFSALLKAQPQFLNDWKAKLWSRFFCLSVYITMYLNDCQRSAFYEGIGLNTK

SEQ ID NO: 29817 - protein, 318 aa, Triticum aestivum
MASAMELSLLNPAMHHHGIAAKTASHLPVLPARRGAVRFRVRAAAAAPPAPAAKPGSPKKRGKTEVNESLLTPRFYTTDFDEMEQLFNAEINKQLNQDEFDALLQEFKTDYNQTHFIRNPEFKEAADKMQGPLRQIFVEFLERSCTAEFSGFLLYKELGRRLKKTNPVVAEIFSLMSRDEARHAGFLNKGLSDFNLALDLGFLTKARKYTFFKPKFIFYATYLSEKIGYWRYITIFRHLKANPEYQVYPIFKYFENWCQDENRHGDFFSALLKAQPQFLNDWKAKLWSRFFCLSVYITMYLNDCQRSAFYEGIGLNTK

SEQ ID NO: 29818 - protein, 314 aa, Triticum aestivum
MELSLLNPAMHHHGIAAKTASHLPVLPARRGAVRFRVRAAAAAPPAPAAKPGSPKKRGKTEVNESLLTPRFYTTDFDEMEQLFNAEINKQLNQDEFDALLQEFKTDYNQTHFIRNPEFKEAADKMQGPLRQIFVEFLERSCTAEFSGFLLYKELGRRLKKTNPVVAEIFSLMSRDEARHAGFLNKGLSDFNLALDLGFLTKARKYTFFKPKFIFYATYLSEKIGYWRYITIFRHLKANPEYQVYPIFKYFENWCQDENRHGDFFSALLKAQPQFLNDWKAKLWSRFFCLSVYITMYLNDCQRSAFYEGIGLNTK

SEQ ID NO: 29819 - DNA, 736 bp, Triticum aestivum
agccaaacaatttccttttccctatcctcccacagcctctttccactactaccaccgagccaccatcccctacaaggagagggcaaagaacacacattcactttgttgcttcaggttgcaacagctaaattaggctacaatggctctgaggctgtgggcaagctcagctgccaatgccctcaagatttcaagcagcggcgccagggccgctgccccggcctactcgatctccagatacttctccaccgttattgatggcttgaagtacacttcctcccacgagtgggtcaagaacgacggctccgtggccacgattggcatcagtgaccacgcccagggccatctcggggaggtggtgttcgtggagctgccggagaccggcacgaaggtgagccagggtggggccttcggcaacgtggagagtgtgaaggccaccagcgacgtcaactcgcccatctccggcgaggtcgtcgaggtcaattcgaagctgtccgagaccccgggcctgatcaactcgagcccgtacgaggaggggtggatgatcaaggtgaagccgagcagcccggcggagctggagggcctgctggactcggccaagtacaccaagcactgcgaggaggaggacgcccactagtgctcccttgttcgcttatcaatccttttgctgcaaccatatcgaatactcttgtctacaataattaaaccagcttcaccatgcgttcagttcatcggttcc

SEQ ID NO: 29820 - protein, 164 aa, Triticum aestivum
MALRLWASSAANALKISSSGARAAAPAYSISRYFSTVIDGLKYTSSHEWVKNDGSVATIGISDHAQGHLGEVVFVELPETGTKVSQGGAFGNVESVKATSDVNSPISGEVVEVNSKLSETPGLINSSPYEEGWMIKVKPSSPAELEGLLDSAKYTKHCEEEDAH

SEQ ID NO: 29821 - protein, 84 aa, Triticum aestivum
SQTISFSLSSHSLFPLLPPSHHPLQGEGKEHTFTLLLQVATAKLGYNGSEAVGKLSCQCPQDFKQRRQGRCPGLLDLQILLHRY

SEQ ID NO: 29822 - DNA, 1310 bp, Triticum aestivum
ctagaacatcctaatcgaaaaccacatcttctattttcaaatattcatctttaaggaactaatcagtcagaaatttgggcaatagttatttctccccattgtcaaccttgtcaattgaaagtactatatgagaaatctacacgcctggtaccatacctcggtgagtaactgagtactccagcttcatatgttagtggttctgatttcaggtgttttgtattacagggcatcaagtgtttatagcatacttctactattactccgtgactcaaacaattataaaataaggatgcatgcggctgttgctttagcagtgccagtcacaaggcttgattatggtagctcctttccagatgttgtcagaggcctcacacatgttcttgagtcattaagttcgaacagttcatcatcgccttcaaatttcaaacaccgggacaaccttgagaaacagcttacgtttactgctctgcatttgcttggttttgtttcaccgaaggatgaccaaagcctgaaagattttcttatcaagaaggcatcctttctggaagactggctgaagggtttatgctcagcattcaatagtgccgaggaccagcctctggcaagcgagaccataaatgacgaggatggtttcagcccaaatgtgtcacagaaagttatgttatcttctgctgtagtgtccttgctcaatgtatatacaagtggaaaccagcaagttattactcagagatttgagcaattggctagaagcacagcgtgagcgtcaaaaatcaatggtggtctccacacccatcaacgagcagcaagatattggtcatccaccttagagaagccaactcgcctatcaattggttcttgaggcttccaataaagcgaggcaacctgacctgtacgtcaatacattccatgaagtcgacgaagctgctgagttgggtgatttcagatcaagggcagctcctggcagctagccaagtagtcggtcaatgcagaattgccttgacatgttgtattctagtgtaaaaatagttgttgaatttcttccaggtttggccatgttgtacatcgtgtttacttatgatcactagtgtgcatacacggagcagacatgtatactgaaggattattcggctagatcagtactacagattaatagctagatcagtactacagactgtagttccatataaactgcaacattatggatttggcttgggttgaatgctttgttagaccacaagcatgatgattttggatctgtgagcgcaacagaaaatgaatgccggccatttcagctgggggtaccaaccgtt

SEQ ID NO: 29823 - protein, 190 aa, Triticum aestivum
MLVVLISGVLYYRASSVYSILLLLLRDSNNYKIRMHAAVALAVPVTRLDYGSSFPDVVRGLTHVLESLSSNSSSSPSNFKHRDNLEKQLTFTALHLLGFVSPKDDQSLKDFLIKKASFLEDWLKGLCSAFNSAEDQPLASETINDEDGFSPNVSQKVMLSSAVVSLLNVYTSGNQQVITQRFEQLARSTA

SEQ ID NO: 29824 - protein, 156 aa, Triticum aestivum
MHAAVALAVPVTRLDYGSSFPDVVRGLTHVLESLSSNSSSSPSNFKHRDNLEKQLTFTALHLLGFVSPKDDQSLKDFLIKKASFLEDWLKGLCSAFNSAEDQPLASETINDEDGFSPNVSQKVMLSSAVVSLLNVYTSGNQQVITQRFEQLARSTA

SEQ ID NO: 29825 - DNA, 1048 bp, Triticum aestivum
  misc_feature (976)..(976): n is a, c, g, or t
  misc_feature (1035)..(1035): n is a, c, g, or t
atcttttgtcctcctcctccgttgcgcagttggctcgcttgcttgcttgctgtaggtgagtgctgctggagacgggagccgggccgaggcggatcggggagaaggtgggaggcgggcgggtggtagatccggcgggcgtggctcgcgagaaggttggtgcgaggttggtggaggaggggagagaaggaggggatggagcggaaggcggtggtggtgtgcgcgctcgtcggcttcctcggcgtcctctccgccgcgctaggcttcgccgccgagggcacccgcgcgcaaggcctcctacctccatgacctcgcccgcaagtatgcgtcggggatcctctccgacgacaacatcgttgccatggacgaccgctccctcgccgccatgctcaccatggtcaacggcatcggcgcctggagtgttcacatgttcatgatcttctccctagcgcgcccggatgtgctcccctccgcggatctcgggatccgcaagggcgtgcagatgctgtatgggctggaggatgtgccccggccgtcgcagatggagaagctctgcgagcgctggcgcccttaccgctccgtcgccgcgtggtacatgtggcgcctcatcgagtccaaggcggcgcagacggcaggggccatgcctgtagtgccacctgcaatgcctgcgcccagtgaggagttcatgctccagcagcaccagcagcagcaccaccatcagcatcagcagcaacagcaacaagctgccatccaaatgctcgatccggttcagatgcttccaggattggggtgaatttggtatatactcgctctgctcatttgttcttgatgtgaaatggatgtcttaaacctgaatttgtcacttcatttgtgtatcattgttctgtatcggttgagaagtgtagcattggacaggaggatctcgaggcaacttcattatcagttatagttggtgttgtgttgttcatttgtaaatttntgctattttagacattgttgccctagacatatttgtatccgacgaataaatttagaccnagctgttatgtcc

SEQ ID NO: 29826 - protein, 143 aa, Triticum aestivum
MDDRSLAAMLTMVNGIGAWSVHMFMIFSLARPDVLPSADLGIRKGVQMLYGLEDVPRPSQMEKLCERWRPYRSVAAWYMWRLIESKAAQTAGAMPVVPPAMPAPSEEFMLQQHQQQHHHQHQQQQQQAAIQMLDPVQMLPGLG

SEQ ID NO: 29827 - protein, 135 aa, Triticum aestivum
MLTMVNGIGAWSVHMFMIFSLARPDVLPSADLGIRKGVQMLYGLEDVPRPSQMEKLCERWRPYRSVAAWYMWRLIESKAAQTAGAMPVVPPAMPAPSEEFMLQQHQQQHHHQHQQQQQQAAIQMLDPVQMLPGLG

SEQ ID NO: 29828 - protein, 132 aa, Triticum aestivum
MVNGIGAWSVHMFMIFSLARPDVLPSADLGIRKGVQMLYGLEDVPRPSQMEKLCERWRPYRSVAAWYMWRLIESKAAQTAGAMPVVPPAMPAPSEEFMLQQHQQQHHHQHQQQQQQAAIQMLDPVQMLPGLG

SEQ ID NO: 29829 - DNA, 581 bp, Triticum aestivum
aaaaccaaaccaaaccaaaccaaaggagaaatcgaaccctatcctctcctccccgcagccgcccaaaaccctagcgccggatctttctctgcagctcctctccccctaccaaccggattcatccgtcaatccatccatccatgatgggggaggccaaggagaacgacgtgtacgaggaggagctgctcgactacgaggaggacgacgacaaggccctcgacgcctcctccaccgccaacgccaagcccgccgccgacgccgcccaggccaagaagggctacgtcggcatccacagctccggattccgcgacttcctcctcaagcccgagctgctccgggccatccaggactgcggattcgagcacccctccgaaggtatactttctcctgacatttcccgttggagggaaatatggtaaaactttccattaacccgggacccagaagcttcactttttactcactggggtgctgctccgattttatttggttccttcctccacatcagtgcaacatgagtgcatccctcaagcaatcctcggaatggtgttaaacacaataaagttggaactggagggggg

SEQ ID NO: 29830 - protein, 129 aa, Triticum aestivum
KPNQTKPKEKSNPILSSPQPPKTLAPDLSLQLLSPYQPDSSVNPSIHDGGGQGERRVRGGAARLRGGRRQGPRRLLHRQRQARRRRRPGQEGLRRHPQLRIPRLPPQARAAPGHPGLRIRAPLRRYTFS

SEQ ID NO: 29831 - protein, 92 aa, Triticum aestivum
MMGEAKENDVYEEELLDYEEDDDKALDASSTANAKPAADAAQAKKGYVGIHSSGFRDFLLKPELLRAIQDCGFEHPSEGILSPDISRWREIW

SEQ ID NO: 29832 - protein, 91 aa, Triticum aestivum
MGEAKENDVYEEELLDYEEDDDKALDASSTANAKPAADAAQAKKGYVGIHSSGFRDFLLKPELLRAIQDCGFEHPSEGILSPDISRWREIW

SEQ ID NO: 29833 - DNA, 534 bp, Triticum aestivum
aaaaaaatccccaccccggtcaaccccacctcccacccccgatacccactcccacatcccacagcccacagccgccacggccctcgccgccggcgcgcgtcccacaaccaccatctcccatgggcgccaaggtccctaccacaggcgcgcgtgccaccgctgccacatcccacaggagccatggtccctaccgccggcgcgcgcgccaccgccaccacctcctgcaggcgccatggtccatgccgccggcacgcgtgccaccgccaccacctcccacagccgccgcggcccccgccgccggtgtgcgccctgccatctccacctcccagagcctccatggccctgtcgccggggagcgccccgccacaaccactgccgttggacgccgtcgccgtgccccccgcacgccagtggctccgagacctcgtcggacatgaccgtggcatccctgaactgccaagcgccgcccaacacccggcttcttcccctgaccactgtcggcctcctaccccgggcaaacccttctcttccttc

SEQ ID NO: 29834 - protein, 178 aa, Triticum aestivum
KKIPTPVNPTSHPRYPLPHPTAHSRHGPRRRRASHNHHLPWAPRSLPQARVPPLPHPTGAMVPTAGARATATTSCRRHGPCRRHACHRHHLPQPPRPPPPVCALPSPPPRASMALSPGSAPPQPLPLDAVAVPPARQWLRDLVGHDRGIPELPSAAQHPASSPDHCRPPTPGKPFSSF

SEQ ID NO: 29835 - protein, 177 aa, Triticum aestivum
KKSPPRSTPPPTPDTHSHIPQPTAATALAAGARPTTTISHGRQGPYHRRACHRCHIPQEPWSLPPARAPPPPPPAGAMVHAAGTRATATTSHSRRGPRRRCAPCHLHLPEPPWPCRRGAPRHNHCRWTPSPCPPHASGSETSSDMTVASLNCQAPPNTRLLPLTTVGLLPRANPSLP

SEQ ID NO: 29836 - protein, 144 aa, Triticum aestivum
KNPHPGQPHLPPPIPTPTSHSPQPPRPSPPARVPQPPSPMGAKVPTTGARATAATSHRSHGPYRRRARHRHHLLQAPWSMPPARVPPPPPPTAAAAPAAGVRPAISTSQSLHGPVAGERPATTTAVGRRRRAPRTPVAPRPRRT

SEQ ID NO: 29837 - protein, 118 aa, Triticum aestivum
MVPTAGARATATTSCRRHGPCRRHACHRHHLPQPPRPPPPVCALPSPPPRASMALSPGSAPPQPLPLDAVAVPPARQWLRDLVGHDRGIPELPSAAQHPASSPDHCRPPTPGKPFSSF

SEQ ID NO: 29838 - DNA, 520 bp, Triticum aestivum
  misc_feature (406)..(406): n is a, c, g, or t
gtgagccgtccacatcctgtcgcgccgtcaagtaactgctacatggcctggtgcgccctgcgcagccgcctcctcccgctctccccctcctcctccgccgccgccgccgccgcgacgccccaccggctcctcctctgcctcctctccaccgcggccccgcgccactcccacggccaccaccaccgccgccgccactcgcccgccgcctacgccgccgcggccgaggagtcgccgcgccccatgccgcccatcggtcgcgccacgcgccaccccgcgggggccacccccatcgcgcgcttctacgccgacgccaactcccagcggcccaaggagtactgggactacgaggcgctcgacatcgagtggggggagcaggatgggtacgaggtgctgcggaaggtgggcnagggcaagtacagcgaggtgttcgagggattgcggaccgggagcgaagagaggtgcgtcatcaagatcctcaagcccgtgaggaagaagaagatwaagagggaaatamagatac

SEQ ID NO: 29839 - protein, 173 aa, Triticum aestivum
  misc_feature (136)..(136): Xaa can be any naturally occurring amino acid
  misc_feature (167)..(167): Xaa can be any naturally occurring amino acid
  misc_feature (172)..(172): Xaa can be any naturally occurring amino acid
VSRPHPVAPSSNCYMAWCALRSRLLPLSPSSSAAAAAATPHRLLLCLLSTAAPRHSHGHHHRRRHSPAAYAAAAEESPRPMPPIGRATRHPAGATPIARFYADANSQRPKEYWDYEALDIEWGEQDGYEVLRKVGXGKYSEVFEGLRTGSEERCVIKILKPVRKKKXKREIXI

SEQ ID NO: 29840 - protein, 159 aa, Triticum aestivum
  misc_feature (122)..(122): Xaa can be any naturally occurring amino acid
  misc_feature (153)..(153): Xaa can be any naturally occurring amino acid
  misc_feature (158)..(158): Xaa can be any naturally occurring amino acid
MAWCALRSRLLPLSPSSSAAAAAATPHRLLLCLLSTAAPRHSHGHHHRRRHSPAAYAAAAEESPRPMPPIGRATRHPAGATPIARFYADANSQRPKEYWDYEALDIEWGEQDGYEVLRKVGXGKYSEVFEGLRTGSEERCVIKILKPVRKKKXKREIXI

SEQ ID NO: 29841 - protein, 93 aa, Triticum aestivum
  misc_feature (56)..(56): Xaa can be any naturally occurring amino acid
  misc_feature (87)..(87): Xaa can be any naturally occurring amino acid
  misc_feature (92)..(92): Xaa can be any naturally occurring amino acid
MPPIGRATRHPAGATPIARFYADANSQRPKEYWDYEALDIEWGEQDGYEVLRKVGXGKYSEVFEGLRTGSEERCVIKILKPVRKKKXKREIXI

SEQ ID NO: 29842 - DNA, 944 bp, Triticum aestivum
ccactcacgctgccgcggcggccacccccgcccgccgctgcgctcgcattcgcgtctccaccggtccttcccgcgccacggccgcgcacccgacctgatcccccgcgccgctcgcgagccgccatccagcagagatgccggccctgaggccgccgccgccgcgcctcatgctcaacgccgtctcctgcatgcggaacgcgcagacggttctccgggacatcaacgtcagcgtccacgacggcacggcgctcgtcctcacgggcgccaacggctccggcaagaccaccttcctgcggatgctggccggcttctcgcgcccctcggccggggagatcctctggaacggccacgacgtcacctccccgggggtcttccagcagtacaagctgcagctcaactggatgtcgctcaaggacgccgtcaaggagaagctcaccgtgctggagaacgtccagtggttcgagctcctcgagggcaagcacggcaggtccgcccccgccatcgagctcatgggcctcggccggctcatgaacgacaaggccaggatgctctccatggggcagaggaagcgcctgcagctcgccaggctgctcgccatcgaccgcccgatctggctcctggacgagccctccgtcgcgctcgactccgagggtgtcaagctgctcgagtacatcatagcggagcaccgcaagaagggtgggatcgtcatcgtcgccacgcatttgcccattgagatcgaggattccatgaacctccggcttccgcagcggttccccaggaggaaaactctggttgatcttgtgcgttgattgattggagctcaaaatatgtagctgtatctttctaattcttctccagccatacaagttttgcgttggagcaacttctgatggtgcaattttgtgacactttcttctggaaaataagaacatatttgccatgcc

SEQ ID NO: 29843 - protein, 243 aa, Triticum aestivum
HSRCRGGHPRPPLRSHSRLHRSFPRHGRAPDLIPRAAREPPSSRDAGPEAAAAAPHAQRRLLHAERADGSPGHQRQRPRRHGARPHGRQRLRQDHLPADAGRLLAPLGRGDPLERPRRHLPGGLPAVQAAAQLDVAQGRRQGEAHRAGERPVVRAPRGQARQVRPRHRAHGPRPAHERQGQDALHGAEEAPAARQAARHRPPDLAPGRALRRARLRGCQAARVHHSGAPQEGWDRHRRHAFAH

SEQ ID NO: 29844 - protein, 224 aa, Triticum aestivum
MPALRPPPPRLMLNAVSCMRNAQTVLRDINVSVHDGTALVLTGANGSGKTTFLRMLAGFSRPSAGEILWNGHDVTSPGVFQQYKLQLNWMSLKDAVKEKLTVLENVQWFELLEGKHGRSAPAIELMGLGRLMNDKARMLSMGQRKRLQLARLLAIDRPIWLLDEPSVALDSEGVKLLEYIIAEHRKKGGIVIVATHLPIEIEDSMNLRLPQRFPRRKTLVDLVR

SEQ ID NO: 29845 - protein, 213 aa, Triticum aestivum
MLNAVSCMRNAQTVLRDINVSVHDGTALVLTGANGSGKTTFLRMLAGFSRPSAGEILWNGHDVTSPGVFQQYKLQLNWMSLKDAVKEKLTVLENVQWFELLEGKHGRSAPAIELMGLGRLMNDKARMLSMGQRKRLQLARLLAIDRPIWLLDEPSVALDSEGVKLLEYIIAEHRKKGGIVIVATHLPIEIEDSMNLRLPQRFPRRKTLVDLVR

SEQ ID NO: 29846 - DNA, 1013 bp, Triticum aestivum
attgcataaatatgtgaaatcattatttcattaccagctgtgttaccagaggtgtaaagttaaaatggaatatatactaagctagagccgagaggtttcaaactatttgcattctaattccagcctttcaattttccaacagtatttcaatcaaatattaatgaccgtacttgacgtgctgggtgactccgatccatctactagggagattgctttgtctttaattgctgagatgctcaacaatcagaaagacgctatggaagaatctattgagattgttcttgaaaaacttctgcatgtgacgaaagatgtggtggcaaagatttcaaatgaagcgaacagatgcataaatgttttgttggcaaaatacgatcctttcagatgtcttgctgttgtagtacctcttttggtcagtgatgatgaaaagatgctcgttgtgtgtatcaactgtttgacaaagcttgtcgcgcaccttccccaagaggaattgatggatcagctgcctacatttttgccagcactgtttgatgcttttagtaaccaaagtccagatgttcgaaagagtgttgtattctgcttggtggacatctacatcatgctggggaaagcgtttgtgccgtacctggaagggctgagcagcacacagctgcgcttggtgaccatctacgcgaaccggatttcgcaggcaaggtccggcacggcgattgacagcgctaaccaatgaggtgtaacattcttctgttttatatggacattttgtttggtaggggagtgagatttttggggggtcccgtttgtttgtgtaggtttgtgtatagtatataagcaaacgattcccttgtatttgggtgtttcctggctttggttctttgtgtgattatgtattccttttaactttttctttttcttttggttagcatgtggagaggagtgttagcgagcttgtgttgtcttgggttgtacaactaggtgacaatgtacaaagaaaggaaatgtaacgtaatggagaaagt

SEQ ID NO: 29847 - protein, 187 aa, Triticum aestivum
MTVLDVLGDSDPSTREIALSLIAEMLNNQKDAMEESIEIVLEKLLHVTKDVVAKISNEANRCINVLLAKYDPFRCLAVVVPLLVSDDEKMLVVCINCLTKLVAHLPQEELMDQLPTFLPALFDAFSNQSPDVRKSVVFCLVDIYIMLGKAFVPYLEGLSSTQLRLVTIYANRISQARSGTAIDSANQ

SEQ ID NO: 29848 - protein, 163 aa, Triticum aestivum
MLNNQKDAMEESIEIVLEKLLHVTKDVVAKISNEANRCINVLLAKYDPFRCLAVVVPLLVSDDEKMLVVCINCLTKLVAHLPQEELMDQLPTFLPALFDAFSNQSPDVRKSVVFCLVDIYIMLGKAFVPYLEGLSSTQLRLVTIYANRISQARSGTAIDSANQ

SEQ ID NO: 29849 - protein, 155 aa, Triticum aestivum
MEESIEIVLEKLLHVTKDVVAKISNEANRCINVLLAKYDPFRCLAVVVPLLVSDDEKMLVVCINCLTKLVAHLPQEELMDQLPTFLPALFDAFSNQSPDVRKSVVFCLVDIYIMLGKAFVPYLEGLSSTQLRLVTIYANRISQARSGTAIDSANQ

SEQ ID NO: 29850 - DNA, 719 bp, Triticum aestivum
acatggtaatggattttcaaaagaagaacaggaagcgaaagaccaaggtggaaacctcagacgacgagttatcacaggcgtcacttgatgaacaggcgccacttgatgaacggtcaccaaaagccaatgcggtaaccttaaatgagaagtatcacagacggtctttcctcctgttgtaaacaaaactggcatccagattgaacaggcgccacttggtgaacgagagaagtacattgttgagctggaaaggaagttgagtgaaagggatagagaattggaagctttgaagtttgatcataaaaaggcaggatcttcttgcagtgcagacgaaatagcttgcaaaagacagtgccatggagcgcgaagcgaggatgctcagggagaacacttactttgatgtggatctgtgcagcggcggacgatgctaccgcaagctgatggtgcctgggcttagtggaggatgtttgggaccttgtttgtgcgttttatcttcagctctgagcatcccctttctttcagactttattctctattgctggtgtcgtctgcttttcgccccataacaattgttttgatggtgagcattttctgtgggtttcaaaaaaaaaaaaaaaaaaaaaaaaaaaaaaaaaaaaaaaaaaaaaaaaaaaaaaaaaaaaaaaaggaaaaaaaaaaaaaaaaaggtttatcgataccgccaacctcaagggggggcccgg

SEQ ID NO: 29851 - protein, 86 aa, Triticum aestivum
MFGTLFVRFIFSSEHPLSFRLYSLLLVSSAFRPITIVLMVSIFCGFQKKKKKKKKKKKKKKKKKKKKKEKKKKKGLSIPPTSRGGP

SEQ ID NO: 29852 - protein, 69 aa, Triticum aestivum
MEREARMLRENTYFDVDLCSGGRCYRKLMVPGLSGGCLGPCLCVLSSALSIPFLSDFILYCWCRLLFAP

SEQ ID NO: 29853 - protein, 63 aa, Triticum aestivum
MLRENTYFDVDLCSGGRCYRKLMVPGLSGGCLGPCLCVLSSALSIPFLSDFILYCWCRLLFAP

SEQ ID NO: 29854 - DNA, 923 bp, Triticum aestivum
tctcctttctcctcacctcctccgttcctcccctgccatcggtggggtcgctgccgccatccttcccaccgccgccgtctccgtcctgctgccccgacctcacccagaaccctagctcgccctaggccgtgtttccgctgccgattggtccatccgtgagttgtttgctcccgtttccgcgtcgtcgtctatgagtctagcagccgaatcgccgtcgccgtccccgtcgtcgtcgagcggcagcgacgatttcgctgcgctcctagacgcggagctggatctcgcctctgccgtcgactccgcctctgcgggcgacccctccacatcacccacaagcagcgatgacaaagaggacgacgatgaagacgcggtggccgatgtagaaaccgtggagcagagcagtgccaaaaggcgtaaagtgaaggtgcaataccaagatcgagaaacggcaataaggcctgacgaagattccattggttcatctgaagatgctcaaatcaagatatgtcctccacatcctggatattttggtggactttgctttaggtgtgggaaaagacaagacgaggaagatgttccaggggttgcttttggttatgtccacaagggtttgaggctaggtacatcagaaattgacagattgcgtggatctgatttgaagaatttgctgcgtgaaagaaaactgatacttattttagacttggaccatacacttatcaactcgacaaaactccatgatatttctgctgctgaaaataacctgggaattcagactgctgcatcaaaagacgatccaaatggaagcttgttcacattagaaggaatgcagatgcttacaaagttgagaccctttgtccgtaaatttctaaaagaagcaagcaatatgtttgagatgtatatatacaccatgggcgacaaggctt

SEQ ID NO: 29855 - protein, 244 aa, Triticum aestivum
MSLAAESPSPSPSSSSGSDDFAALLDAELDLASAVDSASAGDPSTSPTSSDDKEDDDEDAVADVETVEQSSAKRRKVKVQYQDRETAIRPDEDSIGSSEDAQIKICPPHPGYFGGLCFRCGKRQDEEDVPGVAFGYVHKGLRLGTSEIDRLRGSDLKNLLRERKLILILDLDHTLINSTKLHDISAAENNLGIQTAASKDDPNGSLFTLEGMQMLTKLRPFVRKFLKEASNMFEMYIYTMGDKA

SEQ ID NO: 29856 - DNA, 880 bp, Triticum aestivum
agtcactcaccggcgccaccagtaccacccccacccaccccacctccttcctcctttgctcctgctcgctcggcagccatggcgcgagcctcgagcctgtcgctgctgctcgcgctggtggtcgcggcggcgacgtcggcggcgggggccagggtgccggtggacgcggccgggaacgcgacgctgggcgagctccgcgcgcggcgggggcggcgggaggcgctcgagaacggcctcggcaggacgccgcagatggggtggaacagctggaaccacttctactgcgggatcagcgaggagatcatcagggagacagctgatgcattgatcaacaccggtctggcccaattgggctataaatatgttaacatcgatgattgctgggcagagttaaacagggattaccagggtaacatggttccaaacaaaagaacattcccctctggcatcaaggcgcttgcagattatgtgcacgccaaagggttgaagctcggtatctacagtgatgctgggacacaaacatgcagtaacaaaatgccaggatcgctcgatcacgaagagcaagacgtgaagacttttgcatcttggggagttgattatctgaagtatgacaactgcaatgatgctggcaggagtgtcaacgaaagatacactaggatgagcaacgccatgaagaaatacgggcagaacatcttcttctcactctgtgaatggggaaacgaataccctgctacatgggcacgtggcatgggcggtaatagctggaggacaactggcgacattgctgacaactggggcagcatgacatcccgcgcggaccagaatgacaaatgggcctcctacgctggacctggtggatggaacgatcctgatatgcttg

SEQ ID NO: 29857 - protein, 293 aa, Triticum aestivum
SHSPAPPVPPPPTPPPSSFAPARSAAMARASSLSLLLALVVAAATSAAGARVPVDAAGNATLGELRARRGRREALENGLGRTPQMGWNSWNHFYCGISEEIIRETADALINTGLAQLGYKYVNIDDCWAELNRDYQGNMVPNKRTFPSGIKALADYVHAKGLKLGIYSDAGTQTCSNKMPGSLDHEEQDVKTFASWGVDYLKYDNCNDAGRSVNERYTRMSNAMKKYGQNIFFSLCEWGNEYPATWARGMGGNSWRTTGDIADNWGSMTSRADQNDKWASYAGPGGWNDPDML

SEQ ID NO: 29858 - protein, 267 aa, Triticum aestivum
MARASSLSLLLALVVAAATSAAGARVPVDAAGNATLGELRARRGRREALENGLGRTPQMGWNSWNHFYCGISEEIIRETADALINTGLAQLGYKYVNIDDCWAELNRDYQGNMVPNKRTFPSGIKALADYVHAKGLKLGIYSDAGTQTCSNKMPGSLDHEEQDVKTFASWGVDYLKYDNCNDAGRSVNERYTRMSNAMKKYGQNIFFSLCEWGNEYPATWARGMGGNSWRTTGDIADNWGSMTSRADQNDKWASYAGPGGWNDPDML

SEQ ID NO: 29859 - protein, 209 aa, Triticum aestivum
MGWNSWNHFYCGISEEIIRETADALINTGLAQLGYKYVNIDDCWAELNRDYQGNMVPNKRTFPSGIKALADYVHAKGLKLGIYSDAGTQTCSNKMPGSLDHEEQDVKTFASWGVDYLKYDNCNDAGRSVNERYTRMSNAMKKYGQNIFFSLCEWGNEYPATWARGMGGNSWRTTGDIADNWGSMTSRADQNDKWASYAGPGGWNDPDML

SEQ ID NO: 29860 - DNA, 770 bp, Triticum aestivum
catttcggtttcctgccacctttacatttgtggtcagagcattctcagtactggatggtattgggaaaggtttagatcctagatttgatattacagagattgctaagccttatgccatggagttgctcagatttaatgaagctggtgttgaagtacttgttaaggatgcaaggaagcggtgggacaggcagtctcgtgcattctacaatgtgttccgtcaacctgacagagtcgaaaaacttgcacagatcattgagcgtttggagcaaggtgatctcaagcttcgtgtcagagcattagaatcggaaagatcgtttcaaagagttgctgctgtacagaaaacaattggatatggagtggctgcgggcagtttggtaaacctcgctaccattctgcacctcaattctatccggatgccagcaaccatcggatactgtctttgtgcgttctttggactacaaatcctgcttggcgttctcaaggtgaagaagctggaccaacaagagagattgataaccggcactgcctgagttcaccatcgaccagtgagagctgacccaaaagatttcagtgtaatacgttgcggttatcatccgctttttcttttccttttgcctgtgtgcagttttacctcagaggtggtgtagcatagccatcggcgtacgagtatgaaatctttgtacatgcggtgtaatagatgaagagatgtacatactgtacaattgcagggtaaatataagcagtatagcacagctcgtgcaacctgtttc

SEQ ID NO: 29861 - protein, 175 aa, Triticum aestivum
FRFPATFTFVVRAFSVLDGIGKGLDPRFDITEIAKPYAMELLRFNEAGVEVLVKDARKRWDRQSRAFYNVFRQPDRVEKLAQIIERLEQGDLKLRVRALESERSFQRVAAVQKTIGYGVAAGSLVNLATILHLNSIRMPATIGYCLCAFFGLQILLGVLKVKKLDQQERLITGTA

SEQ ID NO: 29862 - protein, 137 aa, Triticum aestivum
MELLRFNEAGVEVLVKDARKRWDRQSRAFYNVFRQPDRVEKLAQIIERLEQGDLKLRVRALESERSFQRVAAVQKTIGYGVAAGSLVNLATILHLNSIRMPATIGYCLCAFFGLQILLGVLKVKKLDQQERLITGTA

SEQ ID NO: 29863 - DNA, 1435 bp, Triticum aestivum
gtgcccgccccgacctcaaactcccgtcgccacccgctctcctcccctctcccctcccctcccctcccctcgcgccggccacgatcgaggcatggcgacgatgacgaccacgaccaccacgacgaagacggcgctgcgccaccgcgggtgctgcgggcacgcgccggcgccggcggaggacggcggcgacctggtggcgctgtcgagcgcggcggcggaggggctcgggaaagaggccgccaggtgggccggcgggctgccgcggctgaagcggttcgaggagctgccggactacctccgcgacaacgagttcatccgcggcggctaccgctgcgagtggtccgtccgcgacgcgctccgcagcgtcttcgcctggcacaacgagacgctcaacgtctggacccatctggggggcttcttcctgttcctggggctcgccgtcgccggccagacggagtggcggccggccggagcagccgcggcgccggggttcatgacgatggtgatgacgtccgccaacgcgtcgtcgttggcgaccaacaacagttcgagcacggcgatccagagcgcgctggcgtcgggcatcggcggcgcggggcacgcggtggcgcggtggccgcggacggtgttcgtgttgggggccatgacgtgcctgtcggtgagcgctgcggcgcacctgctggcaagccactcgcgccgcttcaaccggctcttctggcagctcgactacgccggcatcgccgtcatgatcgtcgcctccttcttcccgccggtctactacaccttcctcggcagccccgtcgcacagctcgcctacctctccgccatcacgctgctcggcgtgctcgtcgtggcggcgctcctggtgccggcccgctcgtcgccgcggctgcggcacctccgcgccggcctgttcgtgtccatggggctctcgggcgtcgtgccggcgctgcacgcgctctggctcaactggggccacccggagtgctacctggcgctgtcgctggagctggccatggggctcgtgtacgccacgggcgccggcttctacgtcgcgcgcgtgccggagcggtggcgcccgggcatgttcgactgcgtcggccacagccaccagatcttccacgtgctggtgctcgtcggcgccgtcacgcactacgccgccaccgccatcctcatcggctggcgcgacgccctggccgcggccgcgtcggcgctcttgtgacgccgcgcgtaggatgcataggcgtagggtgtgccattgattcgttgattcgtgtaactagcttagatgattctttgaacgtgtatcagatcaagtttgtgctcctggctttcttactgtcggtctgcactctgtgtttctgtaatgttgaatggcgtacagcggctgaggtgcaaaaggaaaagggacgagcactgcaacttttttacttgc

SEQ ID NO: 29864 - protein, 478 aa, Triticum aestivum
VPAPTSNSRRHPLSSPLPSPPLPSRRPRSRHGDDDDHDHHDEDGAAPPRVLRARAGAGGGRRRPGGAVERGGGGARERGRQVGRRAAAAEAVRGAAGLPPRQRVHPRRLPLRVVRPRRAPQRLRLAQRDAQRLDPSGGLLPVPGARRRRPDGVAAGRSSRGAGVHDDGDDVRQRVVVGDQQQFEHGDPERAGVGHRRRGARGGAVAADGVRVGGHDVPVGERCGAPAGKPLAPLQPALLAARLRRHRRHDRRLLLPAGLLHLPRQPRRTARLPLRHHAARRARRGGAPGAGPLVAAAAAPPRRPVRVHGALGRRAGAARALAQLGPPGVLPGAVAGAGHGARVRHGRRLLRRARAGAVAPGHVRLRRPQPPDLPRAGARRRRHALRRHRHPHRLARRPGRGRVGALVTPRVGCIGVGCAIDSLIRVTSLDDSLNVYQIKFVLLAFLLSVCTLCFCNVEWRTAAEVQKEKGRALQLFYL

SEQ ID NO: 29865 - protein, 406 aa, Triticum aestivum
CPPRPQTPVATRSPPLSPPLPSPRAGHDRGMATMTTTTTTTKTALRHRGCCGHAPAPAEDGGDLVALSSAAAEGLGKEAARWAGGLPRLKRFEELPDYLRDNEFIRGGYRCEWSVRDALRSVFAWHNETLNVWTHLGGFFLFLGLAVAGQTEWRPAGAAAAPGFMTMVMTSANASSLATNNSSSTAIQSALASGIGGAGHAVARWPRTVFVLGAMTCLSVSAAAHLLASHSRRFNRLFWQLDYAGIAVMIVASFFPPVYYTFLGSPVAQLAYLSAITLLGVLVVAALLVPARSSPRLRHLRAGLFVSMGLSGVVPALHALWLNWGHPECYLALSLELAMGLVYATGAGFYVARVPERWRPGMFDCVGHSHQIFHVLVLVGAVTHYAATAILIGWRDALAAAASALL

SEQ ID NO: 29866 - protein, 376 aa, Triticum aestivum
MATMTTTTTTTKTALRHRGCCGHAPAPAEDGGDLVALSSAAAEGLGKEAARWAGGLPRLKRFEELPDYLRDNEFIRGGYRCEWSVRDALRSVFAWHNETLNVWTHLGGFFLFLGLAVAGQTEWRPAGAAAAPGFMTMVMTSANASSLATNNSSSTAIQSALASGIGGAGHAVARWPRTVFVLGAMTCLSVSAAAHLLASHSRRFNRLFWQLDYAGIAVMIVASFFPPVYYTFLGSPVAQLAYLSAITLLGVLVVAALLVPARSSPRLRHLRAGLFVSMGLSGVVPALHALWLNWGHPECYLALSLELAMGLVYATGAGFYVARVPERWRPGMFDCVGHSHQIFHVLVLVGAVTHYAATAILIGWRDALAAAASALL

SEQ ID NO: 29867 - DNA, 582 bp, Triticum aestivum
aaaacgacgcgagtacgcaccaatagtcagcggaaaaggtcacacctcccagactcccactacagtagtagtactgcaaaggaaacgggaatatcccgtctttccggccacccggcgtgagccaaaggaggcaggatcccggcgatggcggttcccggaggggacggagaggggcgggggcggccggtggtgctggtgacaggttgttcggaggggggcatcgggcacgcgatggcgcgcgcgttcgcggcggagaggtgtgcggtcgtggccacggcgcggtcgcgcgcgtccatgcgcgggctcgagggtgacccgcggtacctgcttctggagctcgacgtgcgttccgaagagagcgcgcgccgcgccgttgaggactccctgcgggagctaggccgcgtcgacgtgctcgtcaacaacgcgggggtccacctcgtcgcgccggtggctgaggtgcccatggagtcgttccaccaggtttttgacaccaatgtttatggaacaatgaggatgattcaagcagttattccccatatgatggaaagaaaagaaggtacaattgtgaatgttggaagcatt

SEQ ID NO: 29868 - protein, 146 aa, Triticum aestivum
MAVPGGDGEGRGRPVVLVTGCSEGGIGHAMARAFAAERCAVVATARSRASMRGLEGDPRYLLLELDVRSEESARRAVEDSLRELGRVDVLVNNAGVHLVAPVAEVPMESFHQVFDTNVYGTMRMIQAVIPHMMERKEGTIVNVGSI

SEQ ID NO: 29869 - protein, 117 aa, Triticum aestivum
MARAFAAERCAVVATARSRASMRGLEGDPRYLLLELDVRSEESARRAVEDSLRELGRVDVLVNNAGVHLVAPVAEVPMESFHQVFDTNVYGTMRMIQAVIPHMMERKEGTIVNVGSI

SEQ ID NO: 29870 - protein, 96 aa, Triticum aestivum
MRGLEGDPRYLLLELDVRSEESARRAVEDSLRELGRVDVLVNNAGVHLVAPVAEVPMESFHQVFDTNVYGTMRMIQAVIPHMMERKEGTIVNVGSI

SEQ ID NO: 29871 - DNA, 1031 bp, Triticum aestivum
aacggcgacgagcgaatcgcgtgaatgagatgagatgggactgggagacgccggcgacggaagcggaggcggaggcgttgcaggagcgcatctgggacctccacgacaagctcagccacgccatcctcgccctctccgcctgcgccggccttccggcctgccgctgccggggcgcccccaacggccacgtaatcctcaaggggcagcggccgccgcaggggggagggcacgtcgaccttgccgcggcggcggcggccatggcggacgcgcggggcctgcacgccatccgcaccgcgctcgaggaccttgagggccacctccacttccttcgcgatgttcagtcacaacagcgtgccgatcgagatgccgcgattgctagggtgcagcaaagtcgtattctccttgctgcaaggttggctgaacatagaggaaaggggcatggagtcattgaggaagccttgggttttgtgggtgatgtgcgtgacaagagccattttgtctcgcccgaagatgtgtatgggatgcacagccaatcaggggaagatgaggaggatcgcagggggcatggttcaaacatggtggtgcgtgtggtatcctgcagttttgctttagccaagaacattttaagattcgagacgatgggtagtgtgctgggtaatgctactgtgtttgcagtaagtatgctcacattcttgcagcttcatcaattggcctctggtaaacaaatgccagcggtccagtataggagaaccgacaatgtttctctctctggagggtcaagaaaagacactaaaggaaagcatctggaagtgttattagctagaggttgagcaatcatcagatacaggaagctttgttctcctttgagttttggtcggttttgttaggtcactaggcactagccattgcattcttttggatggggctggtctacagtctaccttcatcgttagaagctgtaccacacaggatgtaaatggtttgagattagcaatagatgcactggaagaatctgcaagtcggttcccttt

SEQ ID NO: 29872 - protein, 275 aa, Triticum aestivum
RRRANRVNEMRWDWETPATEAEAEALQERIWDLHDKLSHAILALSACAGLPACRCRGAPNGHVILKGQRPPQGGGHVDLAAAAAAMADARGLHAIRTALEDLEGHLHFLRDVQSQQRADRDAAIARVQQSRILLAARLAEHRGKGHGVIEEALGFVGDVRDKSHFVSPEDVYGMHSQSGEDEEDRRGHGSNMVVRVVSCSFALAKNILRFETMGSVLGNATVFAVSMLTFLQLHQLASGKQMPAVQYRRTDNVSLSGGSRKDTKGKHLEVLLARG

SEQ ID NO: 29873 - protein, 266 aa, Triticum aestivum
MRWDWETPATEAEAEALQERIWDLHDKLSHAILALSACAGLPACRCRGAPNGHVILKGQRPPQGGGHVDLAAAAAAMADARGLHAIRTALEDLEGHLHFLRDVQSQQRADRDAAIARVQQSRILLAARLAEHRGKGHGVIEEALGFVGDVRDKSHFVSPEDVYGMHSQSGEDEEDRRGHGSNMVVRVVSCSFALAKNILRFETMGSVLGNATVFAVSMLTFLQLHQLASGKQMPAVQYRRTDNVSLSGGSRKDTKGKHLEVLLARG

SEQ ID NO: 29874 - protein, 190 aa, Triticum aestivum
MADARGLHAIRTALEDLEGHLHFLRDVQSQQRADRDAAIARVQQSRILLAARLAEHRGKGHGVIEEALGFVGDVRDKSHFVSPEDVYGMHSQSGEDEEDRRGHGSNMVVRVVSCSFALAKNILRFETMGSVLGNATVFAVSMLTFLQLHQLASGKQMPAVQYRRTDNVSLSGGSRKDTKGKHLEVLLARG

SEQ ID NO: 29875 - DNA, 700 bp, Triticum aestivum
atttgtggatgaggttgacagcttacttggtgcaaggggtggtgcaatggagcatgaagcaacgagaaggatgcgcaatgaatttatggcagcttgggatggtctaaggtccaaagacagtcaaaggatccttattcttggtgcaacaaaccgtccatttgatctagatgacgctgtaatacgtcgtttgcctaggaggatatacgtggaccttccggatgcgcagaataggatgaaaattctcaagatattacttgccaaagaaaacatagaatgtgaatttggatttgacgaactagccaatgcaacagaaggttactctgggagtgacttgaagaacctatgcgtagctgcagcatacaggccagttcatgaactgctagaagaagaaaagaagggggctgcgggcagtacgaaaacttctttaaggtccttgaagctggatgactttgtccaagcaaaagccaaggtgagcccatccgttgcttttgatgccacgagcatgaacgagctaagaaaatggaacgaacagtacggcgaaggtggcagcaggagtaaatcgccatttgggttcggcagctaacacgattccggtagcaattttgccacactgtatcacttgtagtaccaatgtgctccgatttagccatagggtgtcagatcggcgatagcgctattcctttgaaactttgatgtgcgc

SEQ ID NO: 29876 - protein, 193 aa, Triticum aestivum
FVDEVDSLLGARGGAMEHEATRRMRNEFMAAWDGLRSKDSQRILILGATNRPFDLDDAVIRRLPRRIYVDLPDAQNRMKILKILLAKENIECEFGFDELANATEGYSGSDLKNLCVAAAYRPVHELLEEEKKGAAGSTKTSLRSLKLDDFVQAKAKVSPSVAFDATSMNELRKWNEQYGEGGSRSKSPFGFGS

SEQ ID NO: 29877 - protein, 178 aa, Triticum aestivum
MEHEATRRMRNEFMAAWDGLRSKDSQRILILGATNRPFDLDDAVIRRLPRRIYVDLPDAQNRMKILKILLAKENIECEFGFDELANATEGYSGSDLKNLCVAAAYRPVHELLEEEKKGAAGSTKTSLRSLKLDDFVQAKAKVSPSVAFDATSMNELRKWNEQYGEGGSRSKSPFGFGS

SEQ ID NO: 29878 - protein, 170 aa, Triticum aestivum
MRNEFMAAWDGLRSKDSQRILILGATNRPFDLDDAVIRRLPRRIYVDLPDAQNRMKILKILLAKENIECEFGFDELANATEGYSGSDLKNLCVAAAYRPVHELLEEEKKGAAGSTKTSLRSLKLDDFVQAKAKVSPSVAFDATSMNELRKWNEQYGEGGSRSKSPFGFGS

SEQ ID NO: 29879 - DNA, 587 bp, Triticum aestivum
agaaaaggaaagggagatgctctgaaagtgtacgactggtagtccgctagtccaggcatccccatctgtccctgattttgtcactccgtcggatccgggcgtcgatggaggggagcgcggggcctcgccggagttccacccaggaggtaggcagcccaggcggcgaagcggacctcatcagcgcgctccccgacgaggtgctcctcctcttcctcgcccgcctcccctgcgccggcgccgccgcgcgcaccagcgtcctctcccgccggtggcgcggcctctgggcgctcctccgccagatcgtcttccgcgacgtgcccttccgctcgctcgaggcggcgctcggccgcgtcccgcctcccccgcacgcggtttccctcctctaaatctccgtccccaaggagcagcggacagacagcgccggcgtcaactcgctgctccgcgccgccgcgcggctggagccggagaagctcgacttccgcctcccctcccacttaaccgacccgccttccgaaagcagtctcgtcgccgtcgacctgccttgctcgcaccgcgccacctccatctcgctgggcctctccaccccc

SEQ ID NO: 29880 - protein, 93 aa, Triticum aestivum
MEGSAGPRRSSTQEVGSPGGEADLISALPDEVLLLFLARLPCAGAAARTSVLSRRWRGLWALLRQIVFRDVPFRSLEAALGRVPPPPHAVSLL

SEQ ID NO: 29881 - DNA, 1683 bp, Triticum aestivum
aacgaagtcagcaacaatcatccagtgctattgttgtagctgctcagccccctgtaaacggaccagcaccagctgctaatcatctcactcttgtgaagatgccaagtcaaaatattgccgaagagagcaatgtcattcatgaagaaaccgcggtagaagctccaaaagaaaatggtgctcccgtcgaagttcagagaaatgtcgagatcatcactgagcccgctcctgttagtaaagttgagcctcctgcatctcgtcctgcttctcaagcagacctccttgcagaccttttgggccctcttgcaatagagggtcctcctgctgctgtagagcaaactcctgctcaaggattggaggctaatcaaagtccagtaggtgacttggcactagctacccttgaggaccagtccaactctgttcagccaattgtcaatgtggaggagaagtttaatatattgtgcacgaaagatagtggagttctgtatgaggatcctaacatccagattggtttaaaagcagagtggcgggcccatcatggtcgtcttattcttttcctggggaataaaaatacttcgccccttttgtcattgagggctttgattttgcctcctagccattttaaagtggaactctcgtcagtacctgatactattcctcctagagcacaggtgcaaatcccagtcgaggttacaaatctccgcgcgagtagagatgttgctgttcttgatttctcatataaacatggagctgcactggtgaacgctaaacttcgacttcctattgtgttgcataaattcttgcaacctataactctttcccctgaagattttttcgcccattggaaaacatggaatgttcagtcactcaaggttcaagaagtggttagaggtgtaaaaccattacctattcctgagatggctagtcttctcttgagccttcacctggcagttactcctggacttgataccaacccgaacaacatggtggcgtgtgctacattcttttcggagacaaccaatgccgcgctttgtctggtgagagttgaaacagatccccaagacagaagtcagctccggctaacagtcgcatcaggagatcaaaatctgacattcgagttgaaggagtacatcaaggaacatctgatcgacatcccgagggctcgagtggccccccctgccgctccgcaacaaccacagctgcctccagcagcgccggcgacatataacgacccgggtgccatgctagctgggttgctatgaaaccagacgatgctggaacaagcagttgtcagacgtacattgcattgcagtagtttttcattcatctgaggatctaacaccgcctgcccagaagcttccatgttgccaccaagacgacgaagcggtgtcgaaggtatgtatgataacgactgggcaggaaggaaggaaggaaggaagggacttgctgcaccggagaggagaaaaggaagcactgtattgtattcttttgggcccttagtagcatcgatcgatcttggatcataatttgtgtttgccatagcgtgtaatcgtggttctcttgttccttgagatgtatcctactactagtactatagtaagtgtaccttggaaggaaggaaggaaggaagcggattggtggtggtggtgaaaaaaaaaaaaaaaaaagcttatcgataccgtcgac

SEQ ID NO: 29882 - protein, 418 aa, Triticum aestivum
RSQQQSSSAIVVAAQPPVNGPAPAANHLTLVKMPSQNIAEESNVIHEETAVEAPKENGAPVEVQRNVEIITEPAPVSKVEPPASRPASQADLLADLLGPLAIEGPPAAVEQTPAQGLEANQSPVGDLALATLEDQSNSVQPIVNVEEKFNILCTKDSGVLYEDPNIQIGLKAEWRAHHGRLILFLGNKNTSPLLSLRALILPPSHFKVELSSVPDTIPPRAQVQIPVEVTNLRASRDVAVLDFSYKHGAALVNAKLRLPIVLHKFLQPITLSPEDFFAHWKTWNVQSLKVQEVVRGVKPLPIPEMASLLLSLHLAVTPGLDTNPNNMVACATFFSETTNAALCLVRVETDPQDRSQLRLTVASGDQNLTFELKEYIKEHLIDIPRARVAPPAAPQQPQLPPAAPATYNDPGAMLAGLL

SEQ ID NO: 29883 - protein, 386 aa, Triticum aestivum
MPSQNIAEESNVIHEETAVEAPKENGAPVEVQRNVEIITEPAPVSKVEPPASRPASQADLLADLLGPLAIEGPPAAVEQTPAQGLEANQSPVGDLALATLEDQSNSVQPIVNVEEKFNILCTKDSGVLYEDPNIQIGLKAEWRAHHGRLILFLGNKNTSPLLSLRALILPPSHFKVELSSVPDTIPPRAQVQIPVEVTNLRASRDVAVLDFSYKHGAALVNAKLRLPIVLHKFLQPITLSPEDFFAHWKTWNVQSLKVQEVVRGVKPLPIPEMASLLLSLHLAVTPGLDTNPNNMVACATFFSETTNAALCLVRVETDPQDRSQLRLTVASGDQNLTFELKEYIKEHLIDIPRARVAPPAAPQQPQLPPAAPATYNDPGAMLAGLL

SEQ ID NO: 29884 - DNA, 1564 bp, Triticum aestivum
gtcagcaaaccttctccccacccccacccccccgccccgccgcgggagcgctccgcggccgccatggcgtctcctccgggcccggggtctgccaaccgcgcgctctcctcctcatcgagggggccgctctcgcccttccccggcggcgcgggcccgttcctccggcatcaacatcctcccggcggcgactccgacggcggcgcctcgttcgacgaagatgacgacgacgatgacgaggaggaggaggatggggaggatcaggacgccgagctggcggcccgcagctcgcagcagcgacgcgccgcctctccaggtgatcactgacgctgttgcttgctggttcacgcagcaagaatcgggcggcctgtggtgaatggggagaatggagggagtcaaatccaggaagggcagcaatggcagctgtacagctgtggaaccgagcagcatgaccgcgcttcgtctagaggggacgaagaacctggttctgttcccagggagatgagggtggaggatggatatggggttattgggagaagagagggaggccctgcatctagctactgggacctgctcagagcgcacctttcggacccgttgacaggtattctcatggacgacgcaatgattctttcatgtggccattcttatggaagtagtgggatgcagcatatctacagaatgaaagcttgtggtaaatgtggtcagccaatcaccgagaactccattcgaccaaacctggctcttggccttgcagtccaggcatttagacgagaggaagagtcggcaaaaacgttgaaaagaaaaagagaccgcctggaacaggtatacacttttttccgggtctatgttactgaatgcccgaacatggacagttgaacatgttacacgatgttcttaaatctgttctctctgtaaaatgaggacaaatgtggcaacgatgacccgggtccagctgaggtttcaagaggcaaaggtgtccagtatcctttcgctgtcttcgaccgggtgataatcaagggaaacaagaggaccccggagcggttcgtggggcgcgtcgcggtggtgacggctcagtgcttgaatggatggtacgtggtgaagaccctggacaacgcggagagcgtgaagctgcagtaccgttcgctggcgaagttcgtcgacggcggcggcggcgagcctcctgccgtggcctccaacagttcccagaacacaagctggttgtgacttggaaggtacaaaagcagatcatgctgagcacaagcacagaatcagatctccaggcccccatcttttgctgtttccaggaggaggcaaacagtagagtgaggaacattatccttttttggtagccaatcacagtgtcaatctttatggtgctcctctttcctttcctttttctttttgtggcagcaactaggtaccatgtggtgtcagtcagtgtccttgtgatgtgaggctttgtagaatgctaccattccagtacacccttatccaggctgctgtgataaatcaggaagcaatcatggtgccaccaaagggcaaccaccaacacaaaagtttggtg

SEQ ID NO: 29885 - protein, 125 aa, Triticum aestivum
MRVEDGYGVIGRREGGPASSYWDLLRAHLSDPLTGILMDDAMILSCGHSYGSSGMQHIYRMKACGKCGQPITENSIRPNLALGLAVQAFRREEESAKTLKRKRDRLEQVYTFFRVYVTECPNMDS

SEQ ID NO: 29886 - protein, 123 aa, Triticum aestivum
SANLLPTPTPPPRRGSAPRPPWRLLRARGLPTARSPPHRGGRSRPSPAARARSSGINILPAATPTAAPRSTKMTTTMTRRRRMGRIRTPSWRPAARSSDAPPLQVITDAVACWFTQQESGGLW

SEQ ID NO: 29887 - protein, 107 aa, Triticum aestivum
VSKPSPHPHPPAPPRERSAAAMASPPGPGSANRALSSSSRGPLSPFPGGAGPFLRHQHPPGGDSDGGASFDEDDDDDDEEEEDGEDQDAELAARSSQQRRAASPGDH

SEQ ID NO: 29888 - DNA, 1885 bp, Triticum aestivum
acggagatacctttatcagactaccacctacaagcctgcaagtgggcttaaacatcgggacataatctcacgagctcagcttgtggcagacggatccgatggtgatcggcgaaatggatgctgctcaggtcgcagcattcttcaggggcaagaatatcctcatcaccggcgcaactgggttccttggaaaagtgctcttggagaagatactgaggatccagcctgaggtcacgaagctcttcctcttggttcgagccaccgacgacgaatccgcaaggcggcgggtccagactgaggtaatgtatttctaacagttcgagaagcaacaccgaacatgggaagttttaagacatctccagttataaacacacaaaaaaactgcaaacgatgtttcgtggtctgcaggtaacagggagggagattttccaagttctcagagaaaagcatggcaagggttttgaagatttcatcgaagagaaggtgtaccctttggcaggagacgtcatgtatgaggattttggactagacaccgccaagctgaaagaagtgtccaaggatgtagacatcatcgtcaacggagctgcgactacgaatttctatgaaagatacgatgtatctttcgacactaacgtcttgggagcgaagcagatctgtgcatttgcaaacaagtgcaccaaactgaaaatgctgctccacgtttcaactgcctacgtatgtggtgaacaagagggactaatactagagaaaccattcatgatgggggacacactacgggagggcacacacttagacattgaatccgagctaaatctgatcaaacatacccagatggaactgaaagctaactgtgctactgacaaggctcagaggaaaaccatgaaggaacttggcctcaagagagcgaggcgtttcgggtggccgaatacctacgtgttcaccaaggcaatgggcgagatgctgctggggcacctgcgaggcgaccttccagtcgtcatcatccggccgagcatcataaccagcatcctcaaggagccattgcctggatggatggaaggagtcaggactatcgactcggttttcttgggttacgccaagcaagccttgaaattctttctagtagaccccaataccataatggacgtgattccgggggacatggtggtaaacactatgatggtggccatgctagcgcactcaggggaacaagcacagaccatctaccatgtgacatcatccatgagcaacccggcctcctacatgactctccgggagtcggcccaccgctacttcgtggacaacccgccgcgaggggaaaacggcgagcccatccggctgaacaagatgcgcttctttagcacggttgcaaggctccgcatgtacatggtcatcaagtacaagctccctcttgagatccttcatctggtaaacattgggctatgtggtgttttctcagggcgctacaacgagctcagtggaaaatacagattggccatgcatctgatcgagctctatgcgccttacaccttattcaaagggcgctttgatgacatgaaccttgagaaactgaggaaggccatggagcaaaatagtgatggaggagaatactactttgatttcgatcccaagaaaatcgactgggacgactatttctacatggttcactttcctggtgtgctcaagtatctggcgtgagaattgaatttcatccaaccagctaaataacaactatctttgaatgtattgttgtactatttgttacagaactctcaggagtgtgttgccttcgctaagatagttttgtatgttccatattttttaagatgcgccattaataaagcatgggatcacaatccaaaaaaaaaaaaaaaaaagcttatcgataccg

SEQ ID NO: 29889 - protein, 434 aa, Triticum aestivum
MFRGLQVTGREIFQVLREKHGKGFEDFIEEKVYPLAGDVMYEDFGLDTAKLKEVSKDVDIIVNGAATTNFYERYDVSFDTNVLGAKQICAFANKCTKLKMLLHVSTAYVCGEQEGLILEKPFMMGDTLREGTHLDIESELNLIKHTQMELKANCATDKAQRKTMKELGLKRARRFGWPNTYVFTKAMGEMLLGHLRGDLPVVIIRPSIITSILKEPLPGWMEGVRTIDSVFLGYAKQALKFFLVDPNTIMDVIPGDMVVNTMMVAMLAHSGEQAQTIYHVTSSMSNPASYMTLRESAHRYFVDNPPRGENGEPIRLNKMRFFSTVARLRMYMVIKYKLPLEILHLVNIGLCGVFSGRYNELSGKYRLAMHLIELYAPYTLFKGRFDDMNLEKLRKAMEQNSDGGEYYFDFDPKKIDWDDYFYMVHFPGVLKYLA

SEQ ID NO: 29890 - protein, 395 aa, Triticum aestivum
MYEDFGLDTAKLKEVSKDVDIIVNGAATTNFYERYDVSFDTNVLGAKQICAFANKCTKLKMLLHVSTAYVCGEQEGLILEKPFMMGDTLREGTHLDIESELNLIKHTQMELKANCATDKAQRKTMKELGLKRARRFGWPNTYVFTKAMGEMLLGHLRGDLPVVIIRPSIITSILKEPLPGWMEGVRTIDSVFLGYAKQALKFFLVDPNTIMDVIPGDMVVNTMMVAMLAHSGEQAQTIYHVTSSMSNPASYMTLRESAHRYFVDNPPRGENGEPIRLNKMRFFSTVARLRMYMVIKYKLPLEILHLVNIGLCGVFSGRYNELSGKYRLAMHLIELYAPYTLFKGRFDDMNLEKLRKAMEQNSDGGEYYFDFDPKKIDWDDYFYMVHFPGVLKYLA

SEQ ID NO: 29891 - protein, 335 aa, Triticum aestivum
MLLHVSTAYVCGEQEGLILEKPFMMGDTLREGTHLDIESELNLIKHTQMELKANCATDKAQRKTMKELGLKRARRFGWPNTYVFTKAMGEMLLGHLRGDLPVVIIRPSIITSILKEPLPGWMEGVRTIDSVFLGYAKQALKFFLVDPNTIMDVIPGDMVVNTMMVAMLAHSGEQAQTIYHVTSSMSNPASYMTLRESAHRYFVDNPPRGENGEPIRLNKMRFFSTVARLRMYMVIKYKLPLEILHLVNIGLCGVFSGRYNELSGKYRLAMHLIELYAPYTLFKGRFDDMNLEKLRKAMEQNSDGGEYYFDFDPKKIDWDDYFYMVHFPGVLKYLA

SEQ ID NO: 29892 - DNA, 582 bp, Triticum aestivum
aatccccatccgcccgtctctctcctacgctctccccgcccgcctcgccccgctcctcccccgcagcggcgagctactcccgagccagggagagacaggcggcggcggcagcttccccttcccctcctcctctcctccctcgccctcgccgagaaacaacgagagtttcctcttccgtcagcaatggagaacatgagatccgagaacaaccgtggcgcggccatggagggcgtcaagctcgcgtctgaggcggcggccaacaccaaccgcagggccctgagggacatcaagaacatcctcggcgcccctcaccagccccaggccgtcagcaagaggggcttgcaagaaaaacccgccgccggtgccaagagccaagctggcgccgtcggccaccggccggtgaccaggaaattcgccgccatcctgcagcaaacgcagcctgcaaacgccccgctggcaccaattggcagtgagaggcagaagaggaatgctgacaccgcgttcaatgctccttcagacatggagtgcagcaaggcttcagatgatgaccttgatgagatgatgaccaatgagctaaaggag

SEQ ID NO: 29893 - protein, 194 aa, Triticum aestivum
NPHPPVSLLRSPRPPRPAPPPQRRATPEPGRDRRRRQLPLPLLLSSLALAEKQREFPLPSAMENMRSENNRGAAMEGVKLASEAAANTNRRALRDIKNILGAPHQPQAVSKRGLQEKPAAGAKSQAGAVGHRPVTRKFAAILQQTQPANAPLAPIGSERQKRNADTAFNAPSDMECSKASDDDLDEMMTNELKE

SEQ ID NO: 29894 - protein, 133 aa, Triticum aestivum
MENMRSENNRGAAMEGVKLASEAAANTNRRALRDIKNILGAPHQPQAVSKRGLQEKPAAGAKSQAGAVGHRPVTRKFAAILQQTQPANAPLAPIGSERQKRNADTAFNAPSDMECSKASDDDLDEMMTNELKE

SEQ ID NO: 29895 - protein, 130 aa, Triticum aestivum
MRSENNRGAAMEGVKLASEAAANTNRRALRDIKNILGAPHQPQAVSKRGLQEKPAAGAKSQAGAVGHRPVTRKFAAILQQTQPANAPLAPIGSERQKRNADTAFNAPSDMECSKASDDDLDEMMTNELKE

SEQ ID NO: 29896 - DNA, 1373 bp, Triticum aestivum
ctagaacatcctaatcgaaaaatagacccaccccatgcgtgctagagatgttccagtcccctccgttttgctcatcctcttggcgctctccgtcgtcgtcacgcaggcgcccttcttccgggctcggcgcctgattagcgatgacggcggtggccgcgctacggcttgcaccaaggacgccgcctcctgtgactgcgattactctgatgggaaatgggtgaggagccgctccactgatgctatgccatacggggaggactgcccgttcctcgaccccggcttccgctgcgtgcaaaatgggcggaatgactcgtcctttcgacactggcgttggcaacctcgccgcggcagctgccacctccctaagttcaatgcgacggatatgctggagaggagccggaacggccggatcgtgttcgtcggtgactccattggccgcaaccagtgggagtccatgttgtgcatgctcgccgccgccgtgcctgccggttcgaggatatacgagcagttcggtaagcccctgagccggcacaaaggctatctatccatggtctttgcggactacaacctctccgtggagtactaccgtgcacccatgcttgtcatggttgatcgcctccctccggcgagcgatggtgccatcaagagggccatccggcttgacgcactaccgcggcatgccgcccgctgggctggcgctgacgtgctcatcctcaacacgggccactggtggaacctacacaagaccatcaaatctggaaactatttcacggtgggcgatcggttcaacatgacaacggacattaaggaagcattccgacggtctctccagacggtgaaagattgggcactaaccaatccacgactctccaagagcagctacatcttctttaggagctattctccatcgcactacgacaacgggacatgggacacaggtggctcttgcgcggaccaatgggatccgctaacgatgattaccagtgaaagtgaccagcatgagcacttgtggatcaacacaatgatctcaagtgcggcacagagcatgaggagacggcatggaatgaacaaagatgcggttttcttgaacataacgtacatgacgggcatgaggggggacgggcacccgtcgaggcaccgggagcccgagacgccatcggatgccccagaggattgcagccactggtgcctgccgggtgtgccggacacgtggaaccagatgatgtacgggcacctcgtgtccatgggattcgacatgaggtcaattaagagataggtagatgcatgatatatgtgtggttgtgtgtgcatgtataatgtgtggaaggcaagattggaccagtgctagtcataattaatttaactttatcgtg

SEQ ID NO: 29897 - protein, 413 aa, Triticum aestivum
MRARDVPVPSVLLILLALSVVVTQAPFFRARRLISDDGGGRATACTKDAASCDCDYSDGKWVRSRSTDAMPYGEDCPFLDPGFRCVQNGRNDSSFRHWRWQPRRGSCHLPKFNATDMLERSRNGRIVFVGDSIGRNQWESMLCMLAAAVPAGSRIYEQFGKPLSRHKGYLSMVFADYNLSVEYYRAPMLVMVDRLPPASDGAIKRAIRLDALPRHAARWAGADVLILNTGHWWNLHKTIKSGNYFTVGDRFNMTTDIKEAFRRSLQTVKDWALTNPRLSKSSYIFFRSYSPSHYDNGTWDTGGSCADQWDPLTMITSESDQHEHLWINTMISSAAQSMRRRHGMNKDAVFLNITYMTGMRGDGHPSRHREPETPSDAPEDCSHWCLPGVPDTWNQMMYGHLVSMGFDMRSIKR

SEQ ID NO: 29898 - protein, 344 aa, Triticum aestivum
MPYGEDCPFLDPGFRCVQNGRNDSSFRHWRWQPRRGSCHLPKFNATDMLERSRNGRIVFVGDSIGRNQWESMLCMLAAAVPAGSRIYEQFGKPLSRHKGYLSMVFADYNLSVEYYRAPMLVMVDRLPPASDGAIKRAIRLDALPRHAARWAGADVLILNTGHWWNLHKTIKSGNYFTVGDRFNMTTDIKEAFRRSLQTVKDWALTNPRLSKSSYIFFRSYSPSHYDNGTWDTGGSCADQWDPLTMITSESDQHEHLWINTMISSAAQSMRRRHGMNKDAVFLNITYMTGMRGDGHPSRHREPETPSDAPEDCSHWCLPGVPDTWNQMMYGHLVSMGFDMRSIKR

SEQ ID NO: 29899 - protein, 297 aa, Triticum aestivum
MLERSRNGRIVFVGDSIGRNQWESMLCMLAAAVPAGSRIYEQFGKPLSRHKGYLSMVFADYNLSVEYYRAPMLVMVDRLPPASDGAIKRAIRLDALPRHAARWAGADVLILNTGHWWNLHKTIKSGNYFTVGDRFNMTTDIKEAFRRSLQTVKDWALTNPRLSKSSYIFFRSYSPSHYDNGTWDTGGSCADQWDPLTMITSESDQHEHLWINTMISSAAQSMRRRHGMNKDAVFLNITYMTGMRGDGHPSRHREPETPSDAPEDCSHWCLPGVPDTWNQMMYGHLVSMGFDMRSIKR

SEQ ID NO: 29900 - DNA, 1993 bp, Triticum aestivum
atggttgagaatcaccactccaaactggacatgcccagcccctcacaaacagcggcgtcagagaacgcaaccactgtaccatgcggcggcggagaccaaagaaggacagaagaagaggtctcacgcctgggagcgtgtacaggttcgaccctcattcaggctaatgttcctcctctcttttgcttcagctggttccgtttcgaatcaaaaggcctgcagggtgaccccgatcgccggacgtccacgagggatcgccggagttcgtggggctacgttttcatcctcgtgaacaactgcctccagtacagcgcttactacggcgtgtcgacgaacctggtgaacttcctcaaggtccagctgcactccggcagcaaggccgcggcgaacagcgtcaccaactggcagggcaccgcctccatcacgccgctcgcggccggcttcctcgccgactctttcctcggcaggtactggaccatcaccctcttcctcttcatctccgtcgcggggtacggcgtcgtggcggcgagcgcggtgttctacgcggggctgtacctggtggcgctgggcggcgcgctgcagccggtcctgtcgtcgttcggggccgaccagttcgacgccgagtccgacgaggaggagcgccggcggcagagctccttcttcaactggttctacctgtccattgtcgtgggctcgctcgtgggcggcaccgtcctggtggtgggtgcagtccgcccacggctggcggctcggctacggcatcccggcgctgctcagcgtgctcgccgtcgctctgttcctcgccggcacgggcgcgtaccgccgccaccagccccccggcggcagcccgctcaccaggatcgcgcaggtggtggtcgccgccgccaggaagtgcgacgtggagatcccgaccgacgccacgctgctgcacgagtgtgacggggacgacggcatgtcagtgattcaggggagccgccgcctcgcgcacactgacgagttcaggttcttggacaaggcggcggtggagacggcgggcgacaaggcgcggccggcgagcccgtggcggctgtgcaccgtgacgcaggtggaggagctcaagtgcgtgctccgactgctgccggtgtgggcgtgcggcatcatcttcgcggccgcctacacgcagatgaccaccaccttcatcctccagggtgacacgctggacccgcgcgtcggcagcttccgcgtgccccccgccgtgctcaccgtcttcgacaccctcagcgtcatgctctgggtgccgctctacgaccgcgccgtcgtgccgctcgcgcgccgcctcacgggccaccgccgcgggttcacgcagctggcgcgcatgggtgtgggcttcgtcatcctcactattgccatgctcgccgccggcacgctcgaggtggcgcggcgccgcgtcgtcgcgcgccacggcacctacaccggcgaggacggcgcggggtatgtgccgatgtcgatcttctggcaggtgccgcagtacgtggtggtgggtgccgcagaggtgttcacgttcatcgggcagatggagttcttctatgaccaggcgccggacgccatgcggaacgtctgctcggggctctccagcgcggcgtttgcgctgggcaactacgcgagctcggcgctcgtggccgtcgtggtgcgcgcaatgacgaggggcgggcggcccgggtggatccccgacgatatcaacgacggccatctggactactttttctggctgctcgccatgctctgcatcggcaacttcagcgtgtacctgctcgtcgcacggtggtatacctacaagaagaccgctgactgaacctggagatcaccgtaatgtaagagtatttaaccaaaaactaccataattcacggaaccgtgacgaaaaactactactttaaaaaaaaaaaaaaaaaaaaaaaaaaataaaaaaaaaaaaaaaaaagcttatcgataccgtcgacctgtttaaacacaataaag

SEQ ID NO: 29901 - protein, 311 aa, Triticum aestivum
MVENHHSKLDMPSPSQTAASENATTVPCGGGDQRRTEEEVSRLGACTGSTLIQANVPPLFCFSWFRFESKGLQGDPDRRTSTRDRRSSWGYVFILVNNCLQYSAYYGVSTNLVNFLKVQLHSGSKAAANSVTNWQGTASITPLAAGFLADSFLGRYWTITLFLFISVAGYGVVAASAVFYAGLYLVALGGALQPVLSSFGADQFDAESDEEERRRQSSFFNWFYLSIVVGSLVGGTVLVVGAVRPRLAARLRHPGAAQRARRRSVPRRHGRVPPPPAPRRQPAHQDRAGGGRRRQEVRRGDPDRRHAAARV

SEQ ID NO: 29902 - protein, 301 aa, Triticum aestivum
MPSPSQTAASENATTVPCGGGDQRRTEEEVSRLGACTGSTLIQANVPPLFCFSWFRFESKGLQGDPDRRTSTRDRRSSWGYVFILVNNCLQYSAYYGVSTNLVNFLKVQLHSGSKAAANSVTNWQGTASITPLAAGFLADSFLGRYWTITLFLFISVAGYGVVAASAVFYAGLYLVALGGALQPVLSSFGADQFDAESDEEERRRQSSFFNWFYLSIVVGSLVGGTVLVVGAVRPRLAARLRHPGAAQRARRRSVPRRHGRVPPPPAPRRQPAHQDRAGGGRRRQEVRRGDPDRRHAAARV

SEQ ID NO: 29903 - protein, 292 aa, Triticum aestivum
MSVIQGSRRLAHTDEFRFLDKAAVETAGDKARPASPWRLCTVTQVEELKCVLRLLPVWACGIIFAAAYTQMTTTFILQGDTLDPRVGSFRVPPAVLTVFDTLSVMLWVPLYDRAVVPLARRLTGHRRGFTQLARMGVGFVILTIAMLAAGTLEVARRRVVARHGTYTGEDGAGYVPMSIFWQVPQYVVVGAAEVFTFIGQMEFFYDQAPDAMRNVCSGLSSAAFALGNYASSALVAVVVRAMTRGGRPGWIPDDINDGHLDYFFWLLAMLCIGNFSVYLLVARWYTYKKTAD

SEQ ID NO: 29904 - DNA, 770 bp, Triticum aestivum
atgttgtccctcctgcctcttcgcttgccgtcccccgtagccagcacgctcccaggcgccgcctacctcctccccggcctcgccaggattcccatcctccgaaccccaccgcgagccagcatgagcgcggccgcctccacgccggacgcagtcccgtctcccgccgccgccgccgccgctgtcggcgaggaagcgaggaaggaggccgaggacgtggtggtgcagtacgtggtgctgcggcgcgacctggcggacgcgtggccgctggggagcgtggtggcgcaggggtgccacgccgccgtggccgccgtctgggcgcaccgcgaccacccggacaccgccgcctactgcgcgcccggcaacctcgacagcatgcacaaggtaacattggaggtgaaaggggagacacagctgaagaacttggctgagaaactggaagcagctggtgtacggcacaagctgtggatagagcagcccgagaacatcccgacttgcatagccacagcaccctgcccaaagtcgcaggtagcttcgttctttaggaagctaaaactttgcaaatgactgaagagtaatacctatccaggttgctggtcttggttgttatgggatgacattagtagctttgctgcattgaggtcacacattttagtcccatgttattggtgatacctgtttcagtctttcatcaactgattgttcctgtttaagaaatggatgtgctcgtattggcatgacaaataatagtgaatcgatgagttttgtgttgg

SEQ ID NO: 29905 - protein, 187 aa, Triticum aestivum
MLSLLPLRLPSPVASTLPGAAYLLPGLARIPILRTPPRASMSAAASTPDAVPSPAAAAAAVGEEARKEAEDVVVQYVVLRRDLADAWPLGSVVAQGCHAAVAAVWAHRDHPDTAAYCAPGNLDSMHKVTLEVKGETQLKNLAEKLEAAGVRHKLWIEQPENIPTCIATAPCPKSQVASFFRKLKLCK

SEQ ID NO: 29906 - protein, 147 aa, Triticum aestivum
MSAAASTPDAVPSPAAAAAAVGEEARKEAEDVVVQYVVLRRDLADAWPLGSVVAQGCHAAVAAVWAHRDHPDTAAYCAPGNLDSMHKVTLEVKGETQLKNLAEKLEAAGVRHKLWIEQPENIPTCIATAPCPKSQVASFFRKLKLCK

SEQ ID NO: 29907 - protein, 141 aa, Triticum aestivum
VVPPASSLAVPRSQHAPRRRLPPPRPRQDSHPPNPTASQHERGRLHAGRSPVSRRRRRRCRRGSEEGGRGRGGAVRGAAARPGGRVAAGERGGAGVPRRRGRRLGAPRPPGHRRLLRARQPRQHAQGNIGGERGDTAEELG

SEQ ID NO: 29908 - DNA, 572 bp, Triticum aestivum
ctctcaccaatctcaccccacacccctcggtcgagctactctcccccacgatctcctcgccgccgctgcccacgccggcacgctcgtcgccgctgcaaccgcccacgccggcacgctcgtcgtcgtcgccgtcgtatcgggatctacctcctcatcggcttcctctcccccatggtcgaccccgagctcgacccctccgccgcccacgacgggcacgccctccccaaccgcggatcttgcgagttcaagcacttcatcaggaggctcccggagttcaagttctggggtcatcgacatggactactgcggcctagtgggcatcatgctattcaaccactcggaggcggacttcgtcgtgaagcccggcgaccgcgccgaacatatgatcgtccaggtcattgcgacgccggaggtcgccgaggtgaaggacctcgacgccatcgtctggcgggagggagtgctctgagccttggtagatacatctataagtggtctagttgtttgcatctgatgttaaattggatctcgagatctcgagttaagatgttcaatgctgtatccatgaatgctgc

SEQ ID NO: 29909 - protein, 190 aa, Triticum aestivum
LSPISPHTPRSSYSPPRSPRRRCPRRHARRRCNRPRRHARRRRRRIGIYLLIGFLSPMVDPELDPSAAHDGHALPNRGSCEFKHFIRRLPEFKFWGHRHGLLRPSGHHAIQPLGGGLRREARRPRRTYDRPGHCDAGGRRGEGPRRHRLAGGSALSLGRYIYKWSSCLHLMLNWISRSRVKMFNAVSMNA

SEQ ID NO: 29910 - protein, 154 aa, Triticum aestivum
SHQSHPTPLGRATLPHDLLAAAAHAGTLVAAATAHAGTLVVVAVVSGSTSSSASSPPWSTPSSTPPPPTTGTPSPTADLASSSTSSGGSRSSSSGVIDMDYCGLVGIMLFNHSEADFVVKPGDRAEHMIVQVIATPEVAEVKDLDAIVWREGVL

SEQ ID NO: 29911 - protein, 133 aa, Triticum aestivum
MVDPELDPSAAHDGHALPNRGSCEFKHFIRRLPEFKFWGHRHGLLRPSGHHAIQPLGGGLRREARRPRRTYDRPGHCDAGGRRGEGPRRHRLAGGSALSLGRYIYKWSSCLHLMLNWISRSRVKMFNAVSMNA

SEQ ID NO: 29912 - protein, 56 aa, Triticum aestivum
MDYCGLVGIMLFNHSEADFVVKPGDRAEHMIVQVIATPEVAEVKDLDAIVWREGVL

SEQ ID NO: 29913 - DNA, 474 bp, Triticum aestivum
gattttactgatcattgaagtgatgcgcgtgtatgcagctcgtgatcccatgggtgcggtcgttcaggggcaagacggaggaggagaagtctgagtggatggagcagacgttcatcgccgtggaggccctggaaggagccctgagggagtgcgcgaagggcaagggcttcttcggcggcgacaatgtcgggctcgtcgacgtcgtgctaggcagcctgctcacgtgggtgcacgcgaccgaggtgatgtcggggaccaagatgtttgacccttctaagaccccactgctggccacgtggatggagcgcttcgacgagcttgccgctgccaaggccgtcatgccggacgttaacaggatggtcgagttcaagacgaggcaggcgcaggccatctctgtcgctgcagcttcacagcgtcagtaaactaagctggcattaggtgttggaactactaggaatgcccatgtacccgtta

SEQ ID NO: 29914 - protein, 129 aa, Triticum aestivum
MQLVIPWVRSFRGKTEEEKSEWMEQTFIAVEALEGALRECAKGKGFFGGDNVGLVDVVLGSLLTWVHATEVMSGTKMFDPSKTPLLATWMERFDELAAAKAVMPDVNRMVEFKTRQAQAISVAAASQRQ

SEQ ID NO: 29915 - protein, 107 aa, Triticum aestivum
MEQTFIAVEALEGALRECAKGKGFFGGDNVGLVDVVLGSLLTWVHATEVMSGTKMFDPSKTPLLATWMERFDELAAAKAVMPDVNRMVEFKTRQAQAISVAAASQRQ

SEQ ID NO: 29916 - DNA, 1176 bp, Triticum aestivum
aaagaaaacgcaatccaatcgagaccattcttggcgaggagaagggggagaagaaagcagatcggcgccggcgccggccgtggccgcactgatcgactcggactgtgggtgtggtcttccgcccgagcacccataaacatgggtccagaggcgcctgagcttcaaccaaaccccgtcaatcccgctggacgccttttgccagagcacagctcgatggcgatcgccgatgtcaacatgggtctacaggcgcctgaacttttgtcatatcacatcaatcgcgcacgacccttctatgatgaaaagtggaaaagtatgaatgtggggaagaagaagacgaagaagaagattttccgggttccgcagcatgagctggatgacatactttcctatcaggtgcccgcttggccgaaagtggataaacgctgtccttcagccgccatagagatggaaaagatgaaggaatacttcttggccgggcgggagaagatgaggcgagagtatgaggcccatggctatgctacttttgaagcagaggtcaccgatgatgaggaggaggaagacgcagcaatgactcctcctcacgaggagaaggatgttgtgcgagcgacatcttttcatgacaagaatgacgatgcagcagcgactcatcctcacgaggagaaggatgatgtgccagcgacatcttatcacgacaaaaatgacgaagcagcagcgacgactcctcacgaggagaaggatgatgtgccagccacatcttattatgacaagaatgacgatgcagcagcgacgactcctcacgaggagaaggatgatgtgccagccacatcttattatgacaagaatgacgatgcagcagcgactcctcctcacgaggagaaggatgatgtgccagccacatcttattatgacaagaatgacgatgcagcagcgatgtcttctccgtggattattccacgaggaagaggccgaagaagatttcgcccaggagttgtcaagcaagcaagcggtgttaagaaaataacttagatgtattagttgttttcagtgttagttttggctgttggattagttggttccagtttctgggactgtattgtgtcatctttatttataacttcttgtgtaaaacctacagctgataatttgtcagccgacttgatataatatgataaattt

SEQ ID NO: 29917 - protein, 341 aa, Triticum aestivum
KENAIQSRPFLARRRGRRKQIGAGAGRGRTDRLGLWVWSSARAPINMGPEAPELQPNPVNPAGRLLPEHSSMAIADVNMGLQAPELLSYHINRARPFYDEKWKSMNVGKKKTKKKIFRVPQHELDDILSYQVPAWPKVDKRCPSAAIEMEKMKEYFLAGREKMRREYEAHGYATFEAEVTDDEEEEDAAMTPPHEEKDVVRATSFHDKNDDAAATHPHEEKDDVPATSYHDKNDEAAATTPHEEKDDVPATSYYDKNDDAAATTPHEEKDDVPATSYYDKNDDAAATPPHEEKDDVPATSYYDKNDDAAAMSSPWIIPRGRGRRRFRPGVVKQASGVKKIT

SEQ ID NO: 29918 - protein, 295 aa, Triticum aestivum
MGPEAPELQPNPVNPAGRLLPEHSSMAIADVNMGLQAPELLSYHINRARPFYDEKWKSMNVGKKKTKKKIFRVPQHELDDILSYQVPAWPKVDKRCPSAAIEMEKMKEYFLAGREKMRREYEAHGYATFEAEVTDDEEEEDAAMTPPHEEKDVVRATSFHDKNDDAAATHPHEEKDDVPATSYHDKNDEAAATTPHEEKDDVPATSYYDKNDDAAATTPHEEKDDVPATSYYDKNDDAAATPPHEEKDDVPATSYYDKNDDAAAMSSPWIIPRGRGRRRFRPGVVKQASGVKKIT

SEQ ID NO: 29919 - protein, 270 aa, Triticum aestivum
MAIADVNMGLQAPELLSYHINRARPFYDEKWKSMNVGKKKTKKKIFRVPQHELDDILSYQVPAWPKVDKRCPSAAIEMEKMKEYFLAGREKMRREYEAHGYATFEAEVTDDEEEEDAAMTPPHEEKDVVRATSFHDKNDDAAATHPHEEKDDVPATSYHDKNDEAAATTPHEEKDDVPATSYYDKNDDAAATTPHEEKDDVPATSYYDKNDDAAATPPHEEKDDVPATSYYDKNDDAAAMSSPWIIPRGRGRRRFRPGVVKQASGVKKIT

SEQ ID NO: 29920 - DNA, 759 bp, Triticum aestivum
aaggttcagacgaagtgccgagcacgaacatagcggcgctgcaacctctccgccccctacgaagagagagaaaaccatggcggcggtcggcggcgcgggcaacggagccggcgaggaggcaggcggggcggagttctacctgcggtactacgtggggcacaagggcaagttcgggcacgagttcctcgagttcgagttccgccccgacggcaagctccgctacgccaacaactccaactacaagaacgacaccatgatccgcaaggaggtcttcgtctccccttccgtgctccgcgaggcgaggaggatcatccaggactcggagataatgaaggaggacgacagcaactggccggagcccgaccgcgtcggcaggcaggagctcgagattgtcatgggcaacgagcacatctccttcaccacctccaagatcggctccctcgttgacgtccagaccagcaaggacccggagggcctccgcatcttctactacctcgtccaggaccttaaatgtttcgtgttttcacttatcaacctccactttaagatcaagcctattcaactttgagctctgtttggttctcccggttgtgttgtggtactgcgagtgttagagaattctgtacttatgtaacatgcaatgagttgctcctggtgcgatttggtatgcgttgaagattccttttggcatcgcctgaggttgttggattgtgcaaactttgagtgcccattgatatttatatgcatgtttgttttgcg

SEQ ID NO: 29921 - protein, 188 aa, Triticum aestivum
RFRRSAEHEHSGAATSPPPTKREKTMAAVGGAGNGAGEEAGGAEFYLRYYVGHKGKFGHEFLEFEFRPDGKLRYANNSNYKNDTMIRKEVFVSPSVLREARRIIQDSEIMKEDDSNWPEPDRVGRQELEIVMGNEHISFTTSKIGSLVDVQTSKDPEGLRIFYYLVQDLKCFVFSLINLHFKIKPIQL

SEQ ID NO: 29922 - protein, 163 aa, Triticum aestivum
MAAVGGAGNGAGEEAGGAEFYLRYYVGHKGKFGHEFLEFEFRPDGKLRYANNSNYKNDTMIRKEVFVSPSVLREARRIIQDSEIMKEDDSNWPEPDRVGRQELEIVMGNEHISFTTSKIGSLVDVQTSKDPEGLRIFYYLVQDLKCFVFSLINLHFKIKPIQL

SEQ ID NO: 29923 - protein, 104 aa, Triticum aestivum
MIRKEVFVSPSVLREARRIIQDSEIMKEDDSNWPEPDRVGRQELEIVMGNEHISFTTSKIGSLVDVQTSKDPEGLRIFYYLVQDLKCFVFSLINLHFKIKPIQL

SEQ ID NO: 29924 - DNA, 656 bp, Triticum aestivum
gttctcgcggtattctattccttgatccggttccgtcgtgggttccgacaaatcgggctattcttagatctgtttagaaccgtgccgtctgttaatagcaatgcgtcgaaaccgaagttattttcgcgtacaaattcgtcaagataaggtcctggagctggccggaaacgccgccagggacaacaagaagacccgtatcgtgccgcgccacatccagctcgccgtgcgcaatgacgaggagctgaccaagttgctcggcggcgccaccatcgccagcggcggtgtgatgcccaacatccaccagcacctcctccccaagaaggcctcttcctccaaggcgtccaccgtcgatgacgacgacaactgaggccctgtcctttccctcgctgccaccgcccgcaccatggattacatttgcatcacaaagacgaaggagtttcttgtttcgtaggatttagtgtcttggttttcaggagagtcccggatggtatggtattaggagaatttctagttggtggtcggattggttgctttcatcccatggctgtgaatatggcaaacaaattttcgggtgttcaaactcagatgtaaggctgcttgatcttgtccggtttccatggttgaagaaattgaaaggaactcaactttaagctatt

SEQ ID NO: 29925 - protein, 88 aa, Triticum aestivum
MRRNRSYFRVQIRQDKVLELAGNAARDNKKTRIVPRHIQLAVRNDEELTKLLGGATIASGGVMPNIHQHLLPKKASSSKASTVDDDDN

SEQ ID NO: 29926 - protein, 48 aa, Triticum aestivum
VLAVFYSLIRFRRGFRQIGLFLDLFRTVPSVNSNASKPKLFSRTNSSR

SEQ ID NO: 29927 - DNA, 1083 bp, Triticum aestivum
agcccacacccccctcgtcgctctcaccccctcccgaatcaccctgtatccctctcatcctcgtccacccatgaaaccctagcccccttctcctaatcgccactgccgccttctccctcccagatccaatcctgctcgcgtcggccacctccctccagcggagctcgacccccaccccccgccgctgctccaccctctcccatgagggtctctgaggcccgcgcgcgcacaacctccgtcccctgttgctccaatccggccagcgctccctccacctcgtctctcccgatcccaccggtcggcggtgaccttcaccctagcagtcatactccaccctagcagtcgatcccgaccatcgctgcttcaccagcctcctcatctggcatctccccgagggcggccgatgccagacaggccgtcgacgcgccggacctcaaggccggtcgtgctgctccttctgcctgcgtcccctcgaccgctgtctgcaagatctccctcctcaaggagatgcagcatcggaacatcatcaggctgcaggacgtggtgcataacgagaagagggagggcgccatggcgaagaaggagggaccttgcggccattgcggagtcacaagtgtattgttcctgtacccgagtggctacatcagggaagacccacttggagtccccaacaacctgagccctatgtgcagcaagtcgttgtcgggaggcgcctgcgctgacggtttatgggaccgaatacaacaccaaggatggaataggggtggtgaaattatggtacagaataccagaaattcttctgggtgcgaggcagtattctacccttgttggtgaagtgcgaatccatgttcgaagttttgaagcatatcgacaaagagtagcatattatgtgttgtaattgtaggcagtagtaggcatatctgagttgtaatatactataacgattgtaatagattaatgtagtattggttttggaccaatttcatttgctctttggtctgttcgaaagaatgttgtgcatgtgatttgaatacccatgaaatggaaacctgacaagtgggtcaaggttataatggttgtttg

SEQ ID NO: 29928 - protein, 108 aa, Triticum aestivum
MQHRNIIRLQDVVHNEKREGAMAKKEGPCGHCGVTSVLFLYPSGYIREDPLGVPNNLSPMCSKSLSGGACADGLWDRIQHQGWNRGGEIMVQNTRNSSGCEAVFYPCW

SEQ ID NO: 29929 - protein, 91 aa, Triticum aestivum
MPDRPSTRRTSRPVVLLLLPASPRPLSARSPSSRRCSIGTSSGCRTWCITRRGRAPWRRRRDLAAIAESQVYCSCTRVATSGKTHLESPTT

SEQ ID NO: 29930 - protein, 87 aa, Triticum aestivum
MAKKEGPCGHCGVTSVLFLYPSGYIREDPLGVPNNLSPMCSKSLSGGACADGLWDRIQHQGWNRGGEIMVQNTRNSSGCEAVFYPCW

SEQ ID NO: 29931 - DNA, 1081 bp, Triticum aestivum
tatataaagactgcgctgaaaggaatgtcttgggtgggctatcacttgaaggatttctttctaagtgggctcttatgacacttctagatccagcaaatagtttcgcgaaccttgtatatgtcggctattcaggtgattttaattcagcattcaccatcacgaggaaaagacgagtggaccgtaaaaagcagcagactcaaagaaatgtgttccagtgctatgtttttggtcccaaaggtgccggaaagactgcattgctacaatcattccttggaaggcaaccttctgatgctctgccaactaacagcgaccggtttgccgcaaatactgttgaaccatctgatgggactagaaaaacacttgtgctgcgggagattcctgaaggtgatgtcagatcattgctaaacaacaaggaatccttggcaccctgtgatgtggcagtctttgtttacgatagctgtgatgaattttcttggcaaagagcaagagatttgcttgtgcaagtggcttcacatggagaaaacactggttatgaagtcccttgtctgatagttgctgctaaggacgatcttgatcaatctccagtggctctacaggaatcaaccagagtgagccaagacatgggaattgaaacaccaattcccatcagtgtgaaattgaaagacttgaacagcattttctgccgaatagttcacgcagcacagcggccccatttgagcatcccagagactgaagctggtaaatcacgcaggcaataccgtcaacttctgaaccgttccctcatggttgtttcagttggagctgctataggtgttgtgggggtagccgcgtacagggtttatgcggctaggaggaactcgtcgtcatgaagcccccctccctcccgggcagtcgccgggaaataacgtgcaacaggcaggttcatcgtcgatgaagtggatcgtccagcttgatgtttatgtacagttgcgtcatcaaagataacttgtactagtgcgtgtttgagtttcggatggtataatgtacggcagtcatcaggctctgttagattctttagctgataaaagactgtcatgacttg

SEQ ID NO: 29932 - protein, 288 aa, Triticum aestivum
YKDCAERNVLGGLSLEGFLSKWALMTLLDPANSFANLVYVGYSGDFNSAFTITRKRRVDRKKQQTQRNVFQCYVFGPKGAGKTALLQSFLGRQPSDALPTNSDRFAANTVEPSDGTRKTLVLREIPEGDVRSLLNNKESLAPCDVAVFVYDSCDEFSWQRARDLLVQVASHGENTGYEVPCLIVAAKDDLDQSPVALQESTRVSQDMGIETPIPISVKLKDLNSIFCRIVHAAQRPHLSIPETEAGKSRRQYRQLLNRSLMVVSVGAAIGVVGVAAYRVYAARRNSSS

SEQ ID NO: 29933 - protein, 264 aa, Triticum aestivum
MTLLDPANSFANLVYVGYSGDFNSAFTITRKRRVDRKKQQTQRNVFQCYVFGPKGAGKTALLQSFLGRQPSDALPTNSDRFAANTVEPSDGTRKTLVLREIPEGDVRSLLNNKESLAPCDVAVFVYDSCDEFSWQRARDLLVQVASHGENTGYEVPCLIVAAKDDLDQSPVALQESTRVSQDMGIETPIPISVKLKDLNSIFCRIVHAAQRPHLSIPETEAGKSRRQYRQLLNRSLMVVSVGAAIGVVGVAAYRVYAARRNSSS

SEQ ID NO: 29934 - DNA, 1187 bp, Triticum aestivum
acttagaacatcctaatcgaaaactcatattcttcattcacagcagcattcttactatgcaccattgtctgcaagtggcgtatctattcctgttgagaccacatccatccccccagtaccaggttcttattatagctatccttccgtcactatggctgccactgaagtagcggttgaatcttctggatactatgcttcatcaacctctgccatttctagtggtgaattagataacaaaacaagcttggcctcccttgttgcaaatagtaatgtgaatactgtggagtctgataaagtgatatccaaggagcccacagttgcgtctttgagccaatcagtaggagcagtatcttcaggaccaacagtacatggaagttctactcaagcttctactagctccactaatcagactaaagttcctcgtactaagaagcgacctgttgctgttgcatcatcactgagatctaataagaaggtctcaagtctggtggataagtggaaagctgcaaaggaggagcttcgtgatgaagaggaagaggagcctgaagatgctttggagtacctagaaaggaaacgccggaaggaaatagatgggtggcgtaagcaacaaatagctagtggagaagccaaggaaaatgctaattttgttccccttggtggtgactggcgtgaccgtgtaaaacgcaaaagagctgaagcaaagaaggaagcaaagactgaacctattcgtgcagctgccgaacaacacaaaggggagcctgatctctcagagctctccaagggttttccttctgggtggcaggcatacatagacgagtctacgaagcaagtgtactatgggaacaacctcacttccgagacgacttgggatcggcctagcaaataaagattggattagttgaagatggtctagttttctctgtagatatccctgtacctcgatatatacgttgcctgtcttgaatggaacggatatgacagtcacgccctgagaagcaaccggtttctgatgttaccttggttttgaggctgtattgtttcttctattttccactgggagatcgtagtggggggaaggagagttcgttttggtatagaggcacccttgtaagagtggcaacttgagatcgaattactgaagcaaaatctactagttagttgctgaccaaggaaaaatgtgccttgtc

SEQ ID NO: 29935 - protein, 244 aa, Triticum aestivum
MAATEVAVESSGYYASSTSAISSGELDNKTSLASLVANSNVNTVESDKVISKEPTVASLSQSVGAVSSGPTVHGSSTQASTSSTNQTKVPRTKKRPVAVASSLRSNKKVSSLVDKWKAAKEELRDEEEEEPEDALEYLERKRRKEIDGWRKQQIASGEAKENANFVPLGGDWRDRVKRKRAEAKKEAKTEPIRAAAEQHKGEPDLSELSKGFPSGWQAYIDESTKQVYYGNNLTSETTWDRPSK

SEQ ID NO: 29936 - DNA, 659 bp, Triticum aestivum
caaatgctcaagattttcaaggaacatgtcagcaagacctcaattttggatgactttgcattttacgagaaccgacagaagttgatgcaagaaaagagagcaaagcaacaaccgcttcaggggcagggtgttgatgagaaggagaagagcgcagttaacgggaattccgctgcacagaagcagacaccgagcaaggagagcaccacccctgccgccggtgaagagccgaacgcttccaaacccaccacagctgaaagcggcggcgcgagtgccaactagcgtgatatatttcttacgctcgttgctgtaacatgcggtagtccattgcgcaaaactcggtcaggcttcggaatatgcgcggatcatacatgggaaactaaatttaggtcgtgtgacttggttctcatcgtttaggtctcttatatacttggtgacatcaggttcttatatggcccctttcctattcctatttttgtttcggagtcttgttggtttagtaatttcagctatttgttattgtttagactaaaggagccgattttcgatacttctagacaacatttaaggtactaagtttttatgagtgttgtagtgctggagaaagtaataagaacaaagaactcctggtttttctagtcaaaaaaaaaaaaagaaaaaaa

SEQ ID NO: 29937 - protein, 92 aa, Triticum aestivum
QMLKIFKEHVSKTSILDDFAFYENRQKLMQEKRAKQQPLQGQGVDEKEKSAVNGNSAAQKQTPSKESTTPAAGEEPNASKPTTAESGGASAN

SEQ ID NO: 29938 - protein, 91 aa, Triticum aestivum
MLKIFKEHVSKTSILDDFAFYENRQKLMQEKRAKQQPLQGQGVDEKEKSAVNGNSAAQKQTPSKESTTPAAGEEPNASKPTTAESGGASAN

SEQ ID NO: 29939 - protein, 64 aa, Triticum aestivum
MQEKRAKQQPLQGQGVDEKEKSAVNGNSAAQKQTPSKESTTPAAGEEPNASKPTTAESGGASAN

SEQ ID NO: 29940 - DNA, 811 bp, Triticum aestivum
  misc_feature (76)..(76): n is a, c, g, or t
acatggactgttcctgaatgggaagttagaggaggctgcaaagtattatgaggagatgaaagccaagggattttcnccagaggagaagactgaatcaatgatacaggcgtggcgttcaggcagagagcttgccaaggcgtcagcttctgtcggttcaagacgtggttcggtgtctctcaaagtaactcgtagagagtggtaaagacgaagaccacttggaagtggtctataaagagggacacgggtgttgttttggagtaactggtagaaactttggagagagattatttggttattcagaaagatgagtctgattaccctcaagtgatcttcatctactttgttctggccggtttggtcaaggaagccacgcgcgcaagggccttgctttcgttaagagttattgtcagcgatgacctcagctgagggtatgctgtttggtttcctttgttccagtctgtaatcaaactttgttccttctaacaagaaggcgcagagctcctgccgtatttgaaaagagtatgtttacccagttattttcgttctcactagattgcttggctgtagatcggaagtagaaagtgcaacctagggtttattctgtttagacttggataggcatcactttgctgtaacccttcttttgtagctcatagtttgtactgggtacatgtttgatgattggttcacaacatataatgagtgtccaccatattcatactggtccgactccaaaaaaaaaaaaaaaaaaaaaaaaaaaaaaaaaaaaaaaaaaatgtttaaacacaataaagtgggaactggagggggg

SEQ ID NO: 29941 - protein, 66 aa, Triticum aestivum
  misc_feature (25)..(25): Xaa can be any naturally occurring amino acid
HGLFLNGKLEEAAKYYEEMKAKGFXPEEKTESMIQAWRSGRELAKASASVGSRRGSVSLKVTRREW

SEQ ID NO: 29942 - protein, 48 aa, Triticum aestivum
  misc_feature (7)..(7): Xaa can be any naturally occurring amino acid
MKAKGFXPEEKTESMIQAWRSGRELAKASASVGSRRGSVSLKVTRREW

SEQ ID NO: 29943 - protein, 47 aa, Triticum aestivum
MFDDWFTTYNECPPYSYWSDSKKKKKKKKKKKKKKMFKHNKVGTGGG

SEQ ID NO: 29944 - DNA, 932 bp, Triticum aestivum
gacttcctctcctctctgtgccccccaatcctcctcgccaactcattcccagagcaccaagaagatctggagaagagaggaggccattgctagctccccaccatccccttctccctctatctgcctagcgttcttgcttggtcgccatggccaccatcctggagaacatccagaaggcgcggttcctgccgacgaggccgctgagggacgacctgcccaccttccagggcggcaaggaggaggagagccacctcatgggcctgcggaagcgcctctccagcttctccggcaagatccagcccatctcctccgcgtccgccgagtgggcgttcaggcggacccggtcggcgccgtcgctcgccgccgagttcgcgggcggcccgctcaagcgctggtgggactggggcctcggctggctgctctccaagaagctcggcttcgccggcgacctggagatgaacgaggaggaggcggccgcgctcggccgccaaagcaggggcacctgggcccacgtcctctacaaggtgcgctccggggtccgccgcctcgtcgcgtccgaccactcgctgcccaccacgcaccaccgcaaggcctcgctgcccccgtcctcctccgcgcaccagcactgcaagcccgcgccgcagttcgcctacacccagagcttccagtacggccaagcaatggcgcactaagcagcttgctttgcatcttgttctggtggtgtccgcgagatccaaatagacacgacgacgggaaggaagctcgtgaagaaggagaagattcaggtctcaggtgagatcgatggggaagatggctcgctacacaattatatctgggaatttagagttgttagtttaccgtgctgctttcttttttgtgggtagatctaatgtctctacgtataatagataccgagtgtatgctggtggtcc

SEQ ID NO: 29945 - protein, 264 aa, Triticum aestivum
TSSPLCAPQSSSPTHSQSTKKIWRREEAIASSPPSPSPSICLAFLLGRHGHHPGEHPEGAVPADEAAEGRPAHLPGRQGGGEPPHGPAEAPLQLLRQDPAHLLRVRRVGVQADPVGAVARRRVRGRPAQALVGLGPRLAALQEARLRRRPGDERGGGGRARPPKQGHLGPRPLQGALRGPPPRRVRPLAAHHAPPQGLAAPVLLRAPALQARAAVRLHPELPVRPSNGALSSLLCILFWWCPRDPNRHDDGKEAREEGEDSGLR

SEQ ID NO: 29946 - protein, 181 aa, Triticum aestivum
MATILENIQKARFLPTRPLRDDLPTFQGGKEEESHLMGLRKRLSSFSGKIQPISSASAEWAFRRTRSAPSLAAEFAGGPLKRWWDWGLGWLLSKKLGFAGDLEMNEEEAAALGRQSRGTWAHVLYKVRSGVRRLVASDHSLPTTHHRKASLPPSSSAHQHCKPAPQFAYTQSFQYGQAMAH

SEQ ID NO: 29947 - protein, 145 aa, Triticum aestivum
MGLRKRLSSFSGKIQPISSASAEWAFRRTRSAPSLAAEFAGGPLKRWWDWGLGWLLSKKLGFAGDLEMNEEEAAALGRQSRGTWAHVLYKVRSGVRRLVASDHSLPTTHHRKASLPPSSSAHQHCKPAPQFAYTQSFQYGQAMAH

SEQ ID NO: 29948 - DNA, 598 bp, Triticum aestivum
tgcttcatcaagaagtgccaatgtatctcctgtgacagaggatgagatcaggactgttcttcttgcagtggctcctgtcactacacaagatttagtctccagatttaagtctagactacgaggtccagaggacaagaacgcctttgctgaaattctgaagaaaatttcgaagatacagaagactaatggccacaactatgttgtccttagagaggataagaaatgatgagctcaaaagtggcgatttccttcattgcaaagtatcctcttgtgtcttcctggggataatagttttgtactgtattatgttagacgaatttggtcttctgacaagtatatgccgaacttctacccttctactagaaatcaaataactagttagtgcctgttcggaacctctccagtcttgaaactccgctccgcatgatgagctcggtttgagccactccctgcaattgtgctacagctgcctccgctctgggagctgcagttgtggagcggagagcacccgaacagggccttagtatgttgtcatctcctggagttactctagaagaagttgggaattacaaggttatgatgatgtgtgagaagaggt

SEQ ID NO: 29949 - protein, 74 aa, Triticum aestivum
ASSRSANVSPVTEDEIRTVLLAVAPVTTQDLVSRFKSRLRGPEDKNAFAEILKKISKIQKTNGHNYVVLREDKK

SEQ ID NO: 29950 - protein, 62 aa, Triticum aestivum
MATTMLSLERIRNDELKSGDFLHCKVSSCVFLGIIVLYCIMLDEFGLLTSICRTSTLLLEIK

SEQ ID NO: 29951 - protein, 58 aa, Triticum aestivum
MLSLERIRNDELKSGDFLHCKVSSCVFLGIIVLYCIMLDEFGLLTSICRTSTLLLEIK

SEQ ID NO: 29952 - DNA, 825 bp, Triticum aestivum
actgtaatactcctgctcagtagcacaagcagtggtactactgctcagtgcacaccacccaactcacccacactttccccgcggcgatgggtcgcacgaagcacgcggtggcggcgacggcggcgacgacggagacgaagaagcggctccgcttcgagctctccccgcgctggaggccgccgccggcgctgcgccaggtaccgccggagccgcagccggagaagaagaagaagcgggcgtaccggttccggccgggcacggtagcgctgcgggaggtcaggaagtaccagaagtccaccgggccgctcatccccttcgcgcccttcgtccgcctggttaaggagatcaccgacgacttgacgaagggcgagatgaaccactggactcctcaggcgctcttctcgttgcaggaggctgcagagtatcacatagtcgatgtatttgaaaaggcaaatctatgtgccatccatgctaagcgtgttaccatcatgcaaaaggacatacagctcgcgaggcgtatcggggggagaaggccttggtgatactaatggaagatgttttctgcatcatagggagcaaagactggtgatttggtggtactaatggtagatgttttctgtattaggggtgcaatgcaaaggcgctgatggtagtggcccagtatgtttgtgagtgtatcgttaggaagtaatgtaggtgtattttcatttagttagcatgtcttcgaagttgatctggttcattgcatggttgggatcatctgacctccctgctttgctccatttgaattgatctaattcagacagcgtttctgcgaacatccgg

SEQ ID NO: 29953 - protein, 151 aa, Triticum aestivum
MGRTKHAVAATAATTETKKRLRFELSPRWRPPPALRQVPPEPQPEKKKKRAYRFRPGTVALREVRKYQKSTGPLIPFAPFVRLVKEITDDLTKGEMNHWTPQALFSLQEAAEYHIVDVFEKANLCAIHAKRVTIMQKDIQLARRIGGRRPW

SEQ ID NO: 29954 - protein, 87 aa, Triticum aestivum
TVILLLSSTSSGTTAQCTPPNSPTLSPRRWVARSTRWRRRRRRRRRRSGSASSSPRAGGRRRRCARYRRSRSRRRRRSGRTGSGRAR

SEQ ID NO: 29955 - DNA, 772 bp, Triticum aestivum
ggtgtattctgaaaatggatcaccactgtgtttggattaacaactgtgtgggctatacaaattacaaagcctttatcatctgcgtcctgaatgcaaccattgggtccctttattcgtcggtgatatttgtatgtgatcttcttagaacggagcatgactttagtattcattatgtgaagattatccatatcttggctggtgttgtcttattctccttgtccttgacaataggttctttgttatgctggcatatctatctcatatgtcataacatgacaacaatagagtatcgagaggcagttagagcgaagtggcttgcaaaaaagagtggacagaagtaccgccatcggtttgatcaaggcatgaggaagaatattcaaatgatcatgggcccaaatgttttctgctggctttgccccactgcgacaggacatcttaaggatggcaccgagttccagaatacgaacaactgatcagagacgaagaacagcgttgctgcataaacacaacatgtagatgtgcggatttatctgctgaccagattgatcattttctgccatagcattgttgtcacccaggcagaggtgaagagctccggaagtttcacaatcttgtaaatcatgtaaacctcacctcaaattatatgtgtgtgtatgctgtaaagtagtttgagttttgagtactgttgtgtaccagaatgtaaccagaatgtgtgcaaaagggaatggaaattggaagtgtggaagaaacgcagcaagctttgtctgatttt

SEQ ID NO: 29956 - protein, 156 aa, Triticum aestivum
CILKMDHHCVWINNCVGYTNYKAFIICVLNATIGSLYSSVIFVCDLLRTEHDFSIHYVKIIHILAGVVLFSLSLTIGSLLCWHIYLICHNMTTIEYREAVRAKWLAKKSGQKYRHRFDQGMRKNIQMIMGPNVFCWLCPTATGHLKDGTEFQNTNN

SEQ ID NO: 29957 - protein, 152 aa, Triticum aestivum
MDHHCVWINNCVGYTNYKAFIICVLNATIGSLYSSVIFVCDLLRTEHDFSIHYVKIIHILAGVVLFSLSLTIGSLLCWHIYLICHNMTTIEYREAVRAKWLAKKSGQKYRHRFDQGMRKNIQMIMGPNVFCWLCPTATGHLKDGTEFQNTNN

SEQ ID NO: 29958 - DNA, 1358 bp, Triticum aestivum
  misc_feature (962)..(962): n is a, c, g, or t
  misc_feature (1010)..(1010): n is a, c, g, or t
  misc_feature (1032)..(1032): n is a, c, g, or t
  misc_feature (1080)..(1080): n is a, c, g, or t
  misc_feature (1090)..(1090): n is a, c, g, or t
  misc_feature (1152)..(1152): n is a, c, g, or t
  misc_feature (1163)..(1163): n is a, c, g, or t
  misc_feature (1228)..(1228): n is a, c, g, or t
  misc_feature (1239)..(1239): n is a, c, g, or t
  misc_feature (1331)..(1331): n is a, c, g, or t
aggttcagtcaatgggagctcaccttgtggtttgggcgagggctctcggccttcggactgctgctcctggctccggcggttgtctcgggcatcaacggcgtccgggcgaggtcgccatttccatgtggtcgctgctccaagctggtggcgggacgagcgccgctgagcacgggatcctgcggcaacgaggccgggatctccggatctgtaggcggaggaggggatccggccgacgaccgggggtagcgggcgtggcggcgcgactggcggcggcgttgagggttcgagtgggatagtggtggggcgtgaaggaggaaggagcagaggcaaaactgttcgagagagagggctgctggcttgttctgtgcgccaatccagcccatcccatcccagcccagccacggcgtcccctgcgactctagttcgcgccgtgggctctgccgccgccgccgccctccgaggacccgccgctcgccgtctgcgccaacgcgcttctccctccggaaccgcgccaactacaagccccacctaatcgcccctcaactgaagtcgcgccccctccccgacgccaaccttcctctgtgacgcgccggcggcggcctccccccgcgcctccaccgccaccaccaggtaatctggttggtgaagtgcaggatttactgctgtataagtgcaaattcttgtttgggatggcaaaggaagctgagaaagataaacaaattgctgaggaggaggaggacgaggaggaggaagagtatgtcttgctagagttagatgatgttcattattcctgcatacaaccaaatgccccttatatactctctggtttggatacattgactcctaccttggtagtaggtgatggcctgaagatgattggagaatacgaagaaacggttggcacatgctatttattttcagaaagtgatgctccaccaaagcccgttcatgaagagccggcnccccccaaggaaaacaaggataagcaaggcagaaacatcaaggaagcnccgtccaaggaggtgaaacatntcacgagcgttcacaagatcctcaaattccggtcgaccagcgagggtngtcaggagcncagagcataccgttacagggacaaggagttttgaacacaatgcttgtagctgctctcccttntctgatgcttntgatgcacagcaagcaatccgttgacccttggaatggaatgcaaggatggtagtacttgttaatnttaattacccnctagcattctctatctcgaggtaacttgcgattgcgatgcatgattccggtgattcttggcctctctttctgaatttcttgctctctccttntgaatcatcaatcttttgaaattctgc

SEQ ID NO: 29959 - protein, 144 aa, Triticum aestivum
  misc_feature (91)..(91): Xaa can be any naturally occurring amino acid
  misc_feature (107)..(107): Xaa can be any naturally occurring amino acid
  misc_feature (115)..(115): Xaa can be any naturally occurring amino acid
  misc_feature (131)..(131): Xaa can be any naturally occurring amino acid
  misc_feature (134)..(134): Xaa can be any naturally occurring amino acid
MAKEAEKDKQIAEEEEDEEEEEYVLLELDDVHYSCIQPNAPYILSGLDTLTPTLVVGDGLKMIGEYEETVGTCYLFSESDAPPKPVHEEPXPPKENKDKQGRNIKEXPSKEVKHXTSVHKILKFRSTSEGXQEXRAYRYRDKEF

SEQ ID NO: 29960 - protein, 97 aa, Triticum aestivum
VQSMGAHLVVWARALGLRTAAPGSGGCLGHQRRPGEVAISMWSLLQAGGGTSAAEHGILRQRGRDLRICRRRRGSGRRPGVAGVAARLAAALRVRVG

SEQ ID NO: 29961 - protein, 94 aa, Triticum aestivum
MGAHLVVWARALGLRTAAPGSGGCLGHQRRPGEVAISMWSLLQAGGGTSAAEHGILRQRGRDLRICRRRRGSGRRPGVAGVAARLAAALRVRVG

SEQ ID NO: 29962 - DNA, 1222 bp, Triticum aestivum
agggtgtgtgtgtgcgcgcgctaactgaagctgtttacagagcatgttgccggctttctccacatgctgcaccgagttgataagcagctgggaaagtaaactagccggttctgatggatcacatgaaatagacatatgggaggatttccagaacctcaccggagacgtgatctctcgcacgtcgttcggtagcagcttcatggaagggcgaaggatcttccagcttcaggcagagcaagcggagcgaattatcaaggccttccagtatatgtacatcccaggctacctcttttttccaaccgaaaacaacaagaggatgaagcagatcaaccgagagattgaagggctcctgagaggcatcatcgagaagcgggagcgcgcgatggagaacgatgggcttagtagcggcaacgacttgcttggcttgatgctgcagtcgaacaaggagagcggggcgtcgaggatgaggatgagcaccgaggatgtgatcgaggagtgcaagctcttctacttcgcggggatggagaccacgtccgtgctgctcacctggacgctggtcgtcctgggcatgcaccccgagtggcaggatcgggccagggaagaagtcctcagcgtcttcggcaaggacaagcccaacttcgacggcctcagccgactcaaaacggtgacgatgatactgtatgaagtgctcaggttgtacccaccggcggtcacgctgaaccggaagacatccagacagatgcagattggaggcatcacctaccctgccggcgtgctgctggagctgccgataatcatggttcaccacaacccggatgtatgggggaaagacgtgctggagttcaagccggagaggtttgcggaggggatctccaaggcaaccaaggaccagccggtcttcttcccattcggctggggcccgaggatttgcatcggccagaacttcgcgatgctggaagccaagatggcgctgagcatgatccttcagcgtttcgagttccagctctcaccttcctacacgcatgcgccgtacacggtcatcacactgcatcctcagcatggagcgcagattatactcaagagtctctgatcgtcatcttgtcttgcggctttgtcgacctgtcgtcgggtaacttggtaagtggaagaagtaaattgaatcaagtgaactagactctttcatttgatcctaaaactgggtatttgtacatggttaagcacg

SEQ ID NO: 29963 - protein, 348 aa, Triticum aestivum
MLPAFSTCCTELISSWESKLAGSDGSHEIDIWEDFQNLTGDVISRTSFGSSFMEGRRIFQLQAEQAERIIKAFQYMYIPGYLFFPTENNKRMKQINREIEGLLRGIIEKRERAMENDGLSSGNDLLGLMLQSNKESGASRMRMSTEDVIEECKLFYFAGMETTSVLLTWTLVVLGMHPEWQDRAREEVLSVFGKDKPNFDGLSRLKTVTMILYEVLRLYPPAVTLNRKTSRQMQIGGITYPAGVLLELPIIMVHHNPDVWGKDVLEFKPERFAEGISKATKDQPVFFPFGWGPRICIGQNFAMLEAKMALSMILQRFEFQLSPSYTHAPYTVITLHPQHGAQIILKSL

SEQ ID NO: 29964 - protein, 296 aa, Triticum aestivum
MEGRRIFQLQAEQAERIIKAFQYMYIPGYLFFPTENNKRMKQINREIEGLLRGIIEKRERAMENDGLSSGNDLLGLMLQSNKESGASRMRMSTEDVIEECKLFYFAGMETTSVLLTWTLVVLGMHPEWQDRAREEVLSVFGKDKPNFDGLSRLKTVTMILYEVLRLYPPAVTLNRKTSRQMQIGGITYPAGVLLELPIIMVHHNPDVWGKDVLEFKPERFAEGISKATKDQPVFFPFGWGPRICIGQNFAMLEAKMALSMILQRFEFQLSPSYTHAPYTVITLHPQHGAQIILKSL

SEQ ID NO: 29965 - protein, 273 aa, Triticum aestivum
MYIPGYLFFPTENNKRMKQINREIEGLLRGIIEKRERAMENDGLSSGNDLLGLMLQSNKESGASRMRMSTEDVIEECKLFYFAGMETTSVLLTWTLVVLGMHPEWQDRAREEVLSVFGKDKPNFDGLSRLKTVTMILYEVLRLYPPAVTLNRKTSRQMQIGGITYPAGVLLELPIIMVHHNPDVWGKDVLEFKPERFAEGISKATKDQPVFFPFGWGPRICIGQNFAMLEAKMALSMILQRFEFQLSPSYTHAPYTVITLHPQHGAQIILKSL

SEQ ID NO: 29966 - DNA, 522 bp, Triticum aestivum
aatgccgggtcttgtcccctcctcctcatccgcccacctcctctcccgcagcctcgccgccgccaggacgctctccgccgccgccggttactcctcctccccctccccctcctcttccgtcaagatggcgcgctcggcgctggacgaggtgaccgacaccggcgcgttcgaccggacgccgtccaccttccggagcttcgtgtcgagggacgccatcttgacggaagaggagggggagggggaggaggagtaacaggcggcggcggcggcatcggcgacgggcagtgatgctcgctcgcgcgaggaacgggcgggcgcacgtacgtcgcgtcgcctccgtccatgcaggaagacgcgcgcgccatgaggagccgagcaaccaatcttggtagtctacgtacgtactctatatgcgaataatttgttgggtggtgagcgatgatgagtactctacatgacattccttttccttgtgtatccatgatagtgttactacgacgaatgtgctattattttgaagcc

SEQ ID NO: 29967 - protein, 95 aa, Triticum aestivum
NAGSCPLLLIRPPPLPQPRRRQDALRRRRLLLLPLPLLFRQDGALGAGRGDRHRRVRPDAVHLPELRVEGRHLDGRGGGGGGGVTGGGGGIGDGQ

SEQ ID NO: 29968 - protein, 83 aa, Triticum aestivum
MPGLVPSSSSAHLLSRSLAAARTLSAAAGYSSSPSPSSSVKMARSALDEVTDTGAFDRTPSTFRSFVSRDAILTEEEGEGEEE

SEQ ID NO: 29969 - protein, 49 aa, Triticum aestivum
CRVLSPPPHPPTSSPAASPPPGRSPPPPVTPPPPPPPLPSRWRARRWTR

SEQ ID NO: 29970 - DNA, 867 bp, Triticum aestivum
aacggctcgccacaaagccaacaaacccagcagccccagccctttccgcctccccccgctcccaaaccaagccccgcccccgttctgtccctccgcaaaaccctagctccgtacacgcgcggcgacctccaccatgaagggcaaggccgacacctccaagaagggcgagggcaggctcaaggccgccggcggcgccagcaagaggaagaaggacgccgctgccgctggcaagcccaagcgcccaccctccgccttcttcgtcttcatgtctgagttcaggcagcagtacaacgcggagaaccccaacaacaagagtgtcgccaacgtgagcaaggcggcgggtgagaagtggagagctatgtctgatgaggacaaagcaccttatgtggaaaaggctgaacagaagaagaaggactatgagaagaccaaagccacctttgataacaaggagagtgcgagctccaagaaggccaagactcagaacgatgaggaggtcaaatctgaggtcgaagatgagggtagcgatgaggaaaacgaggacgatgatgagtaaatagtgtatcagagtatgaggtagcaaattgggtgtttggtccccgcttagtgtactagtttgctatcctgctatcctcagtgttagatgatgagatttggaagtagatgttgtgtttgtgtgttaagggggcccttttagacttgtggactcatggtttgagaagttgcttagtagtgtattagcagagaggaagctgagaatgctaccagctgttccaatgcttttctcttgctaaccacctgtgtaagaacttgttttcattcgctaatctgatgactgcccagccattggctcttggttaatttcgcctt

SEQ ID NO: 29971 - protein, 139 aa, Triticum aestivum
MKGKADTSKKGEGRLKAAGGASKRKKDAAAAGKPKRPPSAFFVFMSEFRQQYNAENPNNKSVANVSKAAGEKWRAMSDEDKAPYVEKAEQKKKDYEKTKATFDNKESASSKKAKTQNDEEVKSEVEDEGSDEENEDDDE

SEQ ID NO: 29972 - protein, 95 aa, Triticum aestivum
MSEFRQQYNAENPNNKSVANVSKAAGEKWRAMSDEDKAPYVEKAEQKKKDYEKTKATFDNKESASSKKAKTQNDEEVKSEVEDEGSDEENEDDDE

SEQ ID NO: 29973 - protein, 90 aa, Triticum aestivum
NGSPQSQQTQQPQPFPPPPAPKPSPAPVLSLRKTLAPYTRGDLHHEGQGRHLQEGRGQAQGRRRRQQEEEGRRCRWQAQAPTLRLLRLHV

SEQ ID NO: 29974 - DNA, 737 bp, Triticum aestivum
cctgccttgttgatttgcccggatatggttttgcttatgcaaaggatgaagttaaagagtcttggcaggagcttgtgaaagagtatgtttcaaacagggttggtctggatagagtgtgccttcttgtccacactaaacgtggaatgaaaccattggactacgagcttatagatctaatggaaagatacaagacaccgtaccagattgtattaaccaagactgatttggttttccctatagacgtcgctcgccgtgccatggaaatccaagagagcctcaagaagaacaagtcggtcgtaaagcccgtgatgatggtgagctccaagacgggggcaggcatacgcaacctgagaggcgtgcttgggaagctagctcgcttcatcaagccgtagggaggcgatcgcttagcctggagtgcgtgattccgggaaagataaatgcccaagtggttcggcttttaggccttgaggtccttccttgctaggatgggatatgacgccatgttgtatctaagatttggatcaccgaaccatttccctgtctgagagaagattctatcatttagaggctactagaaggatactgtgtggttcactgggctgtttttctttttctttttttgcaaagtgtatttgcactgtattagcaaaattcatgtcttaaataaacttctacgctggaaaaaaaaaaaaaaaaaagcttatcgataccgtcgacctcgagggggggcccggtac

SEQ ID NO: 29975 - protein, 129 aa, Triticum aestivum
CLVDLPGYGFAYAKDEVKESWQELVKEYVSNRVGLDRVCLLVHTKRGMKPLDYELIDLMERYKTPYQIVLTKTDLVFPIDVARRAMEIQESLKKNKSVVKPVMMVSSKTGAGIRNLRGVLGKLARFIKP

SEQ ID NO: 29976 - protein, 82 aa, Triticum aestivum
MKPLDYELIDLMERYKTPYQIVLTKTDLVFPIDVARRAMEIQESLKKNKSVVKPVMMVSSKTGAGIRNLRGVLGKLARFIKP

SEQ ID NO: 29977 - protein, 71 aa, Triticum aestivum
MERYKTPYQIVLTKTDLVFPIDVARRAMEIQESLKKNKSVVKPVMMVSSKTGAGIRNLRGVLGKLARFIKP

SEQ ID NO: 29978 - DNA, 1367 bp, Triticum aestivum
catccatccacccgcccccaagttatctcgtgccgtcttctcttctcttctcttctcttctcccctcccgcatccggtagcagcaagcactctgcgtctctccctttatccccgcccgcatggctgctctcctccgcacggcggccgcccttgcgccccgcccttcgcctgcccgcgagtccccgcgccggccgtgcgctgcgtccctcgcctgctcccgccggccgccggtgcggtcgctccgcgcccagttgcttacgacccggcgcgctccgggccacgtcgcgagccggctgcggcgattgggggctaccgaggccgacgagtctgcgcagacggccacgcaggaggatacagaaactgaagttactgggggcactgttgccgatgatggttctgcaggcacagaagagactccctctgttctcatcacagcattgcaatcatacaaagaagctttgatgaatgatgatgaagcaaaaattgcggagatagagtcctttctacttactattgaggatgagaaaaattctctaatgggcaaaatcactgctttagatgcagaattgacaactgagagagatcgtatcgtgcggattagttctgactttgataactacaggaagaggacagaaagagagaagctttctttgatgacaaatgtgcaaggagaagttgttgagagcttgttgcctgttcttgacaactttgaaagagcaaaaacacagataaaggtggaaacagagcgtgaagctaaaataaatgacagctaccagagcatttataagcaacttgttgaaattctgaaatcactgggtgttgaagatgtggaaactgttggcaaaccttttgatcctatgcttcatgaggctattatgcgagaagaatcggtggaatatgaagatggggttgtcctccaggaattccgcaagggtttcaagcttggtgagagattactacgtccggcgatggtcaaggtgtctgcaggaccaggccctgaaaagtcgggagatgacgatactacaataggtgaagatagtgtagggcctcaagcgttcgacgacggtgaagacgatggttttgatgatgccgatgccgagtaattgtgctcggtttctaatttggaaacaagaaattccagaagttttgatgttttttctggagggtgccacatgatagagttagatattctgctcctcaaatgtgctggttctctcttcctgctcttgacatggaagtgttgataattgtgtcaaaagtttctatatcctcatggtacggtcattatcatggttaggaattattgttgggtcaagcaacaacaatgttatatatatacgaggtaaattgtgtttgatttgttggag

SEQ ID NO: 29979 - protein, 327 aa, Triticum aestivum
MAALLRTAAALAPRPSPARESPRRPCAASLACSRRPPVRSLRAQLLTTRRAPGHVASRLRRLGATEADESAQTATQEDTETEVTGGTVADDGSAGTEETPSVLITALQSYKEALMNDDEAKIAEIESFLLTIEDEKNSLMGKITALDAELTTERDRIVRISSDFDNYRKRTEREKLSLMTNVQGEVVESLLPVLDNFERAKTQIKVETEREAKINDSYQSIYKQLVEILKSLGVEDVETVGKPFDPMLHEAIMREESVEYEDGVVLQEFRKGFKLGERLLRPAMVKVSAGPGPEKSGDDDTTIGEDSVGPQAFDDGEDDGFDDADAE

SEQ ID NO: 29980 - protein, 213 aa, Triticum aestivum
MNDDEAKIAEIESFLLTIEDEKNSLMGKITALDAELTTERDRIVRISSDFDNYRKRTEREKLSLMTNVQGEVVESLLPVLDNFERAKTQIKVETEREAKINDSYQSIYKQLVEILKSLGVEDVETVGKPFDPMLHEAIMREESVEYEDGVVLQEFRKGFKLGERLLRPAMVKVSAGPGPEKSGDDDTTIGEDSVGPQAFDDGEDDGFDDADAE

SEQ ID NO: 29981 - protein, 188 aa, Triticum aestivum
MGKITALDAELTTERDRIVRISSDFDNYRKRTEREKLSLMTNVQGEVVESLLPVLDNFERAKTQIKVETEREAKINDSYQSIYKQLVEILKSLGVEDVETVGKPFDPMLHEAIMREESVEYEDGVVLQEFRKGFKLGERLLRPAMVKVSAGPGPEKSGDDDTTIGEDSVGPQAFDDGEDDGFDDADAE

SEQ ID NO: 29982 - DNA, 586 bp, Triticum aestivum
gttctagtgtatgtgattgttgtgactcgttcttcttcgtcgttatcttcttcttttgttgtttgtgtgtttgttttttctctcacctgaaaatgtcttgctgcggtggtaactgtggttgcggaagcgcctgcaagtgcggcaacggctgcggaggctgcaagatgtacccagacttgagctacaccgagtcaaccaccaccgagaccttggtcatgggagtggcaccagttaaggctcaattcgagagtgctgaaatgggtgttcccgctgagaacgatggctgcaaatgtggagctaactgcacctgcaacccctgcacttgcaagtgaggtgttggagagctaaagcttcaagcagaaatggcccttagaaataatgataaaaactatatgtagtttcaaaacttcaaaattatgtagtatgtattatgttgcactctggtgttttgtgtctaaacaaacacccttagaataaagtggtcatttcttgcccttgagcaagttcaagtgttttggacttgtgatgggtgtgttaaggtcatggttgccttttttatatatatatatatatataaatgtttggc

SEQ ID NO: 29983 - protein, 109 aa, Triticum aestivum; identical to SEQ ID NO: 18121

SEQ ID NO: 29984 - protein, 79 aa, Triticum aestivum; identical to SEQ ID NO: 18122

SEQ ID NO: 29985 - protein, 55 aa, Triticum aestivum; identical to SEQ ID NO: 18123

SEQ ID NO: 29986 - DNA, 1204 bp, Triticum aestivum
  misc_feature (1154)..(1154): n is a, c, g, or t
gttttctattccttccctcttttgttttctcccgcgagcagctcgtgcgacagctgagctgcggccgccgccgccacactttgcttcgctgtgagcggtcccgagcgtgagccggtgggggtgtcggcgaggcgcgcgagggtcaggcagcgaggagaccgccgccgctgcagcctggtgtgcgcgcgctccaggctgctccgccactcagccaccgggttgcagatgccgccattgctcctgctaggctgctaccgtccgtcgccagccgtccgcgctgctgctgccaccttcgccgcgcacctgaccgcgccgccgcccgggaattgcccgacgcggccgtctcgtgttgccctctgccggcgcgcgcggcagacgacgcctttgacgtctatctttctggccaaacgcattcctcgggcatacagaggctaaagtcaaccttaaaatggaggatgctaacgcagtagtagattggaatgttgacattattggcccagatggtggtagcggcgcttgccgcaaattggcaaaaactgaagaccctgatgccacagagtgttcaagttcctttggggacacactatctggatctcaggatgatgcaaagccttcagagattagtgacattgaagtagactcaccattctgccgttatcctcataatggtgatgctgctgcactcttggatgcagctgctgctgacaatttggatagattattgaaaaagaaaaaagtgaccgatcattggagaagctatatcagcccattaatgtggagatgccaatggttagagctgcggatgaaagacttgcaatctcaagtatccagatatgacagggagcttgcagtacttaaacatgagaaagagttgcagacaaaaatgattgagttggactgttcctcgtcaagatcagtgcccttctcttctcattgctgcaggaagactatgaagaggaagaagaggaagagaaatgaggagaaaatcaatgctccctcatacatcgcaacccacaccatattgtcttattatgaaaaagagaccagcggatggctttgatacctggtacttgtttgcatgatatgctgttcccaagttatctccagagtgctgagcaccaactcccatcaaatcaagataatgttgatagtgngatataatgccattcatattatcaatggaccctttaccacagatggcatc

SEQ ID NO: 29987 - protein, 203 aa, Triticum aestivum
MEDANAVVDWNVDIIGPDGGSGACRKLAKTEDPDATECSSSFGDTLSGSQDDAKPSEISDIEVDSPFCRYPHNGDAAALLDAAAADNLDRLLKKKKVTDHWRSYISPLMWRCQWLELRMKDLQSQVSRYDRELAVLKHEKELQTKMIELDCSSSRSVPFSSHCCRKTMKRKKRKRNEEKINAPSYIATHTILSYYEKETSGWL

SEQ ID NO: 29988 - DNA, 1142 bp, Triticum aestivum
ctagaacatcctaatcgaaaaagctaggcagagcccgacccgtcaatcctttcccctccagaaccctccctcccgccccctcccctccccgccaccacccgccgccgccgcctcgccgcggaaaccctagacccctcccccgtccgccccgtccgttcgccgctccgtcgccgccgccacccgcttcagatctcgacgacttccgcccgcgatggaggactgggagaatgatgattttcaaccaatcgcgcctgttgtgaaagctcaacctcttaaaagtaactgggaagatgaagatgtggatgaagatgatgtcaaagaatcttgggaagaggaggaagagaaacctaagccacaacctgtagaaaagcctgctccaaaacctagtgctaaagctgctgtgaaaaaaggcaaacagccctcaacgagtactgaagtagttgatgatgatgttcttgatgatcctatttcagagaagcttcgccaacaaaggctagtggaagaagctgactttaaggcaacagcagagctttttgcaaagaaggacggcagtgaaaagtcactagagactttcatcccgaagtctgagagcgactttgcggaatatgctgagcttatcgcaaacaaaattcgcccgtatgagaaaagctttcactacatgggtctacttaagaatgtcatgagactttccatggcatcgttgaaaggtgcggatgcgaaagaaatatcctcctctgtcacggcaattgctaatgaaaagatcaaggctgagaaagaagctgcagcaggcaaaaagaaaggaggagcaaaaaagaagcagctccatatagagaaaggagaggaggactttgttgcccgaccgggtgcatcttttgacgatcccgacgagttcgacttcatgtgattggctgggaggggaatagcctcttccgtgtaatacctttgaggcaaagcagagactagggtttgcggcggtctgtattcccttcagaggcacctgaacacttggaactgcgtgggaacatgtcttatctatttgaggttgattttgacactcggagaataagaagaacgcttgcggctccctgaggcgtttttcttgttcaaaaaaaaaaaaaaaaaagcttatcgataccgtcgac

SEQ ID NO: 29989 - protein, 230 aa, Triticum aestivum
MEDWENDDFQPIAPVVKAQPLKSNWEDEDVDEDDVKESWEEEEEKPKPQPVEKPAPKPSAKAAVKKGKQPSTSTEVVDDDVLDDPISEKLRQQRLVEEADFKATAELFAKKDGSEKSLETFIPKSESDFAEYAELIANKIRPYEKSFHYMGLLKNVMRLSMASLKGADAKEISSSVTAIANEKIKAEKEAAAGKKKGGAKKKQLHIEKGEEDFVARPGASFDDPDEFDFM

SEQ ID NO: 29990 - DNA, 672 bp, Triticum aestivum
accattacatagaacatcctaatcgaaaagttggaattgtttaattgttctttgattttcttcacatagcaatctctttcacaatggtgattgctacaagaaattccttcatatctcttatcttaatatcctcacttttttgcacaacactccttgccaagtcttctcacccaatctccgatgctcaagtcaggaagaacaagcttcagtgctatgctgatattgacagtgggttgtggggttggtcatgcaaatcaacgatgatagcaagggagaattgtgctctaagatgcctttcaccagcttgttacgagctcatctacgagagtgacccgctcgaagagggagaaaaggactttattcgaagccaagagtacaaatactgcatgcacaagttgtccatgggagagagccttgagggtgttaagggtgcctttagcaactaatcaacacgaaaattctgaattggaggtggaagtatggtgaatttatatatgccctgttaaatgtagattaaagaaaatgtccaagagagtcttgagagtattttttttctttcaagtaattaattataaatgaaccagatacaagtatatgctcttagaaatccagtacaatctagaacagaacaatgcttctctaaaggtgagtgccttagttttttagcccctt

SEQ ID NO: 29991 - protein, 120 aa, Triticum aestivum
MVIATRNSFISLILISSLFCTTLLAKSSHPISDAQVRKNKLQCYADIDSGLWGWSCKSTMIARENCALRCLSPACYELIYESDPLEEGEKDFIRSQEYKYCMHKLSMGESLEGVKGAFSN

SEQ ID NO: 29992 - protein, 61 aa, Triticum aestivum
MIARENCALRCLSPACYELIYESDPLEEGEKDFIRSQEYKYCMHKLSMGESLEGVKGAFSN

SEQ ID NO: 29993 - DNA, 607 bp, Triticum aestivum
attaccttacagtcaacaaatcaccccattgcgccatgaacaaaggggtgaagctgagcgtggtttgaatgtatttcctcgtagcagcttgtatcatggatacagccccaggcaggctgtagatgatggatttggagtacgctcctcatacacttcaaagccttatggaagacgcgtcccggatatggaaatgtttattccttctagcggcctttcaaaagtaatggggaagcatggtacaaacttggacaatattagaaagatttctggagctgacattgaaattattgaatcaaaatcatctcgtcatgagcatgttgctaacatatttggcaccccggagcagaggcagtcggcagagaatttgatcaaagctttcataatgtctacttaaggaggttcctgctgtagtttgaaaggatatatgtggacccttcagtcagctctatcggacttctcttgtcatcccgtagatcaaaaactgtgttctccatcccttcaactctccaataaacctcatgcttgtctatcttcctcagactcccaaccatggctatacttgtgtggacttgtccgtgtttaatcgcatgttcagatattcccgtct

SEQ ID NO: 29994 - protein, 130 aa, Triticum aestivum
LPYSQQITPLRHEQRGEAERGLNVFPRSSLYHGYSPRQAVDDGFGVRSSYTSKPYGRRVPDMEMFIPSSGLSKVMGKHGTNLDNIRKISGADIEIIESKSSRHEHVANIFGTPEQRQSAENLIKAFIMST

SEQ ID NO: 29995 - protein, 69 aa, Triticum aestivum
MEMFIPSSGLSKVMGKHGTNLDNIRKISGADIEIIESKSSRHEHVANIFGTPEQRQSAENLIKAFIMST

SEQ ID NO: 29996 - protein, 67 aa, Triticum aestivum
MFIPSSGLSKVMGKHGTNLDNIRKISGADIEIIESKSSRHEHVANIFGTPEQRQSAENLIKAFIMST

SEQ ID NO: 29997 - DNA, 927 bp, Triticum aestivum
agaaaagaaaatggatataatcagaactcttcccatccttatcctctgaacctccgcccctgttcgtccccttctcatcccttttcctaattgtgattcctttctaagagagggacatcacatattggtaatcagagctttgttccgatccgtcgcgcgcttcatatttccgagattttagcggtaacatcgactaactggttggagttcgtcctccgaaccgaactcctgtaaatccgaagttagcgttcgcttgatccaggagaggccgcaacgactccggctcatagcaaaccgagtgcccagactagattcgtgcttcaaagcatggaggagatgaggaaggcgcttgaggagttgatccagaaatcaatggggaacatcaccacgaaatttgaggagcactcagcggaattgaagaaagaggtctccgccttgtccaaacaggtggaagattttgggggtgacctcgacaccgtcaagcgtcaacacgctgagaccctgcgcgtctcgcctcccctgcgtactccgttgcaggccgacaagggagttccccgtctccccaacaacgggccaccccttctcccaggccacgcgtggccactagcagctgacgagcagttcgaccgtggggcggatgctgcggcaccggaccatggggattgtcgcgcgaagccgcccaagcacaattttccggtcttcaacggcgaccaccccttgttgtgggtggatctctgctatgtctacttcgacatgtatcgtgtcccagcgcaccactgggtcagcactgcgtcactgtattttgagggccacgcggcgctctggctgcaggcatacaagcgtcagcatcgcttgttgcgttgggactcattcatcactgctgtcactgacgagtttggcaccgatgaatttgatggccagatgtcc

SEQ ID NO: 29998 - protein, 200 aa, Triticum aestivum
MEEMRKALEELIQKSMGNITTKFEEHSAELKKEVSALSKQVEDFGGDLDTVKRQHAETLRVSPPLRTPLQADKGVPRLPNNGPPLLPGHAWPLAADEQFDRGADAAAPDHGDCRAKPPKHNFPVFNGDHPLLWVDLCYVYFDMYRVPAHHWVSTASLYFEGHAALWLQAYKRQHRLLRWDSFITAVTDEFGTDEFDGQMS

SEQ ID NO: 29999 - protein, 197 aa, Triticum aestivum
MRKALEELIQKSMGNITTKFEEHSAELKKEVSALSKQVEDFGGDLDTVKRQHAETLRVSPPLRTPLQADKGVPRLPNNGPPLLPGHAWPLAADEQFDRGADAAAPDHGDCRAKPPKHNFPVFNGDHPLLWVDLCYVYFDMYRVPAHHWVSTASLYFEGHAALWLQAYKRQHRLLRWDSFITAVTDEFGTDEFDGQMS

SEQ ID NO: 30000 - protein, 185 aa, Triticum aestivum
MGNITTKFEEHSAELKKEVSALSKQVEDFGGDLDTVKRQHAETLRVSPPLRTPLQADKGVPRLPNNGPPLLPGHAWPLAADEQFDRGADAAAPDHGDCRAKPPKHNFPVFNGDHPLLWVDLCYVYFDMYRVPAHHWVSTASLYFEGHAALWLQAYKRQHRLLRWDSFITAVTDEFGTDEFDGQMS

SEQ ID NO: 30001 - DNA, 1425 bp, Triticum aestivum
attacctagaacatcctaatcgaaaaaatttcccctctgcccgactaaaaaatcccctctacgccgcccggcgcacgactgcccgattcagcgcatcccgccggagaccgcccgcctctgacgagggccacaccggataatccagatgttttcatatgccttgaggagttgtcggtggattatatgcagaggctaccaagtggtagctccaatgttgcaagaggtcagtaatgggtgcttcttctgggatggctcacctgagataccaacgctgaaggatctgaatttcaagctcagcaaggcctgcatgttgcagtctgtgggacggccgactctggaaaatcaagtttgctctcttgaatggtatggttccaaagctattaggagaggccaagacttgcggaacaatgccatatgtcagccagactgcatggatacaaagcgacaaaattcaggacaacatactgctcgctcggcaaggagatggagagggagaagtatggaagggtccttgagtggtgttcgctaaagaaagacttggagatcagaaatcattggagagtgagtctgcactcttagtgcctggcagaagcaaaggactcggatagcccgagcattgtatcagtatgctgacatctatttattccatgatccgttcaacgcagttgacatacaggatcccaattttccaagatagatggttcatcgcggtcggcaggagaaatatcatcaatggtacggaaaaaggcaggtaggctgaggcgggcgcccacaccgagcagccgatccaggaaaccagccctgcggcaccgcctcgtgccactccccatctctatgtttgtgtcaggcccagcgcaaggtattggtagagaggaggccggaaagagaagctgcatggtaggaggcttttgatccgaaggcaagttggatgatctgctgacaaagacacacctcaattctgaatttctacttgaaacaattgatcagatcacaaatgtaccttggttatgtctctcactgtgtgctgaacaatgttttgcctattttcatcttggttgctgacattgttggtgttatctgtcagagaaagttgttgaagtgaaagatgaagatgaacctgtagaagagctgaaaaaaggacgtggtagaaagaaggaagcgaagcctaaacagtataatgattactgcctcgcccagccgtgcatccaagatgcgacgcttgctggaaagctggtcaagtaggccctcgactgcgagttttagctgattgatccttcacatcagcctaactgctacaataaatggacttacaacaatgattccttctatattgaatttttatattcgacctcaccattgcttagtttcctttcctgatgtcaagacacaaagaatttgagatccaatttatcttttttagttttt

SEQ ID NO: 30002 - protein, 127 aa, Triticum aestivum
MFSYALRSCRWIICRGYQVVAPMLQEVSNGCFFWDGSPEIPTLKDLNFKLSKACMLQSVGRPTLENQVCSLEWYGSKAIRRGQDLRNNAICQPDCMDTKRQNSGQHTARSARRWRGRSMEGSLSGVR

SEQ ID NO: 30003 - protein, 105 aa, Triticum aestivum
MLQEVSNGCFFWDGSPEIPTLKDLNFKLSKACMLQSVGRPTLENQVCSLEWYGSKAIRRGQDLRNNAICQPDCMDTKRQNSGQHTARSARRWRGRSMEGSLSGVR

SEQ ID NO: 30004 - protein, 73 aa, Triticum aestivum
MLQSVGRPTLENQVCSLEWYGSKAIRRGQDLRNNAICQPDCMDTKRQNSGQHTARSARRWRGRSMEGSLSGVR

SEQ ID NO: 30005 - DNA, 940 bp, Triticum aestivum
ctcacaagaaaaaaacgacgttcttctcacgcgggcagggccgagttcttaagacccaatcccaccaaacccctcaccagttctcttatcccctcctcatcttctccccgcacccgacgacatcgctggagaaggaagcatcatggccggagcagcagcagccgccgccgccgtggcgtccggcatctcgatccggccggtcgccgcgcctaagatctcgcgcgcgcctcgctctcggtcggcggtgagggcggccgtctccataggcgagaaggcttacacggttcagaaatctgaggagatcttcaacgccgccaaggaattgatgcctggaggtgttaattcaccagtccgtgccttcaaatcagtcggtgggcagcccatagtttttgattctgtgaagggctctcatatgtgggatgtggatggaaatgaatatattgattatgttggttcctggggtcctgcaatcattggtcatgcagatgatgaggtgaatgctgcacttattgaaactctgaagaagggaactagctttggtgctccatgtgcgttggagaatgtgttggctcaaatggtcatctccgctgtgccgagtatcgaaatggttcgttttgtaaattcaggaacagaagcttgcatgggagcactccgccttgtgcgtgcattcactgggagggaaaagatcctcaagtttgaaggctgttaccatggccatgcagattccttcctcgttaaagcaggcagtggtgttgccaccctcggcctcccagactcccctggagtgcctaagggagccaccgttgggactctaacagcaccttataatgatgttgaggcagttaaaaagctgtttgaggataacaaaggggagattgctgcagtcttccttgagccggttgtcggcaatgctggcttcattcctccgcagcctgctttc

SEQ ID NO: 30006 - protein, 266 aa, Triticum aestivum
MAGAAAAAAAVASGISIRPVAAPKISRAPRSRSAVRAAVSIGEKAYTVQKSEEIFNAAKELMPGGVNSPVRAFKSVGGQPIVFDSVKGSHMWDVDGNEYIDYVGSWGPAIIGHADDEVNAALIETLKKGTSFGAPCALENVLAQMVISAVPSIEMVRFVNSGTEACMGALRLVRAFTGREKILKFEGCYHGHADSFLVKAGSGVATLGLPDSPGVPKGATVGTLTAPYNDVEAVKKLFEDNKGEIAAVFLEPVVGNAGFIPPQPAF

SEQ ID NO: 30007 - protein, 205 aa, Triticum aestivum
MPGGVNSPVRAFKSVGGQPIVFDSVKGSHMWDVDGNEYIDYVGSWGPAIIGHADDEVNAALIETLKKGTSFGAPCALENVLAQMVISAVPSIEMVRFVNSGTEACMGALRLVRAFTGREKILKFEGCYHGHADSFLVKAGSGVATLGLPDSPGVPKGATVGTLTAPYNDVEAVKKLFEDNKGEIAAVFLEPVVGNAGFIPPQPAF

SEQ ID NO: 30008 - protein, 176 aa, Triticum aestivum
MWDVDGNEYIDYVGSWGPAIIGHADDEVNAALIETLKKGTSFGAPCALENVLAQMVISAVPSIEMVRFVNSGTEACMGALRLVRAFTGREKILKFEGCYHGHADSFLVKAGSGVATLGLPDSPGVPKGATVGTLTAPYNDVEAVKKLFEDNKGEIAAVFLEPVVGNAGFIPPQPAF

SEQ ID NO: 30009 - DNA, 1379 bp, Triticum aestivum
aaaacacggcagagttttcccctttcccccctcctccctccccactcgccaaaaatcctcgatccaaatccccactcccggcgacgcgacgcggccatgcgcagctgccgataggcgacgactgcagcgaccacgcacgagcggccatggacgagggctacgccagcctccccaccagccacctcctcggctccgtccccgctgtggctgtggctcccgatgagaggaagcccggtgcccccgccgaagttggaaatgccgctgccacctcgcgccttcagcagtttccgcctgctcctgctgccaacggaggagggtaccagcctccagggagtcctctaggtggagatgtagaaacacagacaaactggaaaggatacttcaatgttgcctcttatactccatatttcaatgttgatactgatgtcgttgttgacagacttatcagttcagtttatccaatggatgggtttttcaggaagatagatgctaatcctgacatgtatggacccttatggatcaccactacactgatattcatgctggctgcattcggaaactttgccacttatctaatgcaaaggaaaagtgatctgaatatatggaactttgatgtcagctatttcagtttggcggcatcagtcatgtacggttatgctatcgtggtacctgctgcattctttttcctgtttcagtactttggatcacgcccaagccttctccggttttggtgtatgtggggctattctctgttcatcttcgtgccggcatctatactgctccttattcctgtggaatttcttcgctgggtcatcatagctggtgctggtggtgcatcatcttggttcatctttttaaacttgaaggaatgcaccgaaggagctgatatgatggctttaatcgcaagtgcagcagtgctgcagtttgctctggcactgttcatcaaagttttcttttttgcctgagatctattctgtgttgcttcaggtgagctggatgttttctttgtgtccccgtcgttctgttctgccattcatctttccgaggaccaggcagtggactagtttcaccctacatacatattgaccctagatttgatagaccttgggagtgtctgttttcaagatttttgactcctgtagttaagggaatttcactgtgtgcgttccagtgcgaagttactaagtttgcatctaaatttgtacctggtgaactttctgccaccgtgttgtacaacaacggtggttagcaagaatgtgaagctcttttttgtttgtacaatccattgctgtgaatgcatggttttctcatgtttctatccagcataaaaaaaaaaaaaaaaaagcttatcgataccgtcgacctcgagggggggcccg

SEQ ID NO: 30010 - protein, 320 aa, Triticum aestivum
NTAEFSPFPPPPSPLAKNPRSKSPLPATRRGHAQLPIGDDCSDHARAAMDEGYASLPTSHLLGSVPAVAVAPDERKPGAPAEVGNAAATSRLQQFPPAPAANGGGYQPPGSPLGGDVETQTNWKGYFNVASYTPYFNVDTDVVVDRLISSVYPMDGFFRKIDANPDMYGPLWITTTLIFMLAAFGNFATYLMQRKSDLNIWNFDVSYFSLAASVMYGYAIVVPAAFFFLFQYFGSRPSLLRFWCMWGYSLFIFVPASILLLIPVEFLRWVIIAGAGGASSWFIFLNLKECTEGADMMALIASAAVLQFALALFIKVFFFA

SEQ ID NO: 30011 - protein, 272 aa, Triticum aestivum
MDEGYASLPTSHLLGSVPAVAVAPDERKPGAPAEVGNAAATSRLQQFPPAPAANGGGYQPPGSPLGGDVETQTNWKGYFNVASYTPYFNVDTDVVVDRLISSVYPMDGFFRKIDANPDMYGPLWITTTLIFMLAAFGNFATYLMQRKSDLNIWNFDVSYFSLAASVMYGYAIVVPAAFFFLFQYFGSRPSLLRFWCMWGYSLFIFVPASILLLIPVEFLRWVIIAGAGGASSWFIFLNLKECTEGADMMALIASAAVLQFALALFIKVFFFA

SEQ ID NO: 30012 - protein, 167 aa, Triticum aestivum
MDGFFRKIDANPDMYGPLWITTTLIFMLAAFGNFATYLMQRKSDLNIWNFDVSYFSLAASVMYGYAIVVPAAFFFLFQYFGSRPSLLRFWCMWGYSLFIFVPASILLLIPVEFLRWVIIAGAGGASSWFIFLNLKECTEGADMMALIASAAVLQFALALFIKVFFFA

SEQ ID NO: 30013 - DNA, 814 bp, Triticum aestivum
cttcttgctgtaacacatccatccatttgtagctgcaggcagagcagagttgtgcgtgtgggagttgaaggagatcgagatggccacagcatatgctcctccgatggcgagccaggtgatgaagagcggcttggtgtgctccaagccgcggggcatgtccggcgcttcgctcaccaggaggccccgcctcgtcgtcaaggccgtcaagtctgacaagccgacgtaccaggtggtccagcccatcaacggcgacccattcatcggcagcctggagacgcccgtcacctccagcccccctcgtcgcctggtacctctcaaacctcccccgcctacgcaccgccgtcagcccgctcctccgcggcatcgaggtcggcctcgcccacggctacctcctggtcggccccttcgcgctcaccgggccgctccgcaacacgccaattcacggccaggcaggcactctcggcgccatcggcctcgtctccatccttagcgtctgcctcaccatgtacggtgtcgcgtccttcaacgagggcgcaccgtcaaccgcgcccgcactcacgctcacaggccgcaagaaggaggccgacaagctgcagaccgctgaagggtggtcgcagttcaccggaggcttcttcttcggtggtgtctccggtgccacctgggcctacttcctcctctacgtgctcgacctcccatacttcttcaagtagattaattattggcatgcatgtacgatgggtgcagatcatgtgatctcttcccgatggtggttgcttcaaagagtccatgtataaatgaatttacacattcctcg

SEQ ID NO: 30014 - protein, 136 aa, Triticum aestivum
MATAYAPPMASQVMKSGLVCSKPRGMSGASLTRRPRLVVKAVKSDKPTYQVVQPINGDPFIGSLETPVTSSPPRRLVPLKPPPPTHRRQPAPPRHRGRPRPRLPPGRPLRAHRAAPQHANSRPGRHSRRHRPRLHP

SEQ ID NO: 30015 - protein, 128 aa, Triticum aestivum
MASQVMKSGLVCSKPRGMSGASLTRRPRLVVKAVKSDKPTYQVVQPINGDPFIGSLETPVTSSPPRRLVPLKPPPPTHRRQPAPPRHRGRPRPRLPPGRPLRAHRAAPQHANSRPGRHSRRHRPRLHP

SEQ ID NO: 30016 - protein, 123 aa, Triticum aestivum
MKSGLVCSKPRGMSGASLTRRPRLVVKAVKSDKPTYQVVQPINGDPFIGSLETPVTSSPPRRLVPLKPPPPTHRRQPAPPRHRGRPRPRLPPGRPLRAHRAAPQHANSRPGRHSRRHRPRLHP

SEQ ID NO: 30017 - DNA, 517 bp, Triticum aestivum
  misc_feature (426)..(426): n is a, c, g, or t
ctcagttctcacccacccaaacaccgccgctgaaacctccggttctcagcacacagcgacctgctcaaccgtctccactagcgctcggccaagatggacgtcgccgacgccgcctccccgtctggccaggaccagcaggggcacaggacggtgtcgtctgagccgccgaagcgccccgcggggcggaccaaggtccatgagacgcgccacccgctgtaccgcggcgtgcggcagcggggacgggtcgggcagtgggtgtgcgaggtgcgcgtgcctggggtgaagggctccaggctctggctcggcaccttcaccaccgccgagatggcggcgcgcgcgcacgacgccgccgtgctcgcgctctccggccgcgctgcctgcctcaacttcgccgactccgcatggcgcatgctgcccgtcctcgcngcccgggtcgttcggcttcggcagcgcgcgcgagatcaaggccgccgtcgccgtcgcccgtcgtggcgttcaagaagcagcagattatccc

SEQ ID NO: 30018 - protein, 141 aa, Triticum aestivum
  misc_feature (111)..(111): Xaa can be any naturally occurring amino acid
MDVADAASPSGQDQQGHRTVSSEPPKRPAGRTKVHETRHPLYRGVRQRGRVGQWVCEVRVPGVKGSRLWLGTFTTAEMAARAHDAAVLALSGRAACLNFADSAWRMLPVLXARVVRLRQRARDQGRRRRRPSWRSRSSRLS

SEQ ID NO: 30019 - protein, 93 aa, Triticum aestivum
SVLTHPNTAAETSGSQHTATCSTVSTSARPRWTSPTPPPRLARTSRGTGRCRLSRRSAPRGGPRSMRRATRCTAACGSGDGSGSGCARCACLG

SEQ ID NO: 30020 - DNA, 1766 bp, Triticum aestivum
aaaaaatagaaactccccgacgacttgctcctcctccccctcacttccctcccccatcttggaccgttgcacaccgatctcgcgccggcccccaaatcgccggcgaagcccgcctccgcctccgtcccccgccgcgccgatctgctcgcaagattcgtaggccggaggaggaggacgaggaagggaggaagttgagttcttgttggtttcttccgcgggagccgaccgcacatgccaacaaccccccggagcagaagccaagctaggaccaccaggtcttggatcttgtcaggcatggacttcggtgacacgagacgcaagcctaatttcgccggaaagatcgcggtggctgctgccctcactgttatgtgcatacttgtgttgaagcagtctcctggttttggcggcactagcgtgttctctcgccatgaaactggggtgactcatgtgctggtgactggaggtgctggatacattggctcacatgctactcttcgtctccttacggacaactaccgagttaccattgtggataacctttcgagagggaacatgggagctgtcagagctctccagaggttgtttccagagcctgggaggcttcagtttatatacactgatttaggcgatccgaaagctgtgaacaaaatgttttcggagaacgcgtttgatgctgttatgcacttcgctgctgttgcttatgttggtgagagcacgcaggagccactaaggtactaccacaacataacatcaaatacgttgacagtgcttgaggcaatggcagcacataatgtaaaaactctgatttactcgagtacttgtgcaacatatggtgaacctgacacaatgcctattgtagaaacaactcctcagatacctatcaatccatacgggaaggcaaaaaagatgtccgaggacatcattctagatttctcaaagaaatcgaacatggctgtgatgatcttaagatacttcaatgtgattggatcggaccctgaggggcgccttggggaagctccaaggcctgaactgcgtgagcatggaaggatttctggtgcgtgttttgatgcagcatcaggaatcattccagggctaaaggttcgaggaacggactaccctaccgctgatggaacttgcgtaagggactacatcgatgtcacagatcttgttgatgcccatgtcaaagctcttggtaaagctgagcctagcaaagttggaatctacaatgtcggcacagggaaaggtaggtcagtgaaggagtttgtagaagcgtgcaagaaggcgactggagcaaccatcaaggttgactacctcgatcggagagctggggattacgccgaagtatacagcaacccggccaagatccgcgatgagctgaactggacagcccaacacacggacctccgtgagagccttgcgacggcctggaaatggcagaaggcgcacccgggcggatacgggtcggcctgatcccgtgctcggtaggttcaacgcaagttcgccaacacagacccacaggtccatgtgcagtgatatggccttgagaacactggtccttcaccgtagacacgtagcaggcagccacagaagtgtagtgatgttatttcgcagcacctggaagaagatacagagagaatggcctgcctggcttagaagaaatcatatatagttttcttttttcttttcttttcgtcagtgacatttaatttattttgctgttcgttggctgaggcataatatatgacacaaatacggagttgtgctgt

SEQ ID NO: 30021 - protein, 412 aa, Triticum aestivum
MPTTPRSRSQARTTRSWILSGMDFGDTRRKPNFAGKIAVAAALTVMCILVLKQSPGFGGTSVFSRHETGVTHVLVTGGAGYIGSHATLRLLTDNYRVTIVDNLSRGNMGAVRALQRLFPEPGRLQFIYTDLGDPKAVNKMFSENAFDAVMHFAAVAYVGESTQEPLRYYHNITSNTLTVLEAMAAHNVKTLIYSSTCATYGEPDTMPIVETTPQIPINPYGKAKKMSEDIILDFSKKSNMAVMILRYFNVIGSDPEGRLGEAPRPELREHGRISGACFDAASGIIPGLKVRGTDYPTADGTCVRDYIDVTDLVDAHVKALGKAEPSKVGIYNVGTGKGRSVKEFVEACKKATGATIKVDYLDRRAGDYAEVYSNPAKIRDELNWTAQHTDLRESLATAWKWQKAHPGGYGSA

SEQ ID NO: 30022 - protein, 391 aa, Triticum aestivum
MDFGDTRRKPNFAGKIAVAAALTVMCILVLKQSPGFGGTSVFSRHETGVTHVLVTGGAGYIGSHATLRLLTDNYRVTIVDNLSRGNMGAVRALQRLFPEPGRLQFIYTDLGDPKAVNKMFSENAFDAVMHFAAVAYVGESTQEPLRYYHNITSNTLTVLEAMAAHNVKTLIYSSTCATYGEPDTMPIVETTPQIPINPYGKAKKMSEDIILDFSKKSNMAVMILRYFNVIGSDPEGRLGEAPRPELREHGRISGACFDAASGIIPGLKVRGTDYPTADGTCVRDYIDVTDLVDAHVKALGKAEPSKVGIYNVGTGKGRSVKEFVEACKKATGATIKVDYLDRRAGDYAEVYSNPAKIRDELNWTAQHTDLRESLATAWKWQKAHPGGYGSA

SEQ ID NO: 30023 - protein, 367 aa, Triticum aestivum
MCILVLKQSPGFGGTSVFSRHETGVTHVLVTGGAGYIGSHATLRLLTDNYRVTIVDNLSRGNMGAVRALQRLFPEPGRLQFIYTDLGDPKAVNKMFSENAFDAVMHFAAVAYVGESTQEPLRYYHNITSNTLTVLEAMAAHNVKTLIYSSTCATYGEPDTMPIVETTPQIPINPYGKAKKMSEDIILDFSKKSNMAVMILRYFNVIGSDPEGRLGEAPRPELREHGRISGACFDAASGIIPGLKVRGTDYPTADGTCVRDYIDVTDLVDAHVKALGKAEPSKVGIYNVGTGKGRSVKEFVEACKKATGATIKVDYLDRRAGDYAEVYSNPAKIRDELNWTAQHTDLRESLATAWKWQKAHPGGYGSA

SEQ ID NO: 30024 - DNA, 1466 bp, Triticum aestivum
gtttttaactcgacttagccaagtttggcaaacgaacaggccccgtggccccgcccccgcgcgacagcgaccgggcgcccgaagtgtctcgcgctcgcccacggcacccgagcggagcccccgcccctaccatgtgctctccctgcccgcagacccctcaaaacccacccgcgcccgcacccaggcaccgagcacccagcagaaagaaacgcaccaaatctttatcccctgccctcagcagtgccgacctgagcgccggagatctgcggcgagcgagatgaaagtggaggagcagacggtggtgggaggaggaggaggggggctctgggggctggccgggcggccgtgcgacacgtgcgccgtggacgcggcgcggctctactgccggtcggacggcgcctacctctgcgccgggtgcgacgcgcgcgctcacggggccggctcccgccacgcgcgcgtctggctctgcgaggtctgcgagcacgcgcccgccgcggtcacctgccgcgccgacgccgccgcgctctgcgccacgtgcgacgccgacatccactccgccaacccgctcgccagccggcacgagcgcctccccgtcacgcctttcttcggcgcgctcgccgacccgccccagcccgccccctccccgtcctccgccgccgcgacgcaggaggacgcggacgacgacgggagcaacgaggccgaggcggcctcctggcttcttcccgagcctggcgatagccccgaggacagcaccgctaccttcttccctgactcggacgcgtacctcgatctggacttcgtccggtctatggacgggatcaaggccatcggggtgcccgtcgccccttccgagctcgacgtcgccggcggcgctctcttctaccccgaacactccatgaaccacagcatgtcaacgtccgaggtcgcggtggtgccggacgcgctgtcagccggcggggccccggcgccggcgccgtcggtggcggtggtggctagcaaggggaaggagcgggaggcccggctgatgcggtaccgggagaagcgcaagaaccggaggttccagaagaccatccgctacgcgtcccgcaaggcgtacgccgagacgcggccgcgcatcaagggccggttcgccaagcgcaccgccgaggacgacgcgctggagcgggacgggccgttctcgcccgcgtcgtcggcgcacctggcgtcggacggtgactacggcgtcgtgccgtccttctgaggagaccggcgacggcgacggcgactctgctgtagttttggcgcgcgcatccatccgagtgcgctcgcgtgcggtggctgcgacgcgcgctccgtgtaacattgaataatctgtacagttttgttccatgggattagtgccgtgaccgtgccgacctgaaaaaaaaaaaaaaaaaaaaaaaaaaaaaaaaatgtttaaacacaataaagttggaacgggagggggg

SEQ ID NO: 30025 - protein, 412 aa, Triticum aestivum
FLTRLSQVWQTNRPRGPAPARQRPGARSVSRSPTAPERSPRPYHVLSLPADPSKPTRARTQAPSTQQKETHQIFIPCPQQCRPERRRSAASEMKVEEQTVVGGGGGGLWGLAGRPCDTCAVDAARLYCRSDGAYLCAGCDARAHGAGSRHARVWLCEVCEHAPAAVTCRADAAALCATCDADIHSANPLASRHERLPVTPFFGALADPPQPAPSPSSAAATQEDADDDGSNEAEAASWLLPEPGDSPEDSTATFFPDSDAYLDLDFVRSMDGIKAIGVPVAPSELDVAGGALFYPEHSMNHSMSTSEVAVVPDALSAGGAPAPAPSVAVVASKGKEREARLMRYREKRKNRRFQKTIRYASRKAYAETRPRIKGRFAKRTAEDDALERDGPFSPASSAHLASDGDYGVVPSF

SEQ ID NO: 30026 - protein, 320 aa, Triticum aestivum
MKVEEQTVVGGGGGGLWGLAGRPCDTCAVDAARLYCRSDGAYLCAGCDARAHGAGSRHARVWLCEVCEHAPAAVTCRADAAALCATCDADIHSANPLASRHERLPVTPFFGALADPPQPAPSPSSAAATQEDADDDGSNEAEAASWLLPEPGDSPEDSTATFFPDSDAYLDLDFVRSMDGIKAIGVPVAPSELDVAGGALFYPEHSMNHSMSTSEVAVVPDALSAGGAPAPAPSVAVVASKGKEREARLMRYREKRKNRRFQKTIRYASRKAYAETRPRIKGRFAKRTAEDDALERDGPFSPASSAHLASDGDYGVVPSF

SEQ ID NO: 30027 - DNA, 1108 bp, Triticum aestivum
ctctctctccaatccgtctccctaactgcagatgatcgccggcaccccgttcccgtacctgagctgcttcgtggccaggttccggcacgacgagcgcaaggccatcgtcctgcgcgccgtcaagtgcatcttcgcctccatcaaagcgatgagctcggtggagtaccagccgtcgaccatggcgctggcgtccatcctggtcgcgcgcggcggcagggaggggacggggacggccccgaacctagaggaggagctcaaggcgatcctgggctcatcatggcagcaattacacaccgggcatgtgtattcctgctacagcgtgatgattcaggaggaggacaggtccacgcagtcgggcagggaggtggcttcctccggcgtctctgccgccgcccccgccgggagcccgggcacctccgtcgccatggccatggtccgtggaggggtggttgaacaggaccccgtggagagggctggttgaacagtagccggtggaggagcggtggaggctagatgaacatgagtccgtggatgagaagggtccattcgcctcagggccagtaggcagccagtaggaggagctgtgtgaatgttggctggagttcagctcgcactctagctgctgctaatttctgtcaccccccctagccttagcccttttttttttcattagcttgagcagtgattttggtggtggtggtggctaaatagggggcaggacttgattcttgtgattgtgcaattattgcagctgattggtaagttaggatcggaaagattttggttttcaggagatctttcccatccaggctttaaaaggctgtgtaaagaggagaggtagagagagaaagtcccagcaggagtactgcactactgctgcaaagagctctcagctcagctcaaagtgaggtgaaaagaaaagagagcacaacaaagcctaggcatgatatgagtggggagccatttttttctccttcctttgtgtacgtgtgtgtgtttggatagtgtgcgagctagctggacctctatcctctcgtcctcttctggtcactccatcagtgacaagtaatacagtacgtaatagttaagcagatattcattcattcat

SEQ ID NO: 30028 - protein, 150 aa, Triticum aestivum
LSLQSVSLTADDRRHPVPVPELLRGQVPARRAQGHRPARRQVHLRLHQSDELGGVPAVDHGAGVHPGRARRQGGDGDGPEPRGGAQGDPGLIMAAITHRACVFLLQRDDSGGGQVHAVGQGGGFLRRLCRRPRREPGHLRRHGHGPWRGG

SEQ ID NO: 30029 - protein, 149 aa, Triticum aestivum
MIAGTPFPYLSCFVARFRHDERKAIVLRAVKCIFASIKAMSSVEYQPSTMALASILVARGGREGTGTAPNLEEELKAILGSSWQQLHTGHVYSCYSVMIQEEDRSTQSGREVASSGVSAAAPAGSPGTSVAMAMVRGGVVEQDPVERAG

SEQ ID NO: 30030 - protein, 110 aa, Triticum aestivum
MSSVEYQPSTMALASILVARGGREGTGTAPNLEEELKAILGSSWQQLHTGHVYSCYSVMIQEEDRSTQSGREVASSGVSAAAPAGSPGTSVAMAMVRGGVVEQDPVERAG

SEQ ID NO: 30031 - DNA, 585 bp, Triticum aestivum
accccagcccgtccccaaatctccaaagcgcgagcgacaaccggccctgcctcaaccccccggcgcgtctccgactccatggcccgcaccaagcagacggcgaggaagtccgaggggcttaagcagacatttgccgcggtggaaacactggaaggagccctgcgggagtgctccaagggagagggctactttggtggtgagaccgtcgggcttgtggacatttcacttgggagcctgctctcctggttgaacgcgacagaagtgatgtccggaaccaagatatttgatcctgttaagactccgctcctggcagcgtggatggagcgctttagcaagctcgatgctgccaaggcggcgttgccagaagttgatagggtggtcgaatttgccaaagaagagacaagcacaggctgctgccgccgccgctgcttcagagaccaagtaaacatcatggggacgtgacttccattgaataaaaaaaagtgcatgttttctatatagcatatatgattgttgtttgtatgtcgatttttgttgtaatggtgccaaggataattaatgcatgtgatattttgtgaaggtttt

SEQ ID NO: 30032 - protein, 153 aa, Triticum aestivum
TPARPQISKARATTGPASTPRRVSDSMARTKQTARKSEGLKQTFAAVETLEGALRECSKGEGYFGGETVGLVDISLGSLLSWLNATEVMSGTKIFDPVKTPLLAAWMERFSKLDAAKAALPEVDRVVEFAKEETSTGCCRRRCFRDQVNIMGT

SEQ ID NO: 30033 - protein, 127 aa, Triticum aestivum
MARTKQTARKSEGLKQTFAAVETLEGALRECSKGEGYFGGETVGLVDISLGSLLSWLNATEVMSGTKIFDPVKTPLLAAWMERFSKLDAAKAALPEVDRVVEFAKEETSTGCCRRRCFRDQVNIMGT

SEQ ID NO: 30034 - protein, 82 aa, Triticum aestivum
PQPVPKSPKRERQPALPQPPGASPTPWPAPSRRRGSPRGLSRHLPRWKHWKEPCGSAPRERATLVVRPSGLWTFHLGACSPG

SEQ ID NO: 30035 - DNA, 1296 bp, Triticum aestivum
gcatatctgcacacggtagcctactggtctcttcatccattgctgaggtgacaaagctagctgcattggattggagcgcaagaagatggagggggagacgaccaagaggctggccacgctggtgggctgcaactacgtgggcacgcgctacgagctccgcggctgcatcaacgacgtcgacgccgtgcgggacaccctcgtcgcccgcttcggcttcgcgccggccgacgtcgccgtgctcaccgacgggcgcggcgccgaggtgctcccgacgggagccaacatccggcgcgcgctggcggacatggtcgcccgcgccgctcccggggacgtgctcttcttccactacagcggccacggcacgctcgtcccgccgcaccacggcgactccggcgcggaggaggaagcgatcgtgccgaccgacttcaacctcatcacggacgtggacttccggcagctggtggaccgggtgccgccgggcgcgagcttcaccattgtgtccgactcgtgtcacagcggcggcctcatcgaccaggagaaggaacagatcgggccctccgtcggctccgaccccagcgcggggtccacggcgcccgcgcgcaccgcccggttccttccctacggcgcgatcctcgaccacctctccgccgtctcgggcatgccttcctcccaccacgtcgccgaccacctcgtggcgctcttcggcgccgatgccagcgccaagttccacgttcacggcggcagcggcaacggcagcaccccgtccaccacacccgcaccggcgccaacgccgccgcgcccggacgagggcatcctgctgagcgggtgccagacgaacgagacctcagcggacgtgccggcgtacgaggccagcggaggcaaggcatgcggggcgttcagtagcgcggtgcagagcgtgctggcggcgcaccctgcgccgctgagcaaccgggagctcgtggcgaaggccagggcggtgctggaagagcaggggttcgagcagcacccgtgtctctactgtaccgacgccaacgccgaggcacggttcctttcgcaggacaagaaggaggagacagcggtgggcgcggcaagcccggccatgtcggcggcgctgctgtagagcacgttcagctcacgagctacggagcgggcatgcgtttcatgtgtcgtgttttactgtttctgcgcacgtcgaattgaatgaggggccaaactcacgtgctatattgtttgtgtgtggatcaagtttataagtgtgtgtattatatatacacggatttgttatgactcacttgc

SEQ ID NO: 30036 - protein, 344 aa, Triticum aestivum
MEGETTKRLATLVGCNYVGTRYELRGCINDVDAVRDTLVARFGFAPADVAVLTDGRGAEVLPTGANIRRALADMVARAAPGDVLFFHYSGHGTLVPPHHGDSGAEEEAIVPTDFNLITDVDFRQLVDRVPPGASFTIVSDSCHSGGLIDQEKEQIGPSVGSDPSAGSTAPARTARFLPYGAILDHLSAVSGMPSSHHVADHLVALFGADASAKFHVHGGSGNGSTPSTTPAPAPTPPRPDEGILLSGCQTNETSADVPAYEASGGKACGAFSSAVQSVLAAHPAPLSNRELVAKARAVLEEQGFEQHPCLYCTDANAEARFLSQDKKEETAVGAASPAMSAALL

SEQ ID NO: 30037 - protein, 272 aa, Triticum aestivum
ISAHGSLLVSSSIAEVTKLAALDWSARRWRGRRPRGWPRWWAATTWARATSSAAASTTSTPCGTPSSPASASRRPTSPCSPTGAAPRCSRREPTSGARWRTWSPAPLPGTCSSSTTAATARSSRRTTATPARRRKRSCRPTSTSSRTWTSGSWWTGCRRARASPLCPTRVTAAASSTRRRNRSGPPSAPTPARGPRRPRAPPGSFPTARSSTTSPPSRACLPPTTSPTTSWRSSAPMPAPSSTFTAAAATAAPRPPHPHRRQRRRARTRASC

SEQ ID NO: 30038 - protein, 271 aa, Triticum aestivum
MVARAAPGDVLFFHYSGHGTLVPPHHGDSGAEEEAIVPTDFNLITDVDFRQLVDRVPPGASFTIVSDSCHSGGLIDQEKEQIGPSVGSDPSAGSTAPARTARFLPYGAILDHLSAVSGMPSSHHVADHLVALFGADASAKFHVHGGSGNGSTPSTTPAPAPTPPRPDEGILLSGCQTNETSADVPAYEASGGKACGAFSSAVQSVLAAHPAPLSNRELVAKARAVLEEQGFEQHPCLYCTDANAEARFLSQDKKEETAVGAASPAMSAALL

SEQ ID NO: 30039 - DNA, 765 bp, Triticum aestivum
  misc_feature (514)..(514): n is a, c, g, or t
  misc_feature (655)..(655): n is a, c, g, or t
  misc_feature (680)..(680): n is a, c, g, or t
acagcccatgcacatccggctttgacgggcagcagcatctccatctcctctcttctccgtctcctctctgctcaattctctcctcctctagtacgagcatgacaagccccaggctgaagctcttcggcttccacttctcctcggcggaggagaaccacaccaccatggacacggccgagcacgaggcggccgaggcggagaagggcggctccgactcctcctcctcgtctaccaccacgaccacggccacggcggcggctgcggcgggcggcgggcaggagaaagagaagtccaagaagaagaagaagaaatccaaggacatggaggagattccagcagctgtcaccgacgctagtgagaacaagaaaaagaagaagagcaaggagaccgaggagacccctgcagccaacaccgacggcgagaagaaaaaaaagaagaagaaatcagacgccgaggacgcccccatggagatcgacgtgtccgctaagaaggacaagaagaagaagaagaagcncgctgatgagtgagcgccacggagatatggcggaaatttgtggtgtaatgctgtagtatcatcatatgaaagttttggtacttgccgttcatgtagaatggaatgccacattaggattagcagcgacgaaccctacaattngaaacttgcaagtggtgagcagtcnctttaagaggcccaatgctgtgctctcatctataacatctgctagtatgttcattctgtcgagtagtaatatatttatctgttgt

SEQ ID NO: 30040 - protein, 174 aa, Triticum aestivum
  misc_feature (171)..(171): Xaa can be any naturally occurring amino acid
SPCTSGFDGQQHLHLLSSPSPLCSILSSSSTSMTSPRLKLFGFHFSSAEENHTTMDTAEHEAAEAEKGGSDSSSSSTTTTTATAAAAAGGGQEKEKSKKKKKKSKDMEEIPAAVTDASENKKKKKSKETEETPAANTDGEKKKKKKKSDAEDAPMEIDVSAKKDKKKKKKXADE

SEQ ID NO: 30041 - protein, 142 aa, Triticum aestivum
  misc_feature (139)..(139): Xaa can be any naturally occurring amino acid
MTSPRLKLFGFHFSSAEENHTTMDTAEHEAAEAEKGGSDSSSSSTTTTTATAAAAAGGGQEKEKSKKKKKKSKDMEEIPAAVTDASENKKKKKSKETEETPAANTDGEKKKKKKKSDAEDAPMEIDVSAKKDKKKKKKXADE

SEQ ID NO: 30042 - protein, 120 aa, Triticum aestivum
  misc_feature (117)..(117): Xaa can be any naturally occurring amino acid
MDTAEHEAAEAEKGGSDSSSSSTTTTTATAAAAAGGGQEKEKSKKKKKKSKDMEEIPAAVTDASENKKKKKSKETEETPAANTDGEKKKKKKKSDAEDAPMEIDVSAKKDKKKKKKXADE

SEQ ID NO: 30043 - DNA, 450 bp, Triticum aestivum
ttattccaaaaatctgcatcttgatgaaaatgttgatcttcaaattatcgctggatggtgcaatggttatgttggtgctgatctagaagctctgtgtcgagaagctgccagacttgcttatcggagattgtcaaactcatccgagaatgggaaggtgctcacactactcatggaagattgggagtctgcgaaatctcagatcaaagcaagcatgataagaggggtaactaaagaagctccaactgtttcatgggatgatataggaggtttgaaagatctaaagaaaaagcttcagcaagctgttgagtggcccatcaagcatgccactgcctttgcaagactggggatatcaccagttcgtggtgtgcttttgcatggtcctccagggtgctccaagactacccttgccaaggctgtgttaaacacaataaagttggaactggagggggg

SEQ ID NO: 30044 - protein, 149 aa, Triticum aestivum
YSKNLHLDENVDLQIIAGWCNGYVGADLEALCREAARLAYRRLSNSSENGKVLTLLMEDWESAKSQIKASMIRGVTKEAPTVSWDDIGGLKDLKKKLQQAVEWPIKHATAFARLGISPVRGVLLHGPPGCSKTTLAKAVLNTIKLELEG

SEQ ID NO: 30045 - protein, 93 aa, Triticum aestivum
MEDWESAKSQIKASMIRGVTKEAPTVSWDDIGGLKDLKKKLQQAVEWPIKHATAFARLGISPVRGVLLHGPPGCSKTTLAKAVLNTIKLELEG

SEQ ID NO: 30046 - protein, 79 aa, Triticum aestivum
MIRGVTKEAPTVSWDDIGGLKDLKKKLQQAVEWPIKHATAFARLGISPVRGVLLHGPPGCSKTTLAKAVLNTIKLELEG

SEQ ID NO: 30047 - DNA, 906 bp, Triticum aestivum
acttcagcacctcgtccccagcggagcccggaccaaactcctccctagctcctccgccggcgcgatctcctccacctcccctggcgtcctgggtcgaggcccgggcttgaaaaatctcgattgccctccctgctccccctaaacctcgcttcacgcaggattcgacactgatgaggctcctcatgtccaggaagcggcacaggctgcgctgccgccggcgaatccgagaccgtggaccggttgctttggtggctaaaagaaagagtctgcgctgccagcaagatgataactatcatgttgacagaggaatatcttgtcccgatcttccagaggatatcttgcggcatattcatgccaaaatgacacttagagatgctgcccgtgctacttgcgcatcgcacgcattccgacacaactggatatgccgtcccaaccttacattcagtctgggaacacttggcttgaatagaaatgcgtctagggatgtaataacaagagatcttatcagcaagattgacctgattatgcaaaatcactcaggcatcggcgtgaagacactagacattgatctctatagttgtgacaacatcgacttcgcctatcttgatagttggcttcgtattgctgttactccagggattgaagaactgatcctgacgctgcctctacccagcattgttttcgagaatgctttacccatcatttcagtgtataacttcccttgttcactattatctaacgggagcggaaactcaattcaatatctcaacctatgttactgtaccttgcgtcccacggctggtcttggttgcctaagaagcctgacaagactgcatatgagttgcacgcggattactggggatgaattatggtgtctcctttccaattctcccgctttggtgtgct

SEQ ID NO: 30048 - protein, 245 aa, Triticum aestivum
MRLLMSRKRHRLRCRRRIRDRGPVALVAKRKSLRCQQDDNYHVDRGISCPDLPEDILRHIHAKMTLRDAARATCASHAFRHNWICRPNLTFSLGTLGLNRNASRDVITRDLISKIDLIMQNHSGIGVKTLDIDLYSCDNIDFAYLDSWLRIAVTPGIEELILTLPLPSIVFENALPIISVYNFPCSLLSNGSGNSIQYLNLCYCTLRPTAGLGCLRSLTRLHMSCTRITGDELWCLLSNSPALVC

SEQ ID NO: 30049 - protein, 241 aa, Triticum aestivum
MSRKRHRLRCRRRIRDRGPVALVAKRKSLRCQQDDNYHVDRGISCPDLPEDILRHIHAKMTLRDAARATCASHAFRHNWICRPNLTFSLGTLGLNRNASRDVITRDLISKIDLIMQNHSGIGVKTLDIDLYSCDNIDFAYLDSWLRIAVTPGIEELILTLPLPSIVFENALPIISVYNFPCSLLSNGSGNSIQYLNLCYCTLRPTAGLGCLRSLTRLHMSCTRITGDELWCLLSNSPALVC

SEQ ID NO: 30050 - protein, 182 aa, Triticum aestivum
MTLRDAARATCASHAFRHNWICRPNLTFSLGTLGLNRNASRDVITRDLISKIDLIMQNHSGIGVKTLDIDLYSCDNIDFAYLDSWLRIAVTPGIEELILTLPLPSIVFENALPIISVYNFPCSLLSNGSGNSIQYLNLCYCTLRPTAGLGCLRSLTRLHMSCTRITGDELWCLLSNSPALVC

SEQ ID NO: 30051 - DNA, 468 bp, Triticum aestivum
ccatcgaggcggccacgagaactgggtgacgaacaaagcccctgcagctcgtctctcgtcttctccgccgccatggcctccgacctcgggcaaccgtcgccggcgaaacgcccgccgacggcgcccaccacgattaccgctatcggcgaagacctcctttgcgagatcttcctcctccttccctccctcccgagcctcgtccgcgccgccctcgcctgccgcaccttcctccacgccgtccgttcgtcccccgccttccgccgccgattccgggcactccacccgccgcagatccttggcttcttttgcgacccgggccgcgaagccgtccctcccttcgtccccctccgcagccgctccgacccggacatcgccgccgccgtccgcggcgccgatttcctcctcacccggatcccagaagacagcggcgattccaccctcgggtgggagctgcagagcttccacggc

SEQ ID NO: 30052 - protein, 156 aa, Triticum aestivum
PSRRPRELGDEQSPCSSSLVFSAAMASDLGQPSPAKRPPTAPTTITAIGEDLLCEIFLLLPSLPSLVRAALACRTFLHAVRSSPAFRRRFRALHPPQILGFFCDPGREAVPPFVPLRSRSDPDIAAAVRGADFLLTRIPEDSGDSTLGWELQSFHG

SEQ ID NO: 30053 - protein, 155 aa, Triticum aestivum
HRGGHENWVTNKAPAARLSSSPPPWPPTSGNRRRRNARRRRPPRLPLSAKTSFARSSSSFPPSRASSAPPSPAAPSSTPSVRPPPSAADSGHSTRRRSLASFATRAAKPSLPSSPSAAAPTRTSPPPSAAPISSSPGSQKTAAIPPSGGSCRAST

SEQ ID NO: 30054 - protein, 132 aa, Triticum aestivum
MASDLGQPSPAKRPPTAPTTITAIGEDLLCEIFLLLPSLPSLVRAALACRTFLHAVRSSPAFRRRFRALHPPQILGFFCDPGREAVPPFVPLRSRSDPDIAAAVRGADFLLTRIPEDSGDSTLGWELQSFHG

SEQ ID NO: 30055 - DNA, 1704 bp, Triticum aestivum
tattgtgtcaatggttcctcttccttcttcatcagttcttcctggtccttcaggcacgattcattttggtccaccctcttattctgcgatgacaccttggatgaagctagtattgtatactgcaggccattctggaccactatctgctgttttcttgaaaggacaacgcttcagattgcttcctgaaccattagctggttgtgaaaaagcattgttatggtcttgggatggctctatggttggtggactaggagggaagtttgaagggaatttggtcaagggcaatctactcttacattgcttgaactcgatgttgaagcaatctgccgtgttagtgcaaccgcttagaatagatgatctcaacgcatcaggaagccttgtcacagtagatatccctttacccctgaagaatgatgatcattcaattgcatctgtggtagctcaagcgaatttgccaaaggaacaggtctttaatttgacctcagtactgaaagacctatccagtaaatttcagttgaccacgcttggctaccttcgtctattaagacttaacaatcttgtcgaatcggataagtttcacccagaaaatgcaagttaccagtgggtgcccttgagtttggagtttggaattcccttgttcaatccaaacttatgtgagaggatttgtgaaagggtggttgcgtctcgtatacttcagaaagatgatctcactgaacattatgatgtgatgcaaaatgtaaggaggcgtctcagagaactttgtagtgaatatcaagcaactggaccagtagctaagttatataacaagaggggaagctcaagggatctacctcgcactttaatcaatagtattagtagcagatgggatccagcaaatgatccttcagcaccaaccaacacaagaaccccaagtgaacacgagaggctaaaacttgctgtccgacagagatgcggcacagaagttgtgggctttgatgggaggactgtcaggtcatattcactctctccggagcaggaagaggctaccaccaaacacatctctgacgaacagtcatccacccatgaaggaaagccagatcaagaagatgcacacagcaaggatgtaaccttgccaggactaaaccttatctttgacggagttgaattacaccccttcgatattggtgcttgtcttcaagcacgccaacctctctggttgatagctgaggcatcaacagtttcatcaaccctcatatgatgcgtccatgtggtcatctcgcttttgctccaatatctccgtctatgctggtaaatcagaactgaaactgttgcaactaatgcttctcgaaaggcttatttcattaatctcgactcttgagggaatattttgttgtacaaagggttcggtgccgtttgatgtgccatgtgaggtcagctgatgtctttcacatgaatgaccaaacattgctcggagattgcatttgtccagtccttccgtttgcataatttgcaagtagacgtttacgttttcaagccttttgctcctttttttttgtgctagcattgggaatttccgtcccaaagaccaaggggggttgggtatttgtgaccttaaagttaagaacacttcccttctcagtaagtggttgtttaagctactgacgaaagatggtgtatgacaaaccctcataatgagaaaatatgttggctcaaaggcagtgttcc

SEQ ID NO: 30056 - protein, 411 aa, Triticum aestivum
IVSMVPLPSSSVLPGPSGTIHFGPPSYSAMTPWMKLVLYTAGHSGPLSAVFLKGQRFRLLPEPLAGCEKALLWSWDGSMVGGLGGKFEGNLVKGNLLLHCLNSMLKQSAVLVQPLRIDDLNASGSLVTVDIPLPLKNDDHSIASVVAQANLPKEQVFNLTSVLKDLSSKFQLTTLGYLRLLRLNNLVESDKFHPENASYQWVPLSLEFGIPLFNPNLCERICERVVASRILQKDDLTEHYDVMQNVRRRLRELCSEYQATGPVAKLYNKRGSSRDLPRTLINSISSRWDPANDPSAPTNTRTPSEHERLKLAVRQRCGTEVVGFDGRTVRSYSLSPEQEEATTKHISDEQSSTHEGKPDQEDAHSKDVTLPGLNLIFDGVELHPFDIGACLQARQPLWLIAEASTVSSTLI

SEQ ID NO: 30057 - protein, 408 aa, Triticum aestivum
MVPLPSSSVLPGPSGTIHFGPPSYSAMTPWMKLVLYTAGHSGPLSAVFLKGQRFRLLPEPLAGCEKALLWSWDGSMVGGLGGKFEGNLVKGNLLLHCLNSMLKQSAVLVQPLRIDDLNASGSLVTVDIPLPLKNDDHSIASVVAQANLPKEQVFNLTSVLKDLSSKFQLTTLGYLRLLRLNNLVESDKFHPENASYQWVPLSLEFGIPLFNPNLCERICERVVASRILQKDDLTEHYDVMQNVRRRLRELCSEYQATGPVAKLYNKRGSSRDLPRTLINSISSRWDPANDPSAPTNTRTPSEHERLKLAVRQRCGTEVVGFDGRTVRSYSLSPEQEEATTKHISDEQSSTHEGKPDQEDAHSKDVTLPGLNLIFDGVELHPFDIGACLQARQPLWLIAEASTVSSTLI

SEQ ID NO: 30058 - protein, 382 aa, Triticum aestivum
MTPWMKLVLYTAGHSGPLSAVFLKGQRFRLLPEPLAGCEKALLWSWDGSMVGGLGGKFEGNLVKGNLLLHCLNSMLKQSAVLVQPLRIDDLNASGSLVTVDIPLPLKNDDHSIASVVAQANLPKEQVFNLTSVLKDLSSKFQLTTLGYLRLLRLNNLVESDKFHPENASYQWVPLSLEFGIPLFNPNLCERICERVVASRILQKDDLTEHYDVMQNVRRRLRELCSEYQATGPVAKLYNKRGSSRDLPRTLINSISSRWDPANDPSAPTNTRTPSEHERLKLAVRQRCGTEVVGFDGRTVRSYSLSPEQEEATTKHISDEQSSTHEGKPDQEDAHSKDVTLPGLNLIFDGVELHPFDIGACLQARQPLWLIAEASTVSSTLI

SEQ ID NO: 30059 - DNA, 857 bp, Triticum aestivum
  misc_feature (93)..(93): n is a, c, g, or t
  misc_feature (136)..(136): n is a, c, g, or t
  misc_feature (139)..(139): n is a, c, g, or t
  misc_feature (210)..(210): n is a, c, g, or t
aacagtgagggagtgagttattcagaacccaggatttggagaaagtgaagcgatgagcagtgataggaatattggggttgccttggacttttncaaaggaagcaaaatcgctctcaaatgggctattgacaatctngcnccgcaacggtgacatactctacatcgtccacatcaagccttccggaggaagtgaattccgaaatcttctcnggtccaccactggttcacctctgattccgttgtcggagtttcgtgagaaggaggtgatgcatcactatgaggtggatactgatgctaggtgttggacttgcttgacaccgcttctagggagaaacaggtgactgtggtggcaaagctatactggggggatgcaagagagaaaattgtggaagctgttggggatttaaagcttgactctttggtcatgggtagcagaggattgggcgccatacagagggtattgctggggagtgtgactaattatgtcaccacaaatgcgagttgccctataacgattgtgaaagactctgccccttctactaactgatatgctactgaatttggttggcctttgtaatcggttgtttttatcttcatcagagaccagactgcttttccctccgttcttacttcttacagatgcttaattgggtttatgaacacacatgatgattaaggattcggcaagcataatgtatattttcggagtctcttttaagtgcttggttataatcacaaaattgtgcttataaataagctttgtgctggatctatttcaaacttactagtgcacatgatgtggtggtgtgaaatgtttgatactttgattctcagtctttactgcgtcatatactctt

SEQ ID NO: 30060 - protein, 40 aa, Triticum aestivum
MGSRGLGAIQRVLLGSVTNYVTTNASCPITIVKDSAPSTN

SEQ ID NO: 30061 - protein, 32 aa, Triticum aestivum
MLLNLVGLCNRLFLSSSETRLLFPPFLLLTDA

SEQ ID NO: 30062 - protein, 32 aa, Triticum aestivum
  misc_feature (14)..(14): Xaa can be any naturally occurring amino acid
  misc_feature (28)..(29): Xaa can be any naturally occurring amino acid
MSSDRNIGVALDFXKGSKIALKWAIDNXXPQR

SEQ ID NO: 30063 - DNA, 1334 bp, Triticum aestivum
acggttcgcccaaacagggtatccccttatcctccttcgtcccagcccccaatccctagcccctcctttccaccgtccgtaccgccgccagcgaccagaagcgctcaaggacctcggcaatctcctgatccggtgggaaatcgtcaacgagccagaccagatccaccggagcaatcaagaatgtgagcaaaaagaatgtgccaagcgtgaggttgctcgctctcgtgataattacatgtcatggagtgatgattgtaccaagtatatgcttgagtggtatatcgagaagcaaagggacaagccaccaaccttcaagtggaaggcacaacaccatctacaatgtgctaatgatttgaatgacaagtttggaattacagctacagcgaaacaagttgatcgacactttaggtcattcaaggagaaatggaagtggataaagctagcaaaggggaggagtggatatggcttcgataaagtacttaacaaatttaacattgacaagtcagagaaatcaccaagcaagcttggcaaaataaaatttaactaccttactcattccatcaagttttatcatctcttggaagaactgtttagtgactcatctcatgcggatggctcacttgctattgatgtgaataatgcaagtgagaatgtggaatctgatggtagtagtgaaacaagcagccacacatccactgctgaacaaggtcttagtgattctgacatgattgcacccaacagtccagcagaaggcactagctcaaatctgaagcgcaagcatgttaaagcaccacataagaagaaaccaaaggtcaaggcgcgtcgagccagagtgttagatgatgatgtggcagcgagcattgtgagtcttgctgaaactgtgaaatctgccgcccctattcagccaatagcagctacagaccctaatgccaatctttggaagcacattgagtcgctaactctcccagcaaatgagaaaattgagttagcaacctatcttgctaagccagaacaagaagttttccgtggtttcctgaattgtgctagcgaccagacttttaatgcttgggtccttgattatttcgcgcacaagtacgacggcaaagatcccgcaactgctgatccatcaatctgaatgacatgtttggtggctttcttttggcaagtgcttttgtagtctacttagctgctttccatgcacttatgctaagtggattcctgtgctctaagggtgtttagagggtcttaccttttgtaatgcattgctgtagcacaaatctgaattaagctagtttgtaagaaattacttgatggtggatggccttgtgcatgct

SEQ ID NO: 30064 - protein, 377 aa, Triticum aestivum
RFAQTGYPLILLRPSPQSLAPPFHRPYRRQRPEALKDLGNLLIRWEIVNEPDQIHRSNQECEQKECAKREVARSRDNYMSWSDDCTKYMLEWYIEKQRDKPPTFKWKAQHHLQCANDLNDKFGITATAKQVDRHFRSFKEKWKWIKLAKGRSGYGFDKVLNKFNIDKSEKSPSKLGKIKFNYLTHSIKFYHLLEELFSDSSHADGSLAIDVNNASENVESDGSSETSSHTSTAEQGLSDSDMIAPNSPAEGTSSNLKRKHVKAPHKKKPKVKARRARVLDDDVAASIVSLAETVKSAAPIQPIAATDPNANLWKHIESLTLPANEKIELATYLAKPEQEVFRGFLNCASDQTFNAWVLDYFAHKYDGKDPATADPSI

SEQ ID NO: 30065 - protein, 299 aa, Triticum aestivum
MSWSDDCTKYMLEWYIEKQRDKPPTFKWKAQHHLQCANDLNDKFGITATAKQVDRHFRSFKEKWKWIKLAKGRSGYGFDKVLNKFNIDKSEKSPSKLGKIKFNYLTHSIKFYHLLEELFSDSSHADGSLAIDVNNASENVESDGSSETSSHTSTAEQGLSDSDMIAPNSPAEGTSSNLKRKHVKAPHKKKPKVKARRARVLDDDVAASIVSLAETVKSAAPIQPIAATDPNANLWKHIESLTLPANEKIELATYLAKPEQEVFRGFLNCASDQTFNAWVLDYFAHKYDGKDPATADPSI

SEQ ID NO: 30066 - protein, 289 aa, Triticum aestivum
MLEWYIEKQRDKPPTFKWKAQHHLQCANDLNDKFGITATAKQVDRHFRSFKEKWKWIKLAKGRSGYGFDKVLNKFNIDKSEKSPSKLGKIKFNYLTHSIKFYHLLEELFSDSSHADGSLAIDVNNASENVESDGSSETSSHTSTAEQGLSDSDMIAPNSPAEGTSSNLKRKHVKAPHKKKPKVKARRARVLDDDVAASIVSLAETVKSAAPIQPIAATDPNANLWKHIESLTLPANEKIELATYLAKPEQEVFRGFLNCASDQTFNAWVLDYFAHKYDGKDPATADPSI

SEQ ID NO: 30067 - DNA, 1907 bp, Triticum aestivum
gcataaaggcggcaatgcaaaccgagcaactggaaggaatccccgcaccacgataatcacgaagcgcgacgcaagcgccacaactcaactcccccactgactgcctgtctcctccccaaaccccgcgccgcccaagcgcctcctcgccgccgccgccgccggacccagctagggttccggcgagctcgcggcctcgccgccccgccgcgcctccttcctcgagggctccgctcctcggtgagggcgcccgcccctgcgcccccttgctggatttggtagcagctatgcaaaaggatacaggctctggtgatgtttctccttctcatgtaggacgtgttagacatcggaggcgccctaatgagactgccaccgatgggaatagagccaatgggacggttttgcttgtcagcgaccagaacaagtacaagtcaatgcttatccgtacatattcaagtttgtggatgattggaggctttgtgttcgtagtttatatgggtcatctttatatctgggccatggtggttgtgattcaaatatttatggcaacagagctttttaacctactcagaagatccagcgaagagaaacaactgccagggttcaggctcctgaattggcacttcttcttcacggcaatgttgtttacttatgggcgttttcttagccgggagcttgttaacacagtaacttcagatcacttgctgtataagctcgtcagcggcctaataaagtatcagatgtttatttgctattttctttatattgcaggatttgtatggtttattttgactctgaagaagaagacatacaattatcagttcaaacagtatgcctggacgcacatgatccttttaacggtttttgcccaatcttctttcaccgtggcaaatatatttgaagggatgttctggtttcttctccctgcttcgctcattgtgatcaatgacattgctgcgtatttatttgggttttttctcgggagaacaccattgatcaagttatcaccaaagaaaacatgggaaggttttattggtgcatcggtgacaaccatcatctctgcttttctgttggcaaacgtaatgggtcattttcagtggttaacctgcccaagaaaggacctgtcgacaggatggcttacctgtgatcccggttctatgtttaagccagagcattactttttgggggattgggtgccacaatggtttccatggaaagaagttttccttttacccgtgcagtggcatgctttagcccttgggttgtttgcatcgataatagcaccatttggaggatttttcgcaagtggcttcaagagggcttttaaaataaaggattttggcgacagtatacctgggcatggtggaattactgaccgaatggattgtcaaatggtcatggcagtctttgcatacatatatcaccaatcatttatctcaccccacaatttctctgttgacacaatcttggatcagattgtaagaaacctaacctacgaggagcagaagtccttataccagcaactaggagagatcttccgtgaaaggcagtttatgcaaagctgaagatttatttgcatgaaccacacaaccacacaagacagctgcgtatggttcattatgtagttctagatctatgtacagcatcatagctcctctgtaccgtgatagagtgatgtccttatccagaccattgtacagaacggagtgtggataggggtttaggttcttgatccgctctccacttatgttgcttcttttaatcatctgcgctaattctctccttgttcgttatcatcagtgttcttgtaaaaacagagctggaaatgcttattcgtgtatatcactttgtcggtcttcgcatcaaatattttgtaagcccttagtttgccagtgtcctttgtttttttg

SEQ ID NO: 30068 - protein, 425 aa, Triticum aestivum
MQKDTGSGDVSPSHVGRVRHRRRPNETATDGNRANGTVLLVSDQNKYKSMLIRTYSSLWMIGGFVFVVYMGHLYIWAMVVVIQIFMATELFNLLRRSSEEKQLPGFRLLNWHFFFTAMLFTYGRFLSRELVNTVTSDHLLYKLVSGLIKYQMFICYFLYIAGFVWFILTLKKKTYNYQFKQYAWTHMILLTVFAQSSFTVANIFEGMFWFLLPASLIVINDIAAYLFGFFLGRTPLIKLSPKKTWEGFIGASVTTIISAFLLANVMGHFQWLTCPRKDLSTGWLTCDPGSMFKPEHYFLGDWVPQWFPWKEVFLLPVQWHALALGLFASIIAPFGGFFASGFKRAFKIKDFGDSIPGHGGITDRMDCQMVMAVFAYIYHQSFISPHNFSVDTILDQIVRNLTYEEQKSLYQQLGEIFRERQFMQS

SEQ ID NO: 30069 - protein, 376 aa, Triticum aestivum
MLIRTYSSLWMIGGFVFVVYMGHLYIWAMVVVIQIFMATELFNLLRRSSEEKQLPGFRLLNWHFFFTAMLFTYGRFLSRELVNTVTSDHLLYKLVSGLIKYQMFICYFLYIAGFVWFILTLKKKTYNYQFKQYAWTHMILLTVFAQSSFTVANIFEGMFWFLLPASLIVINDIAAYLFGFFLGRTPLIKLSPKKTWEGFIGASVTTIISAFLLANVMGHFQWLTCPRKDLSTGWLTCDPGSMFKPEHYFLGDWVPQWFPWKEVFLLPVQWHALALGLFASIIAPFGGFFASGFKRAFKIKDFGDSIPGHGGITDRMDCQMVMAVFAYIYHQSFISPHNFSVDTILDQIVRNLTYEEQKSLYQQLGEIFRERQFMQS

SEQ ID NO: 30070 - protein, 366 aa, Triticum aestivum
MIGGFVFVVYMGHLYIWAMVVVIQIFMATELFNLLRRSSEEKQLPGFRLLNWHFFFTAMLFTYGRFLSRELVNTVTSDHLLYKLVSGLIKYQMFICYFLYIAGFVWFILTLKKKTYNYQFKQYAWTHMILLTVFAQSSFTVANIFEGMFWFLLPASLIVINDIAAYLFGFFLGRTPLIKLSPKKTWEGFIGASVTTIISAFLLANVMGHFQWLTCPRKDLSTGWLTCDPGSMFKPEHYFLGDWVPQWFPWKEVFLLPVQWHALALGLFASIIAPFGGFFASGFKRAFKIKDFGDSIPGHGGITDRMDCQMVMAVFAYIYHQSFISPHNFSVDTILDQIVRNLTYEEQKSLYQQLGEIFRERQFMQS

SEQ ID NO: 30071 - DNA, 577 bp, Triticum aestivum
cattacctagacatcctaatcgaaaataagctaccgcgcgcgtctatcaacaagatcgagtgcaagcgacagcagatcgagtggtcagagcaaacggtgagcgcgcgctacgtgattggtgaaggaaatggcgaccatcaaagccaaggtccaggacgccgcctcctccgccaaggccggcatcgataaggcgaaggccaccgccggcgagaaggtaaagaaggccacgacgacggacccggagaagaagcgcgaggcggaggagaaaaaggaggaccgcatgcacaaggttaactccgacgagcgcgatgagaagggggaccacgccgccgagaggtccgggaggcgcaccatcgtcaccggcacctagttagcttctagctaggcccgactacagcatgtagtagtagcgtaacctcggttttaagcgaatcgaggaatcaaaataagcggcagtccgtcatagaatgtggttcgattcgatccttcatcttctaggcttataaatgtgatgcttcgaaaaatgcgacccgtctacatagtcctctacgatcatatatactcgaacaatctttcc

SEQ ID NO: 30072 - protein, 80 aa, Triticum aestivum
MATIKAKVQDAASSAKAGIDKAKATAGEKVKKATTTDPEKKREAEEKKEDRMHKVNSDERDEKGDHAAERSGRRTIVTGT

SEQ ID NO: 30073 - protein, 62 aa, Triticum aestivum
HYLDILIENKLPRASINKIECKRQQIEWSEQTVSARYVIGEGNGDHQSQGPGRRLLRQGRHR

SEQ ID NO: 30074 - DNA, 1472 bp, Triticum aestivum
  misc_feature (537)..(537): n is a, c, g, or t
cattcctatgatagtatcttttttctgaaataattgccagggtagtattggtttgatgcaaagtacaatcccttgatttgttgaagaatgttttttatattccctaacattcatttgcttggcaagatagagtcttgtccgaatgaagaagttcttctatgaagacaaagatttgatttgagaaaattagtttcgtgaagagaagataaagagagttgtattgggtagtccatgagaagattaaatgaagcgaagttcatttgaagtacttttgagacttttcaaacattgaggaacttgaagcgaatgattttacgaagatgctctttatgaggatcaccgtacttagtcattatacaagaaatttgtacaagaaacttggatactagggcctggacatgtagctgtgttttgcaacacttgcttccatgttgatggaaaatgtgtgtaagttgttgactgtgcgtcgtcaagattcatagagggcacactgcatttgaactgtgatggtaacatgagaggcccacacactctatngaatacttcttgccctcttttttgtctgttatcccattaatttcatttatcctactttgtctaatgaagtcgttatacgcagggagccccgagggtttgcatttgtggagtttgttgacccttatgatgcctctgatgcacaatatcacttgaaccacacagtattttttggccgagagataactgttgttgttgctgccgagtcacggaaaaggccagatgatatgcgtaatagggctagaatcagggggtattctggtgaacctgaaaggcgtcattcccgttatgggaggtctcgttcccgttcatgttcctactctcctcgctatcggggccgtcctcggtcaaggtcaaggtcaaggtcatactctcctgctccaagacggcgagatgactactctgcttccccgccaagatcacatcacacacagtctcctaggcgtctgccaaaagaacatgaagaagacgagcggagatcctattctcctgctggtagaggtggcggcgagcgtgatgccaatactaatggaaagaggtcaccaccatctgacattgatggatcacctccacgcatccggaggtcacccaggcaatcctcaggatcacccgtggggtcgcgctcaaggtcccctgaagcttctcctgcccgcagcgactgatgaaattggtgcctcccatattgccgcgtctcccacagcggcgcggccatgtactctatctctagcttcattgtctgagtaaaacccatctgggatgtgttggctagtgttgcggtgcctctttagttagcagatatgactggttggctgttcttttgctgcttggtgttgttgaaccttgtaccatggtagtgttttaatgtgaactgagccacaactgagccacaattgtgtttggatttgtgattttaaatgcattttgaatgcctttaactt

SEQ ID NO: 30075 - protein, 173 aa, Triticum aestivum
MICVIGLESGGILVNLKGVIPVMGGLVPVHVPTLLAIGAVLGQGQGQGHTLLLQDGEMTTLLPRQDHITHSLLGVCQKNMKKTSGDPILLLVEVAASVMPILMERGHHHLTLMDHLHASGGHPGNPQDHPWGRAQGPLKLLLPAATDEIGASHIAASPTAARPCTLSLASLSE

SEQ ID NO: 30076 - protein, 151 aa, Triticum aestivum
MGGLVPVHVPTLLAIGAVLGQGQGQGHTLLLQDGEMTTLLPRQDHITHSLLGVCQKNMKKTSGDPILLLVEVAASVMPILMERGHHHLTLMDHLHASGGHPGNPQDHPWGRAQGPLKLLLPAATDEIGASHIAASPTAARPCTLSLASLSE

SEQ ID NO: 30077 - protein, 144 aa, Triticum aestivum
MRNRARIRGYSGEPERRHSRYGRSRSRSCSYSPRYRGRPRSRSRSRSYSPAPRRRDDYSASPPRSHHTQSPRRLPKEHEEDERRSYSPAGRGGGERDANTNGKRSPPSDIDGSPPRIRRSPRQSSGSPVGSRSRSPEASPARSD

SEQ ID NO: 30078 - DNA, 1456 bp, Triticum aestivum
aaaacttgtttggggggaggttccccttaggggcccccccccctattaacggttttttccccctttgccttgggggccccctttttttattaggggcttttttttccaaatgggaaaacccttaaaccttttttgggttttttttttgaattataaagggtttttccgattttggcctttttgtttaaaaaaaaaagtggtttttcaaaaaatttaccgggaattttacaaaatttttaccctttcaaatttccttttccctttagggttggcaaatttttggaaaggggattggtgggggccttttttcttttttccccactggggaaaaggggaattttttcaaaggggtttaatttgggtacccccgggttttttccattccggggtttttaaaaggcgggccgtgggggggggttatttggcttccttttggggggatttgggttcggggccccccttgggggtggggggtttgaaaaaacttttttttttttttttttttttttttttttttttttttttttttttttttttttttttttttttttttttttttttttttttttttttttttgctcacagccataccacatttttagtgtattttctggattcagaagaatctgatgacaatatgattcagaaacaagggttggaagatttccaaactgaaaaagttaaactaaatgtcacctgctcacagcaacaccacaatttcagtgcattacatcttttttttgccaatttgagattacttttaccacgcttgccgcattgcagtgtattacatcatttaaccaaggactcggcaacagtgtcacaacacacaaaacaaatcacacccatagcagcattatagtgcaaacttgacaaatgtggattttgtagagtaaacaaactgaacttttagacacaggctattctaaaatccatctcgaaagtctggttggggcatgtgttcctcctatgacctcgtaagctgcatctggagcatcgaggcgacttcctcggcgcctttggaagatcttcttgttgcggacattggtactcttccgaccttgacctttgtagatagaacagaacctagacctcttagctggttgctcatatggtgctttgtcgccaattgtgctagggcgtccagctggtcttagttgcataattttctggttgctcgcggttaagcttcccacatagattcttcagagaccttttggtgaacgtcacctctttcactgatccaaaaaaactgcccacaacactgtaaaccttgcttatgcttacattgctttccctcagctgtttcagaggtcctctgtgtgtctatctatctgccgatgagacttccagtgtaatttctccatacagttgacagaaagtttatggttgtgctctgccctgtgttcgcaaacgtaccatcctttgtcatctgacctgaggatcctcatcattt

SEQ ID NO: 30079 - protein, 250 aa, Triticum aestivum
MGKPLNLFWVFFLNYKGFFRFWPFCLKKKVVFQKIYREFYKIFTLSNFLFPLGLANFWKGDWWGPFFFFPHWGKGEFFQRGLIWVPPGFFHSGVFKRRAVGGGYLASFWGDLGSGPPLGVGGLKKLFFFFFFFFFFFFFFFFFFFFFFFFFFFFFFAHSHTTFLVYFLDSEESDDNMIQKQGLEDFQTEKVKLNVTCSQQHHNFSALHLFFANLRLLLPRLPHCSVLHHLTKDSATVSQHTKQITPIAAL

SEQ ID NO: 30080 - DNA, 590 bp, Triticum aestivum
acttccccaaagaatctccttcgggacataagtttgctgtgttatacgaagcaaggtcaaacacaggaatcgatagaatgaaaattataaatgcagtagcaaaatctatacctcagcctcacaaagttgacctcagcaaccctgacaggactattattgttcagattgccaagactatatgcatgattggagtggtggagagatacaaagagctttcgaagttcaacctaaggcagctgacctcgccaccagagaagtagtttctgcgtgacaaattcttcctcctggttgagttttaagcagacgcagcatcagttggttactagctactccccccgatccaaaataagtgtcacggttttgaactggggtcagttcaaaactgcgacccttattatggatcggaggtagtagttgttagctgaaccgtgaaagtcattgtcatatgattcagatgtattatgtcgttaaaacggatggccgttgtcgtgtggacgcatcctgaattgcttgcttaatgcggtatggtgcaattttgtaacctgttgaatttcctagggcatcgttggaataaagggttaattagattt

SEQ ID NO: 30081 - protein, 85 aa, Triticum aestivum
FPKESPSGHKFAVLYEARSNTGIDRMKIINAVAKSIPQPHKVDLSNPDRTIIVQIAKTICMIGVVERYKELSKFNLRQLTSPPEK

SEQ ID NO: 30082 - protein, 60 aa, Triticum aestivum
MKIINAVAKSIPQPHKVDLSNPDRTIIVQIAKTICMIGVVERYKELSKFNLRQLTSPPEK

SEQ ID NO: 30083 - DNA, 1417 bp, Triticum aestivum
atatgggacacagccaacacagctacactctaggttcacaggcattgtctgcatttaatggacataatttcagtgtcgctggtcaagttccgcaagatcgcccaacgcctttctatgctgggcagagtcaggcaaccgttgacatgtccaatcctaaccaagagagtggtactcacagcatgcaaaacacacatagtttccagcctgttgctccaaatatgcaagctcgcagtcaagccttgcaggggctatctggagtgcctggccaagataccggtacccaaagcatacagaacgcacacaatttccagcctgttgctcctccatatatgcaaaaccggggtcaaaccttgcagggtttatcgatattgccaagctccagctcagctgatatgcctggtgctccccctgttcctcctaatgaggaagaaatccgccgttcattaacatctctggcggcaaccctcataatgcagcctggtacagttgctggactacagttgcctcagcctattctgaatccgagcttgatggccagtttgtcagctgttgaacccagtcagtggccttgggcacagcagcacaaggcaggaacaacccaactcgcacagcagcaacaggcaggaatgacccaactcgcgcagtctgaacagcaagctccccagcagacattgccggcaccttctacggcagttggcagtagtaatggcaacaacccagcgcagtcgatcggtcagaccgctgcgacatcagtggttaccgcgccacaggctgcagaaaataagaaagtagaagccaaagccaaagataacgatggcgaacaagatggcgacaagaataaaaagggcaacaaggaggagtccaaggcgctgaagatgttcaaactcgcgctcgcagactttgtgaaggacgcgctcaaacctacctggaaagagggccagctgaccagggaggttcacaaaaccatagtgaagaaggtcgtcgacaaagtcacgagcacggtcgaaaacacccctccaacaaaagagaagatcgatgtctacatgtcctactcgaaggaaaaactgagcaaacttgtacaggcgtatgtcggcaagtatgtcaaggcgtagcaccaccccgccggccaaaatggcgacatcgggcgtctgtctgtttttgtgccttgtgtgacaggaagaatggaaagcagggtttaggtggcaagggtttctttttgttctgtttcaggcgccttgtgcaaatgttgcctagtgttgtatcatcgtctcctccttttgtacaacaacaccatttgaaacatgaaccttctgtagcggtagatagatataggttatgcaaaagacgtgggtcggtcgtggtcgtcttcatgaacaccgggcgtgttccgtgtttgcatgcatgtagaacttgactc

SEQ ID NO: 30084 - protein, 369 aa, Triticum aestivum
MGHSQHSYTLGSQALSAFNGHNFSVAGQVPQDRPTPFYAGQSQATVDMSNPNQESGTHSMQNTHSFQPVAPNMQARSQALQGLSGVPGQDTGTQSIQNAHNFQPVAPPYMQNRGQTLQGLSILPSSSSADMPGAPPVPPNEEEIRRSLTSLAATLIMQPGTVAGLQLPQPILNPSLMASLSAVEPSQWPWAQQHKAGTTQLAQQQQAGMTQLAQSEQQAPQQTLPAPSTAVGSSNGNNPAQSIGQTAATSVVTAPQAAENKKVEAKAKDNDGEQDGDKNKKGNKEESKALKMFKLALADFVKDALKPTWKEGQLTREVHKTIVKKVVDKVTSTVENTPPTKEKIDVYMSYSKEKLSKLVQAYVGKYVKA

SEQ ID NO: 30085 - protein, 322 aa, Triticum aestivum
MSNPNQESGTHSMQNTHSFQPVAPNMQARSQALQGLSGVPGQDTGTQSIQNAHNFQPVAPPYMQNRGQTLQGLSILPSSSSADMPGAPPVPPNEEEIRRSLTSLAATLIMQPGTVAGLQLPQPILNPSLMASLSAVEPSQWPWAQQHKAGTTQLAQQQQAGMTQLAQSEQQAPQQTLPAPSTAVGSSNGNNPAQSIGQTAATSVVTAPQAAENKKVEAKAKDNDGEQDGDKNKKGNKEESKALKMFKLALADFVKDALKPTWKEGQLTREVHKTIVKKVVDKVTSTVENTPPTKEKIDVYMSYSKEKLSKLVQAYVGKYVKA

SEQ ID NO: 30086 - protein, 310 aa, Triticum aestivum
MQNTHSFQPVAPNMQARSQALQGLSGVPGQDTGTQSIQNAHNFQPVAPPYMQNRGQTLQGLSILPSSSSADMPGAPPVPPNEEEIRRSLTSLAATLIMQPGTVAGLQLPQPILNPSLMASLSAVEPSQWPWAQQHKAGTTQLAQQQQAGMTQLAQSEQQAPQQTLPAPSTAVGSSNGNNPAQSIGQTAATSVVTAPQAAENKKVEAKAKDNDGEQDGDKNKKGNKEESKALKMFKLALADFVKDALKPTWKEGQLTREVHKTIVKKVVDKVTSTVENTPPTKEKIDVYMSYSKEKLSKLVQAYVGKYVKA

SEQ ID NO: 30087 - DNA, 1670 bp, Triticum aestivum
aatcgcccgccctcgctccccatcaaccccttcctagctagctagcgaagcaccagtttgggcagccgccgggcaggatggaagggctggacgtgtaccagcactaccgcttgaaccctacagatgtggacgccgtgacttactacctgccacgcctcatcgccggccagacgctgcacggcgccgataaattcatccaccacgtcgacatctacagctgcgagcccaaggatctggccgcccggattgcgcccgtgccgcaggccgccagcagcggcgaccgcttcttcttcaccacgcgcaagagcaagaacggaagcaaaacccagagcgtgcgcaccgccggcggcggcacctggaccgtcaacgctaccacggccgtcaaacacgccggagtcgaggtcggcgagaggaagaacctgtcgttcaggaagaagggcaagtccaccggttgggtcatggaggagtacaaatgcttgctgccagaggccgtcgtcgccgacggggtgaaggtgttctgcaagatccacttggctcagcatcctcctgacgcggcccgccaggaatcagccgcgtacaagcatcaagcagaaccgcaaccagaggccgtgactgcgagcatgcacgcacagaagaggccagcaatagctcccgccgccgatcctcatccgccgcgccccaacaagaggatgcgaggatcagtccctgtccccgcacctgccccaccgtcgttcttgacgtatgatgaggcagcgagtgcaatgtatggcccgctggctcgtaccatcttccctgttcaagatgctctggatataccagcgtcaatcgaaggtccttcagcatcatgcgagtccactacaacatccaaccactccggcgttgcttcttcctcagataatatgcagcgacaagctcaagctactgagatttcctcccagtcagatgtgctggagtctgtcaagaattacagccaacaacagatgattgttcctgaggctggctcaagcattgcaaggagcacatatgaagaggatgtctttcagccattggagcctctttccgatttgccgggtggggaggcagatggttttgacattgaagaactaatgagaatgatggaagacgacccaattgaggttgagacggtcactggagccaacactggcgtggagatgggccaacaggaacctctgtacctggataccttggaccaaggcatgctggaggacatgctgcagtccgattgcccttacccaatgtcgggatcagaggatcgggccatgcacaaccctgccttccatgatgctgacaaagagaagaggtacaatgccgcgtcggatcttgacgctccatcgcttcagggacaggaccactcgttcaaacagcccttcgatccatttgaagcagcatggaaggccgaagaggcgcacgagaaggagaagagggacaatcttcacgctggaccgcttggaggacacaacaacttcttctggcctgcaagtgtctattaagtccgatgttgaaattgttttcaaagtgtatacgaggatactcactggctgatatattagttcgtccttatacgatcgccacacgtgtacctctgagcaatttgctccacttgttcatgtaagctaaaactgttgttgttcttcttgcccctctgatgg

SEQ ID NO: 30088 - protein, 477 aa, Triticum aestivum
MEGLDVYQHYRLNPTDVDAVTYYLPRLIAGQTLHGADKFIHHVDIYSCEPKDLAARIAPVPQAASSGDRFFFTTRKSKNGSKTQSVRTAGGGTWTVNATTAVKHAGVEVGERKNLSFRKKGKSTGWVMEEYKCLLPEAVVADGVKVFCKIHLAQHPPDAARQESAAYKHQAEPQPEAVTASMHAQKRPAIAPAADPHPPRPNKRMRGSVPVPAPAPPSFLTYDEAASAMYGPLARTIFPVQDALDIPASIEGPSASCESTTTSNHSGVASSSDNMQRQAQATEISSQSDVLESVKNYSQQQMIVPEAGSSIARSTYEEDVFQPLEPLSDLPGGEADGFDIEELMRMMEDDPIEVETVTGANTGVEMGQQEPLYLDTLDQGMLEDMLQSDCPYPMSGSEDRAMHNPAFHDADKEKRYNAASDLDAPSLQGQDHSFKQPFDPFEAAWKAEEAHEKEKRDNLHAGPLGGHNNFFWPASVY

SEQ ID NO: 30089 - protein, 350 aa, Triticum aestivum
MEEYKCLLPEAVVADGVKVFCKIHLAQHPPDAARQESAAYKHQAEPQPEAVTASMHAQKRPAIAPAADPHPPRPNKRMRGSVPVPAPAPPSFLTYDEAASAMYGPLARTIFPVQDALDIPASIEGPSASCESTTTSNHSGVASSSDNMQRQAQATEISSQSDVLESVKNYSQQQMIVPEAGSSIARSTYEEDVFQPLEPLSDLPGGEADGFDIEELMRMMEDDPIEVETVTGANTGVEMGQQEPLYLDTLDQGMLEDMLQSDCPYPMSGSEDRAMHNPAFHDADKEKRYNAASDLDAPSLQGQDHSFKQPFDPFEAAWKAEEAHEKEKRDNLHAGPLGGHNNFFWPASVY

SEQ ID NO: 30090 - protein, 296 aa, Triticum aestivum
MHAQKRPAIAPAADPHPPRPNKRMRGSVPVPAPAPPSFLTYDEAASAMYGPLARTIFPVQDALDIPASIEGPSASCESTTTSNHSGVASSSDNMQRQAQATEISSQSDVLESVKNYSQQQMIVPEAGSSIARSTYEEDVFQPLEPLSDLPGGEADGFDIEELMRMMEDDPIEVETVTGANTGVEMGQQEPLYLDTLDQGMLEDMLQSDCPYPMSGSEDRAMHNPAFHDADKEKRYNAASDLDAPSLQGQDHSFKQPFDPFEAAWKAEEAHEKEKRDNLHAGPLGGHNNFFWPASVY

SEQ ID NO: 30091 - DNA, 1279 bp, Triticum aestivum
tttgagtggactaggcctaatgcttgtcctttaactgtgttttcaaacatcaatccttccttgcactagctagctcatctttgatttttccttgttgcataagcgtcattcaatgtttgctcacatgattaccacactttccccaggtctatacatatagtcggcggtgatcgataccagacgcagtgccaagatggggagtctgcacaagaccacctttgttctcctcatgttctgcttggcggcgttgggaagcgcggattcaagtacaaggatccgaagcagcctcttggcgttcgcatcaaggatctgcttggtcggatgaccctcgctgaaaagatcggccagatgacccagattgagagggagaatgccacagcagaggccatgtccaagtacttcataggtagcgtactgagtggtggaggcagtgtgccttctcctcaggcatccgctgcggcttggcagtcgatggtgaacgagatgcaaaagggcgccctttccacccgcctaggtattccgatgatctacggtattgatgccgtgcatggtcacaacaacgtctacaaagctaccatcttcccacataatgttggcctcggatctaccagggaccctaagttgataaagaggataggagaagcaactgctcttgaagttagagcaacgggaattccttacgcttttgctccgtgtattgcggtgtgtagagatccaagatggggacgctgctacgaaagctacagcgaagacccaaaggttgtccagtccatgaccacacttatctctggtctgcaaggcgacgttccggctggttctgagggaaggccatacgttggtggaagcaagaaggttgctgcatgcgcaaagcactatgtcggtgacggtggtacgtttatggggatcaacgagaatgatacaatcatcgacgcccatgggctgatgactatccatatgcctgcttattacaattctatcatcagaggtgtctccactgttatgacctcgtactctagctggaacggcaagaaaatgcacgccaaccacttccttgtcactgattttctgaagaacaagctcaaattccggggtttcgtgatttcagactggcaaggcattgatcggattactagtcctccaggtgtgaactattcttattcagttgaggccggagttggtgccggtattgacatgatcatggttccttttgcctacaccgaattcattgatgatctgacataccaagtaaagaacaacattatccccatgagcagaatcg

SEQ ID NO: 30092 - protein, 319 aa, Triticum aestivum
MTLAEKIGQMTQIERENATAEAMSKYFIGSVLSGGGSVPSPQASAAAWQSMVNEMQKGALSTRLGIPMIYGIDAVHGHNNVYKATIFPHNVGLGSTRDPKLIKRIGEATALEVRATGIPYAFAPCIAVCRDPRWGRCYESYSEDPKVVQSMTTLISGLQGDVPAGSEGRPYVGGSKKVAACAKHYVGDGGTFMGINENDTIIDAHGLMTIHMPAYYNSIIRGVSTVMTSYSSWNGKKMHANHFLVTDFLKNKLKFRGFVISDWQGIDRITSPPGVNYSYSVEAGVGAGIDMIMVPFAYTEFIDDLTYQVKNNIIPMSRI

SEQ ID NO: 30093 - protein, 310 aa, Triticum aestivum
MTQIERENATAEAMSKYFIGSVLSGGGSVPSPQASAAAWQSMVNEMQKGALSTRLGIPMIYGIDAVHGHNNVYKATIFPHNVGLGSTRDPKLIKRIGEATALEVRATGIPYAFAPCIAVCRDPRWGRCYESYSEDPKVVQSMTTLISGLQGDVPAGSEGRPYVGGSKKVAACAKHYVGDGGTFMGINENDTIIDAHGLMTIHMPAYYNSIIRGVSTVMTSYSSWNGKKMHANHFLVTDFLKNKLKFRGFVISDWQGIDRITSPPGVNYSYSVEAGVGAGIDMIMVPFAYTEFIDDLTYQVKNNIIPMSRI

SEQ ID NO: 30094 - protein, 297 aa, Triticum aestivum
MSKYFIGSVLSGGGSVPSPQASAAAWQSMVNEMQKGALSTRLGIPMIYGIDAVHGHNNVYKATIFPHNVGLGSTRDPKLIKRIGEATALEVRATGIPYAFAPCIAVCRDPRWGRCYESYSEDPKVVQSMTTLISGLQGDVPAGSEGRPYVGGSKKVAACAKHYVGDGGTFMGINENDTIIDAHGLMTIHMPAYYNSIIRGVSTVMTSYSSWNGKKMHANHFLVTDFLKNKLKFRGFVISDWQGIDRITSPPGVNYSYSVEAGVGAGIDMIMVPFAYTEFIDDLTYQVKNNIIPMSRI

SEQ ID NO: 30095 - DNA, 732 bp, Triticum aestivum
ctctccagcctctgcctgtcccctccaccctgcctgcagcctccccctcgtctcctccgttcccgattaaatcgcaatccaaaacctctcccccggaactccagcccccgtgccccgcctcgccccgccatgtcgccggccgctggaggcgccgcgcccacgcaaccggcggccagcgccgccccggcgccgacggtgatcgccgcgccgccgccgccccaggccccgtcgcgggagaacccgcgcgatccggccgcgcaggcggagggggccgatcccggcaatgcggcggcgaggaagacggcgtggaacgtgccgccgccgcccccggcacccgtcggcggcatcatgggcggcgacgagtcgtggccggcgctcgccgacacggccgcgcgggcctggcccaagtcctcctcctccgactccctcaagtccctctccgacggctccgccccctccgcgccggaggatccgattgtgccactggtgccgctgccgcagccacagtcagtttctactctgatctccactgcctcaagtccaggctctgcctctacttctcctcctcccactgccaccaccacggcctcgccgccacagaacagcagcacaggccagccaattttagttcggcatggtggcagtaacggtggtaacaatggagagggcggcggtggcaatgtgagcactcatagccagagcactggtaattacagtagtgatgggaacagc

SEQ ID NO: 30096 - protein, 244 aa, Triticum aestivum
LSSLCLSPPPCLQPPPRLLRSRLNRNPKPLPRNSSPRAPPRPAMSPAAGGAAPTQPAASAAPAPTVIAAPPPPQAPSRENPRDPAAQAEGADPGNAAARKTAWNVPPPPPAPVGGIMGGDESWPALADTAARAWPKSSSSDSLKSLSDGSAPSAPEDPIVPLVPLPQPQSVSTLISTASSPGSASTSPPPTATTTASPPQNSSTGQPILVRHGGSNGGNNGEGGGGNVSTHSQSTGNYSSDGNS

SEQ ID NO: 30097 - protein, 214 aa, Triticum aestivum
LQPLPVPSTLPAASPSSPPFPIKSQSKTSPPELQPPCPASPRHVAGRWRRRAHATGGQRRPGADGDRRAAAAPGPVAGEPARSGRAGGGGRSRQCGGEEDGVERAAAAPGTRRRHHGRRRVVAGARRHGRAGLAQVLLLRLPQVPLRRLRPLRAGGSDCATGAAAAATVSFYSDLHCLKSRLCLYFSSSHCHHHGLAATEQQHRPANFSSAWWQ

SEQ ID NO: 30098 - protein, 201 aa, Triticum aestivum
MSPAAGGAAPTQPAASAAPAPTVIAAPPPPQAPSRENPRDPAAQAEGADPGNAAARKTAWNVPPPPPAPVGGIMGGDESWPALADTAARAWPKSSSSDSLKSLSDGSAPSAPEDPIVPLVPLPQPQSVSTLISTASSPGSASTSPPPTATTTASPPQNSSTGQPILVRHGGSNGGNNGEGGGGNVSTHSQSTGNYSSDGNS

SEQ ID NO: 30099 - DNA, 462 bp, Triticum aestivum
attatttcaaaaaactcctccgtattttcgtctactactccgaattaataataatcccgcaaaatctctccgtccccagctactcccccggatccgatcgccaccgccggaatatccgatctctctgccgccgccgccgcccgagacctgctcgtcggaattccccgcggcggcgcatgtcgctggcgtgcgggctgccgctgctggagtgtgtctactgcctggggtgcgcgcggtgggcgtggaagcggtgcgtccactccggccaccacgacagcgccacctggggccacgccgccgccgccgacttcgcgcccgtgccccgcatgtgccgcctcgtcatggccaactacgccccgcccgacctcctcgccgccccgccgctcctcctcgacccctcaaacgtcgtgcgccgccgcacctacgccgacacggggggccgcgtcacgccctacctcgtct

SEQ ID NO: 30100 - protein, 153 aa, Triticum aestivum
LFQKTPPYFRLLLRINNNPAKSLRPQLLPRIRSPPPEYPISLPPPPPETCSSEFPAAAHVAGVRAAAAGVCLLPGVRAVGVEAVRPLRPPRQRHLGPRRRRRLRARAPHVPPRHGQLRPARPPRRPAAPPRPLKRRAPPHLRRHGGPRHALPR

SEQ ID NO: 30101 - protein, 153 aa, Triticum aestivum
YFKKLLRIFVYYSELIIIPQNLSVPSYSPGSDRHRRNIRSLCRRRRPRPARRNSPRRRMSLACGLPLLECVYCLGCARWAWKRCVHSGHHDSATWGHAAAADFAPVPRMCRLVMANYAPPDLLAAPPLLLDPSNVVRRRTYADTGGRVTPYLV

SEQ ID NO: 30102 - protein, 95 aa, Triticum aestivum
MSLACGLPLLECVYCLGCARWAWKRCVHSGHHDSATWGHAAAADFAPVPRMCRLVMANYAPPDLLAAPPLLLDPSNVVRRRTYADTGGRVTPYLV

SEQ ID NO: 30103 - DNA, 882 bp, Triticum aestivum
aaaggcaaaccccaagaaaccccaaccggccaccaccaccaccacctcccgtcccgaccccgagacaaacacctcccactcgcggccatgcccccctgccaccgccgctgctgactagccatctgcgccgcgaccggtcaacatctatctcgccggaacatctgaatcaacatggacccggcccaggaggagctcgagcgccgcagccgctacctcagctcgctcgttcgccgcaccaggctcgacgacccgccccagccggagccggagccggagcgagagctcaaggtggagcggaaatcggcggcggagcccagcggcggggagggcaaggccgctaagccggaggccaaggacaacagggaggcggcgaaggtcaaaggggacgccgcgagcggggaggggaggaaggtggcggtgcgggtgcgcgcggcggacatgccgctggcgctgcagcggcgcgcgatctggatcgcccgggaggtcgtcctctccacgccgcgcctcgagagcaagcgcctcgcgctcgcgctcaagaaggaattcgacacgacatacgggcctgcttggcactgcattgtcggcacaagctttggctcctacgtcactcactccttaggaggcttcctgtacttttccgttgacaaggcgtacattcttctcttcagaaccgctgtcgagccactgagtaaaccgtgatgaggcctggaacctatcttctcacacacaagtgtagatttagcgcaaatgtgtaatttaaactgctgttttaggagctcgacggtagcaagtgtaagcagtggagaaggatcacctctccgcatacagaagtgtagcaaacatgcctctatgacctttaagtatctacgtaagctgctgctg

SEQ ID NO: 30104 - protein, 175 aa, Triticum aestivum
MDPAQEELERRSRYLSSLVRRTRLDDPPQPEPEPERELKVERKSAAEPSGGEGKAAKPEAKDNREAAKVKGDAASGEGRKVAVRVRAADMPLALQRRAIWIAREVVLSTPRLESKRLALALKKEFDTTYGPAWHCIVGTSFGSYVTHSLGGFLYFSVDKAYILLFRTAVEPLSKP

SEQ ID NO: 30105 - protein, 112 aa, Triticum aestivum
RQTPRNPNRPPPPPPPVPTPRQTPPTRGHAPLPPPLLTSHLRRDRSTSISPEHLNQHGPGPGGARAPQPLPQLARSPHQARRPAPAGAGAGARAQGGAEIGGGAQRRGGQGR

SEQ ID NO: 30106 - DNA, 778 bp, Triticum aestivum
acacacactcactcaagccagcgccactcgcaccacagtcatccactcacaagctaagctagcggcgcagtagctcacttcagtccagtcggcatggcggctccgaggggcgcggcagtggtgctggcgatggtgctcgcggccatggtggtggcgccgccggcgacggtgcacgcggccatatcctgctccacggtgtacagcacgctgatgccgtgcctgcagtacgtgcagcagggcggttcgccggcccggggctgctgcaccggcatccagaacctgctggcggaggccaacaacagccccgaccgccgcaccatctgcggctgcctcaagaacgtcgccaacggcgcctccggcgggccctacatcacccgcgccgccgcgctcccctccaagtgcaacgtcgccctcccctacaagatcagccccagcgtcgactgcaactcgatccactgaacgaactgaagcgccttggcccgtgtgtcgacgtacgtctgccgtgcgaggagtcccatgtccggagaataaattgctgctactagtactgaagcttagctaggccttggcggccagatccgtgtcgttctacctagtcgtcgtgtgtggttttagggtcgatggatctgtgtgcatgcagtccatggtgttctggcctgggtgtcggtaggctccgcaagcagagcagagtggtgaactgatattgtgtgcgtcgtactatgcgcgtgcctatgtaatgtgcgtgctttatctataaactatccctcgttaagtatct

SEQ ID NO: 30107 - protein, 121 aa, Triticum aestivum
MAAPRGAAVVLAMVLAAMVVAPPATVHAAISCSTVYSTLMPCLQYVQQGGSPARGCCTGIQNLLAEANNSPDRRTICGCLKNVANGASGGPYITRAAALPSKCNVALPYKISPSVDCNSIH

SEQ ID NO: 30108 - protein, 109 aa, Triticum aestivum
MVLAAMVVAPPATVHAAISCSTVYSTLMPCLQYVQQGGSPARGCCTGIQNLLAEANNSPDRRTICGCLKNVANGASGGPYITRAAALPSKCNVALPYKISPSVDCNSIH

SEQ ID NO: 30109 - protein, 104 aa, Triticum aestivum
MVVAPPATVHAAISCSTVYSTLMPCLQYVQQGGSPARGCCTGIQNLLAEANNSPDRRTICGCLKNVANGASGGPYITRAAALPSKCNVALPYKISPSVDCNSIH

SEQ ID NO: 30110 - DNA, 622 bp, Triticum aestivum
tcggtatagcagctcccgtccactaccttgctcctcgccgcaatccccacattcatagcgagaatccccaaatcccaaccctgactgacgaccggcggatctgttccggcgcctcctcccgccgtcgaccatggcgtcttccaactccggcggcatccccatcaatgtggaacaggattcggacggctcggcccagagcacagctgatatgactgcttttgtgcaaaatcttctagttcagatgcaaaccaggttccaaactatgtcagagaacatcattacaaagatagatgaaatgggtgcaagaatcgatgaattggagttgagcataaatgacctcaaggctgaaatgggcagcgatggtatgacccctactaaagtgaaggacgaagaatcaaagccagcagacagctctgcctgagtcaagcagaagtagcagaagcaagtcgtattagtcttgggttcatgtcaatatcatcagccattcatcactaacttcatgcatgttatgagatgttattcgcactgttatatgcatttgagatatgcagtacctttcgatgagagatttctctgtacgcattgatgcttgctgagtggtctgctataaattttagtactc

SEQ ID NO: 30111 - protein, 96 aa, Triticum aestivum
MASSNSGGIPINVEQDSDGSAQSTADMTAFVQNLLVQMQTRFQTMSENIITKIDEMGARIDELELSINDLKAEMGSDGMTPTKVKDEESKPADSSA

SEQ ID NO: 30112 - protein, 70 aa, Triticum aestivum
MTAFVQNLLVQMQTRFQTMSENIITKIDEMGARIDELELSINDLKAEMGSDGMTPTKVKDEESKPADSSA

SEQ ID NO: 30113 - protein, 69 aa, Triticum aestivum
GIAAPVHYLAPRRNPHIHSENPQIPTLTDDRRICSGASSRRRPWRLPTPAASPSMWNRIRTARPRAQLI

SEQ ID NO: 30114 - DNA, 1113 bp, Triticum aestivum
ctatcattgattcattagagtttgtagatcaggaatatgtctttgtgtctggacatgcggaaggatcctcttcttcaacaagtgcctctctacagcgcaatttaccggctaaatatgagaatccctctgtttcgccaccgaacttagctgctcttagtgcaccagtgccaataaatggcacagcaataaacaggcaacagtctgctggaactggtagcttggacagtcattgttctccaatatctggtacttcacatggatctgcttacatgagtgatggcttggatcaaccaccatctgattatctgaccaggattagattattggggcagtatgcttctaccatagtggagttggtcaaagaagagattaaaaggtggcaggcacttagaggcattctcgatccagctaattattcttgcgacctggaagcaagcaattcacatatgcaattcctatgcggcttcagctgccagagagagttcctcacatgatatcactatgaaggggcttgatactgacgctccccatttgcttgcaaactctcaaatggctgatgaagaatgcacacagattgagaggcagtttctcactgaagttgaacatgctgaagaacttgcaagcactgtagggcagatacctgatgctacagcgatgcccgacgcggttgaattaatatttcaatatgcactagaatatggaaggcatggtggtgttgtcgagatgatggggaaagcagcagtggccatgtcgcggtatacaaaggcaatatgcttgctgcgttttctcctgatcgaggcaccatcgctcgccctcaacccgcctttgtccctgactagatctgaccgacaccgactgcgctcatacattgaagccctcaacgcaaggctcagccagttgtaatgcccgagtcactgaccgctgccggtgggccttcttgggggctgacttgtacaatattctttcatttgtacatatatttgttggcccaaacgagggcgtgtaagatagccacgctagagattgtgagattagcgagtgtagcggaaatccagtgtaattgcccaaactactatcgtaacgtgaagtgtgtgtgcgtggctgcgtgtgttc

SEQ ID NO: 30115 - protein, 163 aa, Triticum aestivum
IIDSLEFVDQEYVFVSGHAEGSSSSTSASLQRNLPAKYENPSVSPPNLAALSAPVPINGTAINRQQSAGTGSLDSHCSPISGTSHGSAYMSDGLDQPPSDYLTRIRLLGQYASTIVELVKEEIKRWQALRGILDPANYSCDLEASNSHMQFLCGFSCQREFLT

SEQ ID NO: 30116 - protein, 133 aa, Triticum aestivum
MKGLDTDAPHLLANSQMADEECTQIERQFLTEVEHAEELASTVGQIPDATAMPDAVELIFQYALEYGRHGGVVEMMGKAAVAMSRYTKAICLLRFLLIEAPSLALNPPLSLTRSDRHRLRSYIEALNARLSQL

SEQ ID NO: 30117 - protein, 117 aa, Triticum aestivum
MADEECTQIERQFLTEVEHAEELASTVGQIPDATAMPDAVELIFQYALEYGRHGGVVEMMGKAAVAMSRYTKAICLLRFLLIEAPSLALNPPLSLTRSDRHRLRSYIEALNARLSQL

SEQ ID NO: 30118 - DNA, 613 bp, Triticum aestivum
accattacctagaacatcctaatcgaaaatagtaagacttctcaagcggtgcatgatggattggcggataagccgacagaagatattaatagccgcgatgagacgattcaacaagcggaggacggactggcacggtgtggcctaggcgaaaatggggacaccgatgaaatggcaatcattgagaggttccacagcatcgttagagagcatttccgtggacccctgaagccccccttcaatgcggaagccaggaaagcagctggatttgggcctgcctggtatgaaccccttgcggtgaaggaggcagagacacaagcaatcgagcaaagtgagtaagtgtttgtgctattttcccttttactggtagggtagaagacacacagtgggtgctacaccctcggttcaatctggttttggtgtacctttcttgctagcagagactggtgaactggtgatcctgtttgttttggcattggcaaactggtgtacgtgactaaccaaactcaaaccaagagatgtacgtgaatttgcactgaatttgtgatgttttcgtacttgatttaacggcggtgccatatttcagatatatgtagtgtttggttcttttcatttc

SEQ ID NO: 30119 - protein, 55 aa, Triticum aestivum
MAIIERFHSIVREHFRGPLKPPFNAEARKAAGFGPAWYEPLAVKEAETQAIEQSE

SEQ ID NO: 30120 - protein, 30 aa, Triticum aestivum
MMDWRISRQKILIAAMRRFNKRRTDWHGVA

SEQ ID NO: 30121 - DNA, 687 bp, Triticum aestivum
aaagagcctcctgtgttgtctgttttccttgtttcccctattattatctcgctctcacaaaatcatggcattctctagtgctttgattctgtggtcgttgctagcaatcaacatggccctgccaaccctcgcaaccgtctacaccgtgggagatacttcaggttgggcaattggtactgattatagcacttggactggcgacaagatcttttcagtgggtgatagtctcgcgttcaactatggagctgggcacacagtggatgaagttaaagagagcgattacaagtcgtgcaccgcagggaattctattagcacagacagtagtggtgcgaccacaattgcccttaaaagtgcaggcactcattacttcatatgttctgttcctggacattgttctggcggtatgaaacttgccgtcactgtcaaatcaggaaaagcctctgatgccacacccactacttccactactaccgccactaaatcaaactcgtcttcagcgagtagtgtctcaccaattgttgctatgttcattgtttcctcgatctcttactatgttttgcgtatgctataagtttccccactcagtcaggacagaggcagtgctttctttctttcttatattattatcactctgttttctggtttgatttatctctgagtactaatccaggtcacttgttgtcgtgt

SEQ ID NO: 30122 - protein, 189 aa, Triticum aestivum
KSLLCCLFSLFPLLLSRSHKIMAFSSALILWSLLAINMALPTLATVYTVGDTSGWAIGTDYSTWTGDKIFSVGDSLAFNYGAGHTVDEVKESDYKSCTAGNSISTDSSGATTIALKSAGTHYFICSVPGHCSGGMKLAVTVKSGKASDATPTTSTTTATKSNSSSASSVSPIVAMFIVSSISYYVLRML

SEQ ID NO: 30123 - protein, 168 aa, Triticum aestivum
MAFSSALILWSLLAINMALPTLATVYTVGDTSGWAIGTDYSTWTGDKIFSVGDSLAFNYGAGHTVDEVKESDYKSCTAGNSISTDSSGATTIALKSAGTHYFICSVPGHCSGGMKLAVTVKSGKASDATPTTSTTTATKSNSSSASSVSPIVAMFIVSSISYYVLRML

SEQ ID NO: 30124 - protein, 152 aa, Triticum aestivum
MALPTLATVYTVGDTSGWAIGTDYSTWTGDKIFSVGDSLAFNYGAGHTVDEVKESDYKSCTAGNSISTDSSGATTIALKSAGTHYFICSVPGHCSGGMKLAVTVKSGKASDATPTTSTTTATKSNSSSASSVSPIVAMFIVSSISYYVLRML

SEQ ID NO: 30125 - DNA, 716 bp, Triticum aestivum
aacagcttcagtaaacttgggttctgttcagtatcggttgatgtttgatttacagaattactactaaccatgaaagaggcatacatggtgggtgagcacggcgacagctcggtggcgatctggtcgagcatcagcgtgggcgggatgccggcgttcaagtcgctgcgagacagccaccggaacttcgacgaggcggcgctggaggggatccggcgcgccgtggtgggcggcgcctacgaggtgatcggcctcaaggggtacacctcttgggccattggctactctgtcgccagcctcgctgcttccctcctccgcgaccagcgccgcgtgcaccctgtctctgtccttgcctcgggcttccatggcatctcagacggccacgaggtgttcctcagcctgcccgcccgcctcggccgcggcggcatcctcggtgtcgccgagatggacctcaccgaggccgaggccgcgcagctccgccgctcggccaagacgctctgggagaactgccagctcctcgacctctgacggaggaaagccagttgatctacatctacttactgtaaaatcctggagcgtttacaagaactctactgctatatgttgctctgttgctgctgcggccacacgaatgcttgtgtaattttcgagtgtcttcttagggatgttgtagtaatgtaacgcctcttaatttcatgaaataaaatgcgatttgtgtc

SEQ ID NO: 30126 - protein, 151 aa, Triticum aestivum
MKEAYMVGEHGDSSVAIWSSISVGGMPAFKSLRDSHRNFDEAALEGIRRAVVGGAYEVIGLKGYTSWAIGYSVASLAASLLRDQRRVHPVSVLASGFHGISDGHEVFLSLPARLGRGGILGVAEMDLTEAEAAQLRRSAKTLWENCQLLDL

SEQ ID NO: 30127 - protein, 146 aa, Triticum aestivum
MVGEHGDSSVAIWSSISVGGMPAFKSLRDSHRNFDEAALEGIRRAVVGGAYEVIGLKGYTSWAIGYSVASLAASLLRDQRRVHPVSVLASGFHGISDGHEVFLSLPARLGRGGILGVAEMDLTEAEAAQLRRSAKTLWENCQLLDL

SEQ ID NO: 30128 - protein, 126 aa, Triticum aestivum
MPAFKSLRDSHRNFDEAALEGIRRAVVGGAYEVIGLKGYTSWAIGYSVASLAASLLRDQRRVHPVSVLASGFHGISDGHEVFLSLPARLGRGGILGVAEMDLTEAEAAQLRRSAKTLWENCQLLDL

SEQ ID NO: 30129 - DNA, 1079 bp, Triticum aestivum
aaaccctccccaaaaccctagctgattcggggaactagggttcctccccgcctccaccgccgccgccgccaagctcccgccgagctcagaagatacttaccatgggtaagtcaagcaagaagtctgctgttgcggttgcacctgctgctgggctggtcccagatggaaaatctttaaagaaaggcaagaggaatgcggaagatgacatcgagaaggctgtcagtgccaagaagcagaaaactgcacctgagaaggccgtgcctgtgaagaatgatcttaaagtcaagaagctccctccaaagaaggtcgagagcagcagttctgatgaggattcttcagaatccgaggacgaggtgacggttcaaccaaagaaggctgcaccgtctgctaaacaggagtccagttttgatagcagcgatgagagcagttctgatgacgaacctgcaaaaaagcctgctactgcttcaaagaaacctgctgcacttgctagcaatggttcaaagaaagtcaagtctgacagcagcagctctgacagcagctctgatgaggatgtgatggtcccacccaagaaggctgcacaatctgctaaacaggagtccagctctgatggtagtgacgagagcagctctgatgatgaacctgcaaagaagtctgctgccacttcaaagaaacctgctgcaaagactgaagattcagatagcagcagctctgatgaggatgaagatatgcttcccgctaaagcaccagcagcagccaagaagattgacgaatccagtgaaagttccgattttggtagctctgctctgatgatgccgtcagagcacaacttgctcgttttcagcatgaggaagaagatgatttgacagggagcaacacagcttgcttgttttgtttctctgtagcaagttattctataaatactgaacactatgcaaggaaatcagcagctgccattgttcaagaatgtactaattctctgaacattgttttgtttttctatagcaagttatttctataaatactgaacactgcaaggaaatcagcagctttcattgttaagagaatgagctaattctctg

SEQ ID NO: 30130 - protein, 253 aa, Triticum aestivum
MGKSSKKSAVAVAPAAGLVPDGKSLKKGKRNAEDDIEKAVSAKKQKTAPEKAVPVKNDLKVKKLPPKKVESSSSDEDSSESEDEVTVQPKKAAPSAKQESSFDSSDESSSDDEPAKKPATASKKPAALASNGSKKVKSDSSSSDSSSDEDVMVPPKKAAQSAKQESSSDGSDESSSDDEPAKKSAATSKKPAAKTEDSDSSSSDEDEDMLPAKAPAAAKKIDESSESSDFGSSALMMPSEHNLLVFSMRKKMI

SEQ ID NO: 30131 - DNA, 1542 bp, Triticum aestivum
agagagagagagagagagtcccttcccaccccaccccactctcctcgcgcgccccccgctccggagggcgatctcgggaggaacggcgggcgtcccgcggcgagttgtattatatggttgtcggccgcgattttgctgttaatcttgtcaagttggtgagtacctggaagctgcaatgactgaaaacacccagggcagtgtccggcgggcctttggagacctgacaaatgtccttggcaagcggccagcctcatgcgatctggagaagaatgcaggtggagtcaagattagtcgggtcgaaaaggtcgctgaccctaggaaagagtctgatgaaaaggcaaaggccaatgctggggcatcaggaaacctttttgaagttctggttgatggtattggcaaagaggacttcgcaaggacttcaattttccgtggagccaaggttcagcacatggctgctcaggcagctgggctactatccaaggatgatgatgacgcgaggaatcgttgcgtatctttggattcttctggcctcaacgacaaggcggagtcttccttggaatcagagggtggctgtgaaggggaagatgatgaagacactgatagtgagttgctgccatatgccagtgaggctagtaagattgtaattaatgataagactaatgagggtgaatgtctgactcaagaggagatggtggtatcaccaggaaatcagaattcgcagtcttcatttgacgctacagctcgtgatgacatgacatgtacaaatgtccagcatcctccaatggaggttggtggcttggaaaaatcatgtgctacaaagtcttgcacttgctctttctgtcttaaggctgcttttatgtggactaatctccattatcaggatgcaagaagccggcttggtgcattgaagaagagcataaagtttgctagatcgctagaggcaaagaggcaaggaaatgaattcaatgcagacagatactcaaaaagagctgcagagatgggattcaaactatctcaacaacagagatcactctttcttcatactgaaaatgcccttgttcgtgaatctgcccagctccattcagctgtcgtcaagttaaaggacttgagagacaactgcaagaaagatctgaagatctgatcatcaattcttcgccggggagacgagtcctgcatgcacggttgtgctctggtaaacttgttaccctgggatgtagtaggataagctggatctttttgaatcaagatgtgtacggtatttggttgtcaactagcaagttagggggttctcaagtaggaaattcggccgtagagattactcctaacttaaaacataggccagcatcttagcctctgaagatcgtctgaggaaatgcttttgtaaaaaccttagagggagttgtgaactgtaggtttgtgacaggagtcctttcagtcgctcagtcagcacgtggatgtgagatagcaccattttgtttcctgctctccaaagagccaaacgggaagtgcaaataatgtcatttgactagtttttccatgctt

SEQ ID NO: 30132 - protein, 321 aa, Triticum aestivum
MTENTQGSVRRAFGDLTNVLGKRPASCDLEKNAGGVKISRVEKVADPRKESDEKAKANAGASGNLFEVLVDGIGKEDFARTSIFRGAKVQHMAAQAAGLLSKDDDDARNRCVSLDSSGLNDKAESSLESEGGCEGEDDEDTDSELLPYASEASKIVINDKTNEGECLTQEEMVVSPGNQNSQSSFDATARDDMTCTNVQHPPMEVGGLEKSCATKSCTCSFCLKAAFMWTNLHYQDARSRLGALKKSIKFARSLEAKRQGNEFNADRYSKRAAEMGFKLSQQQRSLFLHTENALVRESAQLHSAVVKLKDLRDNCKKDLKI

SEQ ID NO: 30133 - protein, 230 aa, Triticum aestivum
MAAQAAGLLSKDDDDARNRCVSLDSSGLNDKAESSLESEGGCEGEDDEDTDSELLPYASEASKIVINDKTNEGECLTQEEMVVSPGNQNSQSSFDATARDDMTCTNVQHPPMEVGGLEKSCATKSCTCSFCLKAAFMWTNLHYQDARSRLGALKKSIKFARSLEAKRQGNEFNADRYSKRAAEMGFKLSQQQRSLFLHTENALVRESAQLHSAVVKLKDLRDNCKKDLKI

SEQ ID NO: 30134 - DNA, 627 bp, Triticum aestivum
ctccctcaccgttctgcctcatcgactccctcctcctcccctgcctccaccttatcctcacctcagctcagctcaccagctcgccccccacctccaatggcgtcggccaacgccatctccaccgcctccctcctccgctccttctcctcccaggggaggctgaggaggtccaagaacggccgctcgtcgcggctggtggtgcgcgcggacgccaaggaaatcgccttcgaccagaagtcccgcgccgcgctccaggccggcgtcgagaagctcgccaacgccgtcggcgtcaccctcggcccgcgagggaggaacgtagtgctggatgagtatggcaaccccaaagtggtgaacgatggtgttaccattgcccgtgctattgagctagctaacccaatggaaaatgcgggtgcagctctgattcgtgaggttgctagcaagaccaatgattctgctggtgatgggactacgactgcttgtgtccttgctcgagaaatcatcaagctgggcattttgagtgtaacttctggtgcaaaccctgtatcactaaagaaaggaatagacaaaactgtccagggtctgattgaagagcttgaaagaaaagctagaccagtcaagggcagtggt

SEQ ID NO: 30135 - protein, 209 aa, Triticum aestivum
LPHRSASSTPSSSPASTLSSPQLSSPARPPPPMASANAISTASLLRSFSSQGRLRRSKNGRSSRLVVRADAKEIAFDQKSRAALQAGVEKLANAVGVTLGPRGRNVVLDEYGNPKVVNDGVTIARAIELANPMENAGAALIREVASKTNDSAGDGTTTACVLAREIIKLGILSVTSGANPVSLKKGIDKTVQGLIEELERKARPVKGSG

SEQ ID NO: 30136 - protein, 177 aa, Triticum aestivum
MASANAISTASLLRSFSSQGRLRRSKNGRSSRLVVRADAKEIAFDQKSRAALQAGVEKLANAVGVTLGPRGRNVVLDEYGNPKVVNDGVTIARAIELANPMENAGAALIREVASKTNDSAGDGTTTACVLAREIIKLGILSVTSGANPVSLKKGIDKTVQGLIEELERKARPVKGSG

SEQ ID NO: 30137 - protein, 108 aa, Triticum aestivum
PSPFCLIDSLLLPCLHLILTSAQLTSSPPTSNGVGQRHLHRLPPPLLLLPGEAEEVQERPLVAAGGARGRQGNRLRPEVPRRAPGRRREARQRRRRHPRPAREERSAG

SEQ ID NO: 30138 - DNA, 1451 bp, Triticum aestivum
catcctaatcgaaaaaaccgatcatagaaatatctcctttcttctttccttttgctttgcacacatactagtgggcagtggcaccggcagcaagtagtctattcatctcagatctgaagttcactccctctcccggtgttctcttcccagcgtggatcctaaatcgcggacgccggacgaggagcgttcctctccaagttgtaatcgatcgcatcggcagcttcttacatcatcagcaattaatggccaccggaggtatgaccctggagagcctaccgaacgagctaccattagacttcttgagcaaaatcacaaataacttctccggtgagctactacttggtcagggcgcgttcgggtcagtttataaggggatcctggacgatggagtggttgctgtgaagaagctcgcagaaaattcgcctgtaccacgtgacacaatattcgcgaatgaggttcagaatattatggtgctcgagcatgaaaatatcgtcaagttggttgcctactgccgggaagcacaaaacaaattggtgcagagcaacggacgatatattattgcagagatcactgacactgtactctgctatgaatacttgcctaaggggagccttcacaagaatctttttggtgaatccagtagcattgattgggatatgcgctttaaaataataaagggaatatgtgaaggtatacattttctacataccttgcctagtcccgttctccatttgggtctgaagccttagaatatactactgggtgacaacatgacaccgaaaattgcggattttggtttctccagaatattcggccaagatcaaacccgaaagaacacacgaagtgtcgtgggatcgattgggtacatggccccggagtatctgtacaatggcgaaatctcggctcggtcagacatatatagtttaggcctaatcataatggagatatccacgagagagatgaatagttctagcactgaccagaagcatgcaaggaaatatattgatggagtaaaagaaaattggacactggagaaaataatgtgtgagtacattgagttagaagaacatggtttcaatcaagtagaagcatgtatcaatattggtctacagtgtgtagagattgatcagaagaagagaccttccatagagaacattgtcaatatgctcaataagcttccagtgagcgaggaggtctccctgtccacgtgagcacaaaacatcccacttttcagtgagagatgccgaacatcaagtaaaacaagatcagtgctacaaaagtggatgatgaaaccaatgtttgcattcaataaagcaagccatgatggcctttttgtaaaaaagtattaatgagaagtgtattgtgaacatgacccattgatatcacacaattgcaaatatatttagttttactcaaaaaaaaaaaaaaaaaagcttatcgataccgtcgac

SEQ ID NO: 30139 - protein, 168 aa, Triticum aestivum
MATGGMTLESLPNELPLDFLSKITNNFSGELLLGQGAFGSVYKGILDDGVVAVKKLAENSPVPRDTIFANEVQNIMVLEHENIVKLVAYCREAQNKLVQSNGRYIIAEITDTVLCYEYLPKGSLHKNLFGESSSIDWDMRFKIIKGICEGIHFLHTLPSPVLHLGLKP

SEQ ID NO: 30140 - protein, 163 aa, Triticum aestivum
MTLESLPNELPLDFLSKITNNFSGELLLGQGAFGSVYKGILDDGVVAVKKLAENSPVPRDTIFANEVQNIMVLEHENIVKLVAYCREAQNKLVQSNGRYIIAEITDTVLCYEYLPKGSLHKNLFGESSSIDWDMRFKIIKGICEGIHFLHTLPSPVLHLGLKP

SEQ ID NO: 30141 - protein, 146 aa, Triticum aestivum
MTPKIADFGFSRIFGQDQTRKNTRSVVGSIGYMAPEYLYNGEISARSDIYSLGLIIMEISTREMNSSSTDQKHARKYIDGVKENWTLEKIMCEYIELEEHGFNQVEACINIGLQCVEIDQKKRPSIENIVNMLNKLPVSEEVSLST

SEQ ID NO: 30142 - DNA, 463 bp, Triticum aestivum
atgtcgtcttcctcgccaccacaccacaccactgcagtgccgtcgcgtcatctcccacctctcccatcgggccagcggaagcagcagctgcgtgcggaaccaaccatgctccccttcctcctctccctccttctcctcaccggcgccgcggcgggggtacagggccacgacgacgcggcggcgcggcggacgatggaggagttcgccggcttccccgcctccgacgacggcgagggcggccgcgcctcccccttgcgcgtagactccgaaagtcthdagcgccagattgatgaactggcctcgttctccgactcgccggcgcrgtcggtgacgcgtgttctgtacagcgacaaggatgtgcaagctcgaaggtatattaaagggataatgaaacagcttggcctctctgttcgagaagatgccgttggcaacatatttggccgctgggtgggtyctgaggcag

SEQ ID NO: 30143 - protein, 154 aa, Triticum aestivum
  misc_feature (92)..(93): Xaa can be any naturally occurring amino acid
  misc_feature (108)..(108): Xaa can be any naturally occurring amino acid
  misc_feature (152)..(152): Xaa can be any naturally occurring amino acid
MSSSSPPHHTTAVPSRHLPPLPSGQRKQQLRAEPTMLPFLLSLLLLTGAAAGVQGHDDAAARRTMEEFAGFPASDDGEGGRASPLRVDSESXXRQIDELASFSDSPAXSVTRVLYSDKDVQARRYIKGIMKQLGLSVREDAVGNIFGRWVGXEA

SEQ ID NO: 30144 - protein, 119 aa, Triticum aestivum
  misc_feature (57)..(58): Xaa can be any naturally occurring amino acid
  misc_feature (73)..(73): Xaa can be any naturally occurring amino acid
  misc_feature (117)..(117): Xaa can be any naturally occurring amino acid
MLPFLLSLLLLTGAAAGVQGHDDAAARRTMEEFAGFPASDDGEGGRASPLRVDSESXXRQIDELASFSDSPAXSVTRVLYSDKDVQARRYIKGIMKQLGLSVREDAVGNIFGRWVGXEA

SEQ ID NO: 30145 - protein, 95 aa, Triticum aestivum
  misc_feature (92)..(92): Xaa can be any naturally occurring amino acid
VVFLATTPHHCSAVASSPTSPIGPAEAAAACGTNHAPLPPLPPSPHRRRGGGTGPRRRGGAADDGGVRRLPRLRRRRGRPRLPLARRLRKSXAPD

SEQ ID NO: 30146 - DNA, 987 bp, Triticum aestivum
atgcgcagaccgtgggtgggaggcccacgcgtctgtgagattacgtgatatttcggccaagaatccacctacgcgtagttctgccgcacgttacgtggataaaaaggcaggaccgttcggggggcgaagaattgcgcacagcaaccaaccgtgtcagggaaggaattgaggcgagcgagagagaaccccacatcacatggcgaacggcgtgggctcggcgaaggcggagatctgcgccgggctgggcatgccgatggcggagctggagcaggtgttccggcgctacgacgccaacggcgacggcaagatctcggcggacgagctggcgtccgtgctgctcgcgctgggcgcgcccccgggggccaggggaggtgcagagcatgatggaggagatggacgccgacagggacggcttcgtcgacctccacgagttcgccgccttccactgcgggccctgcaagggcggcgcggccgcagacgccaaggagcaggaggccgccacggaggcggagctcaaggaggccttccggatgtacgacgccgaccgcaacgggctcatctccgcgcgggagcttcaccgcgtgctccgccagctcggggagaagtgctccgttgctgactgctcgcgcatgattcgatccgtcgacgccgacggcgacggcagcgtcaacttcgaggaattcaagaagatgatgggcggcggagggaggagctaggtcggtaagggccggccatgagcaaacaatgctgcatctgcatgcctcgttgagggttttgttcctccatggtgcttaatttaatttaattaatctcaaagtgaaaggcttaggctccccgtaatgcgaatactaatgatgatgcgggtgaagtgattaattatgtaaatctaatcttctagtagtagtagtactactaatgatgatgggtgtactaagaaatttggtctggggttgtttgcaatgaattagaactcgtttgaaactcttc

SEQ ID NO: 30147 - protein, 140 aa, Triticum aestivum
MANGVGSAKAEICAGLGMPMAELEQVFRRYDANGDGKISADELASVLLALGAPPGARGGAEHDGGDGRRQGRLRRPPRVRRLPLRALQGRRGRRRQGAGGRHGGGAQGGLPDVRRRPQRAHLRAGASPRAPPARGEVLRC

SEQ ID NO: 30148 - protein, 123 aa, Triticum aestivum
MPMAELEQVFRRYDANGDGKISADELASVLLALGAPPGARGGAEHDGGDGRRQGRLRRPPRVRRLPLRALQGRRGRRRQGAGGRHGGGAQGGLPDVRRRPQRAHLRAGASPRAPPARGEVLRC

SEQ ID NO: 30149 - protein, 121 aa, Triticum aestivum
MAELEQVFRRYDANGDGKISADELASVLLALGAPPGARGGAEHDGGDGRRQGRLRRPPRVRRLPLRALQGRRGRRRQGAGGRHGGGAQGGLPDVRRRPQRAHLRAGASPRAPPARGEVLRC

SEQ ID NO: 30150 - protein, 111 aa, Triticum aestivum
MMEEMDADRDGFVDLHEFAAFHCGPCKGGAAADAKEQEAATEAELKEAFRMYDADRNGLISARELHRVLRQLGEKCSVADCSRMIRSVDADGDGSVNFEEFKKMMGGGGRS

SEQ ID NO: 30151 - DNA, 607 bp, Triticum aestivum
aaaaaggtttgtgatagtgattgcctccctctgctgccgtccctaatctgaaggctcccgccatctgcgatcggatttcatggctccaaagaaggacaaggctcccccaccttcatccaagcctgccaagtctggcggtggcaagcagaagaagaagaagtggagcaagggtaagcaaaaggaaaaggtgaataacatggtgctcttcgatcagggtacctatgacaagctcctctctgaggcacccaaatacaagctcattactccttccattctctctgaccgtttgaggattaatggatcacttgcaaggaaggctattagggaattgatggctagaggttcaatcaggatggtgtctgcccatgcaagtcagcagatttacactagagctacaaacacctagatgtactggttataatttatgtagtattgatgcacctctgaagtgaaattttgttttttctgtttgagacgtacctcatgctagattgcatcagttcgacagttgctaaattcatggtttatttccttttacatccttcttggtaatatatttggcacaaggctttcatattttaaaaaaaaaaaatcaaaaaaaaaaaaa

SEQ ID NO: 30152 - protein, 108 aa, Triticum aestivum
MAPKKDKAPPPSSKPAKSGGGKQKKKKWSKGKQKEKVNNMVLFDQGTYDKLLSEAPKYKLITPSILSDRLRINGSLARKAIRELMARGSIRMVSAHASQQIYTRATNT

SEQ ID NO: 30153 - protein, 69 aa, Triticum aestivum
MVLFDQGTYDKLLSEAPKYKLITPSILSDRLRINGSLARKAIRELMARGSIRMVSAHASQQIYTRATNT

SEQ ID NO: 30154 - DNA, 775 bp, Triticum aestivum
atgtaaaatctaactacaccaattcattctactgggatactctcccagtaccaccatttctaggcgatgactatggaagaaccattgacatttgttcctccatgatgatcaatggctcgaccatatgcatatcctctgtcgagaagggcgctggcacctacaccttttgatatagtgacaaagttatggactcaggctgggaatttgggtgctgcccttctacggcaaagcagagtatgttcccgagctcaacctttcgttcgctctatctgctgacagcccccaccgcttgtgcgctttaacctgcacttcaatgcaccatgggggcccaccagcattgcagcatacttttgatgagctcgacctgccggagaattggtcgccatacaagtgccacctggttaacctgggctcaggcaacttttgcatcatttccttctgtaagaccatgaactgtgagtttgccgtcttcaccggcgtggaggtgaaaccctgcatcaatggcgacggtcctctccggatgatcaagcacctgtctaagagtttcagccttggatctcatagcatcaaaagtgtgctctgaaccatctaattgattgcctggatgccgatatggaacttagtctgtaatctgtgctattttgttttctgcctcttagctgttctaaagcccgctgctgtttatcggtcttgatatgctgcatttaatccgacagcgcatgactatgtaaagactatttgcttaaatgatttttaaacttgcttaagttcattg

SEQ ID NO: 30155 - protein, 89 aa, Triticum aestivum
MHHGGPPALQHTFDELDLPENWSPYKCHLVNLGSGNFCIISFCKTMNCEFAVFTGVEVKPCINGDGPLRMIKHLSKSFSLGSHSIKSVL

SEQ ID NO: 30156 - protein, 55 aa, Triticum aestivum
VKSNYTNSFYWDTLPVPPFLGDDYGRTIDICSSMMINGSTICISSVEKGAGTYTF

SEQ ID NO: 30157 - protein, 54 aa, Triticum aestivum
MARPYAYPLSRRALAPTPFDIVTKLWTQAGNLGAALLRQSRVCSRAQPFVRSIC

SEQ ID NO: 30158 - DNA, 838 bp, Triticum aestivum
atagccgcccgcgccactagtccactagagtagaacagagtgccgagccaacttcgcccaagagccaagaagcttccgagctccctcagttcccccacgagaaacacccttccgctgaagatcaagctgcagcggcgagcgatggctctagcccggaggttcctgttcctcttccctgccgccgtcctgacatggctcgcctcggcctccgcgtcgccctttctgtcggacagagtattccaggccagcaccggatccacgtgaggagcttgctgcagaccaagagggactgccctatagactttgagtaccagaactacacaatcatcacaagcaggtgcaaagggccacaatcgccccctacggaatgttgtgatgctttcaagaaatttgcatgcccatttgccgtgtacatcaacaaccagagcactaactgtgcagacacaatgttaacctacatcaacggccgtggctcatacccagcaggaatgttcgctgccgagtgcctaaaaggcaagcaaggggtttcttgcgaaggcatcccagggatagacaccggcgtgccaagcggcgggcgacgagctcacgggatttcaggtcgtttgatcgctctcttgtgtggactaggaggattgctgttccattgagtgataccttgcacttctccaaagatggaatgtttgtcggttggaagttgtaagtagtaaggctcatttgcttctccttgacgctctcttggtgtagtgactggacaattggcttttccaagcgatatctcttcagaaactccttaatacttgactaacacctcttaaaaatgcatttggttactattccg

SEQ ID NO: 30159 - protein, 151 aa, Triticum aestivum
MARLGLRVALSVGQSIPGQHRIHVRSLLQTKRDCPIDFEYQNYTIITSRCKGPQSPPTECCDAFKKFACPFAVYINNQSTNCADTMLTYINGRGSYPAGMFAAECLKGKQGVSCEGIPGIDTGVPSGGRRAHGISGRLIALLCGLGGLLFH

SEQ ID NO: 30160 - DNA, 1653 bp, Triticum aestivum
aggagcatcatttttcttagagtcgctcaagctgagtaagccaacccaagctcaatggcggcgaatcagcagcaatcgacccgctcggaaccctagcctggcccgccgagtcgccatggcatgccctccttgcccgccgtcgccgctcgccagggtgcggctcgacgacgtggcgccccacgacggcgcggccgccccgggctacgcgcgcgccgtcggcgccctcgccgcctcgctcgcccgccgcggcgccgccgtgctcgagctccccgccgcggacgcggccgtcgtccgctgcgccctcgagtccgcccgcgccttcttccgcggccgccacgccgcctacctctaccgcgccgggaggactttggaagatggagagttgtcccctgcttgcatggctgatgctttcagatgtttgggcaaagcagcccgggccgccctctgtgcaatagcacggcacctgcgcctacgtaccgacgtattcaatcaattagttgatgatactccactgccggttaacgaggtctcctcatcagagttgctggtagcatattctcatgaacagctccaaagtggtctgacactcatgggatgtcccagcaggtcctcaatgcctcaagttgataggggatttgtgacgctagttgcttccgataatccaggaattgaggtttgtgacccaaatggccattggtacctagctgatggggtttcaggcccaaataatctattgcttctgactggaagggccctaagtcacgttactgctggtctttgcccaatttcccagtacagggtcactaatgaaaatagggcatcactcacctttaggttggtgcctcatgccaacgctatattggattgctctccaattttagctgctgggcattgcatacgacaggtgtaccaacccatacctgcaggccaatttatggatgattcttatgctgaagagcacgctgtttccagtcacttggaagaaccttctgaatctcagggcaactttgttagtgatccatcgctgagaagtgtcctgtcagaccctctgtctggggcttttcttgaagatgctatggttctccaatgtgggcactcatttggtggcgtcatgctgaagaaagtcattgaaatggctagatgcaccatttgcaatggagaagttgacccatcctccttgtttcctaatctcgctttaagagcagtagctacggtggtgaagatggaggatgacaggagactgtttcataacgccgctcttcggaagcgcaggaaagatgtgaccgagcatacggatgtggtgaagcggagtgggagtcgcaaaggaaacagtgagcttgctctggatgctgaaagcccggtggcattcaagggtgtgcagtacccatttgtagtgggcgagagggtcctgatcatggggaacaaaaggacgcccgagaaatttgtcgggaaggaggcggtcatcacttcacagtgtctgaatggctggtatcttgtgaaggcgctcgacagcggagagagcacacggcttcagtaccggtcgctgaagaaagtgccggggctgcaactgcagacgcaagcgaggctgcagcccctggcatttctcggaggcagacaataagagacggcgatgacggatcatgtgtggaccat

SEQ ID NO: 30161 - protein, 539 aa, Triticum aestivum
GASFFLESLKLSKPTQAQWRRISSNRPARNPSLARRVAMACPPCPPSPLARVRLDDVAPHDGAAAPGYARAVGALAASLARRGAAVLELPAADAAVVRCALESARAFFRGRHAAYLYRAGRTLEDGELSPACMADAFRCLGKAARAALCAIARHLRLRTDVFNQLVDDTPLPVNEVSSSELLVAYSHEQLQSGLTLMGCPSRSSMPQVDRGFVTLVASDNPGIEVCDPNGHWYLADGVSGPNNLLLLTGRALSHVTAGLCPISQYRVTNENRASLTFRLVPHANAILDCSPILAAGHCIRQVYQPIPAGQFMDDSYAEEHAVSSHLEEPSESQGNFVSDPSLRSVLSDPLSGAFLEDAMVLQCGHSFGGVMLKKVIEMARCTICNGEVDPSSLFPNLALRAVATVVKMEDDRRLFHNAALRKRRKDVTEHTDVVKRSGSRKGNSELALDAESPVAFKGVQYPFVVGERVLIMGNKRTPEKFVGKEAVITSQCLNGWYLVKALDSGESTRLQYRSLKKVPGLQLQTQARLQPLAFLGGRQ

SEQ ID NO: 30162 - protein, 501 aa, Triticum aestivum
MACPPCPPSPLARVRLDDVAPHDGAAAPGYARAVGALAASLARRGAAVLELPAADAAVVRCALESARAFFRGRHAAYLYRAGRTLEDGELSPACMADAFRCLGKAARAALCAIARHLRLRTDVFNQLVDDTPLPVNEVSSSELLVAYSHEQLQSGLTLMGCPSRSSMPQVDRGFVTLVASDNPGIEVCDPNGHWYLADGVSGPNNLLLLTGRALSHVTAGLCPISQYRVTNENRASLTFRLVPHANAILDCSPILAAGHCIRQVYQPIPAGQFMDDSYAEEHAVSSHLEEPSESQGNFVSDPSLRSVLSDPLSGAFLEDAMVLQCGHSFGGVMLKKVIEMARCTICNGEVDPSSLFPNLALRAVATVVKMEDDRRLFHNAALRKRRKDVTEHTDVVKRSGSRKGNSELALDAESPVAFKGVQYPFVVGERVLIMGNKRTPEKFVGKEAVITSQCLNGWYLVKALDSGESTRLQYRSLKKVPGLQLQTQARLQPLAFLGGRQ

SEQ ID NO: 30163 - protein, 407 aa, Triticum aestivum
MADAFRCLGKAARAALCAIARHLRLRTDVFNQLVDDTPLPVNEVSSSELLVAYSHEQLQSGLTLMGCPSRSSMPQVDRGFVTLVASDNPGIEVCDPNGHWYLADGVSGPNNLLLLTGRALSHVTAGLCPISQYRVTNENRASLTFRLVPHANAILDCSPILAAGHCIRQVYQPIPAGQFMDDSYAEEHAVSSHLEEPSESQGNFVSDPSLRSVLSDPLSGAFLEDAMVLQCGHSFGGVMLKKVIEMARCTICNGEVDPSSLFPNLALRAVATVVKMEDDRRLFHNAALRKRRKDVTEHTDVVKRSGSRKGNSELALDAESPVAFKGVQYPFVVGERVLIMGNKRTPEKFVGKEAVITSQCLNGWYLVKALDSGESTRLQYRSLKKVPGLQLQTQARLQPLAFLGGRQ

SEQ ID NO: 30164 - DNA, 976 bp, Triticum aestivum
cttatctcttcgtctcgcaaaaggggagacagaagagagttcgatttccgactaaaacctctcgccgccgacgaccaagctcggagacctattgacctagttcccaatgtcggacgcagatgattaccgttgcttcgttggcagtctgtcatggaacacaactgatgtggatctgaaggatgcttttgggaaatttggtcgagttactgagacaaaggtggttcttgacaagttctctggccgatcacgtggctttggatttgtgacttttgatgacaagaaggccatggaagaagctgttgaggctatgaatggaattgatttggatggaaggaatattactgttgaaagagcacaacctcaaggttcaggcagggaccgtgatggagatcgagactatcgtggtggtggtgaccgctatggtggtggccgtgattttggtggcggtcgtgctggtggtcgtggtggtggcggtgattgctacaaatgtggcaagcctggtcattttgcaaaggggagtgcccatctggtgatggtggggacaggtatggtagcagggatgacaggtacagtagcagggatgacaggtacagtagcagggatgacaggtacagtagtagggatgacaggtatggtggcagggatggtgcaagggatgacaagtatggtggtagcaacggcagcagtcgctatgggcctgaccgtggtggtgatcgctattctggaagtcgtgatggaggaagccgcggcagtggtggcggtgatcgatacagccgtgacaggtctggaccgtatgatcgtcgcagccgagatgaatactgatcttgatggtggagattctgtctcaggtatgaaaggtattggataatacaagtggtatgtttgctttatcacataaggcagcaaatggtttgctgttgtactctttatgagaagtttaatgcttttgttatccatgctgactagtgcttggttc

SEQ ID NO: 30165 - protein, 253 aa, Triticum aestivum
MSDADDYRCFVGSLSWNTTDVDLKDAFGKFGRVTETKVVLDKFSGRSRGFGFVTFDDKKAMEEAVEAMNGIDLDGRNITVERAQPQGSGRDRDGDRDYRGGGDRYGGGRDFGGGRAGGRGGGGDCYKCGKPGHFAKGSAHLVMVGTGMVAGMTGTVAGMTGTVAGMTGTVVGMTGMVAGMVQGMTSMVVATAAVAMGLTVVVIAILEVVMEEAAAVVAVIDTAVTGLDRMIVAAEMNTDLDGGDSVSGMKGIG

SEQ ID NO: 30166 - protein, 193 aa, Triticum aestivum
MEEAVEAMNGIDLDGRNITVERAQPQGSGRDRDGDRDYRGGGDRYGGGRDFGGGRAGGRGGGGDCYKCGKPGHFAKGSAHLVMVGTGMVAGMTGTVAGMTGTVAGMTGTVVGMTGMVAGMVQGMTSMVVATAAVAMGLTVVVIAILEVVMEEAAAVVAVIDTAVTGLDRMIVAAEMNTDLDGGDSVSGMKGIG

SEQ ID NO: 30167 - protein, 186 aa, Triticum aestivum
MNGIDLDGRNITVERAQPQGSGRDRDGDRDYRGGGDRYGGGRDFGGGRAGGRGGGGDCYKCGKPGHFAKGSAHLVMVGTGMVAGMTGTVAGMTGTVAGMTGTVVGMTGMVAGMVQGMTSMVVATAAVAMGLTVVVIAILEVVMEEAAAVVAVIDTAVTGLDRMIVAAEMNTDLDGGDSVSGMKGIG

SEQ ID NO: 30168 - DNA, 920 bp, Triticum aestivum
gccgcgcatcgccttcccaaacagccgaccagtcaactgaacggcagcccatcaagcttcccagcctgtcactgaggggcgccgccgccgggcctgggcgtcccgggaactgcaggaacgatgcagtcgctgcaggacaaggcgtcggagtggagcggcgtggcggccgccgacgccttcgccatcgacgaggtcaacgtcttcgaggcgctcggcggcaccccgcagcccttcgtcgacctctccaccaacttctacaccagggtttatgaggacgaggagcagtggttccgggagatattctcggggtccaggaaggaggacgcgatccagaaccagtacgagttcttggtgcagcggatgggcggcccgccgctattctcccagaggagaggacatcctgccttgataggacgacatcggccatttccagttacccaccaagctgcggagcgatggctacaccacatgcagcaagctttggagactacagaaagcataaacccagatacaaaaaccaaaatgatgatttttttcaggcacactgcatatttccttgtcgccggtaatgagatgacaaggcaaacccaaagtgtacctccctgcaaacatgcaacgagcaaaccagctgagtagccgctcaagtctatccagttgaataatgatttcagcttccgtgattcctatacgattcccatgtgcaacgggatcaaggttgtttatgcattataggaaacaacacgcatgatgttgtagagggggagtgacccaatcagagagcatctcaaaattggtaaatttgcgttcttgatcgtactcctcttctctcttgatttgagcttgagggtacaagttctctgctcctgctaaggggagcactgctatggtgtattggtgctcaaaaaaaaaatgaaaaaaaa

SEQ ID NO: 30169 - protein, 171 aa, Triticum aestivum
MQSLQDKASEWSGVAAADAFAIDEVNVFEALGGTPQPFVDLSTNFYTRVYEDEEQWFREIFSGSRKEDAIQNQYEFLVQRMGGPPLFSQRRGHPALIGRHRPFPVTHQAAERWLHHMQQALETTESINPDTKTKMMIFFRHTAYFLVAGNEMTRQTQSVPPCKHATSKPAE

SEQ ID NO: 30170 - protein, 91 aa, Triticum aestivum
MGGPPLFSQRRGHPALIGRHRPFPVTHQAAERWLHHMQQALETTESINPDTKTKMMIFFRHTAYFLVAGNEMTRQTQSVPPCKHATSKPAE

SEQ ID NO: 30171 - protein, 89 aa, Triticum aestivum
RASPSQTADQSTERQPIKLPSLSLRGAAAGPGRPGNCRNDAVAAGQGVGVERRGGRRRLRHRRGQRLRGARRHPAALRRPLHQLLHQGL

SEQ ID NO: 30172 - DNA, 483 bp, Triticum aestivum
acctacctacccgcgcgcacaagccgcgagcgaggcacccaaccaccgccggcggccgcggtcggcaatggagcactacgagaggctggagaagatcggcgagggcgcctcgggcgtcgtctacaaggcgcgggaccgccgcacgggcgccaccgtcgccgtcaagcgcctccgcggcggcggcttcggcgaccacgacggcagccggctctccgaggacctcctccgcgaggccgcgtgcctcgaggcctgccgcggccacccgtccgtcgtcgagctgcgggccgcgcaccgcgacggcgcgggcggcgcgttcctcgtgatggagtacgtcgggcccagcgtggcgcaggtcatgcgggagcgcggccggcccttccccgaggccgacgcgcgccggctcatgcgccagctcctggacggcgccagggcgatgcacgacctcggggtcctgcaccgcgacctcaagccggacaacgtcct

SEQ ID NO: 30173 - protein, 161 aa, Triticum aestivum
TYLPARTSRERGTQPPPAAAVGNGALREAGEDRRGRLGRRLQGAGPPHGRHRRRQAPPRRRLRRPRRQPALRGPPPRGRVPRGLPRPPVRRRAAGRAPRRRGRRVPRDGVRRAQRGAGHAGARPALPRGRRAPAHAPAPGRRQGDARPRGPAPRPQAGQRP

SEQ ID NO: 30174 - protein, 160 aa, Triticum aestivum
PTYPRAQAASEAPNHRRRPRSAMEHYERLEKIGEGASGVVYKARDRRTGATVAVKRLRGGGFGDHDGSRLSEDLLREAACLEACRGHPSVVELRAAHRDGAGGAFLVMEYVGPSVAQVMRERGRPFPEADARRLMRQLLDGARAMHDLGVLHRDLKPDNV

SEQ ID NO: 30175 - protein, 138 aa, Triticum aestivum
MEHYERLEKIGEGASGVVYKARDRRTGATVAVKRLRGGGFGDHDGSRLSEDLLREAACLEACRGHPSVVELRAAHRDGAGGAFLVMEYVGPSVAQVMRERGRPFPEADARRLMRQLLDGARAMHDLGVLHRDLKPDNV

SEQ ID NO: 30176 - DNA, 959 bp, Triticum aestivum
acaaagaaagcactgaagcccactacgccagccgccaaaggaatcaggagaaaatccccaattccccgttgacccattcttccccggcaacctaagctcggcgacgtcggacggcgggcggcgcggccgtgcaccgtcgaggcgttaaggtcaagcgagcagcgtgccagcggcagggcgtcgctgtgccgcgctgcagccgcgcggcagggacggcgcgaaagctgaagctaagtgtagactgaggtccgaacagcactaggattaaagtcatgtcctcttcgtcatctttcctcggctcccgcttccccttcgccgccgttggcgccggtgctggagcctccggcggaagcggagccggaggcagcgggagcagcgtgcggccgtggggatcgagcggagggacgtcggtctcgtcgtcggggaagcggatacagaaggagctgctggacctcaatgcttccgactgctccgccgtcccaagggcgacaacctctaccactggctctccaccatcattggaccccaagggtcaccatatgatggagggatatttttccttgatatcgttttcccacttgattatcctttcaaacctcctatggtgactttcaaaacaaggatttaccattgcaatgttgattccactggggcagtgagtttggaaattttgaaggatggctggagtccagctttaactatttcaaaggtgctacttgcgatcaaagccatcatcacaaatccggatccatacaacccacttgtggagagcattgcacgtctgtacctgactgatagagctaagcatgatgaaatagctgctgaatggacattgaggtttgcaagatagggagtcctttgtgtaactaaataagaaaaattgactctgtaaatgaataatcttgtatgtatcctgagatataagttggaaaatgaccaatacattaatctgagttgtg

SEQ ID NO: 30177 - protein, 111 aa, Triticum aestivum
MSSSSSFLGSRFPFAAVGAGAGASGGSGAGGSGSSVRPWGSSGGTSVSSSGKRIQKELLDLNASDCSAVPRATTSTTGSPPSLDPKGHHMMEGYFSLISFSHLIILSNLLW

SEQ ID NO: 30178 - protein, 82 aa, Triticum aestivum
MVTFKTRIYHCNVDSTGAVSLEILKDGWSPALTISKVLLAIKAIITNPDPYNPLVESIARLYLTDRAKHDEIAAEWTLRFAR

SEQ ID NO: 30179 - DNA, 858 bp, Triticum aestivum
atcctgtccgggagcacggagccgcttcgttatccgctggccgctgctgctgcttctctgcgagtgagcgagtgaggaaagaggacggcgacgatggccggcatggcggcgctgcagggcgccatgggggcgctctccgtctcggccgcgagcaccagcgcattctggggcaacccgctcgccgccaccttctccgccgcgccgtctggggtcagattcatggccaagacaagcccaattgaaatgaggcttaagcgatgggaacggaagaagtgtaagccaaacagtcttcctatgctgcacaagatgcatgttagggtcggcgacacggtgcaggtcatcgcaggccgtgagaaaggtaaagttggggaagtcgtacggctttataagcacaacagcactgtgatagtgaaggatctgaacttgaagtcaaagcacaagaaaggcactgaggatgaaccgggtgaaattgtcatgattgaaggccccattcatagctcgaacatgatgctctactcaaaggagaagaacgtgacgagtagggttgggcacaaaatcctcgaggatggcaccaaggtccgctacctgaagaagaccggtgaagtaatcgacagcgttgacaactgggtgaaggtgttcaaggaaggagattctgagtcatcatcgtagtatggaaatgctgcgcatgctctcaaccttagctgcgcttattgctgcccaaacgcttactcggctggtgccactgcttgtactgtcagtttttttctagcttcagagcctcttttgtaaattactactactactacaaagttgtcaccatttttgcaacgcttggtccaacaagaaggccttcgtttt

SEQ ID NO: 30180 - protein, 191 aa, Triticum aestivum
MAGMAALQGAMGALSVSAASTSAFWGNPLAATFSAAPSGVRFMAKTSPIEMRLKRWERKKCKPNSLPMLHKMHVRVGDTVQVIAGREKGKVGEVVRLYKHNSTVIVKDLNLKSKHKKGTEDEPGEIVMIEGPIHSSNMMLYSKEKNVTSRVGHKILEDGTKVRYLKKTGEVIDSVDNWVKVFKEGDSESSS

SEQ ID NO: 30181 - protein, 188 aa, Triticum aestivum
MAALQGAMGALSVSAASTSAFWGNPLAATFSAAPSGVRFMAKTSPIEMRLKRWERKKCKPNSLPMLHKMHVRVGDTVQVIAGREKGKVGEVVRLYKHNSTVIVKDLNLKSKHKKGTEDEPGEIVMIEGPIHSSNMMLYSKEKNVTSRVGHKILEDGTKVRYLKKTGEVIDSVDNWVKVFKEGDSESSS

SEQ ID NO: 30182 - protein, 181 aa, Triticum aestivum
MGALSVSAASTSAFWGNPLAATFSAAPSGVRFMAKTSPIEMRLKRWERKKCKPNSLPMLHKMHVRVGDTVQVIAGREKGKVGEVVRLYKHNSTVIVKDLNLKSKHKKGTEDEPGEIVMIEGPIHSSNMMLYSKEKNVTSRVGHKILEDGTKVRYLKKTGEVIDSVDNWVKVFKEGDSESSS

SEQ ID NO: 30183 - DNA, 642 bp, Triticum aestivum
acatccatccacatgtgccagacacctcaacgacccacagccctagctagtgtgtgttaactgttaagtggccggccacctccagattccagcaacagacaccccctacgtcgtctttggtttggtttggtttggtttcgaccccagtctcgaagctctccctccctcttcatattaatcttcccccgataccagcagctagtagcactggagtagatactattgccttctctgctcgatctattcctcaagtagctcctactagtcaagatgctgcacgaggcggcgccatgcacgtgcgggctgctctacggcagctgcggcggcggctgctccatgctgttcgccgcggcgccgggggaccaccactactacagcaagcaatgcggcgacgacggctcctacgcctcctacggcggctccgtcgactgcacgctctcgctcggcacgccctccaccaggcgcgccgaggccgggctgccgtgggaggcggtgcccagctgcaacggcaggcaggatatcggcccggcgcgcgcggatcagagcaatgccggcgccgcctccgctcgccggtgcgccaactgcgacaccacctccaccccgctctggaggaacgggcctcgcggaccaaaggtgcgtgcg

SEQ ID NO: 30184 - protein, 124 aa, Triticum aestivum
MLHEAAPCTCGLLYGSCGGGCSMLFAAAPGDHHYYSKQCGDDGSYASYGGSVDCTLSLGTPSTRRAEAGLPWEAVPSCNGRQDIGPARADQSNAGAASARRCANCDTTSTPLWRNGPRGPKVRA

SEQ ID NO: 30185 - protein, 117 aa, Triticum aestivum
MHVRAALRQLRRRLLHAVRRGAGGPPLLQQAMRRRRLLRLLRRLRRLHALARHALHQARRGRAAVGGGAQLQRQAGYRPGARGSEQCRRRLRSPVRQLRHHLHPALEERASRTKGAC

SEQ ID NO: 30186 - protein, 102 aa, Triticum aestivum
MLFAAAPGDHHYYSKQCGDDGSYASYGGSVDCTLSLGTPSTRRAEAGLPWEAVPSCNGRQDIGPARADQSNAGAASARRCANCDTTSTPLWRNGPRGPKVRA

SEQ ID NO: 30187 - DNA, 496 bp, Triticum aestivum
ctcgatctcctcttccccttcccattccccacccacggctaggttgcaaaccctagctcctcgctgatgtgagcctcccggagattcccaatccagctgccaccccactccggcgcccgactccgtccccggtcctcctcctcctctccccctctcgcacaaggtgctgaagactcgtccgcgactttgcatgatggaggctgcgcggtacggaccttggtcagatcttccgccggaactcctgggccttgtcctcaagcgcctcccttcgctagctgaccgtgttcatctgagagcagtctgtcacccatggcgctctaatggtctgctgcaacagcttcccgtcccattcccgtggctcacccttcctgatggtaccttcttcagcatcccaggaggcgaggttcaccgcatgcctataccagatggtgctagttgctgtggctccatcgacaactggttattcctcatgggcagtgatgacacatgcacgttg

SEQ ID NO: 30188 - protein, 102 aa, Triticum aestivum
MMEAARYGPWSDLPPELLGLVLKRLPSLADRVHLRAVCHPWRSNGLLQQLPVPFPWLTLPDGTFFSIPGGEVHRMPIPDGASCCGSIDNWLFLMGSDDTCTL

SEQ ID NO: 30189 - protein, 101 aa, Triticum aestivum
MEAARYGPWSDLPPELLGLVLKRLPSLADRVHLRAVCHPWRSNGLLQQLPVPFPWLTLPDGTFFSIPGGEVHRMPIPDGASCCGSIDNWLFLMGSDDTCTL

SEQ ID NO: 30190 - protein, 58 aa, Triticum aestivum
MVCCNSFPSHSRGSPFLMVPSSASQEARFTACLYQMVLVAVAPSTTGYSSWAVMTHAR

SEQ ID NO: 30191 - DNA, 488 bp, Triticum aestivum
  misc_feature (306)..(306): n is a, c, g, or t
actgacaacttattaattcggccacatcgccgcctgtcccagccagccagtccaacccgcccgccgtccaacaccccgcgcgcacaccaccgccgccgccgtcgaccccttcctccctcgcacccatggcgttcgcactcaaggcctccgcctcccccgccctcgccgctgcctcctcggcggcgtcgtccccctccttctcggccgcctccgcggcgccgaggggccgcgccgccgcggcgaggagggtctcgctccgcggggccgcgcaccccgttgccgccatcagggcgtccgccaccgccngtggccggggacaagcgcaccatctccggcacgttcaccaacctcaaggagcaggacaagatcgcgttcatcccgttcatcgtcgccggcgaccccgacttggcgaccacggcgaaggcgctaaaggttctcgatgcgtgtggttctgatgtgatcgaattgggcgtgccgtactctgatcc

SEQ ID NO: 30192 - protein, 162 aa, Triticum aestivum
  misc_feature (102)..(102): Xaa can be any naturally occurring amino acid
TDNLLIRPHRRLSQPASPTRPPSNTPRAHHRRRRRPLPPSHPWRSHSRPPPPPPSPLPPRRRRPPPSRPPPRRRGAAPPRRGGSRSAGPRTPLPPSGRPPPXVAGDKRTISGTFTNLKEQDKIAFIPFIVAGDPDLATTAKALKVLDACGSDVIELGVPYSD

SEQ ID NO: 30193 - protein, 109 aa, Triticum aestivum
  misc_feature (61)..(61): Xaa can be any naturally occurring amino acid
MAFALKASASPALAAASSAASSPSFSAASAAPRGRAAAARRVSLRGAAHPVAAIRASATAXGRGQAHHLRHVHQPQGAGQDRVHPVHRRRRPRLGDHGEGAKGSRCVWF

SEQ ID NO: 30194 - DNA, 1892 bp, Triticum aestivum
ctagctcagatcccccatcgcacccctcctccctcatccccatctcctcgccgccgccgccacctcctccccgtcctctgcaccactcctcgtcgccaacctcgccgccgccacctcttccccgtcccctgcaccactccctgatccctcctccggccccatccccggccatccccggccatccgtcccagtcgctgctctctctcggttcagtgagatgggatccactcccgcagccgccgctccaccctcaccgtcaacgacccatgccgccgccgcacaccaccgcgccctcccctcaccttggccccaagtcgggcagtgcgaggcggcgcttccagaccgcgatggccgcaaccttgcccactccgatctggatccatggtgcactccttcctccctctggatcgatggccgcagcctcgccgatggatccagcgcctgccggagacgagggctgccagatccgcgacctgggacgctcctcctgtaggatacgggagcagcacaccgcaccctgcagtcgtcggtccgggacgagcgcagcagctcgaggaagccggcgacaaacgccggcgctcctctgctccatcgacctggacggctgctactccgccaaagacgccgcctacaggaggtgctctactcttgcgcatgtctggtggcgtctccggcgcagtggtacttcttgaggtgactggcgtgacggcggctgtgtatggcggtgaccacaagctctccggtccggcttgtggggattgtcagcggcaaggcagagcggaacacggacgtgtccttcacgctcgacgacggcaccggccgtatcgacttcatcagatgcctggagcagaaggtgattccataatgcaaggtggctgactaggcggtgctcatcaacgcctactgcccctctcgccccctaaagcgcaactacatgtatgcttatacttccagccaaactcaacaacctcatcgacggtccgtgctgctgcctcccacaagtgttgatgtatgtagagaagctggtgagttgatgtgtagcttcatttgcctaatataagtgtaatctaactgctcagagctcaagataacctgtgatatgacatgctacggtactaattggaacatttctgatgcctgggagccacccgtccttagtttctgctttggttactcgctgtgctttgtgattaagtgagctgttgtaatctccgtactagcttacaagttggaatgcaaaattgcttgtgtcaatgctatgtgtagttgtgtcgtgtgtactactttgaaacgtcggtctatggttgtagaagctctactttatgctaatacttgcttggtccttcatatcaaagcttgcatgtactgtagaagctctactttatgctaatacttgcttgtgtaacatttttcatggcatacttctaaatggacaagtacgtgcgacttccagcgtcaacgatgatgcggaccatatgttcaactgcagccccatccattgcatcgacacaaagatgttttgcatcagcctgtcattgctaagggagaagcgggacttggagaggaaatctttccattaagcagattacatgtttggttgctgtgaagtaccagataggctagttctatttttttcacgtcctggagtatttcagcagcgccatgcaaatgcattagcgttaggtttctgattcaccttttgtaaaaacttagttagcccgcagtcagtcagtagtagctcagccagccagccagcctcaaatagtattgctggaatgaatgcttgtaatataataacattgcacgttgctttgaaaatgtatgagaactgggctaggcctaagataacttgtggtgtgatgtgttgtaatgtcaatggcataatatttttt

SEQ ID NO: 30195 - protein, 229 aa, Triticum aestivum
SSDPPSHPSSLIPISSPPPPPPPRPLHHSSSPTSPPPPLPRPLHHSLIPPPAPSPAIPGHPSQSLLSLGSVRWDPLPQPPLHPHRQRPMPPPHTTAPSPHLGPKSGSARRRFQTAMAATLPTPIWIHGALLPPSGSMAAASPMDPAPAGDEGCQIRDLGRSSCRIREQHTAPCSRRSGTSAAARGSRRQTPALLCSIDLDGCYSAKDAAYRRCSTLAHVWWRLRRSGTS

SEQ ID NO: 30196 - protein, 165 aa, Triticum aestivum
MVHSFLPLDRWPQPRRWIQRLPETRAARSATWDAPPVGYGSSTPHPAVVGPGRAQQLEEAGDKRRRSSAPSTWTAATPPKTPPTGGALLLRMSGGVSGAVVLLEVTGVTAAVYGGDHKLSGPACGDCQRQGRAEHGRVLHARRRHRPYRLHQMPGAEGDSIMQGG

SEQ ID NO: 30197 - protein, 141 aa, Triticum aestivum
MPPPHTTAPSPHLGPKSGSARRRFQTAMAATLPTPIWIHGALLPPSGSMAAASPMDPAPAGDEGCQIRDLGRSSCRIREQHTAPCSRRSGTSAAARGSRRQTPALLCSIDLDGCYSAKDAAYRRCSTLAHVWWRLRRSGTS

SEQ ID NO: 30198 - DNA, 707 bp, Triticum aestivum
ctgctgatctagtgctactatagccctagctagagggcgaaagagagaaggaaagagggcggtccatccaggcagcagctgcgcgcgtgacccacacgagaatatttggaggcgttcgtgggcgtgggggcgtgtcatgtgtgtgtgtgtgtgtgtgtgtgtgtgtgtctctgtgtgtgtgtgtgtctgtgtgtgtctgtgtgtgtgtgtgtgtgtctgtgtgagtgcgagacagtgagactggagatatagctaaagaggcgcagcctttctttcttcctcactcccccctcactctccctctcttccagtcttcctcctccctgggcttaagcttatattgctgctccttcttcttctccacccgccttgagtgaccgagtccctgagctactaggtagaagcagcggggtgtacgtgtggttgtgagggccatggctttccttgtggagaggtgcggggagatggtggtgtccatggagatgggctcgggggcggcgggggcgcacggtgccggcggcgttgctgggaagccggtgccggcgccgttcctgaccaagacgtaccagctggtggacgacccctgcaccgaccacatcgtgtcgtggggggaggacgacgccaccttcgtcgtctggaggccgcccgagttcgcccgggacctcctccccatgtttaaacacaataaagttggaactggagggggg

SEQ ID NO: 30199 - protein, 91 aa, Triticum aestivum
MAFLVERCGEMVVSMEMGSGAAGAHGAGGVAGKPVPAPFLTKTYQLVDDPCTDHIVSWGEDDATFVVWRPPEFARDLLPMFKHNKVGTGGG

SEQ ID NO: 30200 - protein, 81 aa, Triticum aestivum
MVVSMEMGSGAAGAHGAGGVAGKPVPAPFLTKTYQLVDDPCTDHIVSWGEDDATFVVWRPPEFARDLLPMFKHNKVGTGGG

SEQ ID NO: 30201 - protein, 77 aa, Triticum aestivum
MEMGSGAAGAHGAGGVAGKPVPAPFLTKTYQLVDDPCTDHIVSWGEDDATFVVWRPPEFARDLLPMFKHNKVGTGGG

SEQ ID NO: 30202 - DNA, 1584 bp, Triticum aestivum
atcactcgcaccccgcgaatactcttctcttcccttctcttctcttctcttctccgcacagcatcactgcctccggccgtgtcgagcaaaccaaaccaaaatctcctgagttgtctcgctcgcctcatcaatccttggcgtcgctagcttcatctggaggcgaggaggcggacggtttgaacccgatcatggatatggcgcacgagagggactcgagcagcgaggaggaggtgatggccggcgacctccgccgcgggccgtggacggtggaggaggacatcctgctcgtcaactacatcgccgctcacggcgagggccgctggaactcgctcgcccgatcagcaggtctgaagcgcaccggcaagagctgccgcctcaggtggctcaactacctccgccccgacctccggcgcggcagcatcaccccgcaggagcagctgctcatcctcgagctgcactcgcggtggggcaaccgctggtccaagatcgcgcagcacctccccgggcgcaccgacaacgagatcaagaactactggcgcacgcgcgtgcagaagcacgccaagcagctcaagtgcgacgtcaacagccagcagttcaaggacgtcatgcgctacctctggatgccccgcctcgtcgagcgcatccaggccgccgccacggccgacgcggtgcaggccgccgctgacacgcccctgtcgtggcagcacggcgccgacgacgctctctacgagtcaccggagctccctgtcgacgcgtgctggccaacggagtacgccgccgtggccggcgggcagctgcccaacgcctcggtcgcggagctgtcgagcactactaccgccggctcttcctcgccgtccaccacggactctggcgccggcgcccagcccagctggcctgcagcagtcgacggtgccgagtggttcaccaccgcctgcgacgcctccagcgccgccgccaccatatgcgacacggaccagctgatccagcagcaggcaccgtcccagcccgcgggtgcgtggacgtccgagccgctgccgagcctcgggttccccgagctgggcgtcgcggacttcgagatgggcagcttcgacgtagacagcatctggagcatggacgacttgtggaacacgcagccgcagttcgtgtgaaaagtcaagacggtggcatggaaatcctcagctgcgacggtgcccgcgggggggcgtgcggcctccgggtccggggacgcgtagcagatccagcggagggaaacggattagaagaagaaggagaggaaccacctgggactgggaggattaaaacaagactaatttaccctgcacgtgaagatctcccggcctgttctgctccagttctgcgccgtcttgtctcctgtgttaatttattactacgtacaagggtaaacagatacgtaaaagtgtagcagaagcagatgatctactagtgttagctgtgccgccgttaattatgctatgttccgtttaatcttactcattcttttcgagtgattactactacatatttaagtacaaaaaaaaaaaaaaaaaagcttatcgataccgtcgacctcgagggggggcccgg

SEQ ID NO: 30203 - protein, 381 aa, Triticum aestivum
HSHPANTLLFPSLLFSSPHSITASGRVEQTKPKSPELSRSPHQSLASLASSGGEEADGLNPIMDMAHERDSSSEEEVMAGDLRRGPWTVEEDILLVNYIAAHGEGRWNSLARSAGLKRTGKSCRLRWLNYLRPDLRRGSITPQEQLLILELHSRWGNRWSKIAQHLPGRTDNEIKNYWRTRVQKHAKQLKCDVNSQQFKDVMRYLWMPRLVERIQAAATADAVQAAADTPLSWQHGADDALYESPELPVDACWPTEYAAVAGGQLPNASVAELSSTTTAGSSSPSTTDSGAGAQPSWPAAVDGAEWFTTACDASSAAATICDTDQLIQQQAPSQPAGAWTSEPLPSLGFPELGVADFEMGSFDVDSIWSMDDLWNTQPQFV

SEQ ID NO: 30204 - protein, 319 aa, Triticum aestivum
MDMAHERDSSSEEEVMAGDLRRGPWTVEEDILLVNYIAAHGEGRWNSLARSAGLKRTGKSCRLRWLNYLRPDLRRGSITPQEQLLILELHSRWGNRWSKIAQHLPGRTDNEIKNYWRTRVQKHAKQLKCDVNSQQFKDVMRYLWMPRLVERIQAAATADAVQAAADTPLSWQHGADDALYESPELPVDACWPTEYAAVAGGQLPNASVAELSSTTTAGSSSPSTTDSGAGAQPSWPAAVDGAEWFTTACDASSAAATICDTDQLIQQQAPSQPAGAWTSEPLPSLGFPELGVADFEMGSFDVDSIWSMDDLWNTQPQFV

SEQ ID NO: 30205 - protein, 317 aa, Triticum aestivum
MAHERDSSSEEEVMAGDLRRGPWTVEEDILLVNYIAAHGEGRWNSLARSAGLKRTGKSCRLRWLNYLRPDLRRGSITPQEQLLILELHSRWGNRWSKIAQHLPGRTDNEIKNYWRTRVQKHAKQLKCDVNSQQFKDVMRYLWMPRLVERIQAAATADAVQAAADTPLSWQHGADDALYESPELPVDACWPTEYAAVAGGQLPNASVAELSSTTTAGSSSPSTTDSGAGAQPSWPAAVDGAEWFTTACDASSAAATICDTDQLIQQQAPSQPAGAWTSEPLPSLGFPELGVADFEMGSFDVDSIWSMDDLWNTQPQFV

SEQ ID NO: 30206 - DNA, 456 bp, Triticum aestivum
cacagatcaaattcactgatcactctatcctaaggattgttcaaatattgggtcgatatggaaactggaaacgtgttctgcaagttgttgaatggcttcaatcacgtgaaagattcaagtcctacaagagcaggtatatttatacaacagtccttgatgttcttgggaaggcaaagagacctttcgaggcattgaatgtattttacaccatgctggaccaattatcttcttatcctgacattgcagcttatcattgtattgctgtgactctcgggcaagctggtcttgtgaaagaactatttgatgtgattgattgcatgcgttcccctcctaggaagaagtttatggtgggtcctgttcagaattgggatcctcggttggaaccagacctcatcgtatacaatgcggttttgaatgcttgcgttcaacaaaagcagtgggaagggacattctggg

SEQ ID NO: 30207 - protein, 151 aa, Triticum aestivum
QIKFTDHSILRIVQILGRYGNWKRVLQVVEWLQSRERFKSYKSRYIYTTVLDVLGKAKRPFEALNVFYTMLDQLSSYPDIAAYHCIAVTLGQAGLVKELFDVIDCMRSPPRKKFMVGPVQNWDPRLEPDLIVYNAVLNACVQQKQWEGTFW

SEQ ID NO: 30208 - protein, 82 aa, Triticum aestivum
MLDQLSSYPDIAAYHCIAVTLGQAGLVKELFDVIDCMRSPPRKKFMVGPVQNWDPRLEPDLIVYNAVLNACVQQKQWEGTFW

SEQ ID NO: 30209 - DNA, 1393 bp, Triticum aestivum
aaaaataggctcgtggcaaatctggtctaccagtcgccccctcacccacccaacccgcccacggagaaaaatcccccaggaagaagaaattccacgctgctgccattccgacgatgcgccgcgccgccgtcgccgtcaccgccgcgctcctcctcctcctcgtcgccggcgcagctgcgggctcccccggcgcggagcccacctgcccgcggggcgccggcccgccgttcctcgacgcgctcggatcgcggtgcccccgcggcgcccggatcgtgccctccccgcccctcgaggtcagaggagatgctgttgataaagaattgaaccttcgctgtaccggtgcctcatgctccattctcttctatgccgcatggtgtcctttctcgagcaaatttcgaccaatatttgaagctctcagcaccatgttccctcagatacatcactttgctgtcgaagaatcttctgcgacgcctagtttgttttcaagatatggtgtccgtggcttcccagccattcttctggcaagtgagactacaatggttcgttacaggggcacaaaagatctgaagtctctggttcagttctatcaagagactacaggcctcgacccaattacatatattgatgttgatcagcaagagagcactggaagtttaggatcagccatgccaggaggccgctctctgcgcaaaatggcgaaagacgagccctttctgtttcttggagccctttttataatcatgaagatcgcggcacacttcgtccccactgtcatctcccaactgagagccttcttgattgtgcgtgttcagaacttgaacttaagaatctgtaggggatcaagccaacttatggaacgggcattgactgtgcttgatgttcagaggctctggagcaagcttagactgagcagtaagacaagggacctaagtaaaggggcgagtaatgctcgagcttgggcttcgtcgtttgcgtccgtctcactgggtgaaccatcctccttacggcatgcctagcctcttcctcatgatgctggtcgatagtctagctgctgatatatggcccaaaattgtttggtcttgcttccccatcctgctatgtacgtgcatccgcgcatgtggggacccaggaatgtaaattttcaggatctcatcttgttgtatataggaacgcgttttcgctttgctgacgcgatagctgatctctgacctttgtttcagttaactctttgatgtatggtgaagatctgagtatttcttcgatctctttcggttgctgttagaatttggctttgctatgtcgcccttgcctgcgccagcttaaatcctgggccgccgactcctgctctgaattgtaaaactgtcttgatttttattcacaccatgctgtttgg

SEQ ID NO: 30210 - protein, 300 aa, Triticum aestivum
MRRAAVAVTAALLLLLVAGAAAGSPGAEPTCPRGAGPPFLDALGSRCPRGARIVPSPPLEVRGDAVDKELNLRCTGASCSILFYAAWCPFSSKFRPIFEALSTMFPQIHHFAVEESSATPSLFSRYGVRGFPAILLASETTMVRYRGTKDLKSLVQFYQETTGLDPITYIDVDQQESTGSLGSAMPGGRSLRKMAKDEPFLFLGALFIIMKIAAHFVPTVISQLRAFLIVRVQNLNLRICRGSSQLMERALTVLDVQRLWSKLRLSSKTRDLSKGASNARAWASSFASVSLGEPSSLRHA

SEQ ID NO: 30211 - protein, 197 aa, Triticum aestivum
MFPQIHHFAVEESSATPSLFSRYGVRGFPAILLASETTMVRYRGTKDLKSLVQFYQETTGLDPITYIDVDQQESTGSLGSAMPGGRSLRKMAKDEPFLFLGALFIIMKIAAHFVPTVISQLRAFLIVRVQNLNLRICRGSSQLMERALTVLDVQRLWSKLRLSSKTRDLSKGASNARAWASSFASVSLGEPSSLRHA

SEQ ID NO: 30212 - protein, 159 aa, Triticum aestivum
MVRYRGTKDLKSLVQFYQETTGLDPITYIDVDQQESTGSLGSAMPGGRSLRKMAKDEPFLFLGALFIIMKIAAHFVPTVISQLRAFLIVRVQNLNLRICRGSSQLMERALTVLDVQRLWSKLRLSSKTRDLSKGASNARAWASSFASVSLGEPSSLRHA

SEQ ID NO: 30213 - DNA, 1361 bp, Triticum aestivum
tctggctcatggccgtcggcaccgtcctctgcgcgtcctactggtcagcttggagcgctagagaagccgttaccgaacaggagaagctcctgaaggatggacatgaagtctcactgaccgttgagggtggaggttctagtggcatcgtggacatcaacgtgatatcggcgatgatgtttgttgtggtcgcgtcgtcttcctgataatgctttacaagctcatgtctgcctggtttatcgatctactagttgtgatcttctgcatcggcggtgtagagggcctgcaaacatgcttggtggctatattatcaagatggtttacatctgctgcgggatcttttgtgaaagtgcccttctttggagcaatctcatacctgacaatggcggtatccccgttttgcgtcgtgtttgctgttctgtgggctatttaccgtcagttcccctatgcttggatcgcccaagacatccttggcattgcgctgatagtcactgtcatccagatcgtgagagtacctaacctcaaggttggttcagtccttctgagctgtgcgttcctgtacgacatcttctgggtattcgtctccaagagtttgtttcacgaaagcgtgatgatcgccgttgcgcgcggtgacaataccgacgaggacggtgtgccgatgctgctaaagatcccgcggatgttcgacccgtggggcgggtacagcatcattgggtttggcgacatccttcttcctggcctggtcgttgcatttgcgttaaggtatgactgggctgcgaagaagaagagcctgcgatccggctacttcctgtggtcagcgtcggcctacggcaccgggctcctgatcacatacgtggcgctgaacctgatggacgggcatgggcagccggcgctgctctacatcgtgcctttcaccctagggacgctgatgtcgctggggtggaagcgtggggagctgcggaacctgtggttcaagggggagccggagcgcgtgtgcacccatcaggatcagggctacgtgcagatggccaagcctccggctgctgctgctgaggatgaggatgatgatgaggatgccgaggagggcaagaacacaccaggtgcatcaccggggccatcttgctcttcttagagagagagagacagacagacttgtgggtggcttggctgcaaatgtgttgtcactgcagtctgtaagagatagtaattatcagtaacttgtatgtatgtatgtatgtatgtatgtatgtattgccgcctggtaaatgatgaagggacgtcgcctgtaatgtgatgtgatgcaatgcaaacatctgtagctcccatttcgcatgacaaggaaagaaaaggaacacatttgcatg

SEQ ID NO: 30214 - protein, 307 aa, Triticum aestivum
MLYKLMSAWFIDLLVVIFCIGGVEGLQTCLVAILSRWFTSAAGSFVKVPFFGAISYLTMAVSPFCVVFAVLWAIYRQFPYAWIAQDILGIALIVTVIQIVRVPNLKVGSVLLSCAFLYDIFWVFVSKSLFHESVMIAVARGDNTDEDGVPMLLKIPRMFDPWGGYSIIGFGDILLPGLVVAFALRYDWAAKKKSLRSGYFLWSASAYGTGLLITYVALNLMDGHGQPALLYIVPFTLGTLMSLGWKRGELRNLWFKGEPERVCTHQDQGYVQMAKPPAAAAEDEDDDEDAEEGKNTPGASPGPSCSS

SEQ ID NO: 30215 - protein, 302 aa, Triticum aestivum
MSAWFIDLLVVIFCIGGVEGLQTCLVAILSRWFTSAAGSFVKVPFFGAISYLTMAVSPFCVVFAVLWAIYRQFPYAWIAQDILGIALIVTVIQIVRVPNLKVGSVLLSCAFLYDIFWVFVSKSLFHESVMIAVARGDNTDEDGVPMLLKIPRMFDPWGGYSIIGFGDILLPGLVVAFALRYDWAAKKKSLRSGYFLWSASAYGTGLLITYVALNLMDGHGQPALLYIVPFTLGTLMSLGWKRGELRNLWFKGEPERVCTHQDQGYVQMAKPPAAAAEDEDDDEDAEEGKNTPGASPGPSCSS

SEQ ID NO: 30216 - protein, 249 aa, Triticum aestivum
MAVSPFCVVFAVLWAIYRQFPYAWIAQDILGIALIVTVIQIVRVPNLKVGSVLLSCAFLYDIFWVFVSKSLFHESVMIAVARGDNTDEDGVPMLLKIPRMFDPWGGYSIIGFGDILLPGLVVAFALRYDWAAKKKSLRSGYFLWSASAYGTGLLITYVALNLMDGHGQPALLYIVPFTLGTLMSLGWKRGELRNLWFKGEPERVCTHQDQGYVQMAKPPAAAAEDEDDDEDAEEGKNTPGASPGPSCSS

SEQ ID NO: 30217 - DNA, 271 bp, Triticum aestivum
catcattctgccgtgctgtccttgtcaaggatgatttcggaaggaacttgaattggatcttgacctaccggcagtgttgctgatgggaggtggagagggcatgggtcctgtaaagaagaccgcgaaagcccttggagatgcattgtttgacaaagagcttggaaaaccaatcgggcagcttgttgtcatctgtggtcggaacaaaacactgagctcctcattgcaggctcttgaatggaaaatgccaataaagattaggggattcgagacc

SEQ ID NO: 30218 - protein, 63 aa, Triticum aestivum
MGGGEGMGPVKKTAKALGDALFDKELGKPIGQLVVICGRNKTLSSSLQALEWKMPIKIRGFET

SEQ ID NO: 30219 - protein, 57 aa, Triticum aestivum
MGPVKKTAKALGDALFDKELGKPIGQLVVICGRNKTLSSSLQALEWKMPIKIRGFET

SEQ ID NO: 30220 - DNA, 914 bp, Triticum aestivum
cctcaattattgctaagcgtctccccatccgcccctcatctcctccccatccgcccccatctcccttcctccacccctccacggcggctctccattggtaatggcgatggcggcgtcgtggtgggcgctgctggcggcggcggcggttgtggcggcggcggggtgcggcgaggcggcgcccacggcggcggcggaggcggcgcacgacgtgctgcagacccacggcctcccgcgcgggctgctccctgcggggatcgcggcgttctcgcacgacccggccaccggccggttcgaggcggtcctggagtccccctgcacgtcgcgcaccgaggtcggcctgcggtacaacatcaccgtggcggggcagatcagctatggccggatcgccgagctctccggggtggacgctcaggacctatttctctggttcgccgtgcgcagcatccgcgtggacgtgccctcctccggcgtcatctacttcgatgtgggcgtggtctacaagcacttcccgctgtcgttcttcgaggcgccgccgccgtgcgtgcccaccccgctcatcctcctgcaaccacatcagattaggggcgacggatcggtggtggaagacggcgccgcgttgcaacaatgatgggacggattccatgatttcatcgtggagacgcaaaccagaaatcgcagttttgagaggtgatcggccggccggcgggcggacggccggctagtgtgcagatagatagacgtggtcattcattgtgtttgctactcgtcacctcatcactctgttcctgtcgtcgttcttgtcctctgcggccaaagtcaatcggcggccggcgggagctgcctgcgtgtactcctccggcgtccggccgactgtcatatttttcacggtaatggatgatgtgtagtgtatatgc

SEQ ID NO: 30221 - protein, 193 aa, Triticum aestivum
PQLLLSVSPSAPHLLPIRPHLPSSTPPRRLSIGNGDGGVVVGAAGGGGGCGGGGVRRGGAHGGGGGGARRAADPRPPARAAPCGDRGVLARPGHRPVRGGPGVPLHVAHRGRPAVQHHRGGADQLWPDRRALRGGRSGPISLVRRAQHPRGRALLRRHLLRCGRGLQALPAVVLRGAAAVRAHPAHPPATTSD

SEQ ID NO: 30222 - protein, 175 aa, Triticum aestivum
MAMAASWWALLAAAAVVAAAGCGEAAPTAAAEAAHDVLQTHGLPRGLLPAGIAAFSHDPATGRFEAVLESPCTSRTEVGLRYNITVAGQISYGRIAELSGVDAQDLFLWFAVRSIRVDVPSSGVIYFDVGVVYKHFPLSFFEAPPPCVPTPLILLQPHQIRGDGSVVEDGAALQQ

SEQ ID NO: 30223 - protein, 173 aa, Triticum aestivum
MAASWWALLAAAAVVAAAGCGEAAPTAAAEAAHDVLQTHGLPRGLLPAGIAAFSHDPATGRFEAVLESPCTSRTEVGLRYNITVAGQISYGRIAELSGVDAQDLFLWFAVRSIRVDVPSSGVIYFDVGVVYKHFPLSFFEAPPPCVPTPLILLQPHQIRGDGSVVEDGAALQQ

SEQ ID NO: 30224 - DNA, 716 bp, Triticum aestivum
acaacagcaaaccaaatcccccaagaccaaaaaaggccccagcaacccaagcgcgtcgaccccatccacagttgaatctctgagtttactttcagagaagattttagtcgagatggcgcaggcgatcgaggctcagagggagggcgcggaggtgtaccacggcgcggcgctgtgcgcggagaaggcggtggagctgctggccgagaccaacatgccgctgggcctgctgccgctggcagacatcgaggaggtgggctacaaccgcgccaccggcttcgtctggctgcgccagaagaaggcgctcacgcacaccttcaagcagatcgggcggcaggtctcgtacggcaccgaggtgacggccttcgtcgaggaccgcaagatgaagcgcatgaccggggtcaagagcaaggagctcctcatctggatcaccctctgcgacatgtacatcgagaaggacgatccctccaagatcaccttcaagacgcccacagggctggggaggaccttccccgtctccgccttcgagaagcaggacgacggcaaggccaaggccgcggctgccgacggcaaggaggccgtcgtggccaagtaggtgaggacggccggcatactctacaaagtttggatgaagagtcctcgagtccaatattaactatatacaaagtttggatgaagagtactatttgcttttatctttataataaactacggattat

SEQ ID NO: 30225 - protein, 196 aa, Triticum aestivum
QQQTKSPKTKKGPSNPSASTPSTVESLSLLSEKILVEMAQAIEAQREGAEVYHGAALCAEKAVELLAETNMPLGLLPLADIEEVGYNRATGFVWLRQKKALTHTFKQIGRQVSYGTEVTAFVEDRKMKRMTGVKSKELLIWITLCDMYIEKDDPSKITFKTPTGLGRTFPVSAFEKQDDGKAKAAAADGKEAVVAK

SEQ ID NO: 30226 - protein, 159 aa, Triticum aestivum
MAQAIEAQREGAEVYHGAALCAEKAVELLAETNMPLGLLPLADIEEVGYNRATGFVWLRQKKALTHTFKQIGRQVSYGTEVTAFVEDRKMKRMTGVKSKELLIWITLCDMYIEKDDPSKITFKTPTGLGRTFPVSAFEKQDDGKAKAAAADGKEAVVAK

SEQ ID NO: 30227 - protein, 126 aa, Triticum aestivum
MPLGLLPLADIEEVGYNRATGFVWLRQKKALTHTFKQIGRQVSYGTEVTAFVEDRKMKRMTGVKSKELLIWITLCDMYIEKDDPSKITFKTPTGLGRTFPVSAFEKQDDGKAKAAAADGKEAVVAK

SEQ ID NO: 30228 - DNA, 512 bp, Triticum aestivum
acaaaacaacagctagctggccatcgagatcaccaacgcacgtacagagacctcatcacgtctttccagttcacaggccgttgtcaagaatgaaggtgaagcccggcacggagccagccaccggcgtccccgtcggcggcgcacccggctcccctaccgcctggtcctccaccggcgtccccgtcggcggcgcacccggcgcccccaccgcctggtcctccggcctcttcgactgcttcgacgactgcggcctctgttgcttgacttgctgctgcccgtgcatcacgttcggcaaggtagcggagatcgtggaccggggtgctacgtcgtgcgggacgagcggcgcgctctacgtgctgctggcgtcgctcacggggtgccactggatctactcctgcacctaccgctccaagatgcgcgcccagtacgcgctcccggacgcgccctgctgcgactgctgcgtgcactactgctgcgtgtttaaacacaataaagttggaacgggagggggg

SEQ ID NO: 30229 - protein, 170 aa, Triticum aestivum
KTTASWPSRSPTHVQRPHHVFPVHRPLSRMKVKPGTEPATGVPVGGAPGSPTAWSSTGVPVGGAPGAPTAWSSGLFDCFDDCGLCCLTCCCPCITFGKVAEIVDRGATSCGTSGALYVLLASLTGCHWIYSCTYRSKMRAQYALPDAPCCDCCVHYCCVFKHNKVGTGGG

SEQ ID NO: 30230 - protein, 141 aa, Triticum aestivum
MKVKPGTEPATGVPVGGAPGSPTAWSSTGVPVGGAPGAPTAWSSGLFDCFDDCGLCCLTCCCPCITFGKVAEIVDRGATSCGTSGALYVLLASLTGCHWIYSCTYRSKMRAQYALPDAPCCDCCVHYCCVFKHNKVGTGGG

SEQ ID NO: 30231 - DNA, 957 bp, Triticum aestivum
cttttcacatacttacattgcaagaacttgagaaatggtcccatttggtcttctggcatgggtttgacactacgcttcggccttgcttagtaatccgtcttggactcgcgtgctctagtatagcccctcgtgatagaccttgttttgggcaagcagtagtttctcagattgaccatggtattatacatttgaccaacgaagaagatcccagaattactgttttgctggattgccacgggatttctccattcaaatttccgatgcaaatgatgaggtcatttgtcaacttggttcaagaaaactacccaaatcgtcttggagtattaattgttgtccgtcttcctccagttgtcagagttattgcacagacttttattcaactcctgaaaccatccacaaagcagaagctgcgtttcgagggggaatcgtacaagaagacgttagccgagttcttacagattgtgccagcttttcttggtggcaaatgcaactgctcacgatgcaagaagcctcgcgacagttcactaatccaagcaggggaggggagcaggagcaggagccttaccagcgctggctccagatcaccagtctcggacatggacttcgacgaggaactggaggagcttccatccccttacaactgcgagaacgcgataagggctgcggtggtcggccttctgatggtgtggatcttcgtcgcgtttctcgctgggatgaacgacccccagtccatgtcttagcctcccgagtctctgtctcccgacggttcattgtctgccagtgccagtagcgtagcgttactgtatgttgtttctttgaggttgacggtatgttgtttctcgcaccagttcttcttccgaatttcctctgctagccggcgtatagtgtggtgctgtgccggccgcaagatttatatagtagatatgaataaagttgtgcgtgtattcagcatggttc

SEQ ID NO: 30232 - protein, 245 aa, Triticum aestivum
FHILTLQELEKWSHLVFWHGFDTTLRPCLVIRLGLACSSIAPRDRPCFGQAVVSQIDHGIIHLTNEEDPRITVLLDCHGISPFKFPMQMMRSFVNLVQENYPNRLGVLIVVRLPPVVRVIAQTFIQLLKPSTKQKLRFEGESYKKTLAEFLQIVPAFLGGKCNCSRCKKPRDSSLIQAGEGSRSRSLTSAGSRSPVSDMDFDEELEELPSPYNCENAIRAAVVGLLMVWIFVAFLAGMNDPQSMS

SEQ ID NO: 30233 - protein, 159 aa, Triticum aestivum
MQMMRSFVNLVQENYPNRLGVLIVVRLPPVVRVIAQTFIQLLKPSTKQKLRFEGESYKKTLAEFLQIVPAFLGGKCNCSRCKKPRDSSLIQAGEGSRSRSLTSAGSRSPVSDMDFDEELEELPSPYNCENAIRAAVVGLLMVWIFVAFLAGMNDPQSMS

SEQ ID NO: 30234 - protein, 157 aa, Triticum aestivum
MMRSFVNLVQENYPNRLGVLIVVRLPPVVRVIAQTFIQLLKPSTKQKLRFEGESYKKTLAEFLQIVPAFLGGKCNCSRCKKPRDSSLIQAGEGSRSRSLTSAGSRSPVSDMDFDEELEELPSPYNCENAIRAAVVGLLMVWIFVAFLAGMNDPQSMS

SEQ ID NO: 30235 - DNA, 808 bp, Triticum aestivum
aacatcctaatcgaaaaacaccacacgcaacgcaagccttcgcacccgaacgcaagaaagagagagagagagagagagagagcacacgcggcgggggaaaagcaggagcgaagcgagggatcgggaggaacatcggcgaggccatggcgcggcggggcacggaggcgttcccggacctgggcgcgcactgcgacagggaggactgcaaccagctcgacttcctgcccttcgactgcaacggctgcggcaaggtgttctgcacggagcaccgcgcgtacgttgaccacggctgcccgctcgcggccgacaacggccgcaccgtcgtcgtctgcgaggcctgcggcgactccatcgagcgcgccgggtcggacgagacggatgcgcagatcctcgagaagcacgcgcggtcgcgccggggctgcgacccggccaggaagctcaagccgcgatgccccgcgcggcgctgcaaggagacactcaccttctccaacacgagccactgcaaggagtgcgggcagaagctgtgcctcaagcaccggttccccgaggaccacgggtgctcgcgcgtgtcgccggtgggggccgccgccgccgcgaggagggccggcgactgcggccgcgacgcgcagaagacaaaggacggcggtgggtgggcgctgccgccgttgatccggaatttcaattgattaccctgaagctgaaattgtggctgggatttacgcaattcatggaacgtttgttttctccggtgtcatattttcaattgtgcacattttgttgttgttaaatgaagaatcaaattcagtct

SEQ ID NO: 30236 - protein, 227 aa, Triticum aestivum
HPNRKTPHATQAFAPERKKERERERESTRGGGKAGAKRGIGRNIGEAMARRGTEAFPDLGAHCDREDCNQLDFLPFDCNGCGKVFCTEHRAYVDHGCPLAADNGRTVVVCEACGDSIERAGSDETDAQILEKHARSRRGCDPARKLKPRCPARRCKETLTFSNTSHCKECGQKLCLKHRFPEDHGCSRVSPVGAAAAARRAGDCGRDAQKTKDGGGWALPPLIRNFN

SEQ ID NO: 30237 - protein, 222 aa, Triticum aestivum
NILIEKHHTQRKPSHPNARKRERERERAHAAGEKQERSEGSGGTSARPWRGGARRRSRTWARTATGRTATSSTSCPSTATAAARCSARSTARTLTTAARSRPTTAAPSSSARPAATPSSAPGRTRRMRRSSRSTRGRAGAATRPGSSSRDAPRGAARRHSPSPTRATARSAGRSCASSTGSPRTTGARACRRWGPPPPRGGPATAAATRRRQRTAVGGRCRR

SEQ ID NO: 30238 - protein, 180 aa, Triticum aestivum
MARRGTEAFPDLGAHCDREDCNQLDFLPFDCNGCGKVFCTEHRAYVDHGCPLAADNGRTVVVCEACGDSIERAGSDETDAQILEKHARSRRGCDPARKLKPRCPARRCKETLTFSNTSHCKECGQKLCLKHRFPEDHGCSRVSPVGAAAAARRAGDCGRDAQKTKDGGGWALPPLIRNFN

SEQ ID NO: 30239 - DNA, 634 bp, Triticum aestivum
ctagaacatcctaatcgaaaaaccccaccccacctcgcccccttcccctcccccttcgccgccgcccgtctccgacgctccatcagcgccgacagccgccccctctccgctccgagagcctcgatcgagaagcggcgccggcggacatgggccagatccagtactccgagaagtacttcgacgacaccttcgagtacaggcacgtggtcctcccgccggaagtcgccaagctgctccccaagaaccgcctcctcgccgagaacgagtggcgcgcgctgggcgtgcagcagagccgcgggtgggtgcactacgccgtccaccggccggagccgcacatcatgctgttccgccgcccactcaactaccagcagcagcaggacgcggcggccgccgccgcggcgcagatgatgcccaagtgatcggccccggcgagggcagtggcgaccggggttggaactcctgaaaaccccaggcccttttcatctctaaaagggcggtcgcactggtttgtctgatcaggatctagttgtgttggtggtgtccaccatgtgttcgtggaaatgcctgggaggaacttgcagtgtgttagtctgtgttattatcctggataatcttgaatgctacctgttatgtt

SEQ ID NO: 30240 - protein, 135 aa, Triticum aestivum
LEHPNRKTPPHLAPFPSPFAAARLRRSISADSRPLSAPRASIEKRRRRTWARSSTPRSTSTTPSSTGTWSSRRKSPSCSPRTASSPRTSGARWACSRAAGGCTTPSTGRSRTSCCSAAHSTTSSSRTRRPPPRRR

SEQ ID NO: 30241 - protein, 90 aa, Triticum aestivum
MGQIQYSEKYFDDTFEYRHVVLPPEVAKLLPKNRLLAENEWRALGVQQSRGWVHYAVHRPEPHIMLFRRPLNYQQQQDAAAAAAAQMMPK

SEQ ID NO: 30242 - DNA, 1078 bp, Triticum aestivum
atcctcccctcgccccctccctgctccgcacgacgcgaagccgatcggggccgtactgctcgcctgcccacctccgccggagaggagcaggaagaggagcaatcgcccgtaccgggcctgccgccatggcgcgcagcggagggggctgctgcccctccatggatctgatgcggtcggaggcgatgcagctcctgcaggtcatcatccccaccgagtccgcgcacctcgccgtctcccacctcggcgatctgggcctcatccagttcaaagacctcaacgcagacaagagcccgtttcaacgcacctatgctgcccagatcaaaaggtgtgccgaaatggcccgcaagctgcgattttttaaggaacaaatgtcgaaagctggaatactagtttctcctatgcaatcaaccgaaactcctctggattttgatgacatggaggtaaagcttggagaactggaagctgaactaactgaagtaaatgcaaacgatgaaaaattacaacgggcccacaatgagctactggagtacagtactgttcttcaaaaggctggtgagtttttctattcagctcaaagaagcgctgcagcacaacacaggcaaatggaagcaaatcagtctggtgagacttccctggagagtcctctgttggagcaggatatgttaacagatgcatcgaaacaagtgaaacttggctctttgagtggtcttgtgccaaaggaaaaggccatggcttttgaacgtatcttattccgtgccacaaggggcaacattttgctcagacaggagtctgttgatgaacctgtcactgatccgcaatccggagaaaaggtgtacaaaaatacatttgtcgtattctactctggggagagggcaaaggccaaaattctgaagatatgtgatgcttttcgtgcaaaccgttacccttttcctgaagaccttgctaaacaaacacatactgttcaggaggtatctggaaagatatcagagttaaaggcaacaattgacatgggattagctcatcgtgacagtatactcaaaactattgcatcagagtttgagcattggaaccatctggc

SEQ ID NO: 30243 - protein, 358 aa, Triticum aestivum
PPLAPSLLRTTRSRSGPYCSPAHLRRRGAGRGAIARTGPAAMARSGGGCCPSMDLMRSEAMQLLQVIIPTESAHLAVSHLGDLGLIQFKDLNADKSPFQRTYAAQIKRCAEMARKLRFFKEQMSKAGILVSPMQSTETPLDFDDMEVKLGELEAELTEVNANDEKLQRAHNELLEYSTVLQKAGEFFYSAQRSAAAQHRQMEANQSGETSLESPLLEQDMLTDASKQVKLGSLSGLVPKEKAMAFERILFRATRGNILLRQESVDEPVTDPQSGEKVYKNTFVVFYSGERAKAKILKICDAFRANRYPFPEDLAKQTHTVQEVSGKISELKATIDMGLAHRDSILKTIASEFEHWNHL

SEQ ID NO: 30244 - protein, 317 aa, Triticum aestivum
MARSGGGCCPSMDLMRSEAMQLLQVIIPTESAHLAVSHLGDLGLIQFKDLNADKSPFQRTYAAQIKRCAEMARKLRFFKEQMSKAGILVSPMQSTETPLDFDDMEVKLGELEAELTEVNANDEKLQRAHNELLEYSTVLQKAGEFFYSAQRSAAAQHRQMEANQSGETSLESPLLEQDMLTDASKQVKLGSLSGLVPKEKAMAFERILFRATRGNILLRQESVDEPVTDPQSGEKVYKNTFVVFYSGERAKAKILKICDAFRANRYPFPEDLAKQTHTVQEVSGKISELKATIDMGLAHRDSILKTIASEFEHWNHL

SEQ ID NO: 30245 - protein, 306 aa, Triticum aestivum
MDLMRSEAMQLLQVIIPTESAHLAVSHLGDLGLIQFKDLNADKSPFQRTYAAQIKRCAEMARKLRFFKEQMSKAGILVSPMQSTETPLDFDDMEVKLGELEAELTEVNANDEKLQRAHNELLEYSTVLQKAGEFFYSAQRSAAAQHRQMEANQSGETSLESPLLEQDMLTDASKQVKLGSLSGLVPKEKAMAFERILFRATRGNILLRQESVDEPVTDPQSGEKVYKNTFVVFYSGERAKAKILKICDAFRANRYPFPEDLAKQTHTVQEVSGKISELKATIDMGLAHRDSILKTIASEFEHWNHL

SEQ ID NO: 30246 - DNA, 774 bp, Triticum aestivum
cctagcagaggaggcggcggaggcagagaaggagagcggcagctcgcgcgcgcgcgcccccattgccgccgcagcaggagcccgccgattccaatccaaggaggagctttgaaggtttgtcagggcggggaagatggttctcaagacagagctctgccgtttcagtggtgccaagatatacccagggaaggggatcagattcatccgctcagactctcaagtcttccttttctccaactcaaagtgcaagagctacttccacaaccgtctcaagccagctaagcttgcatggacggccatgtacaggaagcagcacaagaaggatattcatgctgaggctgcaaagaagaggcgccgcaccaccaagaggccgtattccaggtcaattgtaggtgcttcccttgaagttatccagaagaagagagctgagaagccggaggtccgtgatgcagccagggaagcagctctgcgtgagatcaaggagcgcattaagaagaccaaggatgagaagaaagctaagaaggtggaggtgacgaaatcccagaagaccgccggcagaggcaatgcccccaaacccgggaaggcccccaagcttggcggtggtggtgggaagcgctaggtggcgtccctgccgatcaatgcgaaattttgaactagttacatgatgtcctaccctgtatcttttaggaagtttttggctcaaacctgctgttgccgtcggtatgcagcatctgggtgcataaaccgtcgtcaatgtgagattgttttatgctc

SEQ ID NO: 30247 - protein, 161 aa, Triticum aestivum
MVLKTELCRFSGAKIYPGKGIRFIRSDSQVFLFSNSKCKSYFHNRLKPAKLAWTAMYRKQHKKDIHAEAAKKRRRTTKRPYSRSIVGASLEVIQKKRAEKPEVRDAAREAALREIKERIKKTKDEKKAKKVEVTKSQKTAGRGNAPKPGKAPKLGGGGGKR

SEQ ID NO: 30248 - protein, 106 aa, Triticum aestivum
MYRKQHKKDIHAEAAKKRRRTTKRPYSRSIVGASLEVIQKKRAEKPEVRDAAREAALREIKERIKKTKDEKKAKKVEVTKSQKTAGRGNAPKPGKAPKLGGGGGKR

SEQ ID NO: 30249 - protein, 93 aa, Triticum aestivum
PSRGGGGGREGERQLARARPHCRRSRSPPIPIQGGALKVCQGGEDGSQDRALPFQWCQDIPREGDQIHPLRLSSLPFLQLKVQELLPQPSQAS

SEQ ID NO: 30250 - DNA, 1163 bp, Triticum aestivum
aatcgaaaaacttaacctttcttggtcttgaagcagagtaaaaagaaaaaaaaaagcttgggctaaaaagatggcgtctttgggtgtgtcggaaatgcttggtaagccccttaacttcagggcagtgtcaagaccgtctgctccattggcgtcaagtcccgccacgttcaagacagttgctctgttctccaagaagaagccagctcctcctcccaaggccaagaccgtctctgctgccaacgacgagctcgccaagtggtatggtcctgacaggagaatcttcttgccggatggtcttttggacagatcagaaatcccagagtacttgaacggtgaagttgctggagactatggttatgacccatttggacttggcaagaagcctgagaacttcgccaaataccaagcctttgaacttatccacgcgagatgggctatgttgggagcagctggttgcatcatccctgaagccttaaacaaatatggcgctaactgtggccctgaagctgtctggtttaagactggtgctctgcttcttgatggaaacacattgagctactttggcaagaacatcccaatcaaccttgttctcgctgtagttgctgaggttgttctccttggtggagctgagtactaccgaatcaccaacggcttggacttcgaagacaagcttcacccaggaggcccatttgaccctttgggacttgctaaagaccctgaacaaggagctcttctcaaggttaaagagatcaagaacgggagattggccatgttttccatgttcgctttcttcatccaagcttatgttaccggagaaggtcctgttgagaacctttcaaagcatctaagtgatcctttcggaaacaatttgcttaccgtcatcgctggtactgctgagagagctcccactctctaagacatttccattttaaggagcttcgaagatgctttgtacactttgtttgatgagagtttctgttgacattgtgaaaaaaacttccatctgcatcttcttgatatattccaatgttacttaattattgcttctaaggataaccatctgatggtgcgtttgcgtttagtcatatacatatttcatcatttggttttattttgcttttcagtgattatattattacagataaattatatcctaaactgtc

SEQ ID NO: 30251 - protein, 281 aa, Triticum aestivum
MASLGVSEMLGKPLNFRAVSRPSAPLASSPATFKTVALFSKKKPAPPPKAKTVSAANDELAKWYGPDRRIFLPDGLLDRSEIPEYLNGEVAGDYGYDPFGLGKKPENFAKYQAFELIHARWAMLGAAGCIIPEALNKYGANCGPEAVWFKTGALLLDGNTLSYFGKNIPINLVLAVVAEVVLLGGAEYYRITNGLDFEDKLHPGGPFDPLGLAKDPEQGALLKVKEIKNGRLAMFSMFAFFIQAYVTGEGPVENLSKHLSDPFGNNLLTVIAGTAERAPTL

SEQ ID NO: 30252 - protein, 273 aa, Triticum aestivum
MLGKPLNFRAVSRPSAPLASSPATFKTVALFSKKKPAPPPKAKTVSAANDELAKWYGPDRRIFLPDGLLDRSEIPEYLNGEVAGDYGYDPFGLGKKPENFAKYQAFELIHARWAMLGAAGCIIPEALNKYGANCGPEAVWFKTGALLLDGNTLSYFGKNIPINLVLAVVAEVVLLGGAEYYRITNGLDFEDKLHPGGPFDPLGLAKDPEQGALLKVKEIKNGRLAMFSMFAFFIQAYVTGEGPVENLSKHLSDPFGNNLLTVIAGTAERAPTL

SEQ ID NO: 30253 - protein, 159 aa, Triticum aestivum
MLGAAGCIIPEALNKYGANCGPEAVWFKTGALLLDGNTLSYFGKNIPINLVLAVVAEVVLLGGAEYYRITNGLDFEDKLHPGGPFDPLGLAKDPEQGALLKVKEIKNGRLAMFSMFAFFIQAYVTGEGPVENLSKHLSDPFGNNLLTVIAGTAERAPTL

SEQ ID NO: 30254 - DNA, 788 bp, Triticum aestivum
gccacgccacagaacgctcccggcctctctctgtttgctctcgcgtccgccgcgcccatcctcgtccgcgcctgcgccccgaccgtgctcgccgcctcccgcccgatccaccggtccaccaccgcgccggcggcatggcggatcagctcaccgacgaccagatcgccgagttcaaggaggccttcagcctcttcgacaaggacggagatggttgcatcaccaccaaggagctgggaacagtcatgcgttcgctggggcagaacccaacggaggctgagctccaggacatgatcaatgaagtcgacgctgatggcaatggcaccattgacttcccagagttcctcaacctgatggcccgcaagatgaaggacaccgactcagaggaggagctcaaggaggccttcagggtgttcgacaaggaccaaaacggcttcatctctgctgctgagctccgccacgtcatgacgaacctcggcgagaagctcaccgacgaggaggtggacgagatgatccgtgaagccgacgtcgacggtgatggccagatcaactatgaggagtttgtcaaggtcatgatggccaaatgagcacccaaccgtgctcccaagacaggaggagaattgtgcattgcatattagtttaagatgcaactcttatttgatcgatttccagttaagcatcctacctagctgtagctgctaaaacggatcggacgacgcaattcctgctatgttctccagtgtgtttccagacctcttgtgttttatgtgaacttgtgtcctccctggtgt

SEQ ID NO: 30255 - protein, 193 aa, Triticum aestivum
HATERSRPLSVCSRVRRAHPRPRLRPDRARRLPPDPPVHHRAGGMADQLTDDQIAEFKEAFSLFDKDGDGCITTKELGTVMRSLGQNPTEAELQDMINEVDADGNGTIDFPEFLNLMARKMKDTDSEEELKEAFRVFDKDQNGFISAAELRHVMTNLGEKLTDEEVDEMIREADVDGDGQINYEEFVKVMMAK

SEQ ID NO: 30256 - protein, 149 aa, Triticum aestivum
MADQLTDDQIAEFKEAFSLFDKDGDGCITTKELGTVMRSLGQNPTEAELQDMINEVDADGNGTIDFPEFLNLMARKMKDTDSEEELKEAFRVFDKDQNGFISAAELRHVMTNLGEKLTDEEVDEMIREADVDGDGQINYEEFVKVMMAK

SEQ ID NO: 30257 - protein, 113 aa, Triticum aestivum; identical to SEQ ID NO: 18979

SEQ ID NO: 30258 - DNA, 821 bp, Triticum aestivum
acaacccacgagctgtctgtcatccaaagcccaaagctacagacaacacttcaactcgcagtctggttcaggaaagagcagtagtaagatggagttccaagggcagcacgacaaccccgccaaccgcgtcgacgagtacggcaacccgttcccgctcggcggcgtcggaggagcgcacgccgctcccggcaccggcgggcagttccaggcccgcagggaggagcacaagaccggtgggatactgcatcggtccggcagctccagctccagctcgtcttcggaggacgacggcatgggcgggaggaagaagaagggaatgaaggagaagatcaaggagaagctccccggcggccacaaggacaaccagcagcacatggcgacggggacagggactggaggagcctacgggccgggaactggaactggtgcagcctacgggcagcaaggccacacaggaatggccggcgccggcactggcaccggcgagaagaagggaatcatggacaagatcaaggagaagctgtcgggacagcactgagccgccggctccggctggctgcttcctctgcatagctacgtgtcaaagccttccagttccacgtgatctttgttcaataataagatgaagctgaacgaaaagttgtctcttatcgcatccgtgtcagggacacttctctgcataaagcatgcgttgtgtttgttatgtttatgttgaaaaaaaattagtgtacgactatccctaaaaaaaatccctcaaaaaaaaaatagtgtacgactaaacttgtttctctctaaaggaaatcaggctctcctttctgttc

SEQ ID NO: 30259 - protein, 178 aa, Triticum aestivum
QPTSCLSSKAQSYRQHFNSQSGSGKSSSKMEFQGQHDNPANRVDEYGNPFPLGGVGGAHAAPGTGGQFQARREEHKTGGILHRSGSSSSSSSSEDDGMGGRKKKGMKEKIKEKLPGGHKDNQQHMATGTGTGGAYGPGTGTGAAYGQQGHTGMAGAGTGTGEKKGIMDKIKEKLSGQH

SEQ ID NO: 30260 - protein, 149 aa, Triticum aestivum
MEFQGQHDNPANRVDEYGNPFPLGGVGGAHAAPGTGGQFQARREEHKTGGILHRSGSSSSSSSSEDDGMGGRKKKGMKEKIKEKLPGGHKDNQQHMATGTGTGGAYGPGTGTGAAYGQQGHTGMAGAGTGTGEKKGIMDKIKEKLSGQH

SEQ ID NO: 30261 - protein, 105 aa, Triticum aestivum
NPRAVCHPKPKATDNTSTRSLVQERAVVRWSSKGSTTTPPTASTSTATRSRSAASEERTPLPAPAGSSRPAGRSTRPVGYCIGPAAPAPARLRRTTAWAGGRRRE

SEQ ID NO: 30262 - DNA, 904 bp, Triticum aestivum
atcaaaccaaaagtcgctcttctattctcctctcttcaaccacaatacagagaaaaacttcaagatcagaaatggctttccacctgagatcgataagtttgccatcaaggcctcaggccaaccagactgaagtcgagcaagaggtgctgagcctagaggcgagcatctcttcctccaccaccaccatcggcaccatgtgtgccggtctgaggaggctcggagacatctacaatggtgttgaagagattattggcctgccaagcaaccaggctggcaagatgttggattcagagatggaagtctctctcgagctgctagatctctgcagcaccatgcaagagatcttcgtcaagatgaaggccatcatccaagagctacaagtggctctaagaaaaggagatgatgtaactgctcaagccaagatccagtcttatgcccgtttggtgaagacggccaagaaacatttcaagaagagcgcgaagaaggctaatgctgtgtctgcgggttgcaagatggtcatgctattgaccaaggctagagagatttctgtgtctctgctggagtccacagtccatctcctgtcaaaggaaatcggaatgccaaaacagtctcttgtctcaaaggcatttcacaagaagaaggcagttgtctgccaggaggagcaattgcaggagttagagtgtagtattggagatctcgagaatggggtgggacatctgttcaggaaattagtccagatcagagtttctctcttgaacattcttagctcatagatgctccaagtcactctacaccctgtgattggcatccgcctttttgaggactagccggtcttcatacaattttgccatatgtatacagtacaaatgtacagaaacttagagaaagaaaaagtgaagttttg

SEQ ID NO: 30263 - protein, 256 aa, Triticum aestivum
QTKSRSSILLSSTTIQRKTSRSEMAFHLRSISLPSRPQANQTEVEQEVLSLEASISSSTTTIGTMCAGLRRLGDIYNGVEEIIGLPSNQAGKMLDSEMEVSLELLDLCSTMQEIFVKMKAIIQELQVALRKGDDVTAQAKIQSYARLVKTAKKHFKKSAKKANAVSAGCKMVMLLTKAREISVSLLESTVHLLSKEIGMPKQSLVSKAFHKKKAVVCQEEQLQELECSIGDLENGVGHLFRKLVQIRVSLLNILSS

SEQ ID NO: 30264 - protein, 233 aa, Triticum aestivum
MAFHLRSISLPSRPQANQTEVEQEVLSLEASISSSTTTIGTMCAGLRRLGDIYNGVEEIIGLPSNQAGKMLDSEMEVSLELLDLCSTMQEIFVKMKAIIQELQVALRKGDDVTAQAKIQSYARLVKTAKKHFKKSAKKANAVSAGCKMVMLLTKAREISVSLLESTVHLLSKEIGMPKQSLVSKAFHKKKAVVCQEEQLQELECSIGDLENGVGHLFRKLVQIRVSLLNILSS

SEQ ID NO: 30265 - protein, 192 aa, Triticum aestivum
MCAGLRRLGDIYNGVEEIIGLPSNQAGKMLDSEMEVSLELLDLCSTMQEIFVKMKAIIQELQVALRKGDDVTAQAKIQSYARLVKTAKKHFKKSAKKANAVSAGCKMVMLLTKAREISVSLLESTVHLLSKEIGMPKQSLVSKAFHKKKAVVCQEEQLQELECSIGDLENGVGHLFRKLVQIRVSLLNILSS

SEQ ID NO: 30266 - DNA, 920 bp, Triticum aestivum
tcatctcaaaccaacaccactctaactcaagcttatcgttcgcatctagcctctgtttgtagtcactccatcgggtgcatctagcctctggtggtagtacattcaaattgaggaagcaaagatagatatgctgctgtcaggcggcttctcctgggtgtaccttgctctgctgttggccttgctcaccttcaactccgtcatggcggtgtaccactccaagggcgacacggccactgtcgccttcgtcgccacctcctacctcgacctggtgctgctcttctgctgcctctggctctacaacacaacggcagcggggtcggcgtggaggaaccggctcaaggcgtcagtgtggactctcaccacgctgctcaccttctccttcgcctacatggtcatgggcacggctggcctcaccctccacgtcgcgttgctcgtgtggttcatcgccgcggcgacggggattggtgccttctccgccttcttcgagcagggcagaatcaacccagctccgggtgaacccatgctgccgccaccggtgtagcccaggctctgaatcactacggggatatgcttttgtgatgcattcagacgcatggagtttgccaggttgtgagcttacgatggagttcaaatactgttgggtcgccctcgtcttgtaaatatatttaccttgaaagcatgcaagagtccttgtagaatcgttgtccttgtcccttctaggggtgcacgcttaggtgtgtatgtgtgtagtgtgcaatgtaaccggcaacgaaataatgaattgcgtggttcagtaacaagcgtgtgatctcctatgtctctgcagtcctttactattttgaatcacacgcaaggcgccaaatttccttggcgccaaatttagtattccatgcggattcgcctttattctgcgataatct

SEQ ID NO: 30267 - protein, 137 aa, Triticum aestivum
MLLSGGFSWVYLALLLALLTFNSVMAVYHSKGDTATVAFVATSYLDLVLLFCCLWLYNTTAAGSAWRNRLKASVWTLTTLLTFSFAYMVMGTAGLTLHVALLVWFIAAATGIGAFSAFFEQGRINPAPGEPMLPPPV

SEQ ID NO: 30268 - protein, 113 aa, Triticum aestivum
MAVYHSKGDTATVAFVATSYLDLVLLFCCLWLYNTTAAGSAWRNRLKASVWTLTTLLTFSFAYMVMGTAGLTLHVALLVWFIAAATGIGAFSAFFEQGRINPAPGEPMLPPPV

SEQ ID NO: 30269 - DNA, 562 bp, Triticum aestivum
aaccgttagcaaccaaagaaaaaggagagtgcttagagacagcagaacatattatcatttcctctttttttttttttttttttgagttttaacaaatggcaacaaccactgtgatcatgaccactctcccccaattcagtggtcttagacctcaattctcagctgcccctgtgaagaacttggttgctgtccaacaacctatgaggcccaaggggaagggtgctttgggagctcgatgtgactacattggttcatccactaatctgattatggtggcttctacaaccctgatgctgtttgctggaaggtttggattggctccatcagcaaacaggaaagccactgcagggctaaagctggaggtgagggactcaggcttgcagactggtgaccctgctggcttcacccttgctgacaccttggcctgtggatctgttggccacatcattggggttggggttgtccttggtctcaagaacattggtgccctgtaaatgagcaactataatcaaatttagtgcttgttacatcagtaatcaatgttattatgtactttattttc

SEQ ID NO: 30270 - protein, 132 aa, Triticum aestivum
MATTTVIMTTLPQFSGLRPQFSAAPVKNLVAVQQPMRPKGKGALGARCDYIGSSTNLIMVASTTLMLFAGRFGLAPSANRKATAGLKLEVRDSGLQTGDPAGFTLADTLACGSVGHIIGVGVVLGLKNIGAL

SEQ ID NO: 30271 - protein, 125 aa, Triticum aestivum
MTTLPQFSGLRPQFSAAPVKNLVAVQQPMRPKGKGALGARCDYIGSSTNLIMVASTTLMLFAGRFGLAPSANRKATAGLKLEVRDSGLQTGDPAGFTLADTLACGSVGHIIGVGVVLGLKNIGAL

SEQ ID NO: 30272 - protein, 97 aa, Triticum aestivum
MRPKGKGALGARCDYIGSSTNLIMVASTTLMLFAGRFGLAPSANRKATAGLKLEVRDSGLQTGDPAGFTLADTLACGSVGHIIGVGVVLGLKNIGAL

SEQ ID NO: 30273 - DNA, 762 bp, Triticum aestivum
ctctcagccccagcgaccaaatccgccaccgcgccgccgccgccggcaaggaaggaagagagccccgcagcgcgcgatgaacaccgacatcaccgcgtcggtgaagccggagtacccggtggtggaccggaaccccgccttcaccaaagtcgtcgccaacttctccacgctcgactacctccgcctctccaccatctccgccgtctccgtcaccgtcggctacctctccggtttgctgctagatgaccttcttggtgctgaaacaacaagcagctgcagctgctgctacatgcaagctggaggagcacctggcatatttgcttacaatgatgaacaaacagggcaaatgactacagaaacaactgcggatggagaagtggttcttggaaccccagttgcttctcctgttagataatggggatgtgcatactgatatcagccctgagaatgctgtggtccagggacagagaagatcgagcaaatgtgttgattacttggttgaagcatctgctgcagaggttggggcgatcactgctactttagctgctataaaggcgacacaagttaaaggggcctggctacatggtgatggtgaggaacggcaaagaaatctatgcatgaggtttattttgaatttccagtgtctttgagaaggattaaacttgtctgtcgttgcaccgttacctggtactagcatgcatggtgatctgtattttatgtaagctgttgttaaccagaagcagtaagctggttctgccttca

SEQ ID NO: 30274 - protein, 137 aa, Triticum aestivum
SQPQRPNPPPRRRRRQGRKRAPQRAMNTDITASVKPEYPVVDRNPAFTKVVANFSTLDYLRLSTISAVSVTVGYLSGLLLDDLLGAETTSSCSCCYMQAGGAPGIFAYNDEQTGQMTTETTADGEVVLGTPVASPVR

SEQ ID NO: 30275 - protein, 112 aa, Triticum aestivum
MNTDITASVKPEYPVVDRNPAFTKVVANFSTLDYLRLSTISAVSVTVGYLSGLLLDDLLGAETTSSCSCCYMQAGGAPGIFAYNDEQTGQMTTETTADGEVVLGTPVASPVR

SEQ ID NO: 30276 - protein, 93 aa, Triticum aestivum
MEKWFLEPQLLLLLDNGDVHTDISPENAVVQGQRRSSKCVDYLVEASAAEVGAITATLAAIKATQVKGAWLHGDGEERQRNLCMRFILNFQCL

SEQ ID NO: 30277 - DNA, 840 bp, Triticum aestivum
caagtcttctgctatgttatacttacaacatttgatgtctattttcctatttttttatgacagaaataaccgccacatagtaatatatgtgccatgttataggttctcattttgagatagcagttcatcagtccctgtgatcgagcccttgttcttagtgaaactgttttctttgtaaacatgtaaacttcagaaacatggtactgagtttatgttttccattttcatttgttaatccttgttatttgaatttcacttctatttctgagtttaaaaatctaaattatgctttcatcaggtgtcgatttcatcaaacttccatgccatcatttcttttgccagaaatgcatgcaaacatattgcaaaatgcatgtcaaggaaggaactgtagtgaagttgttgtgtcccgatacaaaatgtggagccgttgttcctcccaatatattgaaaaggttgctaggggaggacgagtttgaacgttgggaaacattgcttcttcagagaactcttgatgcaatggttgatgtcgtttattgtccgagatgtcaaactgcttgcttggaagatgcaggtgatgaagccgtgtgtccaagttgtttgttcagcttctgcgcactttgtagagggcgacgtcatgttggggttgaatgtttatctgcagaagaaaaacttcaaattttggaggaacgtcaaaagtctgcacgaacaaagggagacatccagaagcttatggatgaagtatgcagtatcaaggaaattttgaaggatgcaaagcagtgcccgcattgcaagatggctatatctaagattgagggatgcaataagatgacctgttggaac

SEQ ID NO: 30278 - protein, 185 aa, Triticum aestivum
MLSSGVDFIKLPCHHFFCQKCMQTYCKMHVKEGTVVKLLCPDTKCGAVVPPNILKRLLGEDEFERWETLLLQRTLDAMVDVVYCPRCQTACLEDAGDEAVCPSCLFSFCALCRGRRHVGVECLSAEEKLQILEERQKSARTKGDIQKLMDEVCSIKEILKDAKQCPHCKMAISKIEGCNKMTCWN

SEQ ID NO: 30279 - protein, 164 aa, Triticum aestivum
MQTYCKMHVKEGTVVKLLCPDTKCGAVVPPNILKRLLGEDEFERWETLLLQRTLDAMVDVVYCPRCQTACLEDAGDEAVCPSCLFSFCALCRGRRHVGVECLSAEEKLQILEERQKSARTKGDIQKLMDEVCSIKEILKDAKQCPHCKMAISKIEGCNKMTCWN

SEQ ID NO: 30280 - protein, 158 aa, Triticum aestivum
MHVKEGTVVKLLCPDTKCGAVVPPNILKRLLGEDEFERWETLLLQRTLDAMVDVVYCPRCQTACLEDAGDEAVCPSCLFSFCALCRGRRHVGVECLSAEEKLQILEERQKSARTKGDIQKLMDEVCSIKEILKDAKQCPHCKMAISKIEGCNKMTCWN

SEQ ID NO: 30281 - DNA, 778 bp, Triticum aestivum
ataaattcccacgaccatcggaccaaagaatcatacccctctcttctagccattcaaactagtaaacaatggggatactcaggaagaaaaaacacgagcgaaagccgtcgtttaagagtgttttaacctcaatattagctacacaagccgcaacattcctcttgttgatctccggtgtatccctcgccggcacagccaccgcatttatcgctaccatgccactattcgtagtattcagtccgattctcgtaccagctggtattaccactggtttactgactacgggtttagcagccgccggtggcgccggtgcgactgctgtcaccatcatcctgtggctctacaagcaagcaacgggcaaggagccgccagcagtcctgtcaaaagtcttgaaaaagataataccaggtgctgcagccgcgccagcagccgcaccagcagccgctccagcagccgcaccagctgccgcgccagcagccgcaccagcacctaagcccgcagccgcaccagcacctaagccagcagccccaccggcactatgaaaagaagtggtgggcatgagtaaaggctgatatggaaaatttgatacatggaaacaaaagagtaatccaactttttaaaaataaataacaacttcacgtggggatagaaaaaaattcaaatattattctactaatggatgtcgtggtacaaagtagtaacaaatgtaagcatatttattgtatagcattttaagaacgaagctgtgtatcgttgatattagtaccttattcaagtt

SEQ ID NO: 30282 - protein, 157 aa, Triticum aestivum
MGILRKKKHERKPSFKSVLTSILATQAATFLLLISGVSLAGTATAFIATMPLFVVFSPILVPAGITTGLLTTGLAAAGGAGATAVTIILWLYKQATGKEPPAVLSKVLKKIIPGAAAAPAAAPAAAPAAAPAAAPAAAPAPKPAAAPAPKPAAPPAL

SEQ ID NO: 30283 - protein, 108 aa, Triticum aestivum
MPLFVVFSPILVPAGITTGLLTTGLAAAGGAGATAVTIILWLYKQATGKEPPAVLSKVLKKIIPGAAAAPAAAPAAAPAAAPAAAPAAAPAPKPAAAPAPKPAAPPAL

SEQ ID NO: 30284 - DNA, 911 bp, Triticum aestivum
aaaacttcacctgtacacatagttatatagatatttactccggccatgattctgaaggtcctcacgctgggcgcgctcctcggctgccttgcctatggtaccaatggctgggagccagtgtgcggcgagaaggctggccgcatggagtgccccgacaacaagtgctgcagcaaggatgggcagtgtggcctaggccccgacttctgcggcgagggttgccaaagcggcgcctgctgcgtgagcttgcgctgtggctcgcagaacgacggcaagacgtgccccaacaaccagtgttgtggccaagacggggtatgcgggttcggcaacgagtactgcggctctggctgccagagcggcgcgtgctcgcagggcatgcaatgcggcagccacaggccatgccccgggaacttgtgctgcagccacgcaggttggtgcggtcttggccctcccttctgcgggactgggtgccagagcggagcctgttgcagctcggaccttaagccgtgcggcaacaggggctgtggccgagtgtgcgacaacaatctgtgttgcggcagggatggctactgcggtgacggcaagccctactgcggtggcggctgccagggcggtccatgctcctgcgccgctgccggcggcggtttcagctccactctactacggggactaggtgagtcatgatgagctcagcgtcgcctgcaatgttgcgccatggatggaagcactagatttgcaacgacgccaaataatatatggtagtaccagtttacattatcattactgccaaggtgtcggcgttttgatttcccacttttagttctctctccttgcaccatgtgaggttataatgggatcatatttataagtcgccagaattttatttttagtgtaaagtcacttttattgtgtgt

SEQ ID NO: 30285 - protein, 211 aa, Triticum aestivum
MILKVLTLGALLGCLAYGTNGWEPVCGEKAGRMECPDNKCCSKDGQCGLGPDFCGEGCQSGACCVSLRCGSQNDGKTCPNNQCCGQDGVCGFGNEYCGSGCQSGACSQGMQCGSHRPCPGNLCCSHAGWCGLGPPFCGTGCQSGACCSSDLKPCGNRGCGRVCDNNLCCGRDGYCGDGKPYCGGGCQGGPCSCAAAGGGFSSTLLRGLGES

SEQ ID NO: 30286 - protein, 179 aa, Triticum aestivum
MECPDNKCCSKDGQCGLGPDFCGEGCQSGACCVSLRCGSQNDGKTCPNNQCCGQDGVCGFGNEYCGSGCQSGACSQGMQCGSHRPCPGNLCCSHAGWCGLGPPFCGTGCQSGACCSSDLKPCGNRGCGRVCDNNLCCGRDGYCGDGKPYCGGGCQGGPCSCAAAGGGFSSTLLRGLGES

SEQ ID NO: 30287 - protein, 165 aa, Triticum aestivum
NFTCTHSYIDIYSGHDSEGPHAGRAPRLPCLWYQWLGASVRREGWPHGVPRQQVLQQGWAVWPRPRLLRRGLPKRRLLRELALWLAERRQDVPQQPVLWPRRGMRVRQRVLRLWLPERRVLAGHAMRQPQAMPRELVLQPRRLVRSWPSLLRDWVPERSLLQLGP

SEQ ID NO: 30288 - DNA, 1066 bp, Triticum aestivum
gccgaatcacttcactaatcttgcgtccctcttccagctgcagctctgtccaagcgatcgatcgtccgctgtctgtccaacgagctctttctagctcgatcgaggcacgccattgccatggaagccgcacggatcgcgtcctttctgctcctcctcggggtcgtttggtcacgcgcacagcccggcgccgaggcggccggcacgacggtcttcacactgcgcaacaactgcaccttcacgatctggccggccacattgtccggcaacagcgccgtcgccgtcgggggcggcggcttcgagctcgcgccgggcgccaacgtgtcgttccccggcccgacgggctggtccggccggctctgggcgcgcaccggctgcgtcgccgccgcctccggcgcgtccctcgcctgcgccacgggcgactgcggcggcgccgtgcgctgcaccctgggcggggcgccccccgtcacgctcgccgagttcaccctcgggggcgcggacggcaaggacttctacgacgtgagcctggtggacgggtacaacgtcggcatcggcgtggcggccacgggcgccagggtgaactcctcgacatgcggctacgccgggtgcgtgggcgacgtgaacgcgctgtgccccgcggagctgcaggtggccggcaaggaaggggaccaggaggggaagacggtggcgtgccggagcgcgtgcgaggcgttcgggacggccgagtactgctgcacgggcgcgcacggcgggccgaacagctgcgggccgaccaagtactcgaggctgttcaaggcggcatgccccgccgcgtacagctacgcctacgacgatcccaccagcaccttcacctgcggcgccggagcgcagtacctcatcaccttttgcccggcgcagcagtagtccggcccttcgattttggctagtagtgtcgttcattcatcgttatggtgtctcgattttggttagtactatcgttcatccgaattaccagatgtttattggtttggtcgtgtcaatatgtatgcttttgattcattcatttcaaaaaaaaaagaaatatgctttt

SEQ ID NO: 30289 - protein, 306 aa, Triticum aestivum
RITSLILRPSSSCSSVQAIDRPLSVQRALSSSIEARHCHGSRTDRVLSAPPRGRLVTRTARRRGGRHDGLHTAQQLHLHDLAGHIVRQQRRRRRGRRLRARAGRQRVVPRPDGLVRPALGAHRLRRRRLRRVPRLRHGRLRRRRALHPGRGAPRHARRVHPRGRGRQGLLRREPGGRVQRRHRRGGHGRQGELLDMRLRRVRGRRERAVPRGAAGGRQGRGPGGEDGGVPERVRGVRDGRVLLHGRARRAEQLRADQVLEAVQGGMPRRVQLRLRRSHQHLHLRRRSAVPHHLLPGAAVVRPFDFG

SEQ ID NO: 30290 - protein, 260 aa, Triticum aestivum
MEAARIASFLLLLGVVWSRAQPGAEAAGTTVFTLRNNCTFTIWPATLSGNSAVAVGGGGFELAPGANVSFPGPTGWSGRLWARTGCVAAASGASLACATGDCGGAVRCTLGGAPPVTLAEFTLGGADGKDFYDVSLVDGYNVGIGVAATGARVNSSTCGYAGCVGDVNALCPAELQVAGKEGDQEGKTVACRSACEAFGTAEYCCTGAHGGPNSCGPTKYSRLFKAACPAAYSYAYDDPTSTFTCGAGAQYLITFCPAQQ

SEQ ID NO: 30291 - DNA, 754 bp, Triticum aestivum
ctttctcgcttctcataaactcgttggaacaaaaatcaaacaaaccatattacaaaatttgcgacccaaaggaagaaaaaaggtgaattttctgattccgagcagcccggccgatttagttgaggtcatccggggaatccggttcggctccagacggcgtcacgcacccgcgacgcgtcccggcccttgagcgtgcgtccgacgccctcgaccaccgacgccctggcctgacgccgcgccaggtacacgtgcggcggcacccagccgtcggcgtcgtcttgctgctgctcgtcgggctcgggctccagctccaggtcggcgaaccggctcggccacgcgggcacctcgacgggcgccgacgacgccacctgccgcccgtccgcgaacgcccggctgagcccgcccacgcgccgcggcggctcgcccctgggcgccctgtccgtgcgctgaatcccgtcctgatccgcggtggtggttggcgcgtccgacgatggagaataccagacgtccgattcggccaggtccggcaggtcgtcgtagggggacggggcgacggtggcggagccggggcggtggtggaagccgaggaagcgctcggcggcagagaaggccgtctgcttgcgcgccttggccatcgggcgcagtaccggcggctggctccggtcgattggtttggctgagcgcgcgcgcgcggtgggaaagatgggaggtgggaaagacggaggagcaggagagtgttgagggggggtttggc

SEQ ID NO: 30292 - protein, 88 aa, Triticum aestivum
MENTRRPIRPGPAGRRRGTGRRWRSRGGGGSRGSARRQRRPSACAPWPSGAVPAAGSGRLVWLSARARWERWEVGKTEEQESVEGGFG

SEQ ID NO: 30293 - protein, 62 aa, Triticum aestivum
FLASHKLVGTKIKQTILQNLRPKGRKKVNFLIPSSPADLVEVIRGIRFGSRRRHAPATRPGP

SEQ ID NO: 30294 - DNA, 632 bp, Triticum aestivum
gtttttatctcaggaagagaaggaaagactctctctcttgagcgattcaccagcgtaagatcaatcagatggcagcacctttcacgttgaggaagatcggagttccgccgaactcagctaacctgacggaggctcgccgccgtgttttcgatttcttcagagctgcgtgtagatccctccccaccgtaatggacatttacaatctacaagatgtcgtcgcgccttctcagctccgctttgcgatctctgctcagattcgtaataacgctcacgtcaccgatcctaaggtaattgatcttctgttattcaagggaatggaagagcttactgacattgtggatcacgcaaagcagcgtcaccacattattggtcagtacgtggtgggtgaagggctcgtccagaatactggaagcaaggatcaagggaagtctgattttctcaagaacttctacaccagcaactacttttgagctggtgattgtttttctctactggatttaccaaattcaagaataattagacattttcatttgtattaatttcgccaaacattcaagttttatctgtgacagtgttagctgcgcaaacaatgctatgatttcaaggtacataatcagctctcttttctttcc

SEQ ID NO: 30295 - protein, 133 aa, Triticum aestivum
MAAPFTLRKIGVPPNSANLTEARRRVFDFFRAACRSLPTVMDIYNLQDVVAPSQLRFAISAQIRNNAHVTDPKVIDLLLFKGMEELTDIVDHAKQRHHIIGQYVVGEGLVQNTGSKDQGKSDFLKNFYTSNYF

SEQ ID NO: 30296 - protein, 93 aa, Triticum aestivum; identical to SEQ ID NO: 131

SEQ ID NO: 30297 - DNA, 568 bp, Triticum aestivum
aaaaacaattaattcaaaaacaaaaaatgatgttcccttcaaagatcaccacatgcatcctcgtcctagccgtctacacggcagccccatcagagtcaaccataacgtgtgggacagtgacaagcacactggcacggtgtataggctacttgaccaacagtggttcattgccatcagactgctgcgttggagtcaaatcattgaaccaaatggctcagaccacaccggaccgccgacaagtctgtgagtgcctaaaatctgcggctaaggatatcactggcctcaacaccgaccttgtggccacactccctacaacttgtggtgtttcagttccctaccccattcgttttagcaccaattgtgacactatatcgactgccgtgtgaaggaggctagctagagatgtacgactaatcaaagttgcaagcttttaacctaaataataagtatatcatgcggctatttcccattttatgagttcattctcactatgtaatcatccatttcatatggtaataagttaataacttctactaattaataacgacaaaggaactctttctcgctc

SEQ ID NO: 30298 - protein, 127 aa, Triticum aestivum
KQLIQKQKMMFPSKITTCILVLAVYTAAPSESTITCGTVTSTLARCIGYLTNSGSLPSDCCVGVKSLNQMAQTTPDRRQVCECLKSAAKDITGLNTDLVATLPTTCGVSVPYPIRFSTNCDTISTAV

SEQ ID NO: 30299 - protein, 119 aa, Triticum aestivum
MMFPSKITTCILVLAVYTAAPSESTITCGTVTSTLARCIGYLTNSGSLPSDCCVGVKSLNQMAQTTPDRRQVCECLKSAAKDITGLNTDLVATLPTTCGVSVPYPIRFSTNCDTISTAV

SEQ ID NO: 30300 - protein, 118 aa, Triticum aestivum
MFPSKITTCILVLAVYTAAPSESTITCGTVTSTLARCIGYLTNSGSLPSDCCVGVKSLNQMAQTTPDRRQVCECLKSAAKDITGLNTDLVATLPTTCGVSVPYPIRFSTNCDTISTAV

SEQ ID NO: 30301 - DNA, 826 bp, Triticum aestivum
ctctcaaaacccttcctaaccctagccgcctcccgcacgcttctcctccgctccccgccccgcctcgagcagctcagggacgcgcacagccatggcgacggagaccgagaccttcgccttccaggccgagatcaaccagctcctctcgctcatcatcaacaccttctactccaacaaggagatcttcctccgcgagctcatctccaactcctccgatgccttggacaagatcaggttcgagagcctcacggacaagagcaagctagacgcgcagcccgagctcttcatccacatcatccccgacaaggcgaccaacacgctcacgatcgttgacagcggcattgggatgaccaagtccgacctcgtcaacaacctcgggaccatcgccaggtcggggaccaaggagttcatggaggccctcgccgccggcgccgacgtgtccatgattgggcagttcggtgtcggtttctactccgcctacctcgtcgccgagagggttgtcgtcaccaccaagcacaacgacgacgagcagtacgtgtgggagtcccaggccggtggctccttcaccgtcactcgtgatacgtctggggagcagctcggcaggggtaccaagatggtcctctacctcaaggacgaccagatggaataccttgaggagcgccgcatcaaggatctagttaagaagcactctgagtttatcagctaccccatctccctgtggactgagaagaccaccgagaaggaaatttctgatgatgaagatgaggaggagaagaaggatactgaggagggcaaggttgaggatgttgatgaggagaaggaagag

SEQ ID NO: 30302 - protein, 245 aa, Triticum aestivum
MATETETFAFQAEINQLLSLIINTFYSNKEIFLRELISNSSDALDKIRFESLTDKSKLDAQPELFIHIIPDKATNTLTIVDSGIGMTKSDLVNNLGTIARSGTKEFMEALAAGADVSMIGQFGVGFYSAYLVAERVVVTTKHNDDEQYVWESQAGGSFTVTRDTSGEQLGRGTKMVLYLKDDQMEYLEERRIKDLVKKHSEFISYPISLWTEKTTEKEISDDEDEEEKKDTEEGKVEDVDEEKEE

SEQ ID NO: 30303 - protein, 160 aa, Triticum aestivum
MTKSDLVNNLGTIARSGTKEFMEALAAGADVSMIGQFGVGFYSAYLVAERVVVTTKHNDDEQYVWESQAGGSFTVTRDTSGEQLGRGTKMVLYLKDDQMEYLEERRIKDLVKKHSEFISYPISLWTEKTTEKEISDDEDEEEKKDTEEGKVEDVDEEKEE

SEQ ID NO: 30304 - protein, 139 aa, Triticum aestivum
MEALAAGADVSMIGQFGVGFYSAYLVAERVVVTTKHNDDEQYVWESQAGGSFTVTRDTSGEQLGRGTKMVLYLKDDQMEYLEERRIKDLVKKHSEFISYPISLWTEKTTEKEISDDEDEEEKKDTEEGKVEDVDEEKEE

SEQ ID NO: 30305 - DNA, 1423 bp, Triticum aestivum
agacctcgaaatcatctagcgaggtcgtcgggctaatcgaagttgggcaccaccgtttattcactgaatggactcgaccaccaaccaattcgccggcgccgccgccgccgctggcgcgtcatcggcgaacacggcaccgctgccggccatgctcgctgacgcccttatcggcgccggagctggaggaggagatggggaccccagcgccgctctccaacggctggcggccctcggcgatcgcatggctgctgtccggcgcctcctcgtcgcctccatttctggggaatcgcagcccctctcctcctcggatattcagtccgtgtcctccgagatctcatctgccgctcacctcgtcgtcctcaacgccgcctccctcctttcttcgtccctcccttttcccgccccatctgccactcccgcccctcccgctcctatacaagagcttcccgcagcggcctccaccgccgatgtgcttccccaagaagctaccaagggctacgatgtcgtggagctcgatgccgacgagctgctcgcggagcatgcccacttctgcaatatctgcggcaagggcttccgccgcgacgccaacctcaggatgcacatgcgcgcgcacggcgaccgattcaagaccctggacgcgctctcccggcccggtcaggcaaagccagttgatggccgcgatgtgcgcttttcctgtcctttcacggggtgcaaccggaaccgtgcgcaccgccgcttccggccgctcaagtcagcggtgtgcgcgcgcaaccacttccgccgcagccactgccccaaactctacgcgtgtgagcgctgcggtggcaagaagcgttttgctgttcttgccgatctccgcggccacctccgccactgcggtgaggaggcacagtggcgctgctcctgcggcaccaccttctcccgcaaggacaagctgttcggccatctcgccctctttgaaggccatatgccagccatgtcccctccgaacaaggatgcagtgacaacgactacagaggcaccccttgatataatggatgaaggaggaatcgaagagcaggaagatggcggtgaaggtggttttgatccggagttcttcaaggagtggatggaggagctcaaagatgatggcgtgcctgctggtggcacagtctggcctggacgggcagcagctgggcaatagcctgtgttgcaagttctgtttggggtgtatggtaacagccgcaaggggcattggctgccaaagtgtctgaaagagcggtggggagatgcttctgaagaacagcacagaggtttctaacaagagcagtgggggcatgcccttgtttgtatggcacagtagtagtctggaatcactttgccagtctccttgtcgctccctcgttattctgtacctattgtcctgttggcagaagtacattcc

SEQ ID NO: 30306 - protein, 371 aa, Triticum aestivum
MDSTTNQFAGAAAAAGASSANTAPLPAMLADALIGAGAGGGDGDPSAALQRLAALGDRMAAVRRLLVASISGESQPLSSSDIQSVSSEISSAAHLVVLNAASLLSSSLPFPAPSATPAPPAPIQELPAAASTADVLPQEATKGYDVVELDADELLAEHAHFCNICGKGFRRDANLRMHMRAHGDRFKTLDALSRPGQAKPVDGRDVRFSCPFTGCNRNRAHRRFRPLKSAVCARNHFRRSHCPKLYACERCGGKKRFAVLADLRGHLRHCGEEAQWRCSCGTTFSRKDKLFGHLALFEGHMPAMSPPNKDAVTTTTEAPLDIMDEGGIEEQEDGGEGGFDPEFFKEWMEELKDDGVPAGGTVWPGRAAAGQ

SEQ ID NO: 30307 - protein, 344 aa, Triticum aestivum
MLADALIGAGAGGGDGDPSAALQRLAALGDRMAAVRRLLVASISGESQPLSSSDIQSVSSEISSAAHLVVLNAASLLSSSLPFPAPSATPAPPAPIQELPAAASTADVLPQEATKGYDVVELDADELLAEHAHFCNICGKGFRRDANLRMHMRAHGDRFKTLDALSRPGQAKPVDGRDVRFSCPFTGCNRNRAHRRFRPLKSAVCARNHFRRSHCPKLYACERCGGKKRFAVLADLRGHLRHCGEEAQWRCSCGTTFSRKDKLFGHLALFEGHMPAMSPPNKDAVTTTTEAPLDIMDEGGIEEQEDGGEGGFDPEFFKEWMEELKDDGVPAGGTVWPGRAAAGQ

SEQ ID NO: 30308 - protein, 333 aa, Triticum aestivum
TSKSSSEVVGLIEVGHHRLFTEWTRPPTNSPAPPPPLARHRRTRHRCRPCSLTPLSAPELEEEMGTPAPLSNGWRPSAIAWLLSGASSSPPFLGNRSPSPPRIFSPCPPRSHLPLTSSSSTPPPSFLRPSLFPPHLPLPPLPLLYKSFPQRPPPPMCFPKKLPRATMSWSSMPTSCSRSMPTSAISAARASAATPTSGCTCARTATDSRPWTRSPGPVRQSQLMAAMCAFPVLSRGATGTVRTAASGRSSQRCARATTSAAATAPNSTRVSAAVARSVLLFLPISAATSATAVRRHSGAAPAAPPSPARTSCSAISPSLKAICQPCPLRTRMQ

SEQ ID NO: 30309 - DNA, 850 bp, Triticum aestivum
aaaaacccctctccccaccatccagtctctctccaaatctcgggacagaaaggccgccgtaccgaattagagattgacagcggcggggcgggagccagcgagctcggcgcgaacccggccccggcgagatgctcggcaagcggcagaggagcatgctgatgcgccggacgaccagcctggcgtccatgccgtcggtgcccaagcaggtgcgccagggcagcggcggcggcggcggcgacaaggacaaaacggcgcgcgcgcggccgtcctcctccgtgtcggccggcgcggtggggacgggcggcggcggctacccctctcccgggagggacgccttcgccgggctgatgatcacggcggcgttcctgtcggcctgcggcttctgcgccaagcccctcggccccggcgaggacacctacatctacaggggcgaggtggcattctgcagccaggagtgcagggagcatcggatcaagaaagacgagctcatggaacagaactgcaccatcacatccatccgggaggccccgtcggaccagtccggcagcggcggcggctcgggcggcgccggggacgccgtcgccgccgcatagccgggcggccattagcttactctattatactagctgctagtgatgtgccacatatatttggcacatgtccgccatgtttaaaccgcccgtccgtgtatacagatcgaactgggtagccggaagttgttgttgtgggtggtgatgccccagtagtggccggtgactgaggatgccatgtgacacatggaacatggtggtttcctctcctgccccagtggagaaccgaacctggactgcaatgcaacatcaaattgcgt

SEQ ID NO: 30310 - protein, 154 aa, Triticum aestivum
MLGKRQRSMLMRRTTSLASMPSVPKQVRQGSGGGGGDKDKTARARPSSSVSAGAVGTGGGGYPSPGRDAFAGLMITAAFLSACGFCAKPLGPGEDTYIYRGEVAFCSQECREHRIKKDELMEQNCTITSIREAPSDQSGSGGGSGGAGDAVAAA

SEQ ID NO: 30311 - protein, 146 aa, Triticum aestivum
MLMRRTTSLASMPSVPKQVRQGSGGGGGDKDKTARARPSSSVSAGAVGTGGGGYPSPGRDAFAGLMITAAFLSACGFCAKPLGPGEDTYIYRGEVAFCSQECREHRIKKDELMEQNCTITSIREAPSDQSGSGGGSGGAGDAVAAA

SEQ ID NO: 30312 - protein, 144 aa, Triticum aestivum
MRRTTSLASMPSVPKQVRQGSGGGGGDKDKTARARPSSSVSAGAVGTGGGGYPSPGRDAFAGLMITAAFLSACGFCAKPLGPGEDTYIYRGEVAFCSQECREHRIKKDELMEQNCTITSIREAPSDQSGSGGGSGGAGDAVAAA

SEQ ID NO: 30313 - DNA, 943 bp, Triticum aestivum
acacacacacacacacacacacacacacacacacacacacacacacacacacacacacacacacctcccttcgccctccctcgcgctgccctcccagggtggctcgagggcgtctacggttgcccggcgctacccctctccatcctcccctcccttgccgtcacccgaggtggtcgtcgggcagcgcctgtgcagttgccgatgacagtggcgacgaggtcttcgtcgcttcactcttgcgaaggaccccggaatccagggtggcggccctggtcggcgaggcggcgccgtctcttcggccgtcggcttgtgcgcgggaggtgcggaccggcttcttcggctgcttgggcagcgaggagcaggccggtagcggtcgcgaggcggtgaggtatccttcctccgctccatatttgaaggtcaggcatcacctctatgctctctcccttggctggttcgccgatttggggcttctggccgccggatccggtgccggcagggtgctcctcgaactggtgctgcgggacgagcccgagggaaaccccactttggtttttccagagcggcggtggcggcgccattttgcgtggttctacgccctggagtcgtcgtagtgggctcccctccccacctcggccaagcttctcgggcgaaagctcgaatcccggcgatggatgggccacggcggcgccaggtgcgtcgtgtcctccttggaggcgccgcgtggggaagattggtgctttgggttgtgtgcagcaacttgcaagtgggcggctggtgtctgtcgagtctttgtggctccacagctccttcctttcgacgactctaccggcggcctaccctctattatcggtctccttcggtgactgtggtgttgctgatgtgtgtgtgctctgacttgtggtcgtgctccgtggctgcctcggactcgagactaacctttgcc

SEQ ID NO: 30314 - protein, 202 aa, Triticum aestivum
THTHTHTHTHTHTHTHTHTHTSLRPPSRCPPRVARGRLRLPGATPLHPPLPCRHPRWSSGSACAVADDSGDEVFVASLLRRTPESRVAALVGEAAPSLRPSACAREVRTGFFGCLGSEEQAGSGREAVRYPSSAPYLKVRHHLYALSLGWFADLGLLAAGSGAGRVLLELVLRDEPEGNPTLVFPERRWRRHFAWFYALESS

SEQ ID NO: 30315 - protein, 153 aa, Triticum aestivum
MLSPLAGSPIWGFWPPDPVPAGCSSNWCCGTSPRETPLWFFQSGGGGAILRGSTPWSRRSGLPSPPRPSFSGESSNPGDGWATAAPGASCPPWRRRVGKIGALGCVQQLASGRLVSVESLWLHSSFLSTTLPAAYPLLSVSFGDCGVADVCVL

SEQ ID NO: 30316 - protein, 128 aa, Triticum aestivum
THTHTHTHTHTHTHTHTHTHTPPFALPRAALPGWLEGVYGCPALPLSILPSLAVTRGGRRAAPVQLPMTVATRSSSLHSCEGPRNPGWRPWSARRRRLFGRRLVRGRCGPASSAAWAARSRPVAVARR

SEQ ID NO: 30317 - DNA, 1010 bp, Triticum aestivum
agaacatcctaatcaaaaagttatgctgtaatctatggtgcatcacaatcaatcctactcgttgttttattgataacttgcagcaaaaatgctgggattggaggaagcccctccggcgcatgcccgcacagcagagaaaacctgcgacccgtccggcatgacctttgctaccggtggtgcatgcgtgttggacagtacatcgcacgaggtccctgccctcgccaagcagatttacactttcaagaagatggtcaaggacgggaccatcacggagaatcaactgagtcgctctgtagcgctcgtggcctactccggcaacgactatgcaggcaccggcgtcattgggctaggtagccccaacgatattaatgcttatattggaaaggtgacaaaagagattgcagctaatgtggatcaattgttgaagcttggggtgacaaaggttcttgtcaataacttgcaccctatcggttgcacgccatcacacacccgaaccaacaactacaccacgtgtgatatttttagaaacttgggtgcatctatccacaacgataatctgaaacaagttatgacatcaaagaagaatgtctacatcattgacgtgtacaccgcattcgctaatattgtggatcatgcggcaggtaaaggctcagagttgtccaaacaattcaagcgcaaactatcgccgtgttgcgagagtttgaattcgaagggttactgcggacagcaaaacgagtcatccggggagcttctgtacactgtgtgtgacaagtcaagtaaatttttctattgggacgatatgcacccgacccatgcaggatgggaggttgtgataaaacaattggaaaagcccttgagagagtttgtaaatcaagcctaggtagctggttttatatatctgtgtagagctttgcatccatgatgacaaccttctgatttatttcatagtttcaagtatttggaagacgggattttcccgattccatgatgaatattatattgtatttgct

SEQ ID NO: 30318 - protein, 263 aa, Triticum aestivum
MLGLEEAPPAHARTAEKTCDPSGMTFATGGACVLDSTSHEVPALAKQIYTFKKMVKDGTITENQLSRSVALVAYSGNDYAGTGVIGLGSPNDINAYIGKVTKEIAANVDQLLKLGVTKVLVNNLHPIGCTPSHTRTNNYTTCDIFRNLGASIHNDNLKQVMTSKKNVYIIDVYTAFANIVDHAAGKGSELSKQFKRKLSPCCESLNSKGYCGQQNESSGELLYTVCDKSSKFFYWDDMHPTHAGWEVVIKQLEKPLREFVNQA

SEQ ID NO: 30319 - protein, 240 aa, Triticum aestivum
MTFATGGACVLDSTSHEVPALAKQIYTFKKMVKDGTITENQLSRSVALVAYSGNDYAGTGVIGLGSPNDINAYIGKVTKEIAANVDQLLKLGVTKVLVNNLHPIGCTPSHTRTNNYTTCDIFRNLGASIHNDNLKQVMTSKKNVYIIDVYTAFANIVDHAAGKGSELSKQFKRKLSPCCESLNSKGYCGQQNESSGELLYTVCDKSSKFFYWDDMHPTHAGWEVVIKQLEKPLREFVNQA

SEQ ID NO: 30320 - protein, 210 aa, Triticum aestivum
MVKDGTITENQLSRSVALVAYSGNDYAGTGVIGLGSPNDINAYIGKVTKEIAANVDQLLKLGVTKVLVNNLHPIGCTPSHTRTNNYTTCDIFRNLGASIHNDNLKQVMTSKKNVYIIDVYTAFANIVDHAAGKGSELSKQFKRKLSPCCESLNSKGYCGQQNESSGELLYTVCDKSSKFFYWDDMHPTHAGWEVVIKQLEKPLREFVNQA

SEQ ID NO: 30321 - DNA, 1137 bp, Triticum aestivum
cctttcgatttcttcgcttgtggcgagtcacagcgttccaatttcccagcacttaactcgcccgacctacccaccaaccaccccgcgtcgagactgaccagactgaattgatcgataataaatcagcacgctgcacgcgctgggggtctgagtcagaggaggaagaagatcgaggagcagctgattcgttcgcacaaagcgccgggatcagatccatctctccgcgcgggatgtctgaggtggcggcgatggcggggcaggcgtacatgagacagctctccaagcaccctctccgcaccaaggccatcacctccggggtgctggcgggctgcagcgacgccgtcgcccagaagatctccggcgtcaagaggctccagctcaggaggctcctcctcataatgctctatggatttgcatacgcaggaccattcggtcattttttccacaagcttatggacaagattttcaagggacagaagaaaggaaaagaaactacagccaagaaggtcatagtggagcagctaactgtatcaccatggaacaatatgatgttcatgatgtactacggtctggtagttgaagggaggccattcgggcaagtaaagagcaaggtcaagaaggactttgcaaacatccaattgacagcttggaagttctggccaatagttagctggatcaactatgagtacatgccactccagctccgagttcttttcgccagctccgttgcatcatgctgggcagtgtttctgaacctgaaagcagcaagatccattgccggcgctagtaagaatgcatagaagaaggttggaaggaaggggctagtgctacattgtatttctagctaattaagtatccactagcgattttctcagttcatttttatcgctcagtttgtatttatgtttctatttgaaccccttgagcatcgagaacctagagttaatgtttcaactaagtatgccagtatgtcaatgtgaagagtccctttcttgccaccgggaaaaaaaccctacaaagcaaaaattatcctctacaaggtaccatgtttgttattcctttgggaggaaaatagggactttactgggatctgacgcgtggaaataaatgaacatgctctgaggtttgtagaagctc

SEQ ID NO: 30322 - protein, 189 aa, Triticum aestivum
MSEVAAMAGQAYMRQLSKHPLRTKAITSGVLAGCSDAVAQKISGVKRLQLRRLLLIMLYGFAYAGPFGHFFHKLMDKIFKGQKKGKETTAKKVIVEQLTVSPWNNMMFMMYYGLVVEGRPFGQVKSKVKKDFANIQLTAWKFWPIVSWINYEYMPLQLRVLFASSVASCWAVFLNLKAARSIAGASKNA

SEQ ID NO: 30323 - protein, 183 aa, Triticum aestivum
MAGQAYMRQLSKHPLRTKAITSGVLAGCSDAVAQKISGVKRLQLRRLLLIMLYGFAYAGPFGHFFHKLMDKIFKGQKKGKETTAKKVIVEQLTVSPWNNMMFMMYYGLVVEGRPFGQVKSKVKKDFANIQLTAWKFWPIVSWINYEYMPLQLRVLFASSVASCWAVFLNLKAARSIAGASKNA

SEQ ID NO: 30324 - protein, 177 aa, Triticum aestivum
MRQLSKHPLRTKAITSGVLAGCSDAVAQKISGVKRLQLRRLLLIMLYGFAYAGPFGHFFHKLMDKIFKGQKKGKETTAKKVIVEQLTVSPWNNMMFMMYYGLVVEGRPFGQVKSKVKKDFANIQLTAWKFWPIVSWINYEYMPLQLRVLFASSVASCWAVFLNLKAARSIAGASKNA

SEQ ID NO: 30325 - DNA, 1185 bp, Triticum aestivum
ctcaagctcaaatcccttaccctcctcgcgtgccctcccttatccccttcaccatggccacctccgccatgacactcgccatggccgcggccacggacgcctccctctttcaccccacgttcctctcccaacacaagctcaccccggcggccgccttcctcccactcattttctctcgcgcgccgctcctccgctccacccgcccccgcgccccccttacgcccctcgtcgcctcctccgacgccgccgaggcgggcctcgactgggccgacgcggaggaagccgaagagacggtgacggaggaggagcccgcggtggcggcctccggtggggatgcggggtacgcagccgagcctcccgaggaggctaaggtgtacgtcgggaacctgccgtatgatgtggacagcgagcggctcgcccagctcttcgaccaggccggcgtcgtcgaggtcgccgaggtcatttacaacagagagtcatgccagagccgtggatttggatttgttaccatgagtactattgaggaagctgacaaagccatcgagacgttcaaccgctacgacatcagcggaaggcttctgaacgtaaacagggcagctcaaaggggctcccgtgttgagagacctcctcgacagtttgcatcttctttcagggcttatgttggtaacctgccatggcaagcggaagactctaggttggtgcaattgttcagcgagcatggggaagtagttaacgctacagttgtgtacgacagagaaactgggcgttcacgaggatttggttttgtaactatggcttcaaaggaagatcttgacagtgctatttcagcgcttgatggacaggagatggatggccgtccactccgagtgaacgttgccgcggagcgaccgcagcgagggttctgatgcagaggagagcgggtgtttcttttggacacacgagaacaacactgctgaaatgttactgcggaagactgaagcatgtcaccacttaaaaatcctgcactggcctcctgatgttgggctatctcctcccatcccatattcttttttcatgcttccgtttgctgttgatgtcatcatgttactttcttgtcaacaccgtaagttcaacttttcaagtaggctactgtaatgatgtcctagtgttctcatgataatcgaagaaggttttgttggtaatgct

SEQ ID NO: 30326 - protein, 300 aa, Triticum aestivum
QAQIPYPPRVPSLIPFTMATSAMTLAMAAATDASLFHPTFLSQHKLTPAAAFLPLIFSRAPLLRSTRPRAPLTPLVASSDAAEAGLDWADAEEAEETVTEEEPAVAASGGDAGYAAEPPEEAKVYVGNLPYDVDSERLAQLFDQAGVVEVAEVIYNRESCQSRGFGFVTMSTIEEADKAIETFNRYDISGRLLNVNRAAQRGSRVERPPRQFASSFRAYVGNLPWQAEDSRLVQLFSEHGEVVNATVVYDRETGRSRGFGFVTMASKEDLDSAISALDGQEMDGRPLRVNVAAERPQRGF

SEQ ID NO: 30327 - protein, 283 aa, Triticum aestivum
MATSAMTLAMAAATDASLFHPTFLSQHKLTPAAAFLPLIFSRAPLLRSTRPRAPLTPLVASSDAAEAGLDWADAEEAEETVTEEEPAVAASGGDAGYAAEPPEEAKVYVGNLPYDVDSERLAQLFDQAGVVEVAEVIYNRESCQSRGFGFVTMSTIEEADKAIETFNRYDISGRLLNVNRAAQRGSRVERPPRQFASSFRAYVGNLPWQAEDSRLVQLFSEHGEVVNATVVYDRETGRSRGFGFVTMASKEDLDSAISALDGQEMDGRPLRVNVAAERPQRGF

SEQ ID NO: 30328 - protein, 278 aa, Triticum aestivum
MTLAMAAATDASLFHPTFLSQHKLTPAAAFLPLIFSRAPLLRSTRPRAPLTPLVASSDAAEAGLDWADAEEAEETVTEEEPAVAASGGDAGYAAEPPEEAKVYVGNLPYDVDSERLAQLFDQAGVVEVAEVIYNRESCQSRGFGFVTMSTIEEADKAIETFNRYDISGRLLNVNRAAQRGSRVERPPRQFASSFRAYVGNLPWQAEDSRLVQLFSEHGEVVNATVVYDRETGRSRGFGFVTMASKEDLDSAISALDGQEMDGRPLRVNVAAERPQRGF

SEQ ID NO: 30329 - DNA, 981 bp, Triticum aestivum
agaacatcctaatcgaaaaactaccagcaggtccagcgccaccatcgccctacccctacgcccccacagcaacacgagaaaaccaccgcaagcacgcgccccgctccgccccgagacgcgacggtggaatccggcaggcacgggcacgagcaggcgtgcggacacatagcccgagcgcgcgcgatggcagtcggagggcggcgcgcggcggcggcggcgtgcgggcgctggtgcctggtgatcctcgccgtggcctccgcgctcggcgtctccgggcccgcgctctactggcgctacaagaagggcttctcctcccccgcctccggcgctgccgccgtctccgcaccctcctgcccgccctgcacctgcgactgcccgccgccgctctccctccagtccatcgcgccagggctcatgaacttctcaatttcagcttgcggcacaaatgaccctgagcgtaccaaggagatggcgaagcagtttgttgatctcctcaacgaggaactcaagctgcagcaggttgtagctgaggagcacatccatcacatgaatgccacacttgtcgaggcaaaaaggcaggctaccctgtaccagcgagaggcggagaagtgtaacgcggccacagagacttgtgaggaagccagggagaagtctgagggggcaatctcaaaggagaggaaactgacagcactgtgggaacgtcgagctcgcgaattgggttggcaggattctcgagccgcgaccaccgcacgatagcttggcaagcagtttgcttctgcaggtaaaagtatttgcagcaggcggcattttaccacaccgagcaatgttagctgtatgggtccacgtgtaatgtttgccagtgtatgactatgagttgtcccagttgaagtatagttactctagacactgtagattccttataaatgtaactagtatacattgtttaaatatgcaagctttatattgaagacaaaaaaaaaa

SEQ ID NO: 30330 - protein, 190 aa, Triticum aestivum
MAVGGRRAAAAACGRWCLVILAVASALGVSGPALYWRYKKGFSSPASGAAAVSAPSCPPCTCDCPPPLSLQSIAPGLMNFSISACGTNDPERTKEMAKQFVDLLNEELKLQQVVAEEHIHHMNATLVEAKRQATLYQREAEKCNAATETCEEAREKSEGAISKERKLTALWERRARELGWQDSRAATTAR

SEQ ID NO: 30331 - protein, 148 aa, Triticum aestivum
NILIEKLPAGPAPPSPYPYAPTATRENHRKHAPRSAPRRDGGIRQARARAGVRTHSPSARDGSRRAARGGGGVRALVPGDPRRGLRARRLRARALLALQEGLLLPRLRRCRRLRTLLPALHLRLPAAALPPVHRARAHELLNFSLRHK

SEQ ID NO: 30332 - protein, 113 aa, Triticum aestivum
MNFSISACGTNDPERTKEMAKQFVDLLNEELKLQQVVAEEHIHHMNATLVEAKRQATLYQREAEKCNAATETCEEAREKSEGAISKERKLTALWERRARELGWQDSRAATTAR

SEQ ID NO: 30333 - DNA, 1090 bp, Triticum aestivum
gtttaagcccatttcggaataatgggccattagattaggcgcacctccttctagaaccctccagaaccttcctcctcccccaaccaaactaaatggtggtttgctaagcgttttctgcaccctagtgttgtggctatctacgatttcatatttttatgggacgaagaccttggggtggaaaattttgatccgaggaggtatattgatataatggtttccgaaggcttagaaatcacgcaacctgcattggatcctgatctatcaacagatattcaccaccgcatcacaatccgcaacaagatgacaaaagtgcataggagagtatatgacaatcgttcaagcatgaactgttctgatgatagtaaaggacctccatgcacagggtgggtcgagggcatggcaccagttttttctcgtgctgcctggaaatgtgtatggcatctaatacagaatgacttgattcatggatggggccttgacatgaagcttggttactgtgctcagggtgatcgagctgagaaggtcggtgtaattgacagtgagtatgtcgtccatcaagggataccatcattaggaggaccatcagataccagcaagttacctcgaagatctttggatttgcggacacacattagaagacagtcgtcggcggagctggaaaagttcaaagaacggtgggaaaaagccgtaagggaagacgatgagtggatggatccttttgacgcttgattactttggaagaaacatctgacatgaagatacaaggcccaccatacatgggtggatgcgtccacattcatcatggcgattggagtcgagatcatgtgggcctcatagcaaaacagttagttatatagccttataggcattttgctgactaacacacccccccctgccatcaagagctataagaacaagtgggaatgtcgtcgcgctaatacacggagaaactgagcaaggacctgtatactaccagtggctgacagacacagtatcttgtaatcttaattcgattctccaatcaccgaggttgtatagtgacaatgcatatatgtatgtgcagttatttttagtaataataagtatttat

SEQ ID NO: 30334 - protein, 172 aa, Triticum aestivum
MVSEGLEITQPALDPDLSTDIHHRITIRNKMTKVHRRVYDNRSSMNCSDDSKGPPCTGWVEGMAPVFSRAAWKCVWHLIQNDLIHGWGLDMKLGYCAQGDRAEKVGVIDSEYVVHQGIPSLGGPSDTSKLPRRSLDLRTHIRRQSSAELEKFKERWEKAVREDDEWMDPFDA

SEQ ID NO: 30335 - protein, 142 aa, Triticum aestivum
MTKVHRRVYDNRSSMNCSDDSKGPPCTGWVEGMAPVFSRAAWKCVWHLIQNDLIHGWGLDMKLGYCAQGDRAEKVGVIDSEYVVHQGIPSLGGPSDTSKLPRRSLDLRTHIRRQSSAELEKFKERWEKAVREDDEWMDPFDA

SEQ ID NO: 30336 - protein, 128 aa, Triticum aestivum
MNCSDDSKGPPCTGWVEGMAPVFSRAAWKCVWHLIQNDLIHGWGLDMKLGYCAQGDRAEKVGVIDSEYVVHQGIPSLGGPSDTSKLPRRSLDLRTHIRRQSSAELEKFKERWEKAVREDDEWMDPFDA

SEQ ID NO: 30337 - DNA, 581 bp, Triticum aestivum
aaggttgtgtagttgttgtaagcaaaaaagagagatagagagaaatggctagcttcaccgcctccgcttccaccgtctcggtcgctcgtcctgctctccttctcaagcccaccgtcgccgtctctgctcctgttcttggtttgcctccaatgagtaagaggaagggaggagtgaagtgctcgatggagaccaagcaaggaaacgtctcagccgtgggagctggagtttctgcggcggctacagcagctttgacagctgtgatgagcagcccggctatggctttggtggacgacaggatgtcaactgagggaaccggcttgccctttggacttagcaacaacctcttgggatggattcttttgggagtgtttggtttgatctggactttctactttacctacacttcttctctggacgaggatgaagaatctggtctttcactctaaacatgaactgtatatgttcttcatcagtgtcatctctctccttttccattttcgtgtgaggacatgaaccaaacagtgttattctggttacttgtaatttaagcaaacaccaaaaaaaaactatttttcatgtgc

SEQ ID NO: 30338 - protein, 133 aa, Triticum aestivum
MASFTASASTVSVARPALLLKPTVAVSAPVLGLPPMSKRKGGVKCSMETKQGNVSAVGAGVSAAATAALTAVMSSPAMALVDDRMSTEGTGLPFGLSNNLLGWILLGVFGLIWTFYFTYTSSLDEDEESGLSL

SEQ ID NO: 30339 - protein, 98 aa, Triticum aestivum
MSKRKGGVKCSMETKQGNVSAVGAGVSAAATAALTAVMSSPAMALVDDRMSTEGTGLPFGLSNNLLGWILLGVFGLIWTFYFTYTSSLDEDEESGLSL

SEQ ID NO: 30340 - protein, 87 aa, Triticum aestivum
METKQGNVSAVGAGVSAAATAALTAVMSSPAMALVDDRMSTEGTGLPFGLSNNLLGWILLGVFGLIWTFYFTYTSSLDEDEESGLSL

SEQ ID NO: 30341 - DNA, 799 bp, Triticum aestivum
ctagaacatcctaatcgaaaaaacacccgactgagtgagagagcgctagcgaccggataaggtttcgcctaccagctgccaacggccagcctcgacgccggcgggggctggtccgaccacgcgcctctccgcctcccgtcgcagcctctctcccccgagtttcccttctgcccaagctgcaccttgctagcaaggatactgcgcactccgatctataatatcagctctctatagcgaccgtcgctgtcgcccacctttcgccctgtaggcaagaacaagacggcatggcttgtgacgagtgccgcggtccgaaccataaacagaaagattgccccacactaccctgtcacaactgtgggggaactcttcacacccgaggcacttgctgttacacggatcctgtttaccgcgttggagaaagatgtcccagatgtggtggttttcaacacggggtacccggcaagcccccctgcccagtccaagaagctcatgctcgcccgcctatgtgcccgcggtgtcaagtgccacatcgtccaagagactgccctcatcgtggagccgaatattccgggtggacaagctccgacagatgcacgcaatgcaatgaaactggtcattttttccccgactgccctaacaaatactagtactagtttctctgtatcttgttattgtagctcgtaagtttgtttgagtatttttcaagactattagcttagtggtttgcccattgttgatgtatattattaagcctgaaagcacttcaattctcagtatcttttaatatatagtattattt

SEQ ID NO: 30342 - protein, 120 aa, Triticum aestivum
MACDECRGPNHKQKDCPTLPCHNCGGTLHTRGTCCYTDPVYRVGERCPRCGGFQHGVPGKPPCPVQEAHARPPMCPRCQVPHRPRDCPHRGAEYSGWTSSDRCTQCNETGHFFPDCPNKY

SEQ ID NO: 30343 - protein, 64 aa, Triticum aestivum
MLARLCARGVKCHIVQETALIVEPNIPGGQAPTDARNAMKLVIFSPTALTNTSTSFSVSCYCSS

SEQ ID NO: 30344 - protein, 61 aa, Triticum aestivum
MSQMWWFSTRGTRQAPLPSPRSSCSPAYVPAVSSATSSKRLPSSWSRIFRVDKLRQMHAMQ

SEQ ID NO: 30345 - DNA, 1064 bp, Triticum aestivum
tatttattaccttgtctgtgtatatcagtcttcagttttcctgttctaataagctgcgtttggctcccggagacactacataaccacaacactgatgaaaaggaagatcaagcgagtgaatctttgactgcaattttttctactacggaagtgattgtcgagcataatattacttcaacaacgaaaaacaatgtattgaagaactggccattgatgtcatctattattctgttctgtatcgtatcctttgatgacatggcatattcagagatattctccttatgggctgaaagtgacagaaagtatggtggactaagtttctcgtctgaggatgttggtcaagttcttgcaattacaggtgttagcattcttgtataccaaacttttatttttccccgtattatcagagttatgggaccaatcaatacttctcgtgttgcgatgagtctgtctgtggtgcttctgtttacatatgcaccaatcacacatctctcaagaccttggtcgtcaatagcagtaaacattgcatcgattcttaaaaataattttctcattaccattgttactagttctttcattcttcagaataattctgtgactcaagatcaaagagcaaccgcaaatggcttagccaccactttaatgtccttttgtaaaacatttgctccaacaggaggtggaattgtgttttcatgggcacagaaacgccaacatgttttcttttttccaggtgaccagatgttgttttttcttttggctattgtcgagcttgtgggacttgtttggacattcaagccgtttcttgttgtgcctgatcaattttcttcaaattagcactctagatttgtacgtgctattatgagtgcgtgcctgtatcgtactcttcttacagaattatatccatactttggtggtatacgcgcttcgaattgggttgtaacgtaattacgtggttaggattttgcggagtatctaaaataaggagaaaaccattttcaagtgtcattattatctccctgcaaacaaatagtgccattatttattaattacagaaaaatactatg

SEQ ID NO: 30346 - protein, 277 aa, Triticum aestivum
YLLPCLCISVFSFPVLISCVWLPETLHNHNTDEKEDQASESLTAIFSTTEVIVEHNITSTTKNNVLKNWPLMSSIILFCIVSFDDMAYSEIFSLWAESDRKYGGLSFSSEDVGQVLAITGVSILVYQTFIFPRIIRVMGPINTSRVAMSLSVVLLFTYAPITHLSRPWSSIAVNIASILKNNFLITIVTSSFILQNNSVTQDQRATANGLATTLMSFCKTFAPTGGGIVFSWAQKRQHVFFFPGDQMLFFLLAIVELVGLVWTFKPFLVVPDQFSSN

SEQ ID NO: 30347 - protein, 206 aa, Triticum aestivum
MSSIILFCIVSFDDMAYSEIFSLWAESDRKYGGLSFSSEDVGQVLAITGVSILVYQTFIFPRIIRVMGPINTSRVAMSLSVVLLFTYAPITHLSRPWSSIAVNIASILKNNFLITIVTSSFILQNNSVTQDQRATANGLATTLMSFCKTFAPTGGGIVFSWAQKRQHVFFFPGDQMLFFLLAIVELVGLVWTFKPFLVVPDQFSSN

SEQ ID NO: 30348 - protein, 192 aa, Triticum aestivum
MAYSEIFSLWAESDRKYGGLSFSSEDVGQVLAITGVSILVYQTFIFPRIIRVMGPINTSRVAMSLSVVLLFTYAPITHLSRPWSSIAVNIASILKNNFLITIVTSSFILQNNSVTQDQRATANGLATTLMSFCKTFAPTGGGIVFSWAQKRQHVFFFPGDQMLFFLLAIVELVGLVWTFKPFLVVPDQFSSN

SEQ ID NO: 30349 - DNA, 747 bp, Triticum aestivum
acatcctaatcgaaaattgagaggttaactggaacggaagacacggttcgagcagcctcgaagagactaacccagggaatggcagatttcaacaaggcaatatcttcagcaaagacagaagaagagaaaactaaaatcaaagcggatcagcaaaaatcgacgatgacaatgcggtcctataataatatattggcaatgtcacagccattgcatgggaaatctccgttattcattggagataagaaaattactctatcatggatggaacaaccaaagaaaccagcagcttcaacagctggagggaagaggacccaacctgctagtaatgggaatgcccctttaaacaagaaggggcgaggagatggaggaatgcacaatcagcttgtgaacagagcttttgaggggttaccccgtggtggtggtagaggcagtggaagagggcggggcagaggaggccgaggaagaggttggggctaccgctgagatctttcagaaatcgacattccaagggagaaagggatcagttttctcccattcgagagtagtggcaagagtctgtttatctgggttagcttttctgtaccagcaaggtgcgtgactgtcgggtgcacaagggaagcacaaaagctcatacaaaggatcctaaccgtctgcacatgctagctctcttggtttgcggattgttgtttggtggtccgaacggtacattttagtcatagtatatttattcgaggaatttatttttcg

SEQ ID NO: 30350 - protein, 134 aa, Triticum aestivum
MADFNKAISSAKTEEEKTKIKADQQKSTMTMRSYNNILAMSQPLHGKSPLFIGDKKITLSWMEQPKKPAASTAGGKRTQPASNGNAPLNKKGRGDGGMHNQLVNRAFEGLPRGGGRGSGRGRGRGGRGRGWGYR

SEQ ID NO: 30351 - protein, 106 aa, Triticum aestivum
MTMRSYNNILAMSQPLHGKSPLFIGDKKITLSWMEQPKKPAASTAGGKRTQPASNGNAPLNKKGRGDGGMHNQLVNRAFEGLPRGGGRGSGRGRGRGGRGRGWGYR

SEQ ID NO: 30352 - protein, 104 aa, Triticum aestivum
MRSYNNILAMSQPLHGKSPLFIGDKKITLSWMEQPKKPAASTAGGKRTQPASNGNAPLNKKGRGDGGMHNQLVNRAFEGLPRGGGRGSGRGRGRGGRGRGWGYR

SEQ ID NO: 30353 - DNA, 651 bp, Triticum aestivum
catcctaatcgaaaaaaaccaaaactcctctctcagtacacacttcttttcaaacctcaaactagtttgagatatttagaggagtgtttggttctttggataacaatatcctaaacagaacatggctaagtcatatggaactctcttcctcctggccctcattgtcttctccttgcttcaaaccatggttatggcctcaagtggatctagagtgaagtataacccgaaacgatatggaccaggaagcttgaaacgttcccaatgccccaaggaatgtgataggaggtgtagccagacacaataccacaacgcttgcattttgttctgcaacaaatgctgcaggaagtgtttgtgtgtgcctccggggtattatggaaacaaacaagtttgctcttgctacaacaactggaaaactcaagagggtggaccaaaatgcccttaaaacctcttctaatcgtttttgatatattgttccttttttataataaaaaaaatgaactgatgataattttattcacttttgagcaatgcttgttatgtttttctcatcttattttattcctaatgttgtaatgttatgtcactcctttgggattttgtttcaaatccaaaaaaatggagagtggcctatatatgaatgatatttttctt

SEQ ID NO: 30354 - protein, 106 aa, Triticum aestivum
MAKSYGTLFLLALIVFSLLQTMVMASSGSRVKYNPKRYGPGSLKRSQCPKECDRRCSQTQYHNACILFCNKCCRKCLCVPPGYYGNKQVCSCYNNWKTQEGGPKCP

SEQ ID NO: 30355 - protein, 85 aa, Triticum aestivum
MVMASSGSRVKYNPKRYGPGSLKRSQCPKECDRRCSQTQYHNACILFCNKCCRKCLCVPPGYYGNKQVCSCYNNWKTQEGGPKCP

SEQ ID NO: 30356 - protein, 83 aa, Triticum aestivum
MASSGSRVKYNPKRYGPGSLKRSQCPKECDRRCSQTQYHNACILFCNKCCRKCLCVPPGYYGNKQVCSCYNNWKTQEGGPKCP

SEQ ID NO: 30357 - DNA, 857 bp, Triticum aestivum
tggaaactttgggtcttagaaatggtcctgctaaggaggccgaagatgctgcagaatgtaccaaacagacaaatttgagcactgagaatgagcaactagaaagtgcagaaggtactgagcggcatctggatgtttcatttcatggtactgaagctagcacagacgaagctgcctctgaagcagctgaatcttcagtctcagctacttagacacaggcagagagaacagttgataaaccagctggctcatctgatttggacaatcctatctctgaagcttcacccgatcctgatgtcaatgggagtgatttggctggctcggcattatcttctgagcaagctgtccgtaacgaagatgtggaggtaccgaccaagactgatgcagtcgtggatactgaaatgaaaactgatacagtcgtggaaactgatgcagtcggggatgttggagtgaaagctgatgcagtcgtggaggtaccaagcaaggaagtatctgccgtggatgttgaagctaaaactggcgcagcagaagcaaaagagtgaagtggcagcttatctcatggactgaaatggcatagctgacgagcaattattagtcagacccctcagaagacaggcaatcatctttgcttcaagtgctcatcagccacaagcaacttcgaagcaaactgctgtacaataagcaagtgtactattttgccttccattgtggccaatcactgtacaaatgggcaccattgtctaactgcacgcgtacacttcatcagaaattggtcaatttgcttcaaaatttaccctccgtttcatggggaacaattggttgatgcgaaatgtcatttggcggtagtctcgtgtcttgcg

SEQ ID NO: 30358 - protein, 90 aa, Triticum aestivum
MFHFMVLKLAQTKLPLKQLNLQSQLLRHRQREQLINQLAHLIWTILSLKLHPILMSMGVIWLARHYLLSKLSVTKMWRYRPRLMQSWILK

SEQ ID NO: 30359 - protein, 86 aa, Triticum aestivum
MVLKLAQTKLPLKQLNLQSQLLRHRQREQLINQLAHLIWTILSLKLHPILMSMGVIWLARHYLLSKLSVTKMWRYRPRLMQSWILK

SEQ ID NO: 30360 - protein, 68 aa, Triticum aestivum
ETLGLRNGPAKEAEDAAECTKQTNLSTENEQLESAEGTERHLDVSFHGTEASTDEAASEAAESSVSAT

SEQ ID NO: 30361 - DNA, 1339 bp, Triticum aestivum
atcaccagtaaagcagtaagcaattccactcccgccgccacctccctctactccggcgctctctcggacgctccggcatacatacgtacttacaagcggaagcagccagagccagccatgtgccccggggcgccggtcgcggcggcggcgtcggacaagagcgtgtgcgtgatggacgcgtccggcccgctgggccaggcgctcgtgcaccgcctcctccgccggggctacaccgtccacgccgccacctacggccgctcgctcgacgcgctcgcgctgctcgccgccgccggccacgacgaggaccggctcaagctcttccgcgccgaccccttcgactaccactccatcgccgacgccgtccgcggctgctccggcctcttctgcatgttcaacacccacgaggaccaggccggctgcgacgaggtgatggtggaggtggaggtccgggcggcgcagaacgtgctggaggcgtgcgcgcagacggtgaccatggagcgggtggtcttcacctcctccgtcaccgccgtcgtctggaaggacgacgaccacaagcccgtcgacgccttcgacgagcggaactggagcgacctcaacctctgcaggaagcgcaagttgtggcatgcgctggccaagacgctgtcggagaagacggcctgggccttggccatggacagaggggtggacatggtggccatcaacgccggcctgctcaccgggccggggctctcctccgcccacccctgcctcaagggggtccccgagatgtacgagcacggcgtcctcgtcaccgtcgacgccgacttcctcgccgacgcccacgtggccgcctacgagtgccccacggccttcggccgctacctctgcttcaacaacgtcgtgtgccggcccgaggacgccctccagttcgcccagatgctcaccccgtccgctccatgctacccgccgagtgatgagctgaaggtgatcccacaaaggattcagaacaagaagctgaacaacctgatggtggagtttgccagtgccatatacggggacttggattagagaatcactagttcattgatttacatctcaagggcagctagggttgtattctttatgtacctaaatatctgtattctttttcctcctgaaaagggaaatatggttggtcagatgtacaaatctgtacaaggccaagcatgccgcatgtattccaccactcttaccaggatggtaggagcatttgagccagtgcttagcaatgtagtagtaatccttaggtccaacaaaagggaaaataagtccacagttatgttactactgccttgtacagcagcattatatgaatatgatg

SEQ ID NO: 30362 - protein, 348 aa, Triticum aestivum
ITSKAVSNSTPAATSLYSGALSDAPAYIRTYKRKQPEPAMCPGAPVAAAASDKSVCVMDASGPLGQALVHRLLRRGYTVHAATYGRSLDALALLAAAGHDEDRLKLFRADPFDYHSIADAVRGCSGLFCMFNTHEDQAGCDEVMVEVEVRAAQNVLEACAQTVTMERVVFTSSVTAVVWKDDDHKPVDAFDERNWSDLNLCRKRKLWHALAKTLSEKTAWALAMDRGVDMVAINAGLLTGPGLSSAHPCLKGVPEMYEHGVLVTVDADFLADAHVAAYECPTAFGRYLCFNNVVCRPEDALQFAQMLTPSAPCYPPSDELKVIPQRIQNKKLNNLMVEFASAIYGDLD

SEQ ID NO: 30363 - protein, 309 aa, Triticum aestivum
MCPGAPVAAAASDKSVCVMDASGPLGQALVHRLLRRGYTVHAATYGRSLDALALLAAAGHDEDRLKLFRADPFDYHSIADAVRGCSGLFCMFNTHEDQAGCDEVMVEVEVRAAQNVLEACAQTVTMERVVFTSSVTAVVWKDDDHKPVDAFDERNWSDLNLCRKRKLWHALAKTLSEKTAWALAMDRGVDMVAINAGLLTGPGLSSAHPCLKGVPEMYEHGVLVTVDADFLADAHVAAYECPTAFGRYLCFNNVVCRPEDALQFAQMLTPSAPCYPPSDELKVIPQRIQNKKLNNLMVEFASAIYGDLD

SEQ ID NO: 30364 - protein, 291 aa, Triticum aestivum
MDASGPLGQALVHRLLRRGYTVHAATYGRSLDALALLAAAGHDEDRLKLFRADPFDYHSIADAVRGCSGLFCMFNTHEDQAGCDEVMVEVEVRAAQNVLEACAQTVTMERVVFTSSVTAVVWKDDDHKPVDAFDERNWSDLNLCRKRKLWHALAKTLSEKTAWALAMDRGVDMVAINAGLLTGPGLSSAHPCLKGVPEMYEHGVLVTVDADFLADAHVAAYECPTAFGRYLCFNNVVCRPEDALQFAQMLTPSAPCYPPSDELKVIPQRIQNKKLNNLMVEFASAIYGDLD

SEQ ID NO: 30365 - DNA, 771 bp, Triticum aestivum
agagccaaccaacagggcgaccaagctcaattagctcagactactcagctaccgcctgtctgctctcaattgctccataccctacatggcgagggttcaccccaacatggtggccgcgccgggcgccgtcgacgaggcgccggccagctccgcggtggacgggccgacgacgctgacggtgtggcgcaagtccctgctgttcgactgcaaggggttcacggtgttcgacgccgagggcaaccttgcctaccgcgtcgacagctacgcctccgagagcggcgacgaggtcgtcctcatggacgcggccggccgccccgccttcaccgtccgccgcaagcggttcaccctgcagggcgagcagtggctcgtcttctccggcgaggagacgcggagtcccgtgtacaccgtcaggcggagcggccgcggcaagacgttggcgcacgtgacggcgtgcgcgggctccggccatgggccgtcttacgaggtggaggggtcgtacgcgcggcggagctgcgtggtgtacgacggcgagcggcgcgcggtggcggagatcaggcccaaggaggtggtcggcacggatgtgttccgcctggcggtgcagcccggcgtgggcgtgccgctcgccatggcagtggtggtggcgctggagcagatgttcgcgaggccgtcgctcctcaggagctggtccacatagattatatatttaattataatttgtttgttcatcggagtacgtctcagtatagccaagcttatagcttttttttgcct

SEQ ID NO: 30366 - protein, 257 aa, Triticum aestivum
RANQQGDQAQLAQTTQLPPVCSQLLHTLHGEGSPQHGGRAGRRRRGAGQLRGGRADDADGVAQVPAVRLQGVHGVRRRGQPCLPRRQLRLRERRRGRPHGRGRPPRLHRPPQAVHPAGRAVARLLRRGDAESRVHRQAERPRQDVGARDGVRGLRPWAVLRGGGVVRAAELRGVRRRAARGGGDQAQGGGRHGCVPPGGAARRGRAARHGSGGGAGADVREAVAPQELVHIDYIFNYNLFVHRSTSQYSQAYSFFLP

SEQ ID NO: 30367 - protein, 202 aa, Triticum aestivum
MARVHPNMVAAPGAVDEAPASSAVDGPTTLTVWRKSLLFDCKGFTVFDAEGNLAYRVDSYASESGDEVVLMDAAGRPAFTVRRKRFTLQGEQWLVFSGEETRSPVYTVRRSGRGKTLAHVTACAGSGHGPSYEVEGSYARRSCVVYDGERRAVAEIRPKEVVGTDVFRLAVQPGVGVPLAMAVVVALEQMFARPSLLRSWST

SEQ ID NO: 30368 - protein, 195 aa, Triticum aestivum
MVAAPGAVDEAPASSAVDGPTTLTVWRKSLLFDCKGFTVFDAEGNLAYRVDSYASESGDEVVLMDAAGRPAFTVRRKRFTLQGEQWLVFSGEETRSPVYTVRRSGRGKTLAHVTACAGSGHGPSYEVEGSYARRSCVVYDGERRAVAEIRPKEVVGTDVFRLAVQPGVGVPLAMAVVVALEQMFARPSLLRSWST

SEQ ID NO: 30369 - DNA, 710 bp, Triticum aestivum
ttggaactagagcgaaaaccaaaagatgggtctaagagcactgcctcttcaacataatagtggattcatctccacgaccaaagtcccgatctcaagaacctcgcagagattaagccggaaccctagatgggtcgtggtgtcggccaagcaagagaaagatgaggagaagaagagggaagatgagacttcattgttcaccagactaacagatgcgttggatttcgcacaggttcggtcggagaaagacgccgagcttctctatgaggcccgtgaagccaccaaatctggtggcaagatgagcaaagaacagtatggggcgttgagaagaaaaatcggagggacatacaaggacttctttaaatcctacgttgaagtggatggagaatatgtggaggaaggatgggtggacaaaacatgtaagatatgcaaaaaggacacaaagggtgaggcaagacaagtggacaaggcagggagatatgctcatgtctcctgtcttcaaaacccctccaactcttctggaaatttcttcaccagactcttctcaagatgatcaatctcccatatcgtatacatgactctgtttgtttctgtttttttatagctaagtcattcttgcaattttgtgtatcttatagaaatcgaaattatacacatgccaaaacaaaaattatgtgtattgggatctttagaaacaaagacataacgatatc

SEQ ID NO: 30370 - protein, 174 aa, Triticum aestivum
MGLRALPLQHNSGFISTTKVPISRTSQRLSRNPRWVVVSAKQEKDEEKKREDETSLFTRLTDALDFAQVRSEKDAELLYEAREATKSGGKMSKEQYGALRRKIGGTYKDFFKSYVEVDGEYVEEGWVDKTCKICKKDTKGEARQVDKAGRYAHVSCLQNPSNSSGNFFTRLFSR

SEQ ID NO: 30371 - DNA, 555 bp, Triticum aestivum
aacagccagccagcacaagctcaacgagccacgctagcgtttgagagaacaaaaacagtccaccgacgtacgatggcgccgagcaccttcccgctcgcgctcctggccgtgtccctcgttctcctggtggtcggcggcctcgggccggcggcggaggcacagccgccggggaggtgcgtgccgcagctgaaccggctgctggcgtgccgcgcgtacctggtgcccggcgcggccgaccccagcgccgactgctgcagcgcgctgaactccatctcgcgcgactgcgcgtgcagcaccatgggcatcatcaacagcctcccctcccgctgcaacatcggacaagtcaactgctcggcttgaggcggaacgaagaaacgatgcgagtcacagagtgactaataatgaaggtggtcatttctgccgttgttgcggcatgtctgcctcttcgccgccgtcttagttttcgtttgtccagtctgtcgtgtcctgctgctgctgtcgatctcgacacgttaataaaatggacgatttgaggcacggcctctcactttaacc

SEQ ID NO: 30372 - protein, 119 aa, Triticum aestivum
NSQPAQAQRATLAFERTKTVHRRTMAPSTFPLALLAVSLVLLVVGGLGPAAEAQPPGRCVPQLNRLLACRAYLVPGAADPSADCCSALNSISRDCACSTMGIINSLPSRCNIGQVNCSA

SEQ ID NO: 30373 - protein, 95 aa, Triticum aestivum
MAPSTFPLALLAVSLVLLVVGGLGPAAEAQPPGRCVPQLNRLLACRAYLVPGAADPSADCCSALNSISRDCACSTMGIINSLPSRCNIGQVNCSA

SEQ ID NO: 30374 - DNA, 980 bp, Triticum aestivum
actctcaccagtcgcaaaaaaaaaaaaacacaaaaactaaaaaagatcaagaaaagttctaatggctgcctcaaccatggctctgtcctcccctgcctttgccggaaaggccgtgaagctctcaccgggagcctccgaggtctttggaaccggccgtgtcaccatgagaaaaaccgtcaaacccaccggtccatctggcagcccatggtacggatccgacagggtcaagtacttgggtccattctccggagagcccccgagctacctcacaggagagttccctggtgactacggatgggacaccgccggtctatccgctgaccccgagacctttgcaaggaaccgtgagctagaagttatccactgcaggtgggccatgctcggagccctaggctgcgttttccctgagctcttggctaggaacggagtgaagttcggagaagctgtttggttcaaggctggttcacagatcttcagcgaaggagggcttgactacttgggcaacccgagcttggttcacgctcaaagcatcttagccatttgggcgactcaggtgatcctcatgggagctgttgagggttacagagtagccggagagggaccattgggagaagcagaggacttgctttacccaggaggcagcttcgacccgctgggtctcgctaccgacccagaggctttcgcggagttgaaggtgaaggagatcaagaacggaaggttggctatgttctctatgtttggattctttgttcaggctattgtaaccggaaagggaccgttggagaatcttgctgaccatttggctgatccagtcaacaacaacgcatgggcctttgccaccaacttcgtccctggaaagtgaatgaattaaaggttattatcatgcgagtgagcagcagcgaaagagattgtttgtatatttgttaaacttcctttgtcgtatctttgtatgatttatcagaaaccgaacctcatttctc

SEQ ID NO: 30375 - protein, 266 aa, Triticum aestivum
MAASTMALSSPAFAGKAVKLSPGASEVFGTGRVTMRKTVKPTGPSGSPWYGSDRVKYLGPFSGEPPSYLTGEFPGDYGWDTAGLSADPETFARNRELEVIHCRWAMLGALGCVFPELLARNGVKFGEAVWFKAGSQIFSEGGLDYLGNPSLVHAQSILAIWATQVILMGAVEGYRVAGEGPLGEAEDLLYPGGSFDPLGLATDPEAFAELKVKEIKNGRLAMFSMFGFFVQAIVTGKGPLENLADHLADPVNNNAWAFATNFVPGK

SEQ ID NO: 30376 - protein, 261 aa, Triticum aestivum
MALSSPAFAGKAVKLSPGASEVFGTGRVTMRKTVKPTGPSGSPWYGSDRVKYLGPFSGEPPSYLTGEFPGDYGWDTAGLSADPETFARNRELEVIHCRWAMLGALGCVFPELLARNGVKFGEAVWFKAGSQIFSEGGLDYLGNPSLVHAQSILAIWATQVILMGAVEGYRVAGEGPLGEAEDLLYPGGSFDPLGLATDPEAFAELKVKEIKNGRLAMFSMFGFFVQAIVTGKGPLENLADHLADPVNNNAWAFATNFVPGK

SEQ ID NO: 30377 - protein, 232 aa, Triticum aestivum
MRKTVKPTGPSGSPWYGSDRVKYLGPFSGEPPSYLTGEFPGDYGWDTAGLSADPETFARNRELEVIHCRWAMLGALGCVFPELLARNGVKFGEAVWFKAGSQIFSEGGLDYLGNPSLVHAQSILAIWATQVILMGAVEGYRVAGEGPLGEAEDLLYPGGSFDPLGLATDPEAFAELKVKEIKNGRLAMFSMFGFFVQAIVTGKGPLENLADHLADPVNNNAWAFATNFVPGK

SEQ ID NO: 30378 - DNA, 582 bp, Triticum aestivum
acttccatccaggcagttcacgcttttttgcagaaaagtttataaaagaagccatccgcgaaacccacccgcacaaatccaaacagcattcgcccgtcggcatccccttccccttcccctcacgcgcgcgacctcgtcgtcgtcgtcgtctcggagatctcgccttcccgccggcagcagccatggacgccgtcgactccgtggaccccctccgcgagttcgccaaggacagcgtccgcctcgtcaagcgctgccacaagcccgaccgcaaggagttcaccaaggtggcggcgcggacggcgatcgggttcgtcgtcatggggttcgtcggcttcttcgtcaagctcatcttcatccccatcaacaacatcatcgtcggctccggctaggttggaggacgggatgacaggatgcggggatagtgtgatgccggcagttgagcctgcggtgtgtcgaagtaggcgcccaaagtttgttctgaagttgttgttaaagacctgatttgtgagaaattgtcaccagcttcatcctcgtaatgagtatagatcttgaaacagcgagccataaagtttatgttttgtc

SEQ ID NO: 30379 - protein, 134 aa, Triticum aestivum
LPSRQFTLFCRKVYKRSHPRNPPAQIQTAFARRHPLPLPLTRATSSSSSSRRSRLPAGSSHGRRRLRGPPPRVRQGQRPPRQALPQARPQGVHQGGGADGDRVRRHGVRRLLRQAHLHPHQQHHRRLRLGWRTG

SEQ ID NO: 30380 - protein, 128 aa, Triticum aestivum
FHPGSSRFFAEKFIKEAIRETHPHKSKQHSPVGIPFPFPSRARPRRRRRLGDLAFPPAAAMDAVDSVDPLREFAKDSVRLVKRCHKPDRKEFTKVAARTAIGFVVMGFVGFFVKLIFIPINNIIVGSG

SEQ ID NO: 30381 - protein, 68 aa, Triticum aestivum
MDAVDSVDPLREFAKDSVRLVKRCHKPDRKEFTKVAARTAIGFVVMGFVGFFVKLIFIPINNIIVGSG

SEQ ID NO: 30382 - DNA, 611 bp, Triticum aestivum
aggtcttttagatcgatcggatctgaatcatggacgaggaggcagcaaaacctagagacaccaccataaaccagcaacaacaatactattacggaacgtttcaaggcgttgcaaattatcctcctcccgctccgccaccgcttccgcatcaacctattgtcacgagtcccttgcttcctcctgtacatggttatcagactctccaagaatatacagtggttgaggtgagaccggtgagagagcatgacgttccttgctgtggctttggcatgggctggttcttgtttattatgggcttcttgttcggtgggatcccttggtatctcggtgctgttattattcttttcacctcagttgatcatcgcgagaaggctggttacgttgcttgttctgtcgcatccgttgtctatttgattgccgtcatgctcgggatggctgggaatattaacatcatctggtgacagatactcccttacatatcacatttcaataacgtatatgcatcatcataaccatagtgatttacaaaagcaaatgttgttattctgtgttgtatttatttgtttacaacaatgatcaatatgttcttgattcctttgatggcatcttcc

SEQ ID NO: 30383 - protein, 143 aa, Triticum aestivum
MDEEAAKPRDTTINQQQQYYYGTFQGVANYPPPAPPPLPHQPIVTSPLLPPVHGYQTLQEYTVVEVRPVREHDVPCCGFGMGWFLFIMGFLFGGIPWYLGAVIILFTSVDHREKAGYVACSVASVVYLIAVMLGMAGNINIIW

SEQ ID NO: 30384 - DNA, 765 bp, Triticum aestivum
caacgccacatacgtgacttgactcaagttgagcacactttgtgatggaggcatggagccaaccagatcaccactagttttgctcgtggcgcaagccgtactcgctgcggcgatgctgcaacaaccatcagaagggagggtgcaggcagtggcgccatcagcgccacatctcgccggaggcaaagaagctgaagtagcagccgctacctcctcgccggcttcaccattcaccggcgacacgccattagttttgctcgtggcgtacgccgtactcgcggaggcgatgctgcaaccatcagagacgagggtacaggcggctacctcctcgccttcttcacagttcaccggtgacccgccacggccctccctcccgggcttgccgcctctacctggcttgcccgcgttaccgccgtcgccgggcttcccgggcatggcaggcgcgcagtcgtctccttcgccttcgcagcagccggccaaaacatgcttggagccgctgatacttgcggaaccgtgcgtcagttacctgacgaactccagcgtgccggcgccgccgagaacgtgctgcgacggcttcaggtcgctcgtcggcggcggcgacaggatttgcctgtgccacgccatcatgggcgacctgggtacatttgcaggcgggacgatagaccagcacgtcgccggagcttcttctgatgtgcatcggcaagtctgaatcgttgtttgttttgttttattaactgtatgaacttacgagatgaactgtcatgtgtt

SEQ ID NO: 30385 - protein, 217 aa, Triticum aestivum
MEPTRSPLVLLVAQAVLAAAMLQQPSEGRVQAVAPSAPHLAGGKEAEVAAATSSPASPFTGDTPLVLLVAYAVLAEAMLQPSETRVQAATSSPSSQFTGDPPRPSLPGLPPLPGLPALPPSPGFPGMAGAQSSPSPSQQPAKTCLEPLILAEPCVSYLTNSSVPAPPRTCCDGFRSLVGGGDRICLCHAIMGDLGTFAGGTIDQHVAGASSDVHRQV

SEQ ID NO: 30386 - protein, 197 aa, Triticum aestivum
MLQQPSEGRVQAVAPSAPHLAGGKEAEVAAATSSPASPFTGDTPLVLLVAYAVLAEAMLQPSETRVQAATSSPSSQFTGDPPRPSLPGLPPLPGLPALPPSPGFPGMAGAQSSPSPSQQPAKTCLEPLILAEPCVSYLTNSSVPAPPRTCCDGFRSLVGGGDRICLCHAIMGDLGTFAGGTIDQHVAGASSDVHRQV

SEQ ID NO: 30387 - protein, 140 aa, Triticum aestivum
MLQPSETRVQAATSSPSSQFTGDPPRPSLPGLPPLPGLPALPPSPGFPGMAGAQSSPSPSQQPAKTCLEPLILAEPCVSYLTNSSVPAPPRTCCDGFRSLVGGGDRICLCHAIMGDLGTFAGGTIDQHVAGASSDVHRQV

SEQ ID NO: 30388 - DNA, 521 bp, Triticum aestivum
catggacgacatacactacaacaacgcctacttcgcgcgggtgggcggcgtggaggtgcgggagatgaacggcctcgaattagagttcctcttcgcgctgcgcttccgcctcaacgtcacgcccgacgacttcgcatcctactgcgccgcgctcgagggcgagatgatggccaccaccacgccgccgccgctgtctccgccggcggtcatggtctcggtctcggtctcgccggaggaggaggaagaagcggccgtcgcgggaggcggcatcatcacggccttcgcggcggctgctcgggtatctgtggccgagatcacccaatgacacggagacaacgtacgagcgagcccgcctccgtgcgtggagggcaaaatgggcaatgcctgtgttacgattctttcatttatttttcattttttatactagcttcttggtggggtgtgtaccaggttcgttgtcaattgaatgtgtacatttctatctttttgagctatcgatgaataacttgttttcggatggc

SEQ ID NO: 30389 - protein, 166 aa, Triticum aestivum
HGRHTLQQRLLRAGGRRGGAGDERPRIRVPLRAALPPQRHARRLRILLRRARGRDDGHHHAAAAVSAGGHGLGLGLAGGGGRSGRRGRRHHHGLRGGCSGICGRDHPMTRRQRTSEPASVRGGQNGQCLCYDSFIYFSFFILASWWGVYQVRCQLNVYISIFLSYR

SEQ ID NO: 30390 - protein, 107 aa, Triticum aestivum
MDDIHYNNAYFARVGGVEVREMNGLELEFLFALRFRLNVTPDDFASYCAALEGEMMATTTPPPLSPPAVMVSVSVSPEEEEEAAVAGGGIITAFAAAARVSVAEITQ

SEQ ID NO: 30391 - protein, 86 aa, Triticum aestivum
MNGLELEFLFALRFRLNVTPDDFASYCAALEGEMMATTTPPPLSPPAVMVSVSVSPEEEEEAAVAGGGIITAFAAAARVSVAEITQ

SEQ ID NO: 30392 - DNA, 590 bp, Triticum aestivum
aattaaaacaaaaatggcgtttgcttcaaagatcatcacatgcctcctcatccttacgatctacattgcagctccaacagagtcacacataacgtgtgggacagtgacaagcacaatgacacagtgcatcagctacttgaccaacggtggtccattgccgtcaagctgctgtgtggcagtcaaatcattgaaccaaatggctcagaccacaccagatcgccgacaagtatgtgagtgccttaaatcagtcggtaaggaaattaaaggcctcaatatcgaccttgtggccgcactccctaccacttgtggtgtttcactttcataccccattggtttcaacaccaattgtgacagtatatcgattgccgtgtgaaggagactagagatgtacgaacgaataatcaaagttggcccgactttaacctaaacaatacttctgctattttctattttatgacttgagtttcttattatgtgatccatttcatatggtaataagtaataacgataaaggagctgtctctccttttcgacgctttgatgtatgtacacgtaacataccatcaggaataacactttgtctttctctc

SEQ ID NO: 30393 - protein, 123 aa, Triticum aestivum
IKTKMAFASKIITCLLILTIYIAAPTESHITCGTVTSTMTQCISYLTNGGPLPSSCCVAVKSLNQMAQTTPDRRQVCECLKSVGKEIKGLNIDLVAALPTTCGVSLSYPIGFNTNCDSISIAV

SEQ ID NO: 30394 - protein, 119 aa, Triticum aestivum
MAFASKIITCLLILTIYIAAPTESHITCGTVTSTMTQCISYLTNGGPLPSSCCVAVKSLNQMAQTTPDRRQVCECLKSVGKEIKGLNIDLVAALPTTCGVSLSYPIGFNTNCDSISIAV

SEQ ID NO: 30395 - protein, 85 aa, Triticum aestivum
MTQCISYLTNGGPLPSSCCVAVKSLNQMAQTTPDRRQVCECLKSVGKEIKGLNIDLVAALPTTCGVSLSYPIGFNTNCDSISIAV

SEQ ID NO: 30396 - DNA, 1120 bp, Triticum aestivum
cttttctttcgataagacctcactctgctttcctctgctctgctcctactcgtgtcccggtcacgccacctcccgaccccccaaatcgcgagaccacccgcggcggctggccggccggcgggataggcgacgaggcgaagtaactcgagacggcgcgggcggaccgctccgtgtggctcatgaagcgctcccccatcgtctcccaggcccggcagggcgcctccgcctcctccagcgaagctaaccctaacccggccgtcgccaaggtcgtgctgtccctcgaccccctcagctccgctgagccctccctccagctcaagatggagatgcctcaaactagggaaactagcacttgcaacttaccaaagagttgccccttgaatatgttcttcctcctccgtctcttcgctatcgccatcctgccttgctctgccaacaacgccacccaactggtctatgacacagaaggcaacgagctaaatagcaagtcaaattactacatcctcccagccaaacctgcaagcggtggcggcctcaaagccatcccaaccggtctacggtgcctacattttgtggtcgaggagcgcagcgagacgactctcctcgacacgcccatgcgattcatgccgttgccagaacacgcttctaccactgagccgatccgcctttcgagtgacatatggatccgcctttcgagtgacatatggatcgagtttcacgacttgagaagcttttgctccgaaaggctagattggcccttaccgaacaggtgccggagtcgtcatcaggagagcctaaacacatggctgccggcagtgaagagggcctaagatcatttggggtgttccgggacggatctctcgggatataagataatttcatgtgttggcaaggggccatgcagagacctaggtttgcatgtttacaaggacaagacatggctgactgtaaaggataaaccttttatggttgtgtttaggaaaaagactatataggtgtttttttgcttgcttcttgaggtgatccctgtaggcgagttcattgtatcgccactgtggtgttcatgttatgtaatgtgttcccccactttgcaataaagcgatactaactatattatgtg

SEQ ID NO: 30397 - protein, 216 aa, Triticum aestivum
MKRSPIVSQARQGASASSSEANPNPAVAKVVLSLDPLSSAEPSLQLKMEMPQTRETSTCNLPKSCPLNMFFLLRLFAIAILPCSANNATQLVYDTEGNELNSKSNYYILPAKPASGGGLKAIPTGLRCLHFVVEERSETTLLDTPMRFMPLPEHASTTEPIRLSSDIWIRLSSDIWIEFHDLRSFCSERLDWPLPNRCRSRHQESLNTWLPAVKRA

SEQ ID NO: 30398 - protein, 169 aa, Triticum aestivum
MEMPQTRETSTCNLPKSCPLNMFFLLRLFAIAILPCSANNATQLVYDTEGNELNSKSNYYILPAKPASGGGLKAIPTGLRCLHFVVEERSETTLLDTPMRFMPLPEHASTTEPIRLSSDIWIRLSSDIWIEFHDLRSFCSERLDWPLPNRCRSRHQESLNTWLPAVKRA

SEQ ID NO: 30399 - protein, 167 aa, Triticum aestivum
MPQTRETSTCNLPKSCPLNMFFLLRLFAIAILPCSANNATQLVYDTEGNELNSKSNYYILPAKPASGGGLKAIPTGLRCLHFVVEERSETTLLDTPMRFMPLPEHASTTEPIRLSSDIWIRLSSDIWIEFHDLRSFCSERLDWPLPNRCRSRHQESLNTWLPAVKRA

SEQ ID NO: 30400 - DNA, 573 bp, Triticum aestivum
atcttactcacattcactcaactgatactactaggtagtccccttccttcggatctcttgctcactcgaagatgtcgaccgtgacccgtgcctacctcgaccagaggctcgcagccgccaagcgctgctcgaaagaggctgccatggcgggagctaaggccgcggccgtcgccaccgtcgctgccgcagtccccaccctcgcgagcgtgaggatgctgccgtgggcgaaggcgcacctcaacccaaccgggcaggcgctcatcatctccaccgtcgccgggatggcctacttcatcgtcgcagacaagaccatcctctccatggcaaggaagcactccttcgaggacgcgccggagcacctcaggaacacctccttccactaattagcctattgtagatccattagtatagtgcgtaataaaccgtgttctgctgaagcctgaaagatggtataatgttcagcgagagggtataattatctgatgatgtatgtaataatgtggccatgttctccatcttgtcatctttccagggatcgtgaaataataaccagctcttgtacaactttgcttc

SEQ ID NO: 30401 - protein, 103 aa, Triticum aestivum
MSTVTRAYLDQRLAAAKRCSKEAAMAGAKAAAVATVAAAVPTLASVRMLPWAKAHLNPTGQALIISTVAGMAYFIVADKTILSMARKHSFEDAPEHLRNTSFH

SEQ ID NO: 30402 - protein, 79 aa, Triticum aestivum
MAGAKAAAVATVAAAVPTLASVRMLPWAKAHLNPTGQALIISTVAGMAYFIVADKTILSMARKHSFEDAPEHLRNTSFH

SEQ ID NO: 30403 - protein, 56 aa, Triticum aestivum
MLPWAKAHLNPTGQALIISTVAGMAYFIVADKTILSMARKHSFEDAPEHLRNTSFH

SEQ ID NO: 30404 - DNA, 907 bp, Triticum aestivum
  misc_feature (172)..(172): n is a, c, g, or t
aaaagtcatatcttcttgtaccactctccttcaaacatagtcagagaaaaacagcaactcttgtctgaaaaatcagagagagagagagagagaaaaagaatggatcaaaatgtgctaggcactcaagtatacccctacacgacccaaacccatggccagtgcatcatcgttnaccagatcgatggatcatcatcaggcgaaggatcaaagccggtgaagcggcggaggaggaggaggagcaaagggtcgtctgccacgagcgaagatgacatgacggcgatcggagtgatgttgaggaagaggaagttgaccgatgagcaagtgaatatgctcgaattcagcttcgagaacgagcacaagcttgagtcagggaggaaagagaagatcgccgcagagttaggtctcgacccgagacaggtggctgtttggttccagaaccgccgtgcacggtggaagaacaagaaactcgaggaagaatacgccaaactgaagagccaacacgacaccgtcgtcctcggccaatgtcagctcgaatctcaggtattaaaactgtcggaacaattgagtgaagctcaaaacgaaattcgaaaactttccgagcgacttgctcaagaaacattaacaaacagtccgagttcacctcgttctgttgaagccaatggtgcaccaattcatttcgagtttccgccggatgttaattacaacatcccgttttacatatcggataatagttacttgcagaacatggagtattgggatggtttgtatgtgtaattttaacaactaaaatatttagagtctatggatcgaaaatcatgtttaaattaatgtataaatagatgtttgtcaacctgttgtaaatgcagtgtttaaaatatttttattttaataaataactttgtttctc

SEQ ID NO: 30405 - protein, 257 aa, Triticum aestivum
  misc_feature (58)..(58): Xaa can be any naturally occurring amino acid
KSHIFLYHSPSNIVREKQQLLSEKSERERERKRMDQNVLGTQVYPYTTQTHGQCIIVXQIDGSSSGEGSKPVKRRRRRRSKGSSATSEDDMTAIGVMLRKRKLTDEQVNMLEFSFENEHKLESGRKEKIAAELGLDPRQVAVWFQNRRARWKNKKLEEEYAKLKSQHDTVVLGQCQLESQVLKLSEQLSEAQNEIRKLSERLAQETLTNSPSSPRSVEANGAPIHFEFPPDVNYNIPFYISDNSYLQNMEYWDGLYV

SEQ ID NO: 30406 - protein, 224 aa, Triticum aestivum
  misc_feature (25)..(25): Xaa can be any naturally occurring amino acid
MDQNVLGTQVYPYTTQTHGQCIIVXQIDGSSSGEGSKPVKRRRRRRSKGSSATSEDDMTAIGVMLRKRKLTDEQVNMLEFSFENEHKLESGRKEKIAAELGLDPRQVAVWFQNRRARWKNKKLEEEYAKLKSQHDTVVLGQCQLESQVLKLSEQLSEAQNEIRKLSERLAQETLTNSPSSPRSVEANGAPIHFEFPPDVNYNIPFYISDNSYLQNMEYWDGLYV

SEQ ID NO: 30407 - protein, 167 aa, Triticum aestivum
MTAIGVMLRKRKLTDEQVNMLEFSFENEHKLESGRKEKIAAELGLDPRQVAVWFQNRRARWKNKKLEEEYAKLKSQHDTVVLGQCQLESQVLKLSEQLSEAQNEIRKLSERLAQETLTNSPSSPRSVEANGAPIHFEFPPDVNYNIPFYISDNSYLQNMEYWDGLYV

SEQ ID NO: 30408 - DNA, 652 bp, Triticum aestivum
agaaaagaaggacttgttccagagccaggaggaggaaatccaaccccgccgccgccgccatgagcgccatgaagttctgccgcgagtgcaacaacatcctgtaccccaaggaggagaaggagcggaaactcctcctcttcgcctgccgcaactgcgagcaccaggaggtggccggcgacaactgcgtctaccgcaacatcgtgcaccacgaggccggggagcgcacgcaggtcctgcaggacgtggcctccgaccccaccctgccccgcaccaaggacgtccgctgcgccgcctgcggccacggcgaggccgtcttcttccaggctacagcaagaggggaggaggggatgactctcttcttcgtgtgctgcaacccctcctgcggcaaccggtggagggagtgaacgatccgcatctcctgcctgcggaggccaccgtcgacccgtgccctttaggccttaattgatcgtgctctggaatttagcttccgatagcttagccgtcttgtcagagcacaagagagctcaacttgtgaaacatataattgtggtttcagtacttgcccgtgaccatgtacttaatttacaaacccttatatgtctctagtgagactaatctcattttataggttggttcttgcctatccactgtt

SEQ ID NO: 30409 - protein, 154 aa, Triticum aestivum
EKKDLFQSQEEEIQPRRRRHERHEVLPRVQQHPVPQGGEGAETPPLRLPQLRAPGGGRRQLRLPQHRAPRGRGAHAGPAGRGLRPHPAPHQGRPLRRLRPRRGRLLPGYSKRGGGDDSLLRVLQPLLRQPVEGVNDPHLLPAEATVDPCPLGLN

SEQ ID NO: 30410 - protein, 133 aa, Triticum aestivum
KRRTCSRARRRKSNPAAAAMSAMKFCRECNNILYPKEEKERKLLLFACRNCEHQEVAGDNCVYRNIVHHEAGERTQVLQDVASDPTLPRTKDVRCAACGHGEAVFFQATARGEEGMTLFFVCCNPSCGNRWRE

SEQ ID NO: 30411 - protein, 114 aa, Triticum aestivum
MSAMKFCRECNNILYPKEEKERKLLLFACRNCEHQEVAGDNCVYRNIVHHEAGERTQVLQDVASDPTLPRTKDVRCAACGHGEAVFFQATARGEEGMTLFFVCCNPSCGNRWRE

SEQ ID NO: 30412 - DNA, 591 bp, Triticum aestivum
acctaagcaatcgcagcatccacagcacacaaatccgcagccatggcctcccagctctccgccatgacctccgtgccgcagttccacggcctcaggagctactcctcgcccaggtccatagccacgctgccgtccttgaggaagaggtcccagggcatccgctgcgactacatcggctcctccaccaacatcatcatggtgacgacgacgaccctgatgctgttcgccgggcggttcgggctggcgccgtcggcgaacaggaaggctacggcggggctcaagttggaggcgcgcgagtccgggctgcagacgggcgacccggccggcttcacgctcgccgacacgctcgcatgcggctccttcggccacatcttgggcgtcggcatcgtgctcggcctcaagaacaccggcgtcctcgaccagatcatcggctagaaccttccttttccgtccatagctgttctgcattcgcatcgcgcgctccatgtagtggatcaattaatgctcccttcgtgattgaaaaaaaaaaaaaaaaaagcttatcgataccgtcgactgtttaaacacaataaagttggaacgggagggggg

SEQ ID NO: 30413 - protein, 186 aa, Triticum aestivum
LSNRSIHSTQIRSHGLPALRHDLRAAVPRPQELLLAQVHSHAAVLEEEVPGHPLRLHRLLHQHHHGDDDDPDAVRRAVRAGAVGEQEGYGGAQVGGARVRAADGRPGRLHARRHARMRLLRPHLGRRHRARPQEHRRPRPDHRLEPSFSVHSCSAFASRAPCSGSINAPFVIEKKKKKSLSIPSTV

SEQ ID NO: 30414 - protein, 130 aa, Triticum aestivum
MASQLSAMTSVPQFHGLRSYSSPRSIATLPSLRKRSQGIRCDYIGSSTNIIMVTTTTLMLFAGRFGLAPSANRKATAGLKLEARESGLQTGDPAGFTLADTLACGSFGHILGVGIVLGLKNTGVLDQIIG

SEQ ID NO: 30415 - protein, 123 aa, Triticum aestivum
MTSVPQFHGLRSYSSPRSIATLPSLRKRSQGIRCDYIGSSTNIIMVTTTTLMLFAGRFGLAPSANRKATAGLKLEARESGLQTGDPAGFTLADTLACGSFGHILGVGIVLGLKNTGVLDQIIG

SEQ ID NO: 30416 - DNA, 902 bp, Triticum aestivum
aacaaaaaacactttaaaatccaaaaagaaagaaagagaaattaaacatcttatccaaaatcaagactctgttttcgtttcattcgatggatccattttacacttctttttcagattccttcctctcgatccccgaccacaggtctcctgtttctgacagtagtgagtgttctccaaagctagcttcgagctgtccgaagaaactagcagggagaaagaagtttcgtgagacacgtcatccgatttacagaggagttcgtcagagaaactcagggaaatgggtttgtgaagttagggagcctaataagaagtcgaggatttggttagggacttttccgacagtcgaaatggccgctcgtgctcacgacgtcgccgctttagcccttcgtggccgctccgcttgtcttaatttcgccgactcggcttggcgtctacggattcctgagtctacttgtcctaaagaaattcagagagctgcggctgaagctgcaatggcgtttcagaacaagacggctacgactgagacgactatggttgaggcagtgaaaccggcagaggagacggttgggcaaacgggtggggagaccatggaagagaacggtgtgttttatatggccgaagaagcggttttggggatgccaaggtttcttgagaatatgggggaggagatgctcttgccgccgccggaacttggatggaatcataacgacttggccggagatgctgacgtgtcactctggagtttttagaatttgaatcttctcttattattcagattttgtaagattttttgaatttctaggattggtcaaaagttcaactacctactttttattggtagactggtagtacgatacggaaagagaatggagatatacaaatctaataaattctatattact

SEQ ID NO: 30417 - protein, 220 aa, Triticum aestivum
MDPFYTSFSDSFLSIPDHRSPVSDSSECSPKLASSCPKKLAGRKKFRETRHPIYRGVRQRNSGKWVCEVREPNKKSRIWLGTFPTVEMAARAHDVAALALRGRSACLNFADSAWRLRIPESTCPKEIQRAAAEAAMAFQNKTATTETTMVEAVKPAEETVGQTGGETMEENGVFYMAEEAVLGMPRFLENMGEEMLLPPPELGWNHNDLAGDADVSLWSF

SEQ ID NO: 30418 - protein, 133 aa, Triticum aestivum
MAARAHDVAALALRGRSACLNFADSAWRLRIPESTCPKEIQRAAAEAAMAFQNKTATTETTMVEAVKPAEETVGQTGGETMEENGVFYMAEEAVLGMPRFLENMGEEMLLPPPELGWNHNDLAGDADVSLWSF

SEQ ID NO: 30419 - DNA, 861 bp, Triticum aestivum
  misc_feature (98)..(98): n is a, c, g, or t
ataaagcaagctagctttcttggtgaacaagccactgctattacgaaccagacccacttgtgaaggccacgtttatttctgcgtgttatacgacgatngaggcagagctgatacgttggccagctggccaggtctgccttattgctctgatactcctccgtgattctcaccctgctaacatcaaccaagaggggaatttattgccagcggaagtgatgatggtagatggttcatatgggagaaaagaacaggaaggcttgttaaaatgcttgcaggggatggagctgttgtgaactgtatacagtctcatccctatgattgtgctgttgcaacgagtggaattgacaatacaataaagttatggacaccggatgcagaaggtacttctatggttgatggaccagaaattgatgtgttaagtgccatagagaacaaccagaagaagttatgccgcaaccgtgaaactttgttgccttttgagtttttggaacgatttggggcgcatgaatttgctgaaggaagcttgcatcctttagagtgtgcgcagacttgatatactattgcttgggttgctgaggaaaagggaggacatttaatccaagatacaagcagccagtgtctaggtaaacatgagattgcaaggttgtgttgcaatcgtagccagtgttttgcacaccttgcttagataatattgcaggggcgctggtattaagttgttgcttgagatgtgaatagacagtaaaggctgtttgttggtgcattcacttgtacagattgtagaaaagcgaagtcttgtaataagtaaatcatctgtacatgcttccataatagagccgtctgctgtgacgtttttctggggcg

SEQ ID NO: 30420 - protein, 95 aa, Triticum aestivum
MLAGDGAVVNCIQSHPYDCAVATSGIDNTIKLWTPDAEGTSMVDGPEIDVLSAIENNQKKLCRNRETLLPFEFLERFGAHEFAEGSLHPLECAQT

SEQ ID NO: 30421 - protein, 54 aa, Triticum aestivum
MVDGPEIDVLSAIENNQKKLCRNRETLLPFEFLERFGAHEFAEGSLHPLECAQT

SEQ ID NO: 30422 - DNA, 734 bp, Triticum aestivum
aatgatggatgcgatgaaaaagatagataaggataaggtgaaagctgcgctggagaaacggaggaagtcgaaaggcgatgctggtaggaaagtggacgtcatggatgatcatgacctgattgagagggagctggaacatggcgtggagttggctgccgaggacgagaaaaaacacgacagaaggcagagctggccccaccccgcgcaccgggaggatcaccagaacacggctcgcaaggcggagaacaccgaagagggcgagctgtccctggatggccaggaataccgctctcctggccccgacaaccggaagaggaaggacgcgcacgagcacaggagcaatgaccgcagcgccgagagagacatcaagaggccgaggccatgagatgaagtattcattgtggggggtgatcagcggtgacggactgagaactggtgttttgagcgccagtgcgtgatacctagtttttgcatcgcgggaacatacaggtgcttgtttgcctatgttgggagatttgaaatgtactgtactgtaacttgaaaagatgaggagtatgtacatgttcaggttatggaacattcggcagcagtttggtgtcgaggaacgataggaaagaggctgcatggcctgcacccgaaggctatataaataactttttaaatacatggatttgaagcaaatttggattgggacatttatatggatttgaaacaaatttgattggcacatttct

SEQ ID NO: 30423 - protein, 127 aa, Triticum aestivum
MMDAMKKIDKDKVKAALEKRRKSKGDAGRKVDVMDDHDLIERELEHGVELAAEDEKKHDRRQSWPHPAHREDHQNTARKAENTEEGELSLDGQEYRSPGPDNRKRKDAHEHRSNDRSAERDIKRPRP

SEQ ID NO: 30424 - protein, 126 aa, Triticum aestivum
MDAMKKIDKDKVKAALEKRRKSKGDAGRKVDVMDDHDLIERELEHGVELAAEDEKKHDRRQSWPHPAHREDHQNTARKAENTEEGELSLDGQEYRSPGPDNRKRKDAHEHRSNDRSAERDIKRPRP

SEQ ID NO: 30425 - protein, 123 aa, Triticum aestivum
MKKIDKDKVKAALEKRRKSKGDAGRKVDVMDDHDLIERELEHGVELAAEDEKKHDRRQSWPHPAHREDHQNTARKAENTEEGELSLDGQEYRSPGPDNRKRKDAHEHRSNDRSAERDIKRPRP

SEQ ID NO: 30426 - DNA, 1080 bp, Triticum aestivum
agaacatcctaatcgaaaaaaccagacacagagcttgagagagagagagagaagatggcgtacaacgcgtgtttcctacatcagagcgcactagcctcctcctccgtcgcaagatcatcaccttcctcatcatcccagcgctacgtgtcactctctaaactagtctgcaaagcacaacagactcaagaagacgatacctccaccgtctctcgccgtctcgctctcgcacttctcgtcggcgccgctgcggttggttccaaagtgtctcccgccgatgctgcctacggtgaagctgcaaatgtgtttgggaagccaaagacaaacacagacttcactgcgtacaatggagatggattccaagtgcaggtgccagctaagtggaacccaagcagagaggtagagtatccaggacaagtccttaggtacgaagacaactttgacgctactagcaatctcaatgtcatggtcactcctaccgacaagaagtccatcactgattacggttctcctgaagagttcctctctcaggtcaactatcttctcgggaaacaagcgtacttcggtgagactgcctctgagggaggctttgacaacaatgcagtggcaacagcaaacattctggagacaaacattcaggacgttggtgggaaaccatactattacttgtcggtgttgacaagaacagccgatggagatgaaggtggtaagcatcagctgatcacagccaccgtgaatggagggaagctttatatctgcaaagcacaagctggagacaagaggtggttcaagggagccaataaatttgtggagaaagcagccatttctttcagtgttgcttgattaaaaaagctgcacaacagaagaactatatgctctgcttgttgttatcttcatttgtctcttgtaaagaatggaaaaatgaaacttagcttctgagaactatcaagatggtgatgttacctttgcggctttttcaaaattatattcggtagatctttgctcattagtataatggttgctcaaactaaagacactgactcaagaaaaagctatagactaattctaaatccttgaaaacct

SEQ ID NO: 30427 - protein, 261 aa, Triticum aestivum
MAYNACFLHQSALASSSVARSSPSSSSQRYVSLSKLVCKAQQTQEDDTSTVSRRLALALLVGAAAVGSKVSPADAAYGEAANVFGKPKTNTDFTAYNGDGFQVQVPAKWNPSREVEYPGQVLRYEDNFDATSNLNVMVTPTDKKSITDYGSPEEFLSQVNYLLGKQAYFGETASEGGFDNNAVATANILETNIQDVGGKPYYYLSVLTRTADGDEGGKHQLITATVNGGKLYICKAQAGDKRWFKGANKFVEKAAISFSVA

SEQ ID NO: 30428 - DNA, 747 bp, Triticum aestivum
atcgcaactcgcagcagttcaatacttgcacaaccatacacatcacacatcacctgtagatcgaccggtgcacgtaaggcgcgacaatggagtaccaggggcagaccggccacgccaccgacaaggtggaggagtacggccagcccgtggccgggcacggcggcgccaccgacggccccacggggacgcacggcgccgcagccgccgcgggcaccgggcagctccagccgaccagggacgaccacaagaccgacggtgtcctgcgccgctccggcagctccagctccagctcgtctgaggacgacggcgttggcgggaggaggaagaaggggatgaaggagaagatcaaggagaagctccccggcggagcccacaaggacgccaccgggcagcagcacacgccggcggccggcgagtacgccggcaccggcaccggcacccacggcgcggaggccaccggcgagaagaaaggcgtcatggacaagatcaaggagaagcttcccggcggacagcactaagttaagctaggcagctagcgatcgccctgtgctgtgtctgtgttcggtcaaagctcggtatcatgcgtacttctgcatgcgttcgtacggataaataatgggcgccgatcgaggtgccggagtatatatgttgtgtgtgtgacgtatttgtggaccccgtgtacatgtatttgtactgaagtgctaaaaccccatcgtaataaagcgctcgtttatatttgtgttttgt

SEQ ID NO: 30429 - protein, 143 aa, Triticum aestivum
MEYQGQTGHATDKVEEYGQPVAGHGGATDGPTGTHGAAAAAGTGQLQPTRDDHKTDGVLRRSGSSSSSSSEDDGVGGRRKKGMKEKIKEKLPGGAHKDATGQQHTPAAGEYAGTGTGTHGAEATGEKKGVMDKIKEKLPGGQH

SEQ ID NO: 30430 - protein, 111 aa, Triticum aestivum
IATRSSSILAQPYTSHITCRSTGARKARQWSTRGRPATPPTRWRSTASPWPGTAAPPTAPRGRTAPQPPRAPGSSSRPGTTTRPTVSCAAPAAPAPARLRTTALAGGGRRG

SEQ ID NO: 30431 - protein, 98 aa, Triticum aestivum
SQLAAVQYLHNHTHHTSPVDRPVHVRRDNGVPGADRPRHRQGGGVRPARGRARRRHRRPHGDARRRSRRGHRAAPADQGRPQDRRCPAPLRQLQLQLV

SEQ ID NO: 30432 - DNA, 568 bp, Triticum aestivum
cttatcacaaaaaaaaaagagaaaatcaaaacacatgactatgggtctgaagttctttacatgccttgttttgacggtctgcattgccgcatcagtagatgcagcactcacatgtggtacagtgacaagtagcttggctccatgtgccacctacctatcgaaaggtggggcggtggtgccgggtccatgttgtgcgggagtaaaaaaattgaatgatatggctcaaaccacaccggaccgccaacaagcatgcaaatgcctaaaggccgctgcaaaaagcatcaatccaagtctagcctccggccttcctggaaagtgcagtgttagcattccctatcctatctccatgagcaccaactgcgacaatgtcaaatgaagtgggacgcatatcattgtgtggatgatgagtatggtttaccataagtaaaataaaagggtctatgtacgctgacctcaccatgctctaggttgtcttgtttgatttcttttgttgttgttgaaagtttgtcatgttactttgtaatcttttggtctagatattgtatcttaattattttaagatatgaca

SEQ ID NO: 30433 - protein, 124 aa, Triticum aestivum
LSQKKKRKSKHMTMGLKFFTCLVLTVCIAASVDAALTCGTVTSSLAPCATYLSKGGAVVPGPCCAGVKKLNDMAQTTPDRQQACKCLKAAAKSINPSLASGLPGKCSVSIPYPISMSTNCDNVK

SEQ ID NO: 30434 - protein, 113 aa, Triticum aestivum
MTMGLKFFTCLVLTVCIAASVDAALTCGTVTSSLAPCATYLSKGGAVVPGPCCAGVKKLNDMAQTTPDRQQACKCLKAAAKSINPSLASGLPGKCSVSIPYPISMSTNCDNVK

SEQ ID NO: 30435 - protein, 111 aa, Triticum aestivum
MGLKFFTCLVLTVCIAASVDAALTCGTVTSSLAPCATYLSKGGAVVPGPCCAGVKKLNDMAQTTPDRQQACKCLKAAAKSINPSLASGLPGKCSVSIPYPISMSTNCDNVK

SEQ ID NO: 30436 - DNA, 996 bp, Triticum aestivum
gatcctttctctcatcctcaaacgctgcaagcagcacaccacacaaaatacaaaatggctcaaaccatgctgcttacttcgggagtttctgcgaaccaattcttaaggaacaagaaccctctcgctcagcccaaagttcaccatttcttcctctcgggaaactctcatgttgttctaccatctcgaagaccatcattagtacctcttgccatcttcaaacccaaaaccaaagctgctcccaaaaaggttgagaaggtgaagccaaaggttgaagacggtatcttcggaacatctggtgggataggtttcacgaagcagaacgagctctttgtgggtcgtgttgctatgatcggtttcgctgcatcgttgctgggtgaggcgttaacagggaaaggtatattagcacagttgaatctggagacagggataccgatttacgaagcagaaccattacttctcttcttcatattgttcactctgttgggtgctatcggagctcttggggacagaggaaaattcgtcgacgatcctcccaccggacttgagaaagccgtcattcctcccggcaaaggcgtccgatctgctctcggtcttaaagaacaaggtccattgtttgggttcacgaaggcaaacgagttgttcgtaggaagattggcacagttgggaatagcattttcattgataggagagattataaccgggaaaggagccttggctcaactcaacattgagactggtattccaattcaagatattgaacccctcgtcctcttaaacgttgctttcttcttctttgctgccattaatcctggtaatggaaagttcattactgatgatggtgaagaaaggtaaactctttatgtacttaaaatttgtggtttgtgagcccatcttcatgttgagacaaaaggacatggacagcttaaactgttgtaattcttaaatcctcttgtttttacttgaattttcagattatatatagtttcacaaccacct

SEQ ID NO: 30437 - protein, 283 aa, Triticum aestivum
DPFSHPQTLQAAHHTKYKMAQTMLLTSGVSANQFLRNKNPLAQPKVHHFFLSGNSHVVLPSRRPSLVPLAIFKPKTKAAPKKVEKVKPKVEDGIFGTSGGIGFTKQNELFVGRVAMIGFAASLLGEALTGKGILAQLNLETGIPIYEAEPLLLFFILFTLLGAIGALGDRGKFVDDPPTGLEKAVIPPGKGVRSALGLKEQGPLFGFTKANELFVGRLAQLGIAFSLIGEIITGKGALAQLNIETGIPIQDIEPLVLLNVAFFFFAAINPGNGKFITDDGEER

SEQ ID NO: 30438 - protein, 265 aa, Triticum aestivum
MAQTMLLTSGVSANQFLRNKNPLAQPKVHHFFLSGNSHVVLPSRRPSLVPLAIFKPKTKAAPKKVEKVKPKVEDGIFGTSGGIGFTKQNELFVGRVAMIGFAASLLGEALTGKGILAQLNLETGIPIYEAEPLLLFFILFTLLGAIGALGDRGKFVDDPPTGLEKAVIPPGKGVRSALGLKEQGPLFGFTKANELFVGRLAQLGIAFSLIGEIITGKGALAQLNIETGIPIQDIEPLVLLNVAFFFFAAINPGNGKFITDDGEER

SEQ ID NO: 30439 - protein, 261 aa, Triticum aestivum
MLLTSGVSANQFLRNKNPLAQPKVHHFFLSGNSHVVLPSRRPSLVPLAIFKPKTKAAPKKVEKVKPKVEDGIFGTSGGIGFTKQNELFVGRVAMIGFAASLLGEALTGKGILAQLNLETGIPIYEAEPLLLFFILFTLLGAIGALGDRGKFVDDPPTGLEKAVIPPGKGVRSALGLKEQGPLFGFTKANELFVGRLAQLGIAFSLIGEIITGKGALAQLNIETGIPIQDIEPLVLLNVAFFFFAAINPGNGKFITDDGEER

SEQ ID NO: 30440 - DNA, 610 bp, Triticum aestivum
actcagtatcacaattacacacatctacttttgcaaatccgcaaaaacgctaagagaaaaaacaaatggccggtctagtgaaattggcatgcttggtcttggcctgcatgattgtggcaggtcccatcacatcaaaggcggctttgagctgtggcaccgttaacaccaacgtggcggcatgcattggctacttgacccaaggtggaccccttcccagagcgtgctgcaccggtgttagtaagcttaacagtattgcccgtacaactcccgaccgtcagcaagcttgtcgttgccttaaaactgctgcgagcgccttaggctctggtctcaacgctggccgggcagctggacttcctaaggcatgtggagtcaatgttcctttccccattagcactagcatcaactgcaacggcgtgaaataagcagcgttcggatgaagcttgagtggataattcccatgctatgaaatggatgagaatatatatttaataagatgttcgaatggatgttttctattttcctgtcttttctttttatattatgccgaccctattaactggttgtttgtattgtgttctcaaacaaacgtaatatgaatttcaagattttt

SEQ ID NO: 30441 - protein, 118 aa, Triticum aestivum
MAGLVKLACLVLACMIVAGPITSKAALSCGTVNTNVAACIGYLTQGGPLPRACCTGVSKLNSIARTTPDRQQACRCLKTAASALGSGLNAGRAAGLPKACGVNVPFPISTSINCNGVK

SEQ ID NO: 30442 - protein, 104 aa, Triticum aestivum
MIVAGPITSKAALSCGTVNTNVAACIGYLTQGGPLPRACCTGVSKLNSIARTTPDRQQACRCLKTAASALGSGLNAGRAAGLPKACGVNVPFPISTSINCNGVK

SEQ ID NO: 30443 - DNA, 498 bp, Triticum aestivum
agaaaatatataaaacacagtcaaaatccaaacaatttattataaaactaactaaatagacatgatgaagatcttggcattgacactcatggttttcgtcattctttcgccatcatttgcggctccaactgaagtggcactcggagcggcatgtgacgctaagcagcttcagccttgcctggcagcgattacaggaggaggccaaccctcgggtgattgttgtgcaaagctgaaggagcagcagccatgcttatgtggatttgctaagaaccctgcgtttgctcagtacattagctctccgaactctcgcaaagtcctatccgcttgtggtattccttatccaagttgctaaaaatctagagattttataattaactaaataaataaataacgagtaaggaagataaataacattttatcatactatgttaacgaaacaatgtaaccgtttggattaatgtaatcgtttatacggttcatcaaagaagtttcttattt

SEQ ID NO: 30444 - protein, 96 aa, Triticum aestivum
MMKILALTLMVFVILSPSFAAPTEVALGAACDAKQLQPCLAAITGGGQPSGDCCAKLKEQQPCLCGFAKNPAFAQYISSPNSRKVLSACGIPYPSC

SEQ ID NO: 30445 - protein, 95 aa, Triticum aestivum
MKILALTLMVFVILSPSFAAPTEVALGAACDAKQLQPCLAAITGGGQPSGDCCAKLKEQQPCLCGFAKNPAFAQYISSPNSRKVLSACGIPYPSC

SEQ ID NO: 30446 - protein, 87 aa, Triticum aestivum
MVFVILSPSFAAPTEVALGAACDAKQLQPCLAAITGGGQPSGDCCAKLKEQQPCLCGFAKNPAFAQYISSPNSRKVLSACGIPYPSC

SEQ ID NO: 30447 - DNA, 766 bp, Triticum aestivum
  misc_feature (97)..(97): n is a, c, g, or t
attacgatttagagggagggaggaagaagaatcagatcggagaaaatgacaatgacgacgtcgatgatacagaggctgttcacgcaaggcaccaagntcgtctgcgtcgggcgtaactacgccgctcacgccaaagaactaggcaacgccgttcccaaggaaccagttatattcttaaagccgacgtcatcatacttagagaacggaggaacgattgagattccacatcctctagaatcactccatcatgaggtggagctcgctgtagtgatgggagagaaggctagagatgtacccgaggcaaccgccatggattacattggaggatatgcggttgctcttgatatgactgctagggaactccaagctactgccaaggcatctggtctcccttggactcttgctaaaggacaggatactttcactccaataagctctgttctgccaaaggcgatggtgcatgatcctgataacctagaactttggctgaaggttgatggtgaaacaagacagaagggtttgacaaaagatatgatcttcaaggttccgtacctcatcagctacataagctctataatgactctctacgaaggagatgtcatcttgacaggtacgccagaaggtgttggacctgtaaagataggacagaagataaccgcagggatcactggtctatctgaagttcagttcgatgttgataggcgtctaaagcctttgagttaattgttttgtttgtgtttcatataatactattaataaaaatgtt

SEQ ID NO: 30448 - protein, 225 aa, Triticum aestivum
  misc_feature (18)..(18): Xaa can be any naturally occurring amino acid
MTMTTSMIQRLFTQGTKXVCVGRNYAAHAKELGNAVPKEPVIFLKPTSSYLENGGTIEIPHPLESLHHEVELAVVMGEKARDVPEATAMDYIGGYAVALDMTARELQATAKASGLPWTLAKGQDTFTPISSVLPKAMVHDPDNLELWLKVDGETRQKGLTKDMIFKVPYLISYISSIMTLYEGDVILTGTPEGVGPVKIGQKITAGITGLSEVQFDVDRRLKPLS

SEQ ID NO: 30449 - protein, 223 aa, Triticum aestivum
  misc_feature (16)..(16): Xaa can be any naturally occurring amino acid
MTTSMIQRLFTQGTKXVCVGRNYAAHAKELGNAVPKEPVIFLKPTSSYLENGGTIEIPHPLESLHHEVELAVVMGEKARDVPEATAMDYIGGYAVALDMTARELQATAKASGLPWTLAKGQDTFTPISSVLPKAMVHDPDNLELWLKVDGETRQKGLTKDMIFKVPYLISYISSIMTLYEGDVILTGTPEGVGPVKIGQKITAGITGLSEVQFDVDRRLKPLS

SEQ ID NO: 30450 - protein, 219 aa, Triticum aestivum
  misc_feature (12)..(12): Xaa can be any naturally occurring amino acid
MIQRLFTQGTKXVCVGRNYAAHAKELGNAVPKEPVIFLKPTSSYLENGGTIEIPHPLESLHHEVELAVVMGEKARDVPEATAMDYIGGYAVALDMTARELQATAKASGLPWTLAKGQDTFTPISSVLPKAMVHDPDNLELWLKVDGETRQKGLTKDMIFKVPYLISYISSIMTLYEGDVILTGTPEGVGPVKIGQKITAGITGLSEVQFDVDRRLKPLS

SEQ ID NO: 30451 - DNA, 774 bp, Triticum aestivum
agataaggaaagctctggttctgcgcacaagctccaaccaaattccgactcctctgcgcagaccaatcaccaatgcctgggcctccttccaccatgtccctgccgaggccgagcaggtgctaccgctgctgctcgtcgtcgacgccgccgccgccgaagcagcgagccgcggagagcaagcggcggcctatccgcggagcgcggctgctgctgacccggagggcgctggcgggcgctgtggcgacggtgacgttggcggtggcgggccgtgccagggcggcggaggagggcggcgagggggtggtgggcgcgttcaagtcgctgttcgacccgaacgaggagaccaaggccgggaaggtgctgcccaaggcgtacctgaaggcggcgcgggaggtggtgcggacgctccgggagtcgctgggggagggcgacgccgccggcgactcggccagcttccgcaggggcgccgactccgccaagacgtccatccgagagttcctcggcggctggagaggccagcccgccgtcgccaaagaggagtcgtatgtggcgctggagaaggccatcaaatcgctggctgagttctactccaaggcagggcccttcgcctcgcttccgggagatgtcaaaaacaagatcctcgacgacctcaacgccgcagaggcctacctctaggtctctttgcttagcggcattgtattttccggcgtaaattcgttatacttgtgtccttttgttgcgacgttatgatgagtaaataataattgacatggt

SEQ ID NO: 30452 - protein, 200 aa, Triticum aestivum
MPGPPSTMSLPRPSRCYRCCSSSTPPPPKQRAAESKRRPIRGARLLLTRRALAGAVATVTLAVAGRARAAEEGGEGVVGAFKSLFDPNEETKAGKVLPKAYLKAAREVVRTLRESLGEGDAAGDSASFRRGADSAKTSIREFLGGWRGQPAVAKEESYVALEKAIKSLAEFYSKAGPFASLPGDVKNKILDDLNAAEAYL

SEQ ID NO: 30453 - protein, 193 aa, Triticum aestivum
MSLPRPSRCYRCCSSSTPPPPKQRAAESKRRPIRGARLLLTRRALAGAVATVTLAVAGRARAAEEGGEGVVGAFKSLFDPNEETKAGKVLPKAYLKAAREVVRTLRESLGEGDAAGDSASFRRGADSAKTSIREFLGGWRGQPAVAKEESYVALEKAIKSLAEFYSKAGPFASLPGDVKNKILDDLNAAEAYL

SEQ ID NO: 30454 - protein, 192 aa, Triticum aestivum
IRKALVLRTSSNQIPTPLRRPITNAWASFHHVPAEAEQVLPLLLVVDAAAAEAASRGEQAAAYPRSAAAADPEGAGGRCGDGDVGGGGPCQGGGGGRRGGGGRVQVAVRPERGDQGREGAAQGVPEGGAGGGADAPGVAGGGRRRRRLGQLPQGRRLRQDVHPRVPRRLERPARRRQRGVVCGAGEGHQIAG

SEQ ID NO: 30455 - DNA, 1060 bp, Triticum aestivum
  misc_feature (316)..(316): n is a, c, g, or t
actagcttccagcgcacacttgtcaccttcctccccgcaacgcatccagctaccccgtctcactcccgacccatcccaccagcaccaggacagacacggacaggacgatggagtcacccatggcggcccggaggctcctgcaggaggcggcgggcctgtccacgccgggcgcccggatcatcgccgacgacagggacatcgtcatcatcctcgcctcgctgctctgcgcgctcatcaccgtcctcggcatcggcctcgtcgcccgctggtgcgcgtgcggcggcgcggaagccagggcgcgcgccgccgccaaccngggcgtcaagaagtcggtgctccgcgccatccccaccgtcgcctacgtctccgccgacgccggcaagggcaagggcaaggaggcagaggaggccgccgcggcgccggagtgcgccatctgcctcgccgagttcgaggacggcgaggccatgcgcgtgctgccccagtgcggccacgccttccacgccgcctgcgtcgacaagtggctgcgcggccactcttcttgcccctcctgccgccggatcctcgccgtccagctgccggctgcccagcggtgccagcgctgcggcgcgcgccccgacccagccgtggcgacctggaagcctccggcccagtacggcgagatgccgcccttcttgccgtagcggctcgcgcgcgcgctcgatctccacagatctgggcgagagctagaagacgactagtagcagaggaaccagtcaaccaatcgatgagccttctgtttggtcaaatatctcggctgcttctcttaattaccttcctttgtttatctcatcatcagtagcagttcttcttaccgccgagctggaaatgcatagcatttctgaatttaggaccctggtatgcaggtgggtggtgatcaaggtgttgccactacatcttagcagctttgtacatttgtaaatagtaactataattactcctaaggagtaatcggcatcatcgattaggcttatctgaaactgtgaatacctttgctttccatgaatccatttggtcaattctg

SEQ ID NO: 30456 - protein, 278 aa, Triticum aestivum
  misc_feature (105)..(105): Xaa can be any naturally occurring amino acid
LASSAHLSPSSPQRIQLPRLTPDPSHQHQDRHGQDDGVTHGGPEAPAGGGGPVHAGRPDHRRRQGHRHHPRLAALRAHHRPRHRPRRPLVRVRRRGSQGARRRQXGRQEVGAPRHPHRRLRLRRRRQGQGQGGRGGRRGAGVRHLPRRVRGRRGHARAAPVRPRLPRRLRRQVAARPLFLPLLPPDPRRPAAGCPAVPALRRAPRPSRGDLEASGPVRRDAALLAVAARARARSPQIWARARRRLVAEEPVNQSMSLLFGQISRLLLLITFLCLSHHQ

SEQ ID NO: 30457 - protein, 241 aa, Triticum aestivum
  misc_feature (106)..(106): Xaa can be any naturally occurring amino acid
TSFQRTLVTFLPATHPATPSHSRPIPPAPGQTRTGRWSHPWRPGGSCRRRRACPRRAPGSSPTTGTSSSSSPRCSARSSPSSASASSPAGARAAARKPGRAPPPTXASRSRCSAPSPPSPTSPPTPARARARRQRRPPRRRSAPSASPSSRTARPCACCPSAATPSTPPASTSGCAATLLAPPAAGSSPSSCRLPSGASAAARAPTQPWRPGSLRPSTARCRPSCRSGSRARSISTDLGES

SEQ ID NO: 30458 - protein, 190 aa, Triticum aestivum
  misc_feature (70)..(70): Xaa can be any naturally occurring amino acid
MESPMAARRLLQEAAGLSTPGARIIADDRDIVIILASLLCALITVLGIGLVARWCACGGAEARARAAANXGVKKSVLRAIPTVAYVSADAGKGKGKEAEEAAAAPECAICLAEFEDGEAMRVLPQCGHAFHAACVDKWLRGHSSCPSCRRILAVQLPAAQRCQRCGARPDPAVATWKPPAQYGEMPPFLP

SEQ ID NO: 30459 - DNA, 701 bp, Triticum aestivum
acctagaacatcctaatcgaaaaacacaacacacaatccaagttaaagaaaccgttacaaaaagaaaagaaaaactacgttgtttcttgaaaatggagattcttaagttcgctgtcatttttgtactttgctccatctcgtcgtctaacgccgcaactacaccgccgagcggcggagcaggagatgctcactcaatgccatgtatacaaaaactgatgccgtgtcagccgtatcttcgctcagtcactccgccgcctccagcgtcgtgttgtatgccgctgaaggagatcgtcgagaccgacgtgaactgtctttgctccgtcttcaacaacgtagatatgcttaaatcgcttaaccttactaaagaaaacgctcttgttctccccaaagcttgtggcgccaacgctgatgtgtcgcagtgcaaagccagcaccggtactacgacgccttcgacgtcaccaggaactactaaaactcctccggcagctcccgctgaaagcggatctacgggaggttcagcttcttcaacggccaaaccatcagactcggctccggccatcattttttctggaattagcttcgcctccgctttcgtggcattggcaacaatctttttctgatatcctactaattagtcacgtctttattcagcttagttggtttaaaatgttggaaactactattatcagacaatattcggt

SEQ ID NO: 30460 - protein, 205 aa, Triticum aestivum
LEHPNRKTQHTIQVKETVTKRKEKLRCFLKMEILKFAVIFVLCSISSSNAATTPPSGGAGDAHSMPCIQKLMPCQPYLRSVTPPPPASCCMPLKEIVETDVNCLCSVFNNVDMLKSLNLTKENALVLPKACGANADVSQCKASTGTTTPSTSPGTTKTPPAAPAESGSTGGSASSTAKPSDSAPAIIFSGISFASAFVALATIFF

SEQ ID NO: 30461 - protein, 175 aa, Triticum aestivum
MEILKFAVIFVLCSISSSNAATTPPSGGAGDAHSMPCIQKLMPCQPYLRSVTPPPPASCCMPLKEIVETDVNCLCSVFNNVDMLKSLNLTKENALVLPKACGANADVSQCKASTGTTTPSTSPGTTKTPPAAPAESGSTGGSASSTAKPSDSAPAIIFSGISFASAFVALATIFF

SEQ ID NO: 30462 - protein, 141 aa, Triticum aestivum
MPCIQKLMPCQPYLRSVTPPPPASCCMPLKEIVETDVNCLCSVFNNVDMLKSLNLTKENALVLPKACGANADVSQCKASTGTTTPSTSPGTTKTPPAAPAESGSTGGSASSTAKPSDSAPAIIFSGISFASAFVALATIFF

SEQ ID NO: 30463 - DNA, 724 bp, Triticum aestivum
agtttatctctctctctgttgcaatgtcgaagagcggaagatattgcttaggatcaatggaagacatccgagcagtattccagcgcttcgacaaaaacggagacgggaaaatctccatcgacgagctcaaagacgtgatcggagctctcagtcccacggcgtcgccggaagaaacgacgttgatgatgaaagagttcgatctcgacggtaacggatacatcgacatggacgagttcgttgctctgttccaaaccgaagacggtggcgatattcgagatctgaaggaagcgtttgatctgtacgatttggatggaaacggacggatctctgtgaacgagcttcactcggtgatgaagaatctcggcgagaagtgttcggttgaggattgcaagaggatcattagcaaagttgatgctgacggtgacggttgtgttaactttgaagagtttaagaagatgatgatgaacggcagagctactgcttgacttaacggcgaggaatcgtttccttttttttttttttgtatatattcaatttttagttttaggttttatcgattaaactggattaatctttgtttttcctttggttttttaatcttatggattaattagggatttttatttcttaattgtaaggtttaatcgatttttttattttaataattatttattagtatggttaaaaaaaaaaaaaaaaaagcttatcgatcccgtcgacctcg

SEQ ID NO: 30464 - protein, 160 aa, Triticum aestivum
FISLSVAMSKSGRYCLGSMEDIRAVFQRFDKNGDGKISIDELKDVIGALSPTASPEETTLMMKEFDLDGNGYIDMDEFVALFQTEDGGDIRDLKEAFDLYDLDGNGRISVNELHSVMKNLGEKCSVEDCKRIISKVDADGDGCVNFEEFKKMMMNGRATA

SEQ ID NO: 30465 - protein, 153 aa, Triticum aestivum
MSKSGRYCLGSMEDIRAVFQRFDKNGDGKISIDELKDVIGALSPTASPEETTLMMKEFDLDGNGYIDMDEFVALFQTEDGGDIRDLKEAFDLYDLDGNGRISVNELHSVMKNLGEKCSVEDCKRIISKVDADGDGCVNFEEFKKMMMNGRATA

SEQ ID NO: 30466 - protein, 142 aa, Triticum aestivum
MEDIRAVFQRFDKNGDGKISIDELKDVIGALSPTASPEETTLMMKEFDLDGNGYIDMDEFVALFQTEDGGDIRDLKEAFDLYDLDGNGRISVNELHSVMKNLGEKCSVEDCKRIISKVDADGDGCVNFEEFKKMMMNGRATA

SEQ ID NO: 30467 - DNA, 886 bp, Triticum aestivum
ctgcttggatggatcagccgagaccgcacacaccagccacaccactccaccgaagcgaaaggggacaaaggtttgcacgtcgccaagtcctgaaccattacctagcagagcagggatcccatcgacgaggcgaggacagaggtggatcaacaatggcgtcgcttctttcgccgaacaccgtcgctgcgaccacggcgaggccgtccggcaggaggagccgccttactcccagtgtcaccgccatggcaaccaagggcccgaagcccagctccggcggcacgaaaagatcgtcgggcactaccacggtgttcccggtggggaagcccgcgggcccgccgcggccggcgacgacgaaggggtcggcgcccgtgaagctgctgacgaacgtggagaagctacggctgctgaccaaggcggagaaggcgggcctgctgtccgcggcggagcgcgccgggctgtcgctgtcggcggtcgagcgcctcgggctgctgtccaaggcggaggagctcggggtgctgtcggccgccaccgaccctggcacccccggctcgctgcagggcctcgcgctcctgctgctggccgccggccccgccgtcgtcttcctcgtccccgagcagtacccctgggaggtggcgctccaggccgtcgccgccctcgtctgcgtcgccgggggctccgccgcgttcgccgcgtccagcttcgtgtccaggctccagggctcctccggctgatctcgacgaactctgcttgcttcagcatcgaccgagtgtcaattgccgcgtttgattctagcaccaatgatcttgcgtagagttaatctacttctgtaaagatgggctgatatttatacgatgcgccattcggttgcaatactgcaggtttttgt

SEQ ID NO: 30468 - protein, 269 aa, Triticum aestivum
CLDGSAETAHTSHTTPPKRKGTKVCTSPSPEPLPSRAGIPSTRRGQRWINNGVASFAEHRRCDHGEAVRQEEPPYSQCHRHGNQGPEAQLRRHEKIVGHYHGVPGGEARGPAAAGDDEGVGAREAADERGEATAADQGGEGGPAVRGGARRAVAVGGRAPRAAVQGGGARGAVGRHRPWHPRLAAGPRAPAAGRRPRRRLPRPRAVPLGGGAPGRRRPRLRRRGLRRVRRVQLRVQAPGLLRLISTNSACFSIDRVSIAAFDSSTNDLA

SEQ ID NO: 30469 - protein, 242 aa, Triticum aestivum
AWMDQPRPHTPATPLHRSERGQRFARRQVLNHYLAEQGSHRRGEDRGGSTMASLLSPNTVAATTARPSGRRSRLTPSVTAMATKGPKPSSGGTKRSSGTTTVFPVGKPAGPPRPATTKGSAPVKLLTNVEKLRLLTKAEKAGLLSAAERAGLSLSAVERLGLLSKAEELGVLSAATDPGTPGSLQGLALLLLAAGPAVVFLVPEQYPWEVALQAVAALVCVAGGSAAFAASSFVSRLQGSSG

SEQ ID NO: 30470 - protein, 240 aa, Triticum aestivum
MDQPRPHTPATPLHRSERGQRFARRQVLNHYLAEQGSHRRGEDRGGSTMASLLSPNTVAATTARPSGRRSRLTPSVTAMATKGPKPSSGGTKRSSGTTTVFPVGKPAGPPRPATTKGSAPVKLLTNVEKLRLLTKAEKAGLLSAAERAGLSLSAVERLGLLSKAEELGVLSAATDPGTPGSLQGLALLLLAAGPAVVFLVPEQYPWEVALQAVAALVCVAGGSAAFAASSFVSRLQGSSG

SEQ ID NO: 30471 - DNA, 1147 bp, Triticum aestivum
tcgcaccaacgccacagacagaccaacaccgcagcacgcaccacgcgccccccccccccaccctgtgatccctcgccgtggtctcgccgccgcgccgacccctccaccggcattcgattcggagcgcagctcgtccgccggcgcggagccatgggcacggttgtggatgctcccgcagttgtgactgagaaggaggtggttgctgagaacatgttgggtgacaagaaagtcacagtagtatttgttcttggcggtcctggaagtggaaagggcacacagtgttccaacattgttgaacactttggattcacccatcttagtgctggagatcttttgcgcgcggagattaaatctggctctgagaatggaactatgattgagaacatgataaaggagggaaagattgttccgtcggaggtgactataaagctcttgcagcaagccatgataaagaatgagaatgataagttcctcatcgacgggtttccaaggaatgaagagaatcgtgctgcgttcgagaatgttacaaaaatttcgcctgcatttgtgctattcttcaattgttccgaggaagagatggaaaggcgtcttttgggacgcaatgagggtagagttgatgacaacatcgagactatcaggaagagattcaaagtttttgttgaatccagtttgcctgtgattgagtactatgacgcgaaggacaaggttaagaagatcgatgctgcaaaaccaattcctgaggtgtttgaagatgtcaaagccatttttgccccatatgccaaggctacatagaacagtataaaggaccacaaaggtgataaatggaatgatttcatacaaggttttgctcaagtgtgactacatatctgtgattacaaacccttaatatagatcagacttatcagtagacaatttgatttgttgccagcaataagttagatctggtttgtggtgttcctgctagaagtttttatttaccacccattgttggtgtatcccatgtagtatacctgtaccattgtgtaatttacggtaaggacggatcagaccttgtgcccatgagctatccggttgtattacagaaaattgaacttatcacatgttcactcatatttacattctttatacactgttggttcttctgttg

SEQ ID NO: 30472 - protein, 263 aa, Triticum aestivum
SHQRHRQTNTAARTTRPPPPPCDPSPWSRRRADPSTGIRFGAQLVRRRGAMGTVVDAPAVVTEKEVVAENMLGDKKVTVVFVLGGPGSGKGTQCSNIVEHFGFTHLSAGDLLRAEIKSGSENGTMIENMIKEGKIVPSEVTIKLLQQAMIKNENDKFLIDGFPRNEENRAAFENVTKISPAFVLFFNCSEEEMERRLLGRNEGRVDDNIETIRKRFKVFVESSLPVIEYYDAKDKVKKIDAAKPIPEVFEDVKAIFAPYAKAT

SEQ ID NO: 30473 - protein, 213 aa, Triticum aestivum
MGTVVDAPAVVTEKEVVAENMLGDKKVTVVFVLGGPGSGKGTQCSNIVEHFGFTHLSAGDLLRAEIKSGSENGTMIENMIKEGKIVPSEVTIKLLQQAMIKNENDKFLIDGFPRNEENRAAFENVTKISPAFVLFFNCSEEEMERRLLGRNEGRVDDNIETIRKRFKVFVESSLPVIEYYDAKDKVKKIDAAKPIPEVFEDVKAIFAPYAKAT

SEQ ID NO: 30474 - protein, 193 aa, Triticum aestivum
MLGDKKVTVVFVLGGPGSGKGTQCSNIVEHFGFTHLSAGDLLRAEIKSGSENGTMIENMIKEGKIVPSEVTIKLLQQAMIKNENDKFLIDGFPRNEENRAAFENVTKISPAFVLFFNCSEEEMERRLLGRNEGRVDDNIETIRKRFKVFVESSLPVIEYYDAKDKVKKIDAAKPIPEVFEDVKAIFAPYAKAT

SEQ ID NO: 30475 - DNA, 622 bp, Triticum aestivum
accccgggatgaccgtgttcagcaagctgctcatcggatcgatgcacataaagtcgtatgactggactgatcccgatgatctagccggctcatcgcccgacgatcaactgaggctggcggagctggtcgtggatgatctcttcaccgctccgtgcgacacgtcggtcctctacccgacggcgggaggcaatatgcaccggttcacggccatcgcgccatgcgccatcctcgacatccttggccccccttactccatagaggaacgggattgcacctactacgcggatgtcccctactcctcccatcatctcaggacactgaccagcaatgaacaagaaggccggcgcctcgcgtggctgaaagaggttgagcaactcaaaccccaactcaaacaagatgatgtcagaatcgtttgccgtgtgactatagcagcaaagctagctgcttcagccgtgagcataggtttcagtttgtgcatgatgtctcagtgagtgatggcagtttatcatgtaagagtgcttaattacctgcctgcttttgcagcagctgtgtgtgtgtgtggactttgtccagtcccttgttgatctttgtcaatgcatagatcatccatatatttcacttt

SEQ ID NO: 30476 - protein, 162 aa, Triticum aestivum
PGMTVFSKLLIGSMHIKSYDWTDPDDLAGSSPDDQLRLAELVVDDLFTAPCDTSVLYPTAGGNMHRFTAIAPCAILDILGPPYSIEERDCTYYADVPYSSHHLRTLTSNEQEGRRLAWLKEVEQLKPQLKQDDVRIVCRVTIAAKLAASAVSIGFSLCMMSQ

SEQ ID NO: 30477 - protein, 160 aa, Triticum aestivum
MTVFSKLLIGSMHIKSYDWTDPDDLAGSSPDDQLRLAELVVDDLFTAPCDTSVLYPTAGGNMHRFTAIAPCAILDILGPPYSIEERDCTYYADVPYSSHHLRTLTSNEQEGRRLAWLKEVEQLKPQLKQDDVRIVCRVTIAAKLAASAVSIGFSLCMMSQ

SEQ ID NO: 30478 - protein, 149 aa, Triticum aestivum
MHIKSYDWTDPDDLAGSSPDDQLRLAELVVDDLFTAPCDTSVLYPTAGGNMHRFTAIAPCAILDILGPPYSIEERDCTYYADVPYSSHHLRTLTSNEQEGRRLAWLKEVEQLKPQLKQDDVRIVCRVTIAAKLAASAVSIGFSLCMMSQ

SEQ ID NO: 30479 - DNA, 769 bp, Triticum aestivum
tgtatcggcaacactaaagcaaaagagttcttcggttgaaggtgtagaaaagtggccttatgaagctgctgctttagcattcgaagcaatcccaagaactttgcttcaaaattgtggtttgaatgttatcaggacgatgacacagctccagggaaagcatgcgaacggtgaaaatccttgggtaggcgttgatggaaggactggtgatattgttgacatgaaagagcggaagatctgggattcttacagcgtgaaggcacagaccttcaagacagctatcgagtcagcttgcatgcttctaaggattgacgacattgtcagtggaatcaagaagaagcaggctcctggctctggtgctcctaagcaaccccagattgaaacgggtgaagatgccgacactgaacagatgatcccggagtagaactattgtgctgttggagtgagcaagcaccggcgatgttgtgtaccaaagctagaaaaaagcgcccgcggagcagaatgttttattaacacgtgaaatggcgtcgcctggttgcatttctggaatgtttgatggtggccgggccttcagggtcgtctagtattagtttggattgtactagctttttcctatgttcggatggtgagcggtatgcgggtttcagttgtgtatttgtatcagcgttttggcatctgactattgcatgaatggttgctgttcggttttgtttttggactttgtactgaacggataccagaacttgaatttaacagcaaaactagctttgtg

SEQ ID NO: 30480 - protein, 139 aa, Triticum aestivum
VSATLKQKSSSVEGVEKWPYEAAALAFEAIPRTLLQNCGLNVIRTMTQLQGKHANGENPWVGVDGRTGDIVDMKERKIWDSYSVKAQTFKTAIESACMLLRIDDIVSGIKKKQAPGSGAPKQPQIETGEDADTEQMIPE

SEQ ID NO: 30481 - protein, 94 aa, Triticum aestivum
MTQLQGKHANGENPWVGVDGRTGDIVDMKERKIWDSYSVKAQTFKTAIESACMLLRIDDIVSGIKKKQAPGSGAPKQPQIETGEDADTEQMIPE

SEQ ID NO: 30482 - DNA, 564 bp, Triticum aestivum
aaaaacaatcaattaaacacaattaaaaaaaaaaatgacgtttgcttcaaagatcatcacatgcctcctcgtccttacgatctacattgcagctccaacagagtcacacataacgtgtgggacagtgacaagcacaatgacacaatgcatcagctacttgaccaacggtggtccattgccgtcaagctgctgtgtggcagtcaaatcattgaaccaaatggctcagaccacaccagatcgccgacaagtatgtgagtgccttaaatcagccggtaaggaaattaaaggcctcaatatcgaccttgtggccgcactccctaccacttgtggtgtttcactttcctaccccattggtttcaacaccaattgtgacagtatatcgattgccgtgtgaaggagactagagacgtacgaacgaataagaagagttggcccaactttaacctaaacaataattatcccgctgctattttctattttatgacttgagtttcttattatgtaatcatccatttcatatggtaataagtaataacgataaaggagctctctctctctttatcg

SEQ ID NO: 30483 - protein, 119 aa, Triticum aestivum
MTFASKIITCLLVLTIYIAAPTESHITCGTVTSTMTQCISYLTNGGPLPSSCCVAVKSLNQMAQTTPDRRQVCECLKSAGKEIKGLNIDLVAALPTTCGVSLSYPIGFNTNCDSISIAV

SEQ ID NO: 30484 - protein, 85 aa, Triticum aestivum
MTQCISYLTNGGPLPSSCCVAVKSLNQMAQTTPDRRQVCECLKSAGKEIKGLNIDLVAALPTTCGVSLSYPIGFNTNCDSISIAV

SEQ ID NO: 30485 - protein, 84 aa, Triticum aestivum
KNNQLNTIKKKNDVCFKDHHMPPRPYDLHCSSNRVTHNVWDSDKHNDTMHQLLDQRWSIAVKLLCGSQIIEPNGSDHTRSPTSM

SEQ ID NO: 30486 - DNA, 902 bp, Triticum aestivum
agatcccctccaccggggcctccttcgacctcctctcctctcccaatccactgcagccggccggccttcccctcccccctccgaccgctagctgctcacccccctccctcctccgaccgctagctgctcgccccactccctccccgtgagaagcttggtccagcaccgagcggcgccgagagctgtccgcgtcgggcgctgttggcatggagagcagcgcggcggcgcggatggatcctgaggcggcgacggagctggcgcggaagggggtcaccctcctgctcctagacgtgccccagcacaccctcctcggcctcgacacccaggtgttctcggtgagccccaggttcagagggatcaagatggtgcccccaggcccacatttcctccactactgctcccccagcagagcaaaaaggttcaacaaccatgaaatcctagctgaggacgtgcgagactgggatatagccagtgaccgggggcaagggcagcgtgcgcagggtgatcgacgaggactactgcggcccgatgggagtcgtgctcttcaactactgagaggcagacttcaccgtgaagccccgcgaccgcgtcatacagattattgtccaggtgattgcgacgcaggaggtcctcggggtggaggagctcgacgccaccgttcggaggtcaccgaggtggaggacgacgccaccgtccggagttcctcaaggtggaggacctcgacgctttgtacatacatctagagaagtggtctggttaggttggtggtgaaacgctagagaaggtaccaaccttttgatgacgattgtgtgtgtcctcgtgatctcttcgagttgagatgttgaatgttgcatccatgaacactgcaagtgttaagatggttatgtgaaatttattttgct

SEQ ID NO: 30487 - protein, 178 aa, Triticum aestivum
MESSAAARMDPEAATELARKGVTLLLLDVPQHTLLGLDTQVFSVSPRFRGIKMVPPGPHFLHYCSPSRAKRFNNHEILAEDVRDWDIASDRGQGQRAQGDRRGLLRPDGSRALQLLRGRLHREAPRPRHTDYCPGDCDAGGPRGGGARRHRSEVTEVEDDATVRSSSRWRTSTLCTYI

SEQ ID NO: 30488 - protein, 170 aa, Triticum aestivum
MDPEAATELARKGVTLLLLDVPQHTLLGLDTQVFSVSPRFRGIKMVPPGPHFLHYCSPSRAKRFNNHEILAEDVRDWDIASDRGQGQRAQGDRRGLLRPDGSRALQLLRGRLHREAPRPRHTDYCPGDCDAGGPRGGGARRHRSEVTEVEDDATVRSSSRWRTSTLCTYI

SEQ ID NO: 30489 - protein, 126 aa, Triticum aestivum
MVPPGPHFLHYCSPSRAKRFNNHEILAEDVRDWDIASDRGQGQRAQGDRRGLLRPDGSRALQLLRGRLHREAPRPRHTDYCPGDCDAGGPRGGGARRHRSEVTEVEDDATVRSSSRWRTSTLCTYI

SEQ ID NO: 30490 - DNA, 951 bp, Triticum aestivum
aatccaaagcttagctaagccaagccaggggtccctccctccctccctcctcctccccctacctctctctggtcccaacgaccccttctcccttctcgaactccagctggccacccagctaccaccaagctactgtcactcgctcaccaatcctcccgtcttgcccgactacacgccagcgccatggatggttagctagctagctcttgcgctcttgtgcaatcccttcctctgggacttgtcgtcatggagaggcagcgggtggtggtggtggtggaggaggccccggcgtcgcgcgcggcgctgcagtgggccgtgcgcaacttcatccggggccggcgactccatcgcgctgctgcacgtgtgcgcgccggcccgctcccaggcgccgccgccggcgcctccgcctccaaggcttccagctcgcgctcgccttcagggacctctgcgacggcggcgtcgcggaggccatggtggagatcgtggtgcgggagggggagctcgcgccgacggtggccgcggccgtggcgcagctccgggcctccacgctcgtcgtcggcctccacgacaagagcttcctctacgggtcgccgagcccgtacgagggcgcgggcgggctggggtgccgggtgctggccgtccggcagcacgcgacggcgcggcgcggggccgtggaggcggagctcacccaggtggagaccatacggctgcacgtgccgccgcccaagatcccgttcccgatcttcgcgctgccgctgggggtgatctggcggcgatcgtcgtcgtcgtcgaagaagaggagatgaatgaacggatgccgacatctccggacggacggacttgtgtctcaacctgtaagttcatccatccaacctcctctgcttgctagccctgtacagacagacatcatttttttttctttttaccataaatctttcttcttcttctttc

SEQ ID NO: 30491 - protein, 172 aa, Triticum aestivum
MERQRVVVVVEEAPASRAALQWAVRNFIRGRRLHRAAARVRAGPLPGAAAGASASKASSSRSPSGTSATAASRRPWWRSWCGRGSSRRRWPRPWRSSGPPRSSSASTTRASSTGRRARTRARAGWGAGCWPSGSTRRRGAGPWRRSSPRWRPYGCTCRRPRSRSRSSRCRWG

SEQ ID NO: 30492 - protein, 111 aa, Triticum aestivum
MVEIVVREGELAPTVAAAVAQLRASTLVVGLHDKSFLYGSPSPYEGAGGLGCRVLAVRQHATARRGAVEAELTQVETIRLHVPPPKIPFPIFALPLGVIWRRSSSSSKKRR

SEQ ID NO: 30493 - DNA, 659 bp, Triticum aestivum
atcctaatcgaaaagatttttttggcgagagagctaagatgtgtctccgttactccctttgcttgatcttattctctctcatttcactccaaggttttgccaagaagacaggagatgtgtcggaattgcagatcggtgttaagtttaagccagcaacgtgtgaagtgaaggctcacaaaggtgatatgatcaaggtgcactacagggggaaacttactgatggaacagtattcgattcgagctttgaaagggatgaaccgttcgagtttgagttaggaagtggtcaggttatcaaaggctgggatcaaggattgctaggtgcgtgtgtaggagagaagaggaagttaaagatacctgctaaacttggatatggtgaacagggctctcctccaaccatccccggtggggcaacactgatatttgacacagagcttatcgcggtaaatgaaaaaccagctggtggagaacaagaacaagaagaagaagatgtagacgacacatatggagctgacgagctgtgattgattctctattctccaaccgtttagcttcagagttcctctacgaataaaatgtctatgtgcgtttgctttttaatcattggatgcttttagttttgcttctttctaagttatcaacaattacttcgttttggtttg

SEQ ID NO: 30494 - protein, 172 aa, Triticum aestivum
PNRKDFFGERAKMCLRYSLCLILFSLISLQGFAKKTGDVSELQIGVKFKPATCEVKAHKGDMIKVHYRGKLTDGTVFDSSFERDEPFEFELGSGQVIKGWDQGLLGACVGEKRKLKIPAKLGYGEQGSPPTIPGGATLIFDTELIAVNEKPAGGEQEQEEEDVDDTYGADEL

SEQ ID NO: 30495 - protein, 160 aa, Triticum aestivum
MCLRYSLCLILFSLISLQGFAKKTGDVSELQIGVKFKPATCEVKAHKGDMIKVHYRGKLTDGTVFDSSFERDEPFEFELGSGQVIKGWDQGLLGACVGEKRKLKIPAKLGYGEQGSPPTIPGGATLIFDTELIAVNEKPAGGEQEQEEEDVDDTYGADEL

SEQ ID NO: 30496 - protein, 111 aa, Triticum aestivum
MIKVHYRGKLTDGTVFDSSFERDEPFEFELGSGQVIKGWDQGLLGACVGEKRKLKIPAKLGYGEQGSPPTIPGGATLIFDTELIAVNEKPAGGEQEQEEEDVDDTYGADEL

SEQ ID NO: 30497 - DNA, 1164 bp, Triticum aestivum
aaaacacaccacacaccacagcaccacccgccacctcaacgcacgcaaaggccgaggaggacaagctaggaggagcgagcagccatggcttcgtcggtggccgccgcggcgagcacgttcctcgggacccggctggcggacccggcgccgcagaacgggcgcatcgtggcgcggttcggcttcggcaagaagaaggccccgccgaagaaggccaaggcgcccccgaccaccgaccggccgctgtggttccccggcgcgcaggcgcccgagtacctcgacggcacgctcgtcggcgactacggcttcgaccccttcggcctcgggaagcccgcggagtacctgcagtacgacgtggactccctggaccagaacctggcccagaacctggcgggcgagatcatcggcacccggttcgaggacgccgacgtcaagtccaccccgttccagccctacgccgaggtgttcggcctccagaggttccgcgagtgcgagctcatccacggccgctgggccatgctcgccaccctcggcgccctcaccgtcgagtggctcaccggcgtcacctggcaggacgccggcaaggtggagctggtggacgggtcgtcgtacctggggcagccgctgccgttcacgctcaccacgttgatctggatcgaggtgctggtgatcgggtacatcgagttccagcgcaacgcggagctggacccggagaggaggctctaccccggtggctcctacttcgacccgctgggactcgcggcggacccggtgaagaaggagactctgcagctggcggagatcaagcacgcccgcctcgccatggtcgccttcctcggcttcgccgtgcaggccgccgccaccggcaaggggccactcaacaactgggccacccacctcagcgacccgctgcacaccaccatcttcgacaccttcggctcctcttaagtggtcggtggtcgagcaatttctgtcagctcagctgcaaaatggacgaacgcgcgtcagtgtacgaacgtgctttggttttgtatgacgagtgatggatgagagggtatcgcaaagatcctttgttgattaatgcaggtctgatcacataggagagctgctgggacttggtgatttgtaaaatatgaaccaatggtgacttaatgcatccacttgtac

SEQ ID NO: 30498 - protein, 345 aa, Triticum aestivum
NTPHTTAPPATSTHAKAEEDKLGGASSHGFVGGRRGEHVPRDPAGGPGAAERAHRGAVRLRQEEGPAEEGQGAPDHRPAAVVPRRAGARVPRRHARRRLRLRPLRPREARGVPAVRRGLPGPEPGPEPGGRDHRHPVRGRRRQVHPVPALRRGVRPPEVPRVRAHPRPLGHARHPRRPHRRVAHRRHLAGRRQGGAGGRVVVPGAAAAVHAHHVDLDRGAGDRVHRVPAQRGAGPGEEALPRWLLLRPAGTRGGPGEEGDSAAGGDQARPPRHGRLPRLRRAGRRHRQGATQQLGHPPQRPAAHHHLRHLRLLLSGRWSSNFCQLSCKMDERASVYERALVLYDE

SEQ ID NO: 30499 - protein, 286 aa, Triticum aestivum
MASSVAAAASTFLGTRLADPAPQNGRIVARFGFGKKKAPPKKAKAPPTTDRPLWFPGAQAPEYLDGTLVGDYGFDPFGLGKPAEYLQYDVDSLDQNLAQNLAGEIIGTRFEDADVKSTPFQPYAEVFGLQRFRECELIHGRWAMLATLGALTVEWLTGVTWQDAGKVELVDGSSYLGQPLPFTLTTLIWIEVLVIGYIEFQRNAELDPERRLYPGGSYFDPLGLAADPVKKETLQLAEIKHARLAMVAFLGFAVQAAATGKGPLNNWATHLSDPLHTTIFDTFGSS

SEQ ID NO: 30500 - protein, 214 aa, Triticum aestivum
KHTTHHSTTRHLNARKGRGGQARRSEQPWLRRWPPRRARSSGPGWRTRRRRTGASWRGSASARRRPRRRRPRRPRPPTGRCGSPARRRPSTSTARSSATTASTPSASGSPRSTCSTTWTPWTRTWPRTWRARSSAPGSRTPTSSPPRSSPTPRCSASRGSASASSSTAAGPCSPPSAPSPSSGSPASPGRTPARWSWWTGRRTWGSRCRSRSPR

SEQ ID NO: 30501 - DNA, 864 bp, Triticum aestivum
acatctctcccatccatcaaaccgccgcaaccttctctgaccgagcagctgcgagctccagcccaagttccaagctagaatcgcggcgatggcacggtcggagctggtcatggcgttgctggtggtggtcctcgccggcggctgctgcgcgtcggcgggcgccgtggcgtacctctccaagctgcctgtgatcctcgacgtcaccgcatcccccagtcccggccaagttcttcacgccggcgaggacgtgatcacggtgacttgggccctgaacgcgagccagccggccggcaaggacgccgactacaagaacgtgaaggtgagcctctgctacgcgccggtgagccagaaggagcgcgagtggcgcaagacccacgacgacctcaagaaggacaagacctgccagttcaaggtcacccagcaggcctaccccggcaccggcaaggtcgagtaccgcgtcgccctcgacatccccaccgccacctactatgtgcgtgcctacgcgctcgacgcctccggcacgcaggtcgcctacggccagaccgcgcccgccgccgccttcaacatcgtcagcatcaccggcgtcaccacctccatcaaggtcgccgccggcgtcttctccgccttctccgtcgcgtcgctcgccttcttcttcttcattgagaaacgcaagaagaacaactaaactcggaagtcggaaccgtggcaaagtgttcgtcttcgtccgtgcgcaatttcttcctgtccttcgcaacctacgcataattgtacggaaaaatgtactgtactgtactatatgtaagagattgtttgatgttccctttttcttatccggagactctcgtatataattggttatgttgt

SEQ ID NO: 30502 - protein, 198 aa, Triticum aestivum
MARSELVMALLVVVLAGGCCASAGAVAYLSKLPVILDVTASPSPGQVLHAGEDVITVTWALNASQPAGKDADYKNVKVSLCYAPVSQKEREWRKTHDDLKKDKTCQFKVTQQAYPGTGKVEYRVALDIPTATYYVRAYALDASGTQVAYGQTAPAAAFNIVSITGVTTSIKVAAGVFSAFSVASLAFFFFIEKRKKNN

SEQ ID NO: 30503 - protein, 191 aa, Triticum aestivum
MALLVVVLAGGCCASAGAVAYLSKLPVILDVTASPSPGQVLHAGEDVITVTWALNASQPAGKDADYKNVKVSLCYAPVSQKEREWRKTHDDLKKDKTCQFKVTQQAYPGTGKVEYRVALDIPTATYYVRAYALDASGTQVAYGQTAPAAAFNIVSITGVTTSIKVAAGVFSAFSVASLAFFFFIEKRKKNN

SEQ ID NO: 30504 - protein, 120 aa, Triticum aestivum
MCVPTRSTPPARRSPTARPRPPPPSTSSASPASPPPSRSPPASSPPSPSRRSPSSSSLRNARRTTKLGSRNRGKVFVFVRAQFLPVLRNLRIIVRKNVLYCTICKRLFDVPFFLSGDSRI

SEQ ID NO: 30505 - DNA, 715 bp, Triticum aestivum
aggataaggtaaaggaagcaggcaaggcgagacgagagcgtagcagtcagcgtgagcaagagagatggcagcaggaacggcctgggcgggatgccatctcgcccacctcccccaaattcccatctcggtcagcatccccgtgaccggcgctgccgctagcagcaggaggaggaggtgcggcttagcggcggcggcgggggcagcagcagcagcagcgacagacgggcgggtgctgggccggcgccccgtggaggacgtgtacaaggtgcgcgtggtgcgcggcgcggcggcgcaggagcgggtggaggcgctgcgggcgatggagacgtggtcgacgtggcgcacgaggggccgctgccacctggcctgggactggcaggtggaccagctcgtgtacatcgtcgccggcgaggtccgcgtgctccccgccggggccaccaccggcgaggagtacatgcacttcgtggccggcgacctggtccggtaccccaagtggctggaggcggacctccacttcgacgggccctacgaggagcgctaccgcttcctcgcctacggcgacgacaactgaaccgcggcgccccctcctagctagctcctttagtccttctactactagttcactgaagctttcgttcgagttctagccatatagtatttccttttgtttactatatactcctagcctgggacaataaggagtatttcctagtcg

SEQ ID NO: 30506 - protein, 168 aa, Triticum aestivum
MAAGTAWAGCHLAHLPQIPISVSIPVTGAAASSRRRRCGLAAAAGAAAAAATDGRVLGRRPVEDVYKVRVVRGAAAQERVEALRAMETWSTWRTRGRCHLAWDWQVDQLVYIVAGEVRVLPAGATTGEEYMHFVAGDLVRYPKWLEADLHFDGPYEERYRFLAYGDDN

SEQ ID NO: 30507 - DNA, 556 bp, Triticum aestivum
ctatagcagaaagaagaggaggattttcatgtctgaagctgccatcactcccaaaggagctagtattgccaccaagggcaccatctattcacaaagcagaggaagccacggataagagtaataccaatggtgtgaaacagcttactggtgtttcttgcccagagaaatgcaccggaactagttcaacagcaactgacagcaactcagaggctactgtccacggtgagaccatattaattgagcatactaactcagaggcctgtaattatgttcaactactagtctaccgatggccctgcatggagaagctgactgcattcgctcgcaaggatcttgacccaaaaacagtttttatttttgttgctcctaatgccagcagaagtgcagaagcagttaaaatggtatgcgtatgggtaggaggtgaatatgagtgtagtaaaggtgttgaaagtattgattggcagcaagttgctggtgattttcttaatcagaaggggttcagcaatactcttcctgttaaggttttcaaggagcatgaaaccgagaatcttttgga

SEQ ID NO: 30508 - protein, 184 aa, Triticum aestivum
IAERRGGFSCLKLPSLPKELVLPPRAPSIHKAEEATDKSNTNGVKQLTGVSCPEKCTGTSSTATDSNSEATVHGETILIEHTNSEACNYVQLLVYRWPCMEKLTAFARKDLDPKTVFIFVAPNASRSAEAVKMVCVWVGGEYECSKGVESIDWQQVAGDFLNQKGFSNTLPVKVFKEHETENLL

SEQ ID NO: 30509 - protein, 85 aa, Triticum aestivum
MEKLTAFARKDLDPKTVFIFVAPNASRSAEAVKMVCVWVGGEYECSKGVESIDWQQVAGDFLNQKGFSNTLPVKVFKEHETENLL

SEQ ID NO: 30510 - DNA, 818 bp, Triticum aestivum
aactagaacatcctaatcgaaaatattttttcgccttacacctcgccatcgactcacatacttttgctggccggccggagccacacgaccacaaggaaggagctaagctagcaccgacaaacagcccttgctgccgtcccgatggcaagcaccaacatggcgtcggccacctccagattcatgctggcggcgggcatccccagcggcaccaacggcggcgtgagcagccgcgtcagcttcgtcccctccaaccgactgggcttgaagctcgtggcccgcgccgaggaggagcccactgccgccgcgccggcggaaccagcaccggccgcggaggagaaaccggacgccgccgtggccaccaaggagcccgccaaagccaagccgccgccgaggggacccaagaggggaaccaaggtgaagattctgaggagggagtcctactggtacaacgggaccggatccgtcgtcacggttgatcaggatcccaacacccgttacccggtggtggtgcgtttcgccaaggtgaactacgccggcgtgtcgaccaacaactacgccctggacgagatcaaggaggttgctgcttaaacgatcgaagctgccgcgtgtgctccatccaatgtttgtatcagtagctcgtcaagtgacgatgtgaatgttagcctctcacaaaccttatgtgtaatacctctgcgattatatgtatttgcctgcttcctcatggacctaataatctcctcctgttgcttaagatgattgcattcttgctcacttttgtacaaaagatcggttgttcatgttaccggaaggctacacag

SEQ ID NO: 30511 - protein, 157 aa, Triticum aestivum
LEHPNRKYFFALHLAIDSHTFAGRPEPHDHKEGAKLAPTNSPCCRPDGKHQHGVGHLQIHAGGGHPQRHQRRREQPRQLRPLQPTGLEARGPRRGGAHCRRAGGTSTGRGGETGRRRGHQGARQSQAAAEGTQEGNQGEDSEEGVLLVQRDRIRRHG

SEQ ID NO: 30512 - protein, 148 aa, Triticum aestivum
MASTNMASATSRFMLAAGIPSGTNGGVSSRVSFVPSNRLGLKLVARAEEEPTAAAPAEPAPAAEEKPDAAVATKEPAKAKPPPRGPKRGTKVKILRRESYWYNGTGSVVTVDQDPNTRYPVVVRFAKVNYAGVSTNNYALDEIKEVAA

SEQ ID NO: 30513 - protein, 143 aa, Triticum aestivum
MASATSRFMLAAGIPSGTNGGVSSRVSFVPSNRLGLKLVARAEEEPTAAAPAEPAPAAEEKPDAAVATKEPAKAKPPPRGPKRGTKVKILRRESYWYNGTGSVVTVDQDPNTRYPVVVRFAKVNYAGVSTNNYALDEIKEVAA

SEQ ID NO: 30514 - DNA, 654 bp, Triticum aestivum
catgctgaacgagctcaacgccgaggtcggctccggcggcggtaatggagcggtgttcgtggccgtgaacacgcggcgcatgcacgacgacttcatcgccgaccccaaggcgtacggcttcgtcacggccaaggaggcgtgctgcggccaggggaggttcaacggcatcggcatctgcaccatggtgtccagcctgtgcgccaaccgcgacgagtacgtgttctgggacgccttccaccccacggagcgcgccaaccgcctcatcgcccagaactacctcaccggctccacggactacatctcccccatgaacctctccaccatcctccatctcgaccgccacctccacgactagaagatcgatggttcagcctcgatcatttgcagttcgattgcttatgctttttcatacctggccttcttgattttgtcaaacaaaacgttaataatatattcagtaagtacgtgtacgttatttcctagtgtgtcaggttgaggttctagctagttttgtgatacgtgctcagctagcttagccagcagataaatccatggttaccatcgaggtacttgtggtgtcatatccgtgtacgtgtcgtgtatctagtacagccgggtgggtgataattgaatcctggatatgatcaagattcc

SEQ ID NO: 30515 - protein, 117 aa, Triticum aestivum
MLNELNAEVGSGGGNGAVFVAVNTRRMHDDFIADPKAYGFVTAKEACCGQGRFNGIGICTMVSSLCANRDEYVFWDAFHPTERANRLIAQNYLTGSTDYISPMNLSTILHLDRHLHD

SEQ ID NO: 30516 - protein, 91 aa, Triticum aestivum
MHDDFIADPKAYGFVTAKEACCGQGRFNGIGICTMVSSLCANRDEYVFWDAFHPTERANRLIAQNYLTGSTDYISPMNLSTILHLDRHLHD

SEQ ID NO: 30517 - DNA, 1065 bp, Triticum aestivum
accattattgttgttctgccagcggcatatacggagggagggagctccaccgtcccctgtttcccaccccctcccctgtcccattcgacaaaacacgccaagcacgcgcaccgaatccatcgcccgagcaagcgaagcagacgccacctgccctgcccagaccgccgcccaccgtctcccaggagctcagaggcgccaccaagaaccgcacggaagagagcggatcgatggcgatggccggcggagccccgccggcgccgctgccggtggtggggcaccagttctgcgcgccctacgtggtgccgctgacggtgaccaagaaggcgctcagcctctccgacggcgacttcgccatcacggacgccaacggcgccgtcgtgctcaaggtcaagggcgccatcttcagcatccggagccgccgcaccatcctcgacggcgccgggatgcccctcctcaccatgcaggaaaaggtgttcagcatgcaccaccgatgggaggttttcagaggggacagcaccaacgcaggtgacctgctcttcaccgtgaagacaacttcgctgatccaactcaagaccgagatggatgtcttcttggcagggaacaccgcgcagcaggtctgcgacttcaagatcaagggcagctacttcgacaggtcctgcgtcttctaccttggcgactccaacaacatggtagctcaaatgagccgtaaactgactgtttccaatgtgctgctggggagggacacgttcagtgtgaccgtgttcccgcacgtcgactacgtgttcatcgcgagccttgttgtgatcctggatgaggttcacagggacaagcgcgacgattgatgagtgagttatatacgctcctcgatcctaagcgttcctggagttctactactgtcgtgtcatctcaagttgatatgttgtcactgtaagtcactggtgttatctgcatttcttgtagcattatgcgtgcatggtgagccatgctgaattgtgatgttgtggaataatgttcatgcaccttacatttgatccctggcctgccagtgtatcattcgtatttact

SEQ ID NO: 30518 - protein, 279 aa, Triticum aestivum
HYCCSASGIYGGRELHRPLFPTPSPVPFDKTRQARAPNPSPEQAKQTPPALPRPPPTVSQELRGATKNRTEESGSMAMAGGAPPAPLPVVGHQFCAPYVVPLTVTKKALSLSDGDFAITDANGAVVLKVKGAIFSIRSRRTILDGAGMPLLTMQEKVFSMHHRWEVFRGDSTNAGDLLFTVKTTSLIQLKTEMDVFLAGNTAQQVCDFKIKGSYFDRSCVFYLGDSNNMVAQMSRKLTVSNVLLGRDTFSVTVFPHVDYVFIASLVVILDEVHRDKRDD

SEQ ID NO: 30519 - protein, 204 aa, Triticum aestivum
MAMAGGAPPAPLPVVGHQFCAPYVVPLTVTKKALSLSDGDFAITDANGAVVLKVKGAIFSIRSRRTILDGAGMPLLTMQEKVFSMHHRWEVFRGDSTNAGDLLFTVKTTSLIQLKTEMDVFLAGNTAQQVCDFKIKGSYFDRSCVFYLGDSNNMVAQMSRKLTVSNVLLGRDTFSVTVFPHVDYVFIASLVVILDEVHRDKRDD

SEQ ID NO: 30520 - protein, 202 aa, Triticum aestivum
MAGGAPPAPLPVVGHQFCAPYVVPLTVTKKALSLSDGDFAITDANGAVVLKVKGAIFSIRSRRTILDGAGMPLLTMQEKVFSMHHRWEVFRGDSTNAGDLLFTVKTTSLIQLKTEMDVFLAGNTAQQVCDFKIKGSYFDRSCVFYLGDSNNMVAQMSRKLTVSNVLLGRDTFSVTVFPHVDYVFIASLVVILDEVHRDKRDD

SEQ ID NO: 30521 - DNA, 683 bp, Triticum aestivum
aaaaaagagagatctgaatccgtcaaacaaacaaacaaaaaaaaccccaaacgttcgttcacagatctcgagagatgaaaggtggtgaaagcaaagcgcaagcgaagagcactgacgagagattgaagacgagagggaagaaagcagggaagaaggtgaaggatccgaacaagcctaagaggcctccaagtgctttcttcgtcttcctggagggattccgaaaggagttcaatctagctaaccctgacaacaaatccgttggagctgttggtaaagctgctggagccaaatggaaatcaatgactgctgaagataaagctccttatgtagccaaggctgagaccaagaagactgaatacgccaagactatgcaaaaatacaacatgaaattggctaatggaacgagtacagctggagatgatgactctgacaagtccaagtctgaggtcaacgacgaggaagatgctgcaagtgatgaggaggaagatgatgattaaaatgatggatcagcagcagcagtttgtttaattgaagtatcttctcttctgttatgtgttagctttactagttttagggagaaagttgttatgtcttccccccccttttatgttttaactgggattaattcacatctctctacttccaacttcctcatgataactttggatttagctttgaactcc

SEQ ID NO: 30522 - protein, 140 aa, Triticum aestivum; identical to SEQ ID NO: 133

SEQ ID NO: 30523 - DNA, 795 bp, Triticum aestivum
aagctgacgaggatggatgatggttggttttggtggagagatcagttttttaggcctgatgagtatcaaatgccatgagaaattcaaaaattccatgggaagaatgaagacagctagcaaggttgggttctccgaggaatgcccatccgagctggctatggggacgatgactcaagggatggacacggcgatcatgcttaaccagttgggcaatccgaagtggagttgtaacttggtcgtggagagacaggcagagatgattttagggcgtcgcctggtttgccggggcggcgcccagccggaccttctggggatgacgctatgatttggggagcagcagtgcggcgaggctggtttcccgcattcgggcgtgaggttgatggaggagactagactgatgcgtggctgttgacgctcccatccggcaacaccgaccaagcggacgcgtcccagatcaatggctatccggcaacaccgaccaacggcggatgcgtcccagatcaatgccagaaaaatcacatcgtcgatcgtaagtgctccggacttcgcgcagctcctgctgtactccgtcggtcacatgtaccatgaacatggagtgtcgcatgtagtttgttgctttacaaaagaagaagatgcttgatgccttgttttgttgacgacatttattaatgacttgcagcaacagtacgctgcttcagttattggctgggagctacaactacttatcataaaatatgccaaatacaatgattttattatgtagaagtacaaataaaaatattattatgtagtttc

SEQ ID NO: 30524 - protein, 102 aa, Triticum aestivum
MMVGFGGEISFLGLMSIKCHEKFKNSMGRMKTASKVGFSEECPSELAMGTMTQGMDTAIMLNQLGNPKWSCNLVVERQAEMILGRRLVCRGGAQPDLLGMTL

SEQ ID NO: 30525 - protein, 101 aa, Triticum aestivum
MVGFGGEISFLGLMSIKCHEKFKNSMGRMKTASKVGFSEECPSELAMGTMTQGMDTAIMLNQLGNPKWSCNLVVERQAEMILGRRLVCRGGAQPDLLGMTL

SEQ ID NO: 30526 - protein, 88 aa, Triticum aestivum
MSIKCHEKFKNSMGRMKTASKVGFSEECPSELAMGTMTQGMDTAIMLNQLGNPKWSCNLVVERQAEMILGRRLVCRGGAQPDLLGMTL

SEQ ID NO: 30527 - DNA, 777 bp, Triticum aestivum
aggattgccgtgttgtttgtccagcaattattcagcgtcgtcggtatgtgtgctctaaaatagcagctgtagggcgttgtttcaactcaggcacactaatggccaagattggggaagaggtcacctggacaggcacacttgattgcgtttgcattgagcgaatatcacgtaaaatcagcaaggctggtattggagggccccttgttaatttggacggggaagttgttggcatggacttctacgatccgaggataggaacccctatcgtgatgtgggaccatgttgaacacattctgcaccatatagaaaagagtgacccctccggcgcggctttctggaaaatggctggggatcccagcacgaggctaaataggtggcctgtgcctgcgccatgttggcgtagccgtgaggacgtggagaaggacaagaaatctgaggaagatgagatgaaccttgagcccccgcccctaccccccagggagagtttctcatgggtcttcaatttctttcaacagaagccgggctctgaaccctcatccagtcacataaaccgcagtaacccattcatatacggattcatagatggaaagaaagttttactgtctatttgatacgtggctgcatttcgttaggatgttggctagttttcacgaggatctgcttgttgctagtcttagcaaatattacatgtgttgctccgcttgctctcttgaattatccagtgtgtgcagccttgtgtaatactcgatggtgatgactttagtttatatattgtcc

SEQ ID NO: 30528 - protein, 202 aa, Triticum aestivum
DCRVVCPAIIQRRRYVCSKIAAVGRCFNSGTLMAKIGEEVTWTGTLDCVCIERISRKISKAGIGGPLVNLDGEVVGMDFYDPRIGTPIVMWDHVEHILHHIEKSDPSGAAFWKMAGDPSTRLNRWPVPAPCWRSREDVEKDKKSEEDEMNLEPPPLPPRESFSWVFNFFQQKPGSEPSSSHINRSNPFIYGFIDGKKVLLSI

SEQ ID NO: 30529 - protein, 170 aa, Triticum aestivum
MAKIGEEVTWTGTLDCVCIERISRKISKAGIGGPLVNLDGEVVGMDFYDPRIGTPIVMWDHVEHILHHIEKSDPSGAAFWKMAGDPSTRLNRWPVPAPCWRSREDVEKDKKSEEDEMNLEPPPLPPRESFSWVFNFFQQKPGSEPSSSHINRSNPFIYGFIDGKKVLLSI

SEQ ID NO: 30530 - protein, 126 aa, Triticum aestivum
MDFYDPRIGTPIVMWDHVEHILHHIEKSDPSGAAFWKMAGDPSTRLNRWPVPAPCWRSREDVEKDKKSEEDEMNLEPPPLPPRESFSWVFNFFQQKPGSEPSSSHINRSNPFIYGFIDGKKVLLSI

SEQ ID NO: 30531 - DNA, 718 bp, Triticum aestivum
agcaggaagctctaacatacaatggatacgaggcagagcgtcgcggcggtggtgaagccgtcgttggatggcggtgccccggccacggcgtcgttccgtctccgtaacggcagcctcaactcggttcgcctccgccgggtgttcgacctgttcgacaagaacggcgacggtcagatcacggtcgacgagctggcgcaggcgctggattcgctcgggctcgtcgccgaccgcgagggcctggcctccactgtgggcgcgtacgtccccgagggcgcggcggggcttcggttccaggacttcgagtgcctccaccgtgagctgggtgacgcgctcttcggcgcgctggacgacgtgcccgaggacggcgaggccggcgcgggcggggacgaggaggagatgaaggaggcgttcaaggtgttcgacgtggacggcgacggcttcatctcggcaaccgagctgcaggaggtgctcaagaagctgggcctccccgagggcagcagcctcgccaccgtgcgccagatgatttgcaacgtcgaccgtaacagcgacggccgcgtcgactttggggagttcaagtgcatgatgaaggggatcacggtgttgggcgcgtgaccatcgaaaccaatcgtgtccgatcgcacgctgcaacaaaccgcacatcctctcgttcatgggtggcgatcagaatcggttcccgtcaatcaagtacaccatctcc

SEQ ID NO: 30532 - protein, 196 aa, Triticum aestivum
MDTRQSVAAVVKPSLDGGAPATASFRLRNGSLNSVRLRRVFDLFDKNGDGQITVDELAQALDSLGLVADREGLASTVGAYVPEGAAGLRFQDFECLHRELGDALFGALDDVPEDGEAGAGGDEEEMKEAFKVFDVDGDGFISATELQEVLKKLGLPEGSSLATVRQMICNVDRNSDGRVDFGEFKCMMKGITVLGA

SEQ ID NO: 30533 - protein, 110 aa, Triticum aestivum
MAVPRPRRRSVSVTAASTRFASAGCSTCSTRTATVRSRSTSWRRRWIRSGSSPTARAWPPLWARTSPRARRGFGSRTSSASTVSWVTRSSARWTTCPRTARPARAGTRRR

SEQ ID NO: 30534 - DNA, 887 bp, Triticum aestivum
aacgaatatatcctagctactcgatcttgtcccagccaataggtagctgcttctgtctgcctagtgaacttttctcgctagctaccagggaaaagaccacctcaccggtcaccaccatggctgggctagtgctagccaagtgccttcttctgttctccctctccgccgcgctcctctctctgctcggcaccggcgcctccgccattggcctgccccagcctcatgcgccagtgaacttcaccatcggcgtgcagggcatggtctggtgcaagacctgcaggtacatcggctacaatgccaacatggacgcctccccactcaaaggcgtggaggtgtacctgcagtgccggcacggcccggggcggctgaagaaggtgcaaggggcatcggggcagggcggctactttgtcatccagtcggcgcagatggcgtccttcaccaacgacgagtgcaaggtgtacgcggagagctcgtcgtcgaccgcgtgcagcctcgtcgacgaacccgctgccggcgaggggctgccgctcaagttcgactccttcgtcaagcacggcgatggcctgcaggcgctctactccgtcggcaacttcttcttccgccccagcaaccccaacaagtgctactgacgcatccatccgtcatgtacatacttgtgggacttgaataaatgggtcaggaactcaggatgaattagttgttggagtagctggggatatgcatccggtgctgtaatgttgatttaagtttcttctattgttgcagtagttttgtaagcttcttttaattagcaaccgcatgatcgaaataactcgaatatgattagggcagtgtatgtcctgtcatgtgatgactaaccgatgtgctacaaggctctatgtataact

SEQ ID NO: 30535 - protein, 208 aa, Triticum aestivum
RIYPSYSILSQPIGSCFCLPSELFSLATREKTTSPVTTMAGLVLAKCLLLFSLSAALLSLLGTGASAIGLPQPHAPVNFTIGVQGMVWCKTCRYIGYNANMDASPLKGVEVYLQCRHGPGRLKKVQGASGQGGYFVIQSAQMASFTNDECKVYAESSSSTACSLVDEPAAGEGLPLKFDSFVKHGDGLQALYSVGNFFFRPSNPNKCY

SEQ ID NO: 30536 - protein, 170 aa, Triticum aestivum
MAGLVLAKCLLLFSLSAALLSLLGTGASAIGLPQPHAPVNFTIGVQGMVWCKTCRYIGYNANMDASPLKGVEVYLQCRHGPGRLKKVQGASGQGGYFVIQSAQMASFTNDECKVYAESSSSTACSLVDEPAAGEGLPLKFDSFVKHGDGLQALYSVGNFFFRPSNPNKCY

SEQ ID NO: 30537 - protein, 123 aa, Triticum aestivum
MVWCKTCRYIGYNANMDASPLKGVEVYLQCRHGPGRLKKVQGASGQGGYFVIQSAQMASFTNDECKVYAESSSSTACSLVDEPAAGEGLPLKFDSFVKHGDGLQALYSVGNFFFRPSNPNKCY

SEQ ID NO: 30538 - DNA, 853 bp, Triticum aestivum
aatggtaagagagagtatgggagaagagtccgaggcttttgccacgacggcgccgttagctccagtgaccggtgagcgaaaagtaaggaacgacttggaggaaacattaccaaaaccatatttggcaagagcactagtagctccagatacagagcatccgaatggatcagaaggtcatgacagcaaaggcatgagtgttatgcaacaacatgttgcttttttcgaccaaaacggcgatggaatcgtctatccttgggagacttatgcgggattccgtgacctcggtttcaacccaatctcttctgttttttgggccatattcataaactttgcgtttagctacgttacacttccgagttggttgccatcaccactattgcctgtttatatcgacaacattcacaaagccaagcatgggagtgattcaagcacctatgataccgaaggaaggtacgtcccggttaatctcgagaacatctttagcaaatatgcgttaacggctccaaataaaataacattaaaagagctttggaacttaaccgagggaaaccgaatggcaatcgatccttttggatggcttgcgaataaagttgaatggctactagtctatcttcttgcaaaggatgaggaagggttcgtgtctaaagaagctgtgagaggtgtctttgatgcaagtttctttgaatactgtgctaaaaagaataaagagaaggccgattctcgcaagcaagactaagcatttaatttgcttatcttttaaatttgtccgtttgtattattatgctctcaatcttaattaggaaaaggacagaaaacaaaaactctatgtggaataaaacgtttgtgttcttgg

SEQ ID NO: 30539 - protein, 244 aa, Triticum aestivum
MVRESMGEESEAFATTAPLAPVTGERKVRNDLEETLPKPYLARALVAPDTEHPNGSEGHDSKGMSVMQQHVAFFDQNGDGIVYPWETYAGFRDLGFNPISSVFWAIFINFAFSYVTLPSWLPSPLLPVYIDNIHKAKHGSDSSTYDTEGRYVPVNLENIFSKYALTAPNKITLKELWNLTEGNRMAIDPFGWLANKVEWLLVYLLAKDEEGFVSKEAVRGVFDASFFEYCAKKNKEKADSRKQD

SEQ ID NO: 30540 - protein, 239 aa, Triticum aestivum
MGEESEAFATTAPLAPVTGERKVRNDLEETLPKPYLARALVAPDTEHPNGSEGHDSKGMSVMQQHVAFFDQNGDGIVYPWETYAGFRDLGFNPISSVFWAIFINFAFSYVTLPSWLPSPLLPVYIDNIHKAKHGSDSSTYDTEGRYVPVNLENIFSKYALTAPNKITLKELWNLTEGNRMAIDPFGWLANKVEWLLVYLLAKDEEGFVSKEAVRGVFDASFFEYCAKKNKEKADSRKQD

SEQ ID NO: 30541 - protein, 181 aa, Triticum aestivum
MSVMQQHVAFFDQNGDGIVYPWETYAGFRDLGFNPISSVFWAIFINFAFSYVTLPSWLPSPLLPVYIDNIHKAKHGSDSSTYDTEGRYVPVNLENIFSKYALTAPNKITLKELWNLTEGNRMAIDPFGWLANKVEWLLVYLLAKDEEGFVSKEAVRGVFDASFFEYCAKKNKEKADSRKQD

SEQ ID NO: 30542 - DNA, 990 bp, Triticum aestivum
atatctcaccccccgctccattgatagttcgtctcatcttagcttaatatccatggcagcaaagatggcgaagaacgtggacaagccactcttcacggcgacgttcaacgtccaggccagctccaccgactatgtcaccttcatcaccggcatccgcaacaagctccgcaacccggggcaatcctcccacaaccgccccgtgctaccgccgatcgagcccaacgtcccgccgagcaggtggttccacatcgtgctcaagacatcgccggccaacaccgggctcacactcgccacccgcgccgacaacctctattgggagggcttcaagagcagcgacggcacctggtgggagctcacccccggccttatccccggtgccacctatgtcgggtttggcggcacctaccgcgacctcctcggcgacaccgacaagctgaccaacgttgccctcggccggcagcagatggccgacgcggtgactgcgctccacgggcgcaccaaggccgacaagacctccggcccgaagcagcagcaggcgagggaagcggtgacgacgctgctcctcatggtgcacgaggccacgcggttccagaccgtgtcggggttcgtggctggcctgctgcaccccaagacggtggagaagaagagcgggaagatctccaacgagctaaaggcccaggtgaacgggtggcaggacctgtccgaagcgctgttgaagacggatgcgaagcccccggcgggaaagccgccagcaaagttcacgccgatcgagaagatgggtgtgaggacggcagagcaggcggccgccaccctggggatcctactgttcgtccaggtgcccggtgggatgacagtggctcaggcgctggagctgtttcataagagtggggggaaataggtagttgtgcaggtatatctgcatgggtatcgtataagtcaaataaacatgtcacagagtgactaaatgatataaataaataaacatgtcgc

SEQ ID NO: 30543 - protein, 298 aa, Triticum aestivum
YLTPRSIDSSSHLSLISMAAKMAKNVDKPLFTATFNVQASSTDYVTFITGIRNKLRNPGQSSHNRPVLPPIEPNVPPSRWFHIVLKTSPANTGLTLATRADNLYWEGFKSSDGTWWELTPGLIPGATYVGFGGTYRDLLGDTDKLTNVALGRQQMADAVTALHGRTKADKTSGPKQQQAREAVTTLLLMVHEATRFQTVSGFVAGLLHPKTVEKKSGKISNELKAQVNGWQDLSEALLKTDAKPPAGKPPAKFTPIEKMGVRTAEQAAATLGILLFVQVPGGMTVAQALELFHKSGGK

SEQ ID NO: 30544 - protein, 281 aa, Triticum aestivum
MAAKMAKNVDKPLFTATFNVQASSTDYVTFITGIRNKLRNPGQSSHNRPVLPPIEPNVPPSRWFHIVLKTSPANTGLTLATRADNLYWEGFKSSDGTWWELTPGLIPGATYVGFGGTYRDLLGDTDKLTNVALGRQQMADAVTALHGRTKADKTSGPKQQQAREAVTTLLLMVHEATRFQTVSGFVAGLLHPKTVEKKSGKISNELKAQVNGWQDLSEALLKTDAKPPAGKPPAKFTPIEKMGVRTAEQAAATLGILLFVQVPGGMTVAQALELFHKSGGK

SEQ ID NO: 30545 - protein, 277 aa, Triticum aestivum
MAKNVDKPLFTATFNVQASSTDYVTFITGIRNKLRNPGQSSHNRPVLPPIEPNVPPSRWFHIVLKTSPANTGLTLATRADNLYWEGFKSSDGTWWELTPGLIPGATYVGFGGTYRDLLGDTDKLTNVALGRQQMADAVTALHGRTKADKTSGPKQQQAREAVTTLLLMVHEATRFQTVSGFVAGLLHPKTVEKKSGKISNELKAQVNGWQDLSEALLKTDAKPPAGKPPAKFTPIEKMGVRTAEQAAATLGILLFVQVPGGMTVAQALELFHKSGGK

SEQ ID NO: 30546 - DNA, 905 bp, Triticum aestivum
gattcaccgctccccctccacctccacccggacccgcaagatcccgacccgccgcggcccccgctcctcgatcgattgatatcagacgcggccgggtgggcggaagaaggcggcggcggcggcgatgagcgcggtgaacatcaccaacgtggcggtgctggacaaccccaccgccttcctcaaccccttccagttcgagatctcctacgagtgcctcgtcccgctcgacgacgatctggaatggaagctcacatatgttggatcagctgaagacgaaacctatgatcagcaacttgagagcgtgcttgttggacctgtcaatgttgggacctaccgttttgtcttccaggctgacccaccggaccctttgaagatacgtgaagaagacatcattggtgtcaccgtgctgctgttgacatgctcctacgtgggtcaggagttcatgagggtgggttattatgtgaacaatgattacgacgaggagcagctgagagaagagcccccggcaaagctattacttgacagggtgcagagaaacattttggctgacaagccccgtgtcaccaagttcccaatcaacttccaccctgaacctggcacgagctcagaacagccgcaacaggatgcagaacagcagcagcagccgacttcaccggaaccacagacggctccagtagagccacatatggcgccactagagaatgtccccattgccgccgaccaatgatcagagttggggtgctaacggtctgttctccatgccttctatggtgtcttaatgttacgaatcgagagtggtggttctgcaatgtactgatctgttgtttacatttcacaatctgttctgtggcaaatgttgggtgtctagctatttcttgataaagagtacttctgcctattttgtt

SEQ ID NO: 30547 - protein, 200 aa, Triticum aestivum
MSAVNITNVAVLDNPTAFLNPFQFEISYECLVPLDDDLEWKLTYVGSAEDETYDQQLESVLVGPVNVGTYRFVFQADPPDPLKIREEDIIGVTVLLLTCSYVGQEFMRVGYYVNNDYDEEQLREEPPAKLLLDRVQRNILADKPRVTKFPINFHPEPGTSSEQPQQDAEQQQQPTSPEPQTAPVEPHMAPLENVPIAADQ

SEQ ID NO: 30548 - DNA, 594 bp, Triticum aestivum
accaaactccacagcgactccaaatctctcgtggtagacagcttccatctcatctccggcgatgtctgggcgtggcaagggcggcaaggggctcggcaagggcggcgccaagcgccaccggaaggtgctccgggacaacatccagggcatcaccaagccggcgatccggaggctggccaggaggggcggtgtgaagcgcatctcggggctcatctacgaggagacccgcggcgtcctcaagatcttcctcgagaacgtcatccgcgacgccgtcacctacaccgagcacgcccgccgcaagaccgtcaccgccatggacgtcgtgtacgccctcaagcgccagggccgcaccctctacggcttcggcggctgagcgccatcagcgcgctgccgctggctgacactgctgtttcctgctttgctctgtagtcttactcccccccgtcgtgaatccagtgcgctggctatgcttgtttctgtagtttgtctagtgagatccaacttctagttgtaactcctatcgtttcgtttcgctgcaatgaaaagttaattccaatctgtaaaaaaaaaaaaaaaaaagcttatcgataccgt

SEQ ID NO: 30549 - protein, 142 aa, Triticum aestivum
TKLHSDSKSLVVDSFHLISGDVWAWQGRQGARQGRRQAPPEGAPGQHPGHHQAGDPEAGQEGRCEAHLGAHLRGDPRRPQDLPRERHPRRRHLHRARPPQDRHRHGRRVRPQAPGPHPLRLRRLSAISALPLADTAVSCFAL

SEQ ID NO: 30550 - protein, 103 aa, Triticum aestivum; identical to SEQ ID NO: 71

SEQ ID NO: 30551 - DNA, 1001 bp, Triticum aestivum
acatttgaggtctgagaagaatctcaggaacagaacctattgtgtgtgtttcttgtttctctctctctctacaatggctgcttttgcgtgcactactcgtccgccgatttctctccggtcagagatgaggatcgcatcctcaacgaaagtttcactctccactcgacaaatgttctccgtgggaggattgaggactcgcgtctctctatcatcggtctccaagaattctagcgcttctcgattacgacgacgaggagggttcatcatctgtgaagctcaggacactgctacagggattccaatggtgaacgattcaacgtgggagtcactagtactcaaggctgatgagcctgttgttgtggacttttgggcaccatggtgtggaccctgcaaaatgattgatcccattgtcaacgaactagcacagcagtacactgggaagatcaagttcttcaaactaaacactgacgattctccggcgaccccgggaaagtacggtgtgagaagcataccaaccatcatgatcttcgttaagggagagaagaaggatacaatcatcggtgcagtgcctaaaaccacattagcaacaagcattgataaattcttgcagtgaagcatgtggatggatcactctcttttatttctctatagtcctgttcgtttaacgaacgctgcgttcgatatctgcgtctgaaatttgttcataagttgattaaatgaaatgaaaacaagagacgcagcgtcaaaaaaacgaagctttccggtgttgccgctgacgtcaaaaaaagtagcgaccattgttcctcatttctctctcctctctgcgactgaaatcagaaacgcggcgtcacctgttcttctctctttctctttggatacccttttttctctatgtgtatttggacttaacttatctactactccttctcatttagacatgtataatgataataatataatgttgggtttaagaaatcgtgtttatgatggtgactttatct

SEQ ID NO: 30552 - protein, 203 aa, Triticum aestivum
HLRSEKNLRNRTYCVCFLFLSLSTMAAFACTTRPPISLRSEMRIASSTKVSLSTRQMFSVGGLRTRVSLSSVSKNSSASRLRRRGGFIICEAQDTATGIPMVNDSTWESLVLKADEPVVVDFWAPWCGPCKMIDPIVNELAQQYTGKIKFFKLNTDDSPATPGKYGVRSIPTIMIFVKGEKKDTIIGAVPKTTLATSIDKFLQ

SEQ ID NO: 30553 - protein, 179 aa, Triticum aestivum
MAAFACTTRPPISLRSEMRIASSTKVSLSTRQMFSVGGLRTRVSLSSVSKNSSASRLRRRGGFIICEAQDTATGIPMVNDSTWESLVLKADEPVVVDFWAPWCGPCKMIDPIVNELAQQYTGKIKFFKLNTDDSPATPGKYGVRSIPTIMIFVKGEKKDTIIGAVPKTTLATSIDKFLQ

SEQ ID NO: 30554 - protein, 162 aa, Triticum aestivum
MRIASSTKVSLSTRQMFSVGGLRTRVSLSSVSKNSSASRLRRRGGFIICEAQDTATGIPMVNDSTWESLVLKADEPVVVDFWAPWCGPCKMIDPIVNELAQQYTGKIKFFKLNTDDSPATPGKYGVRSIPTIMIFVKGEKKDTIIGAVPKTTLATSIDKFLQ

SEQ ID NO: 30555 - DNA, 1136 bp, Triticum aestivum
cctagaacatcctaatcgaaaaatcacgaaaggtctcgctcgctagctgccgtccccgcccgcctgccgcctcgtgccctcgacacgacacgacacgatggccgcggccgcgccatcccgccaccgccccgagggacctccctcggaggaggaggcggcgagggactgggcggggctgccgggggacgcgctgctggcggtgctccacaggctagaccacgtcgacgtcctcatgggggccggccaggtgtgcagcccctggcgctgcgcggcgcggaacgagccggagctgtggcgccgcgtcgaggtgcgctcccacgccgaccgccgatctcacgtcgcggcgccctcccgcgccagacgccactcctgctccgtcctctgtgggctggcgcgcgccgccgtcaggcgtgccgcggggcagtgcgaggccttctgcggcgagggcgccgtggacgacagcgtcctctccctccttgccgactcggcgccttcgctgaagagcctccggatcatctccggcgacaggatcgtcgacgagaggctcagcctcaccatcacgaacttctccctgctggaggagctggagctctcgctttgcaccgacgtctacccggggacgtgcgaggccgtcggcaccgcctgccctctcctcaagcgcttccgtctgagcaagaagcagttctgcaagtggaacaccaagaacatcgaccaggaggccatggccatcgccaccatgggcgggctgcggtcgcttcagctcttcgccaaccctctcagcgacgacgggctggcggccatccttgacggatgcccgcgcctcgagtctctcgacatccgccactgcttcaacgttgggatgggcgctgctgcgatccgagcacggtgtcctgggatcaagacgctgaggctgccggatgactccacgatcgattacgatctgaagttttctcccccggatatgaccccgtggaacacccaggatgagcatcaatgtgattggcacgagttggtctatttcagttcatggtagtctagtgtactggtgtgcagcttccccacaagataccgctgctgtaagtaggagtacaaccaaatggacgggttaataatggcaatgatacttttttttggtt

SEQ ID NO: 30556 - protein, 311 aa, Triticum aestivum
MAAAAPSRHRPEGPPSEEEAARDWAGLPGDALLAVLHRLDHVDVLMGAGQVCSPWRCAARNEPELWRRVEVRSHADRRSHVAAPSRARRHSCSVLCGLARAAVRRAAGQCEAFCGEGAVDDSVLSLLADSAPSLKSLRIISGDRIVDERLSLTITNFSLLEELELSLCTDVYPGTCEAVGTACPLLKRFRLSKKQFCKWNTKNIDQEAMAIATMGGLRSLQLFANPLSDDGLAAILDGCPRLESLDIRHCFNVGMGAAAIRARCPGIKTLRLPDDSTIDYDLKFSPPDMTPWNTQDEHQCDWHELVYFSSW

SEQ ID NO: 30557 - protein, 266 aa, Triticum aestivum
MGAGQVCSPWRCAARNEPELWRRVEVRSHADRRSHVAAPSRARRHSCSVLCGLARAAVRRAAGQCEAFCGEGAVDDSVLSLLADSAPSLKSLRIISGDRIVDERLSLTITNFSLLEELELSLCTDVYPGTCEAVGTACPLLKRFRLSKKQFCKWNTKNIDQEAMAIATMGGLRSLQLFANPLSDDGLAAILDGCPRLESLDIRHCFNVGMGAAAIRARCPGIKTLRLPDDSTIDYDLKFSPPDMTPWNTQDEHQCDWHELVYFSSW

SEQ ID NO: 30558 - DNA, 641 bp, Triticum aestivum
aaaacttccccatcatctctacctgcttatgcattagagcccccggtgttgacttcgatttgcagctaagtcctgctctcctttcctttcagtccttgtagcttcttttttccttgcagtctactccctgttccgttgcaaataagcccctgagctctgtcacattctagcctcgactccttggtcttgggaggagttcgtcgcagatccgatctagagagcctccccgcaccacccatgtttaccttccccttcctctggcggctgtcggtggcgacgttctacaaccccggggccgacgccgttgtggcgccggcgaccgcggcgagggagccggcggcgcagctgtaccccgggccgtacaggttcggcgactacctggactactaccagggcaccaagtttgctgacaaggcggcgaggtttcaggctgtcaaggaactgttcggttcacggattgtgcacgattgactagctgtgctcgttggggtttcattgtagtagtactccttggactatttcctggtgttcgttaactgctccctacttttctaaatataagtctttctagatattttaatatggacaaaaaaaaaaaaaaaaaagcttatcgataccgtcgacctcgagggggggcccgg

SEQ ID NO: 30559 - protein, 77 aa, Triticum aestivum
MFTFPFLWRLSVATFYNPGADAVVAPATAAREPAAQLYPGPYRFGDYLDYYQGTKFADKAARFQAVKELFGSRIVHD

SEQ ID NO: 30560 - DNA, 576 bp, Triticum aestivum
gtgttggggaaacagaaaggaaacccggaaaagaaaacagagcaggactccactccacactccactctcctcccccctcctcactctttcttggatcgtaaggaaacggaagaaatacatccgcgatcgtggaggggacattttgatcggtgttggtttcccaaggccgagacgagggtacgtggtggtcgtcatggatcggggcgtggacgggaggacggggagggaccagcagcggcggcggcggggcacgggcagatgttcctgcacgggaatttcctgaaggtggaggaggacgagacggggttcctggacgacgaggagccgtgcggtggcttcttcgccgacgagccgccgctggcgtggtggaccgagccgacggatccctggaaatgaggcgcggcagagagagagactcggtgggagacgacacctcgcgcggggaataaaagattagtgaagaaagcaggggcttttctgaaatttttgtaaatctcgtttttatctagtcctttcctgtcaaaccctcgccctcgctaggcagccagcatcagcaatagtactactactagtgcc

SEQ ID NO: 30561 - protein, 131 aa, Triticum aestivum
VLGKQKGNPEKKTEQDSTPHSTLLPPPHSFLDRKETEEIHPRSWRGHFDRCWFPKAETRVRGGRHGSGRGREDGEGPAAAAAGHGQMFLHGNFLKVEEDETGFLDDEEPCGGFFADEPPLAWWTEPTDPWK

SEQ ID NO: 30562 - protein, 93 aa, Triticum aestivum
CWGNRKETRKRKQSRTPLHTPLSSPLLTLSWIVRKRKKYIRDRGGDILIGVGFPRPRRGYVVVVMDRGVDGRTGRDQQRRRRGTGRCSCTGIS

SEQ ID NO: 30563 - protein, 45 aa, Triticum aestivum
MFLHGNFLKVEEDETGFLDDEEPCGGFFADEPPLAWWTEPTDPWK

SEQ ID NO: 30564 - DNA, 736 bp, Triticum aestivum
atcagagctcattctctctctctctctctatctctatctctatctctctctagctccaatgggctttcccgtaggctacacagaggtgtttctccctaagctcttcgtacaaacgctttcgatactcagtttcttcagaaccgtcgtcttctatctcttccgcttcttgggtctctccggcttcctcgaaacggatcaaacctggcccgactacacatcgtacccgacccgaatacccgaactccgctcacctttctccgccctactaatccgcgagatcttaccggttatcaaattcgaagacgtgacgagctccggcgaagaactaccaggaaactgcgccgtttgtctctacgagttcgaaggagaggaagagatccgacggctgagaaactgcagacatatattccaccggagctgtctcgaccgttggatggatcatgatcagaagacgtgtcctctttgtagaacaccgtttgttccagatgagatgcaagaagagtttaatcaacggttatgggctgcttctggtgttcatgacttccacatcgagtagagtcccttgtcgttactttagagaaagctacttttgtctccctccctccttgtgtcttttcttttctttttttactttttaccactgtacttttaattgtgctttttcacccttgctaacattagatttgccacttttatgtgtatatgaatgatatgagcaataaacacaaccaaattt

SEQ ID NO: 30565 - protein, 184 aa, Triticum aestivum
SELILSLSLYLYLYLSLAPMGFPVGYTEVFLPKLFVQTLSILSFFRTVVFYLFRFLGLSGFLETDQTWPDYTSYPTRIPELRSPFSALLIREILPVIKFEDVTSSGEELPGNCAVCLYEFEGEEEIRRLRNCRHIFHRSCLDRWMDHDQKTCPLCRTPFVPDEMQEEFNQRLWAASGVHDFHIE

SEQ ID NO: 30566 - protein, 165 aa, Triticum aestivum
MGFPVGYTEVFLPKLFVQTLSILSFFRTVVFYLFRFLGLSGFLETDQTWPDYTSYPTRIPELRSPFSALLIREILPVIKFEDVTSSGEELPGNCAVCLYEFEGEEEIRRLRNCRHIFHRSCLDRWMDHDQKTCPLCRTPFVPDEMQEEFNQRLWAASGVHDFHIE

SEQ ID NO: 30567 - DNA, 1203 bp, Triticum aestivum
aatattcttctctgttttgtattcgtctgaggtgttttatcttcttcttcttcttcttagacgaagcagtgaaaggattcggattctctgtcaatttttcgagaagagaagtttctaacagtattgggatagagatagatagatagatgagttcatctctacctatgaggctcctcgtgcctctcacacttcccttgattcctcctccttcttcggattctctagctccgtctccgctcagatcgaaaaaccctaactttattctccgatcctcttcttctagtacctcctgttcatcttccctgtggcagctcttccccaggagatccagatcctcttctccttgtgttcccatgtgcacgaaagaccaagacatcacagatacttggagaaatgaagatgatcctattacatgtgggccgcttgaatctgatgaagattccggaggcctccggattcctactcaggctcaggccatcgttgaaggctccggttcagttgctgtctctgagctcagaccttcccctgatgttgattacattcaagagcttctggcgatacagcagcaagggcctagaaccattggcttctttgggactaggaacatgggtttcatgcatcaagaactcatcgagattcttagctacgccatggttattactaaaaatcatatatatacttcaggtgcatctggaactaatgcagctgttatcagaggtgcgttgagagctgagaggccagagcttcttacagtaatcttacctcaaagtttgaaaaaacaacctcctgagagccaagagctattgtctaaggtgcaaaacgtggtagaaaagccacacaatgatcatttgccattactagaagctagcaggctgtgtaatatggacatcatatcacaagtacagcaagtgatctgcttcgcgtttcatgacagtaggcttctcatggagacatgtcaagaagctaaaaatctccgcaagatcgtcactctcttctacctcgattgattcccactctcttctcctgggaacacaagaggatggatacaagtttctttgtaaattgtgaatctctcccccatcccaaaacatattttactattcttttgtctagattttgaaaactccatcattatgatttgtaggattaaattctcagctattttgtaactttacatgggttataaaatatttcttctcatct

SEQ ID NO: 30568 - protein, 286 aa, Triticum aestivum
MSSSLPMRLLVPLTLPLIPPPSSDSLAPSPLRSKNPNFILRSSSSSTSCSSSLWQLFPRRSRSSSPCVPMCTKDQDITDTWRNEDDPITCGPLESDEDSGGLRIPTQAQAIVEGSGSVAVSELRPSPDVDYIQELLAIQQQGPRTIGFFGTRNMGFMHQELIEILSYAMVITKNHIYTSGASGTNAAVIRGALRAERPELLTVILPQSLKKQPPESQELLSKVQNVVEKPHNDHLPLLEASRLCNMDIISQVQQVICFAFHDSRLLMETCQEAKNLRKIVTLFYLD

SEQ ID NO: 30569 - protein, 280 aa, Triticum aestivum
MRLLVPLTLPLIPPPSSDSLAPSPLRSKNPNFILRSSSSSTSCSSSLWQLFPRRSRSSSPCVPMCTKDQDITDTWRNEDDPITCGPLESDEDSGGLRIPTQAQAIVEGSGSVAVSELRPSPDVDYIQELLAIQQQGPRTIGFFGTRNMGFMHQELIEILSYAMVITKNHIYTSGASGTNAAVIRGALRAERPELLTVILPQSLKKQPPESQELLSKVQNVVEKPHNDHLPLLEASRLCNMDIISQVQQVICFAFHDSRLLMETCQEAKNLRKIVTLFYLD

SEQ ID NO: 30570 - protein, 217 aa, Triticum aestivum
MCTKDQDITDTWRNEDDPITCGPLESDEDSGGLRIPTQAQAIVEGSGSVAVSELRPSPDVDYIQELLAIQQQGPRTIGFFGTRNMGFMHQELIEILSYAMVITKNHIYTSGASGTNAAVIRGALRAERPELLTVILPQSLKKQPPESQELLSKVQNVVEKPHNDHLPLLEASRLCNMDIISQVQQVICFAFHDSRLLMETCQEAKNLRKIVTLFYLD

SEQ ID NO: 30571 - DNA, 971 bp, Triticum aestivum
agtcgtctcccctgtccccctcgtcctcctcccgcaatccaatcacggggacgggtgagcagcgagcgagcgagcgggatggcgacgctgacctcggagctgctgcggccggtgcacgcggcgcaggcgctggacgaggcggcgctgctgcgctacgcggccgcgcacgtcccgggcttccccacgcccgcgccggcgctcgccctcacgcagttcggccacggccagtccaaccccacctactgcatccaggcctccgcgcccggcggggagcccaggcgctacgtgctgcggaagaagcccgccggcgccatcctccagtccgcccacgccgtcgagcgcgagttccaggttctcaaagctttgggtgcctacacggatgttcctgtccctaaggtgttttgcctttgcactgatgccagtgtgatcggaaccccattctacataatggagtatctggaaggagcattatatcttaataacaagttaacgggagtaaccccagagaaacggaggaatatatacttggctgctgcaaaaactttggctgctgtacacaaaattgatacgactgcagttggattgcataagtatggaagaagagacaattattgcaaaagacaagtagaaagatggggaaaacaatatcttcattcaaccggtgaagggaagcctgcacgttatcagaagatgcttgatctgattggttggctgaaagaaaatataccagaagaagattcatcgacaggattgggaactggccttgttcatggtgattatcgtgttgataaccttgtttttcacccaactgaggatcgagtgataggtgtacttgattgggaattatctactttggggaatcagatgtgtgatgttgcttacagctgtatggtatgaaatatgaaactgtattagggaaaatgtgaaataccttcttatacataatattgttggaaattattcacctattt

SEQ ID NO: 30572 - protein, 298 aa, Triticum aestivum
SRLPCPPRPPPAIQSRGRVSSERASGMATLTSELLRPVHAAQALDEAALLRYAAAHVPGFPTPAPALALTQFGHGQSNPTYCIQASAPGGEPRRYVLRKKPAGAILQSAHAVEREFQVLKALGAYTDVPVPKVFCLCTDASVIGTPFYIMEYLEGALYLNNKLTGVTPEKRRNIYLAAAKTLAAVHKIDTTAVGLHKYGRRDNYCKRQVERWGKQYLHSTGEGKPARYQKMLDLIGWLKENIPEEDSSTGLGTGLVHGDYRVDNLVFHPTEDRVIGVLDWELSTLGNQMCDVAYSCMV

SEQ ID NO: 30573 - protein, 272 aa, Triticum aestivum
MATLTSELLRPVHAAQALDEAALLRYAAAHVPGFPTPAPALALTQFGHGQSNPTYCIQASAPGGEPRRYVLRKKPAGAILQSAHAVEREFQVLKALGAYTDVPVPKVFCLCTDASVIGTPFYIMEYLEGALYLNNKLTGVTPEKRRNIYLAAAKTLAAVHKIDTTAVGLHKYGRRDNYCKRQVERWGKQYLHSTGEGKPARYQKMLDLIGWLKENIPEEDSSTGLGTGLVHGDYRVDNLVFHPTEDRVIGVLDWELSTLGNQMCDVAYSCMV

SEQ ID NO: 30574 - protein, 149 aa, Triticum aestivum
MEYLEGALYLNNKLTGVTPEKRRNIYLAAAKTLAAVHKIDTTAVGLHKYGRRDNYCKRQVERWGKQYLHSTGEGKPARYQKMLDLIGWLKENIPEEDSSTGLGTGLVHGDYRVDNLVFHPTEDRVIGVLDWELSTLGNQMCDVAYSCMV

SEQ ID NO: 30575 - DNA, 999 bp, Triticum aestivum
  misc_feature (181)..(181): n is a, c, g, or t
tattatgagacggaatgctctattatgggtgaagtattaccccttgtggaaaatgtgacaaagtttgtgcaaagtacagaagcaagggaagaaataagtgtggcccctgaggaacctattttggactcatcgagttcgcatgaagcaatggccataccatctaataatgcaacaacacctntccatgaagctgcaaaggctggcaatgttgaacaaactatggaattgctcgagcagggtttggatccttgtatcaaagatgaaagaggaaagacaccttacctgctggcttcagacaaagaagtcagaaatacgttcagaagattcatggcgctcaaccttgacaaatgggattggcatgctgctgaggtgcctagtgcattaacaaaggaaatggaagaatcacaagctgcaaaacaggcagagaaggatgccaagaagaaagccagagcaaaggaactgaagaaacaaaagaaggctagagagaaggaaaaggaaaaggaaaaggaaaaagagaaggcgctagcagcgcaatcacaacctgttgctaaaggcatttcagttggccaaatgggcaaaccaactgcttctgtgtcaggcctgaaacataagaatccccaggctgttgctctttctatgcaggaggaacgagaccgaaaactcgctgacgaaagagagaaaagagcagcggcagcggaaagaaggctcgcggcgctagcagttcaatcagggccctcgaccgcggcgggcagctccacgcagacatcaacagcggcaaacgacgctgcatgttcatgctgtttctcatccctggcaggcaaggtaccattccataggtacagctacaagtactgcagcactacatgtatgcatctccattcagaaatgctggaagatgactgagctttttgttgtcgtggagaaacataccgagattttgtggtaccttcaattttaatgaactagtccggagctggcccatctgccagtttttgcttt

SEQ ID NO: 30576 - protein, 300 aa, Triticum aestivum
  misc_feature (61)..(61): Xaa can be any naturally occurring amino acid
YYETECSIMGEVLPLVENVTKFVQSTEAREEISVAPEEPILDSSSSHEAMAIPSNNATTPXHEAAKAGNVEQTMELLEQGLDPCIKDERGKTPYLLASDKEVRNTFRRFMALNLDKWDWHAAEVPSALTKEMEESQAAKQAEKDAKKKARAKELKKQKKAREKEKEKEKEKEKALAAQSQPVAKGISVGQMGKPTASVSGLKHKNPQAVALSMQEERDRKLADEREKRAAAAERRLAALAVQSGPSTAAGSSTQTSTAANDAACSCCFSSLAGKVPFHRYSYKYCSTTCMHLHSEMLEDD

SEQ ID NO: 30577 - protein, 292 aa, Triticum aestivum
  misc_feature (53)..(53): Xaa can be any naturally occurring amino acid
MGEVLPLVENVTKFVQSTEAREEISVAPEEPILDSSSSHEAMAIPSNNATTPXHEAAKAGNVEQTMELLEQGLDPCIKDERGKTPYLLASDKEVRNTFRRFMALNLDKWDWHAAEVPSALTKEMEESQAAKQAEKDAKKKARAKELKKQKKAREKEKEKEKEKEKALAAQSQPVAKGISVGQMGKPTASVSGLKHKNPQAVALSMQEERDRKLADEREKRAAAAERRLAALAVQSGPSTAAGSSTQTSTAANDAACSCCFSSLAGKVPFHRYSYKYCSTTCMHLHSEMLEDD

SEQ ID NO: 30578 - protein, 251 aa, Triticum aestivum
  misc_feature (12)..(12): Xaa can be any naturally occurring amino acid
MAIPSNNATTPXHEAAKAGNVEQTMELLEQGLDPCIKDERGKTPYLLASDKEVRNTFRRFMALNLDKWDWHAAEVPSALTKEMEESQAAKQAEKDAKKKARAKELKKQKKAREKEKEKEKEKEKALAAQSQPVAKGISVGQMGKPTASVSGLKHKNPQAVALSMQEERDRKLADEREKRAAAAERRLAALAVQSGPSTAAGSSTQTSTAANDAACSCCFSSLAGKVPFHRYSYKYCSTTCMHLHSEMLEDD

SEQ ID NO: 30579 - DNA, 871 bp, Triticum aestivum
ctatctagtccaactgctccgccgcagatccgcgattgccagcagcaccatctccgaatcgcctcgctagggtttcctctccagcggcggccggctcgaccgtactccgttcgtgagcaatggctgcgaaagctgggaattctgtgggtggtgttcttccccatccccacgtgattggaaatgcatttgcccaacactactacaaaattctgaatgagtcaccagaggatgtccataagttctaccatgatcaaagtattcttggtcggaagccaaattctgatggtacattgacatctataaccacattgcgtgatatcaataaacactttgtatctacatacctcaagggatgttcgatggagatagacaatgtagattctcagccatcccacgagggcggtgtgctcgttttagttagtgggtccttcactgtccctgatgccatgaagcgtaggtttactcagtcgttcttccttgctccacaaaaaggaggctattttgttctgaatgatgtgcttagatacattccagttgagccagaaacaccacctgtcaaggttacagtgcttccgttgatggattatttctgggtatgatgatatcgccggtgaagtcatgaatcaatctacagaaagtacctccatcagcaatgaagtcatgaatgacagatagtcacgtctcggcagtgcactactagctttcttacagaatgcaagtttatccatctatagattatgtttgcttttgcaacaaatgggtgcgaaaagtttaacatttgcgaatgccttagcattgtacatacattatgacttgttaaaaggggagaaaacatcagacaagtatacaactgaatatatctattatatgc

SEQ ID NO: 30580 - protein, 159 aa, Triticum aestivum
MAAKAGNSVGGVLPHPHVIGNAFAQHYYKILNESPEDVHKFYHDQSILGRKPNSDGTLTSITTLRDINKHFVSTYLKGCSMEIDNVDSQPSHEGGVLVLVSGSFTVPDAMKRRFTQSFFLAPQKGGYFVLNDVLRYIPVEPETPPVKVTVLPLMDYFWV

SEQ ID NO: 30581 - protein, 79 aa, Triticum aestivum
MEIDNVDSQPSHEGGVLVLVSGSFTVPDAMKRRFTQSFFLAPQKGGYFVLNDVLRYIPVEPETPPVKVTVLPLMDYFWV

SEQ ID NO: 30582 - DNA, 1192 bp, Triticum aestivum
ccgctgtcattgacttgtcgacgtcgtgggggtgagaccgaatccagcaaagtaggaaacgggaggggagaagcttcttttacttccgcgcggcgatctcccgtccaaacccacccatccaacccaccgcccaaggtcgccgcggatctagcagcctcgtcggagcggagatgaagatcacggcgctcgtcgtgctgaagccgtcggccgggggcgtcgggggctcctcctccagcggcgggcagggctccgaggcgctcgtgctggccaacgccacggacgtcagccacttcggcttcttccagcgcggcgccgcccgggagttcatcgtcttcgtcgcccgcaccgtcgcccagcgcacccagcccggccagcgccagtccgtccagcacgaagagtacaaggtccactcacacaacagaaatggcctctgcgtggtggcatttatggatgaccactatcctgtacgaagtgcattttctcttctgaataaggtacttgatgaataccagaaggcttttggggatgcttggaaagccgccacagcagattccactcaagagtggcctttcctgatggaagctttgacaaaatttcaggatcctgcagaggctgacaagttaacaaaaattcagagggacttggatgaaacaaaaattatcctacataaaactatagagaatgtccttcaaagaggagagcgattggatagcttggttgaaaaaagctcagacctgagtgctgcttcacagatgttctacaagcaggcgaagaaaacaaacagttgttgtactatactttgaagcttgaactgtgatcctccaatctttcttggaaggctccagaaagaaaatcaacccaatatcgttgtgttgtaccgtaagtccgattgctcatgaaaacgtgctgggatcaatactgtaaatctgttattctttggtggtgcctttgaatagcaactaacatcacttgtcggactagatggtttctccctgcgctatactccttagcaatggccaacatcaattgtcttctgcaatagattgttgatatctcagttctcaagtagtatgttggagcaccgttgctactcttaatttaagtatgttggaacactggttgctacttgtaatttatgttcgattgaagattgtttgtactatgcttccttgattttattacaagtttattt

SEQ ID NO: 30583 - protein, 210 aa, Triticum aestivum
MKITALVVLKPSAGGVGGSSSSGGQGSEALVLANATDVSHFGFFQRGAAREFIVFVARTVAQRTQPGQRQSVQHEEYKVHSHNRNGLCVVAFMDDHYPVRSAFSLLNKVLDEYQKAFGDAWKAATADSTQEWPFLMEALTKFQDPAEADKLTKIQRDLDETKIILHKTIENVLQRGERLDSLVEKSSDLSAASQMFYKQAKKTNSCCTIL

SEQ ID NO: 30584 - protein, 118 aa, Triticum aestivum
MDDHYPVRSAFSLLNKVLDEYQKAFGDAWKAATADSTQEWPFLMEALTKFQDPAEADKLTKIQRDLDETKIILHKTIENVLQRGERLDSLVEKSSDLSAASQMFYKQAKKTNSCCTIL

SEQ ID NO: 30585 - DNA, 1299 bp, Triticum aestivum
attcattcattctccctcccctccttccttcctacctaatcctagaggagcatagctagggttcctccccgcagccgtcgcctcctctcctctcctcaccccgccgccgccggccaacgagatccagccagcgagatccgaccgacgccgtctccgtctccgtctccgcctcgccgccgccgcctgcttcggcatgtcgcattccaacgaagtaaggtacaccgcgcgctccatcacgcctccggcagacagggacagcggctccaagtcgcccccaccacggaggcgcgcggcttccaagtcgcctcccctgcctccccctccccctttccctcccaagggggtgcgcaccatctcgaggtcgcctccacctagtagtagaagacgcagcgtctcgaggtcccctccaccaaagaggcgcggcaggtccaggtccaggtccaggtccaggaacaggagccgctccaggagcagagacaaagacgatgtgaggaatcctggcaacaacctctatgtcactggactgtccacacggacgcaggaaactgacctggagaagttcttcagcaaagagggcaaggttaaagactgccgtgtcgttatcgatcctcgtacgaaagaatcacgtggctttgcgttcgtgaccatggagaatgttgaggatgcaaggcgctgcatcaagtacctgcaccgtactgtacttgaaggccgcctcatcagtgtggcaaaggcaaagagaactcgtgagaggacccctacccctggagaatactgtggtccgagaggcgggcgctcccgggtggagccgcggcggagccgttctccacgccgttccagcaggtcgtcgagggaccggtcaaggtcgccggccgcaaggagggacagggacagcagggacaggaagcgcgactgaatgaaacaaggcaaggggagaaacaaaatgatgctaaaatcacatatcgccgcgagttgtcgagtatgaatgtgtcttggattctttgttgctgaatgaatgtttgtttgatgaaggaggactctagtcagtatttctgctggatgctttctttagataagcagctgatttgtcttgtctttctgttttatcagaggagaggatttccctaacattcatttctttttaggttttgtgttgtgtatggacgatgaaggcgcatttcgtgtttttaaggtttctcgctatcgaatcggatgcgtctatttggttgtatgagcacctttgtcttgtcttggctggatgctaacattattattattattattatgtctgtgatggtatgc

SEQ ID NO: 30586 - protein, 239 aa, Triticum aestivum
MSHSNEVRYTARSITPPADRDSGSKSPPPRRRAASKSPPLPPPPPFPPKGVRTISRSPPPSSRRRSVSRSPPPKRRGRSRSRSRSRNRSRSRSRDKDDVRNPGNNLYVTGLSTRTQETDLEKFFSKEGKVKDCRVVIDPRTKESRGFAFVTMENVEDARRCIKYLHRTVLEGRLISVAKAKRTRERTPTPGEYCGPRGGRSRVEPRRSRSPRRSSRSSRDRSRSPAARRDRDSRDRKRD

SEQ ID NO: 30587 - DNA, 1542 bp, Triticum aestivum
aattgccttcccgcaaaaataaggaaaattacaccttcccgccgccgccaacgaacgacgctttgcctcattgctcagttccctatgaccagcacgcccaccgttaccaagtcgccgccggcgctcatcccgccggcgggacctaccccctgcggcacccttccgttctcctccattgacaagaccgtcgccggctccggctttgtgaaccttatgcaggtctttcccccgccctcgatctccgccgcccgcaaggaccagggcgccgtcgcggccgtggccgcaatgcgcaacgggttcgcgagggcgcttgtgccgtactatccggtggccggccgcatcgcctcgagcggcctcgcggtggactgcaccggggagggcatctggtttgtggaagccgccgcgagctgcacgctcgccgacgtggacggcctcgacagctgcccactgctgatcccaggagagctcctcctccctcgccctccccccggcgagaagctcagcgacctcatcctcatagcccaggcgacgaggttcacctgcggtggtttcgccgtcgggatccgcttcagccacgcggtgttcgacgggcatggggctgcgcagttccttacggcggtgggggagctagcgcgggggctcaaggcgccgtcagtggctccggtgtgggaccgcgacgcgatcccagaagctccaagcccgctgccggggcagctcacggagttcaggctggtgacccaggtggtcgacatctcggcggagagcatcgcgcgcgtgaaggacgagttcaagcaggctgccgcgacatcgacgggggaagtgtgctccacctttgacgcggtgacggccgtggtgttcaagtgccgcgcgctggcgctggcatcggcgctcccggacgagaccgaggtccggatggccttcgccgccagcacgcggcaccttctccgcggtgtgctgccgacggtggagggctactacggcaactgcgtattcctggcgtgcgccactaggacaggcaaggccgtccgggaggccacgctggcggaggtggtcggcgcggtacgggaggcgaaggaggcggttcccgctcggttcgcgggctggatgcgcggcgtcgagcagtacgacgtgccgccgctggactacagcacagtgacgttgtcggactggagccgtctcggcttcgacgaggtggactacggcttcggtgcgcccgggtacgttttcccgctcaacgaccacgtcaacttcgtcgcggcgctcaactacgtcaggccgccggcgcccaggcgtgggggcatccgggtggtgctccgctgcgtcgaggagcctcatgcggctgcgttcgccgtcgagctcgccaagttcgcctagatgcaacgcacgcgtgcttcccatttcttggccatgtccgtccattaatgtgagaccgcgcagttcagggaacacattttcacattttttttctctcggcagccaacacgttgtatctccattgtatggtcgtataataagagtaatactttatcttttcctatcggg

SEQ ID NO: 30588 - protein, 457 aa, Triticum aestivum
NCLPAKIRKITPSRRRQRTTLCLIAQFPMTSTPTVTKSPPALIPPAGPTPCGTLPFSSIDKTVAGSGFVNLMQVFPPPSISAARKDQGAVAAVAAMRNGFARALVPYYPVAGRIASSGLAVDCTGEGIWFVEAAASCTLADVDGLDSCPLLIPGELLLPRPPPGEKLSDLILIAQATRFTCGGFAVGIRFSHAVFDGHGAAQFLTAVGELARGLKAPSVAPVWDRDAIPEAPSPLPGQLTEFRLVTQVVDISAESIARVKDEFKQAAATSTGEVCSTFDAVTAVVFKCRALALASALPDETEVRMAFAASTRHLLRGVLPTVEGYYGNCVFLACATRTGKAVREATLAEVVGAVREAKEAVPARFAGWMRGVEQYDVPPLDYSTVTLSDWSRLGFDEVDYGFGAPGYVFPLNDHVNFVAALNYVRPPAPRRGGIRVVLRCVEEPHAAAFAVELAKFA

SEQ ID NO: 30589 - protein, 429 aa, Triticum aestivum
MTSTPTVTKSPPALIPPAGPTPCGTLPFSSIDKTVAGSGFVNLMQVFPPPSISAARKDQGAVAAVAAMRNGFARALVPYYPVAGRIASSGLAVDCTGEGIWFVEAAASCTLADVDGLDSCPLLIPGELLLPRPPPGEKLSDLILIAQATRFTCGGFAVGIRFSHAVFDGHGAAQFLTAVGELARGLKAPSVAPVWDRDAIPEAPSPLPGQLTEFRLVTQVVDISAESIARVKDEFKQAAATSTGEVCSTFDAVTAVVFKCRALALASALPDETEVRMAFAASTRHLLRGVLPTVEGYYGNCVFLACATRTGKAVREATLAEVVGAVREAKEAVPARFAGWMRGVEQYDVPPLDYSTVTLSDWSRLGFDEVDYGFGAPGYVFPLNDHVNFVAALNYVRPPAPRRGGIRVVLRCVEEPHAAAFAVELAKFA

SEQ ID NO: 30590 - protein, 386 aa, Triticum aestivum
MQVFPPPSISAARKDQGAVAAVAAMRNGFARALVPYYPVAGRIASSGLAVDCTGEGIWFVEAAASCTLADVDGLDSCPLLIPGELLLPRPPPGEKLSDLILIAQATRFTCGGFAVGIRFSHAVFDGHGAAQFLTAVGELARGLKAPSVAPVWDRDAIPEAPSPLPGQLTEFRLVTQVVDISAESIARVKDEFKQAAATSTGEVCSTFDAVTAVVFKCRALALASALPDETEVRMAFAASTRHLLRGVLPTVEGYYGNCVFLACATRTGKAVREATLAEVVGAVREAKEAVPARFAGWMRGVEQYDVPPLDYSTVTLSDWSRLGFDEVDYGFGAPGYVFPLNDHVNFVAALNYVRPPAPRRGGIRVVLRCVEEPHAAAFAVELAKFA

SEQ ID NO: 30591 - DNA, 1137 bp, Triticum aestivum
aaccatcaccaccgagctacctccagcctccagccatcactcagctcaaagacacaatcaggcaatcagcggcggcgagaacacacacagagtcacagatgaccttcagcgtctcgccggcgacgggggcgagccaggagtacatgatccggttcgacggccacttcgaggacccgagctccgcggccgcgagcgccgagccacccctgccgttcgccggcagggctttctcgccacagcaggagcagagcgccatggtcgccgcgctgctgcacgtcgtctccgggtacaccacgccggcgcctgacctcttcttcccggcgcgcaaggaggcgtgcacggcgtgcgggatggacgggtgcctcgggtgcgagttcttcggcgcggaggccgggcgcgcggtcgcggcatcggacgcgccgagagcgccggcggccggcgggccgcagaggaggcggaggaacaagaagaaccagtaccgcggcgtcaggcagcggccgtggggcaagtgggcggcggagatccgcgacccgcgccgcgccgtgcgggtgtggctcgggaccttcgacacggccgaggacgccgccagggcctacgaccgcgccgccgtcgagttccgcggcccgcgcgccaagctcaacttctccttccccgagcagcagcagcagcagctaggcggcagcggcaatgccgcggccaagtcagacgcgtgctcgccctcgccttcgccccgcagcgcggacgaggacgaaacaggggacctgctctgggacggcttggtggacttgatgaagctggacgagagcgacctctgcttactgctcccggtcgacaacacggataaatttcacatagaggggaagagacgatcaggatcaggggtacccctctgctactagtgttagactattagcgagtaccagatagacaatcagcagtcctaatcctgctcactacgtggttagcacacgtcctagcttcggttgtaattctgcataaataggcacccgatcaatggaaaagttgtgttcaaccatactcatctgccatgttgtatgtagacaaatccaatttggggcttatttgttggaactataatggtttctattaatagaaaccaggggaaaccccttttgc

SEQ ID NO: 30592 - protein, 298 aa, Triticum aestivum
PSPPSYLQPPAITQLKDTIRQSAAARTHTESQMTFSVSPATGASQEYMIRFDGHFEDPSSAAASAEPPLPFAGRAFSPQQEQSAMVAALLHVVSGYTTPAPDLFFPARKEACTACGMDGCLGCEFFGAEAGRAVAASDAPRAPAAGGPQRRRRNKKNQYRGVRQRPWGKWAAEIRDPRRAVRVWLGTFDTAEDAARAYDRAAVEFRGPRAKLNFSFPEQQQQQLGGSGNAAAKSDACSPSPSPRSADEDETGDLLWDGLVDLMKLDESDLCLLLPVDNTDKFHIEGKRRSGSGVPLCY

SEQ ID NO: 30593 - protein, 266 aa, Triticum aestivum
MTFSVSPATGASQEYMIRFDGHFEDPSSAAASAEPPLPFAGRAFSPQQEQSAMVAALLHVVSGYTTPAPDLFFPARKEACTACGMDGCLGCEFFGAEAGRAVAASDAPRAPAAGGPQRRRRNKKNQYRGVRQRPWGKWAAEIRDPRRAVRVWLGTFDTAEDAARAYDRAAVEFRGPRAKLNFSFPEQQQQQLGGSGNAAAKSDACSPSPSPRSADEDETGDLLWDGLVDLMKLDESDLCLLLPVDNTDKFHIEGKRRSGSGVPLCY

SEQ ID NO: 30594 - protein, 251 aa, Triticum aestivum
MIRFDGHFEDPSSAAASAEPPLPFAGRAFSPQQEQSAMVAALLHVVSGYTTPAPDLFFPARKEACTACGMDGCLGCEFFGAEAGRAVAASDAPRAPAAGGPQRRRRNKKNQYRGVRQRPWGKWAAEIRDPRRAVRVWLGTFDTAEDAARAYDRAAVEFRGPRAKLNFSFPEQQQQQLGGSGNAAAKSDACSPSPSPRSADEDETGDLLWDGLVDLMKLDESDLCLLLPVDNTDKFHIEGKRRSGSGVPLCY

SEQ ID NO: 30595 - DNA, 1332 bp, Triticum aestivum
ctcaccgccacgcttcaaggctagctagctcgatcgcacagcgaaaatggcgggtagattagttctgtcggtggtggtgactctgctagctgcggccggggcagccgcggcggagtcgtcgtgcccggcgacgccgccggacgcggggccgatgctgcaggtgtcgcacgcgttcgggccgtgctcgccgctgggaaacgcggccgcagcgccgtcgtgggcggggttcctcgcggaccagtcctcccgggacgcgtcgcggctgctgtacctcgactccctcgccgtggccgggcgcgcgtacgcgccgatcgcgtccgggcggcagctgctgcagacgccgacgtacgtggtgcgcgcgcgcctcggcaccccgccgcagcagctcctgctcgccgtcgacaccagcaacgacgccgcgtggatcccctgctccggctgcgcgggctgccccaccaccacgcccttcaagccagccgcgtccacctcgtaccgcgccgtgccgtgcggctcgccggcgtgctcgcgggcgccgaacccgtcctgctcgctcaacaccaagtcctgcgggttcagcctcacctacgccgactcctcgctggaggccgcgctgtcccaggactccctcgccgtcgccaacgacgtcgtgaagagctacaccttcggatgtctccagaaggccaccggcacggcggcgccgccgcagggcctcctcgggctcggccgcgggccgctgtcgttcctgtcgcagaccaaggacatgtacgagggcaccttctcctactgcctcccgagcttcaagtccctcaacttctccggcacgctcaggctcggccgcaagggccaaccgctgcgcatcaagacgacgccgctgctcgtcaacccgcaccgctcctcgctctactacgtgggcatgaccggcatccgcgtgggcaagaaggtggtgcccatcccgccctccgcgctggcgttcgacccggcgacgggcgccggcacggtgctcgactccgggacgatgttcaccaggctggtggcgccggcgtacgtggcggtgcgcgacgaggtccgccaccgcatccgcggcgccaacggccgcgtcggcttcgcccgcgagcagtgcaccgcggcttgacaccgattgattatccctctgccggtagctgggaaccgaggctgcggcctgcgccactgttgcctgtccgttggtgtcggacctgcatgcatccatgctggtgatttaattattttgtagcctagtgagtgtgtcgtctccatcggtgtgcaagatcttgtgtctttctttcttgtttgtgtaatatcatgtgtgtctct

SEQ ID NO: 30596 - protein, 361 aa, Triticum aestivum
MAGRLVLSVVVTLLAAAGAAAAESSCPATPPDAGPMLQVSHAFGPCSPLGNAAAAPSWAGFLADQSSRDASRLLYLDSLAVAGRAYAPIASGRQLLQTPTYVVRARLGTPPQQLLLAVDTSNDAAWIPCSGCAGCPTTTPFKPAASTSYRAVPCGSPACSRAPNPSCSLNTKSCGFSLTYADSSLEAALSQDSLAVANDVVKSYTFGCLQKATGTAAPPQGLLGLGRGPLSFLSQTKDMYEGTFSYCLPSFKSLNFSGTLRLGRKGQPLRIKTTPLLVNPHRSSLYYVGMTGIRVGKKVVPIPPSALAFDPATGAGTVLDSGTMFTRLVAPAYVAVRDEVRHRIRGANGRVGFAREQCTAA

SEQ ID NO: 30597 - protein, 326 aa, Triticum aestivum
MLQVSHAFGPCSPLGNAAAAPSWAGFLADQSSRDASRLLYLDSLAVAGRAYAPIASGRQLLQTPTYVVRARLGTPPQQLLLAVDTSNDAAWIPCSGCAGCPTTTPFKPAASTSYRAVPCGSPACSRAPNPSCSLNTKSCGFSLTYADSSLEAALSQDSLAVANDVVKSYTFGCLQKATGTAAPPQGLLGLGRGPLSFLSQTKDMYEGTFSYCLPSFKSLNFSGTLRLGRKGQPLRIKTTPLLVNPHRSSLYYVGMTGIRVGKKVVPIPPSALAFDPATGAGTVLDSGTMFTRLVAPAYVAVRDEVRHRIRGANGRVGFAREQCTAA

SEQ ID NO: 30598 - protein, 189 aa, Triticum aestivum
MSPEGHRHGGAAAGPPRARPRAAVVPVADQGHVRGHLLLLPPELQVPQLLRHAQARPQGPTAAHQDDAAARQPAPLLALLRGHDRHPRGQEGGAHPALRAGVRPGDGRRHGARLRDDVHQAGGAGVRGGARRGPPPHPRRQRPRRLRPRAVHRGLTPIDYPSAGSWEPRLRPAPLLPVRWCRTCMHPCW

SEQ ID NO: 30599 - DNA, 968 bp, Triticum aestivum
aatggaggtggccgtcgccgacggcgtggacgtgctctccctgtccctcggcggcggcacgtctgactactaccgcgacagcatcgccgtgggcgcgtacagcgccatggaaaggggaatatttgtgtcctgctcggcggggaatgccgggccgggcgcggcgtcgctgacgaacggcgcgccatggatcaccaccgtgggcgcggggacactcgaccgcgacttccccgcctacgtcaccctcggcaacggtaacaagtacaacggcgtctccctctacaacggcaagcaattgcccaccacgccggtgccgttcatctacgcagggaacgcgtcgaacagcagcatgggcgcgctctgcatgacgggcaccctcatccctgccaaggtcgccggcaagatcgtcctctgcgaccgcggcaccaacgccagggtccagaagggattcgtcgtcagagacgccggtggtgccggcatggtgctcgccaacaccgccgccaacggcgaggagctggtcgccgacgcgcacattctcccgggcgccggcgtcggagagagggccggcaacgccatgagaacctacgcgtcgtcggatccaaagccgacggccaacatagtgttcgcgggcacgaaggttgggatccagccgtcgcccgtcgtggccgccttctcgtcgagggggccgaacaccgtgacgcccggcatcctcaagccggacctgatcgcgccgggggtgaacatcctcgcggcgtggtccggatccgtcggcccatcagggatcgccggcgacgaccggcgcaccagcttcaacatcatatcgggcacgtccatgtcgtgcccgcacgtgagcgggctggcggcgctgctccggtcggcgcaccaggactggagcccggcggccatccggtcggcgctgatgacgacggcgtacgcggcgtaccccaacggcgacggcctgctcgacgtgg

SEQ ID NO: 30600 - protein, 322 aa, Triticum aestivum
MEVAVADGVDVLSLSLGGGTSDYYRDSIAVGAYSAMERGIFVSCSAGNAGPGAASLTNGAPWITTVGAGTLDRDFPAYVTLGNGNKYNGVSLYNGKQLPTTPVPFIYAGNASNSSMGALCMTGTLIPAKVAGKIVLCDRGTNARVQKGFVVRDAGGAGMVLANTAANGEELVADAHILPGAGVGERAGNAMRTYASSDPKPTANIVFAGTKVGIQPSPVVAAFSSRGPNTVTPGILKPDLIAPGVNILAAWSGSVGPSGIAGDDRRTSFNIISGTSMSCPHVSGLAALLRSAHQDWSPAAIRSALMTTAYAAYPNGDGLLDV

SEQ ID NO: 30601 - protein, 287 aa, Triticum aestivum
MERGIFVSCSAGNAGPGAASLTNGAPWITTVGAGTLDRDFPAYVTLGNGNKYNGVSLYNGKQLPTTPVPFIYAGNASNSSMGALCMTGTLIPAKVAGKIVLCDRGTNARVQKGFVVRDAGGAGMVLANTAANGEELVADAHILPGAGVGERAGNAMRTYASSDPKPTANIVFAGTKVGIQPSPVVAAFSSRGPNTVTPGILKPDLIAPGVNILAAWSGSVGPSGIAGDDRRTSFNIISGTSMSCPHVSGLAALLRSAHQDWSPAAIRSALMTTAYAAYPNGDGLLDV

SEQ ID NO: 30602 - protein, 207 aa, Triticum aestivum
MGALCMTGTLIPAKVAGKIVLCDRGTNARVQKGFVVRDAGGAGMVLANTAANGEELVADAHILPGAGVGERAGNAMRTYASSDPKPTANIVFAGTKVGIQPSPVVAAFSSRGPNTVTPGILKPDLIAPGVNILAAWSGSVGPSGIAGDDRRTSFNIISGTSMSCPHVSGLAALLRSAHQDWSPAAIRSALMTTAYAAYPNGDGLLDV

SEQ ID NO: 30603 - DNA, 1260 bp, Triticum aestivum
agctacaagcaaaccgcgtacgcaccgagacaaccgaaacatgctggcgatgaggaggagctgcaggacggccctcgtcgcagcggtggtggtggtggccctggcgatggcgccgccgggtgtgtgcgagaagaaggggccgctggtgacggcggtgatcgtgttcggcgactccatcatggaccccggcaacaacaacggcctccacacggtggtgaaggcgaaccacgcgccctacggcaaggacttcgccaaccacgagcccaccggccgcttctccaacgggctcatacccaccgacttcatggcccagggccttaacgtgaaggaactacttcctccgtacctgggcgtggagcacacccgagaggacctcctcaccggcgtcagcttcgcgtccggcgccaccggattcgaccctctcacccccgtcatcgtgaacgtgatctcgctggagcagcagctggcctacttcgacgagtaccgcggcaagctggtggacatcgccggcgaggaggagacgcggcggatcatcgacggcgcgctgttcgtggtgtgcgcgggcacggacgacatcgccaacacctactacaccacgccgctccggagcgcccactacgacatcccggcctacgtggacctgctcctcgtcggcgtcgagtccttgctccgcaacgtgagcgcgcggggcgccaagcggatcggcttcgtggggctcccgcccatcgggtgcgtgccgtcgcagcggaccatgggcggcggcccggaccgcggctgcgtgccggagcgcaacgccgcggcgcggctctacaacgcgagggcgcaggagctgatccgccggctgggcgaggaggacccggccgggttccccaccctcgtgttcatcgacatctacaccgtgatccaggacctggtggacaacggggcgcggtacgggttcagcgagacgacgaaggggtgctgcggcaccgggacgaacgaggtggccgtgctgtgcgacgccaggttcatgccggtgtgcgacgacgtgtcggagcatgtcttcttcgacagctaccaccccacgcagagggcctacaaggtcatcgtcgactacatcttcgaccactacatgcagttcctcaacctctgagactgcaacattcattattgtccttttatttttcaaataaagcattattattcattatttgtttctttaaattatgagatgtgagggctaaatgtatgtggaggtccaaagttgtgtgtccatttttg

SEQ ID NO: 30604 - protein, 376 aa, Triticum aestivum
ATSKPRTHRDNRNMLAMRRSCRTALVAAVVVVALAMAPPGVCEKKGPLVTAVIVFGDSIMDPGNNNGLHTVVKANHAPYGKDFANHEPTGRFSNGLIPTDFMAQGLNVKELLPPYLGVEHTREDLLTGVSFASGATGFDPLTPVIVNVISLEQQLAYFDEYRGKLVDIAGEEETRRIIDGALFVVCAGTDDIANTYYTTPLRSAHYDIPAYVDLLLVGVESLLRNVSARGAKRIGFVGLPPIGCVPSQRTMGGGPDRGCVPERNAAARLYNARAQELIRRLGEEDPAGFPTLVFIDIYTVIQDLVDNGARYGFSETTKGCCGTGTNEVAVLCDARFMPVCDDVSEHVFFDSYHPTQRAYKVIVDYIFDHYMQFLNL

SEQ ID NO: 30605 - protein, 363 aa, Triticum aestivum
MLAMRRSCRTALVAAVVVVALAMAPPGVCEKKGPLVTAVIVFGDSIMDPGNNNGLHTVVKANHAPYGKDFANHEPTGRFSNGLIPTDFMAQGLNVKELLPPYLGVEHTREDLLTGVSFASGATGFDPLTPVIVNVISLEQQLAYFDEYRGKLVDIAGEEETRRIIDGALFVVCAGTDDIANTYYTTPLRSAHYDIPAYVDLLLVGVESLLRNVSARGAKRIGFVGLPPIGCVPSQRTMGGGPDRGCVPERNAAARLYNARAQELIRRLGEEDPAGFPTLVFIDIYTVIQDLVDNGARYGFSETTKGCCGTGTNEVAVLCDARFMPVCDDVSEHVFFDSYHPTQRAYKVIVDYIFDHYMQFLNL

SEQ ID NO: 30606 - protein, 360 aa, Triticum aestivum
MRRSCRTALVAAVVVVALAMAPPGVCEKKGPLVTAVIVFGDSIMDPGNNNGLHTVVKANHAPYGKDFANHEPTGRFSNGLIPTDFMAQGLNVKELLPPYLGVEHTREDLLTGVSFASGATGFDPLTPVIVNVISLEQQLAYFDEYRGKLVDIAGEEETRRIIDGALFVVCAGTDDIANTYYTTPLRSAHYDIPAYVDLLLVGVESLLRNVSARGAKRIGFVGLPPIGCVPSQRTMGGGPDRGCVPERNAAARLYNARAQELIRRLGEEDPAGFPTLVFIDIYTVIQDLVDNGARYGFSETTKGCCGTGTNEVAVLCDARFMPVCDDVSEHVFFDSYHPTQRAYKVIVDYIFDHYMQFLNL

SEQ ID NO: 30607 - DNA, 734 bp, Triticum aestivum
atctttaggcagttacttcggtcgagacggccatttactgcacaatttactgatgctatgggtaatgagatattcacggtccgccggccattttggttcatcaacagctccatttatgcagaagtggatggcaaggaggtaggtgtagtccacaggcgctggcatctttggcgtagaatttatgatctgtacttagggaacaagcaatttgctgtggttgagaatcctggattttggaactggacttttaccctgattgatgaagatgaaaatgtgttggcccagattgaccgtaattggaggggaattggtttcgagctctttacggatgctggccagtatgcaattcggtttggtgatgatggacaaagcagtagacttggtctcggttcagatatcgaagaactaaacgttgttcgcccgctgagtttacctgaaagggccgtagctcttgctctggcagtgtccctggactcagattacttctctaggagagggggctggggactgccttttctcatcgccacagagtagacgcgcatacgaatgccatcctcagttcacagcggaacttaaattgccagttctttcaccattgatgtctgaagaagctggtggcattcactgtcgccacaccattgtgatcattacacaagtgtaccgtgtttttttttttaccgtgaccgtacttggttggcttttcgtatgaattttagtgcactctgagaggtttg

SEQ ID NO: 30608 - protein, 177 aa, Triticum aestivum
IFRQLLRSRRPFTAQFTDAMGNEIFTVRRPFWFINSSIYAEVDGKEVGVVHRRWHLWRRIYDLYLGNKQFAVVENPGFWNWTFTLIDEDENVLAQIDRNWRGIGFELFTDAGQYAIRFGDDGQSSRLGLGSDIEELNVVRPLSLPERAVALALAVSLDSDYFSRRGGWGLPFLIATE

SEQ ID NO: 30609 - protein, 158 aa, Triticum aestivum
MGNEIFTVRRPFWFINSSIYAEVDGKEVGVVHRRWHLWRRIYDLYLGNKQFAVVENPGFWNWTFTLIDEDENVLAQIDRNWRGIGFELFTDAGQYAIRFGDDGQSSRLGLGSDIEELNVVRPLSLPERAVALALAVSLDSDYFSRRGGWGLPFLIATE

SEQ ID NO: 30610 - DNA, 1525 bp, Triticum aestivum
ttttcctccgcgtagccttcccaccatattccagttcggcaagctcgccagtcaccaagctcctcctcctccacaggaaagcaacagcgcagcgcggcttcactggtttcgccctcaattcgagagctagtcttggaaggccttccatggctcagccgtcgctgctcctcggctctccggcatcgattgtcctccttatcaccttcttccaaggaccggtagtgagcgccatcacgttcaccttcgccaaccggtgcacggacacggtgtggcccgggttgctctcgggctccacctcgccgccgctggagaccaccggcttcgcgctctcgccgggccagtcgcgctcaatctacgggccgaccgggtggtcgggccgcttctgggcgcgctctggctgtaatttcaacggcggcaagggcacctgcgtcacgggggactgcggctccggcgagatagagtgccgcggcgccggggccaccccgcccgccacgctcgcggagttcaccctcgacggcgacggcgggaaggacttctatgacgtcagcctcgtcgacggctacaacttgcccatgctcgtgcagccgtccgtgcctgggtgccccgacaccgggtgcctcgtcgacctcaacgagcgctgcccctccgagctccgctccggcggcggcctcgcctgccgcagcgcctgcgaggccttcggcaagcccgagttctgctgcaacggcgcctacgggaaccctgacacgtgccacccctcccagtactcgcagctcttcaagtcggcgtgccccaagtcctacagctacgcctacgacgacgccacctccaccttcacctgcaaccacaccgattacaccattaccttctgcccgcagtccaatccttacagtggcaaaccgaacaagcacgcattgcggaggccgagccatgagcagcttgaggacgacgtgtggctggcatctttgaagaaaaccagcggcgccggtggaagcagcatggcatcatggtcggcgtccggaggtttccaagccgccctggcaattgctgtggccgtcgtgcttgccgcggcacaggggggtcatccccgtttcagcttgttatgaccgggcaaggcaggcgattcttcatccctaggagtgatctgcagagggtttttttaggataaaaaaggaggatcagagcactagaggaagagacgtggatatcatgttctttaggcctttttgcttgttgataaagaacatgacgcgtcctcatgttggcaattgtagttgttctagtagtggcatttcatattgctttattgcctttttgaaaacattgttcttctggttgtattcatctttctgcgcaatttttttgtggggatcctgatcagtgcatcgtcactaggagatcgcaagctttgaagtgggaagactgtaagatctgaatatactattgctctgccttctgagctccttttttttgtaaaaatctgaaatgccttcttaaaaaaaaaaaaaaaaaagcttatcgataccgt

SEQ ID NO: 30611 - protein, 366 aa, Triticum aestivum
FLRVAFPPYSSSASSPVTKLLLLHRKATAQRGFTGFALNSRASLGRPSMAQPSLLLGSPASIVLLITFFQGPVVSAITFTFANRCTDTVWPGLLSGSTSPPLETTGFALSPGQSRSIYGPTGWSGRFWARSGCNFNGGKGTCVTGDCGSGEIECRGAGATPPATLAEFTLDGDGGKDFYDVSLVDGYNLPMLVQPSVPGCPDTGCLVDLNERCPSELRSGGGLACRSACEAFGKPEFCCNGAYGNPDTCHPSQYSQLFKSACPKSYSYAYDDATSTFTCNHTDYTITFCPQSNPYSGKPNKHALRRPSHEQLEDDVWLASLKKTSGAGGSSMASWSASGGFQAALAIAVAVVLAAAQGGHPRFSLL

SEQ ID NO: 30612 - protein, 318 aa, Triticum aestivum
MAQPSLLLGSPASIVLLITFFQGPVVSAITFTFANRCTDTVWPGLLSGSTSPPLETTGFALSPGQSRSIYGPTGWSGRFWARSGCNFNGGKGTCVTGDCGSGEIECRGAGATPPATLAEFTLDGDGGKDFYDVSLVDGYNLPMLVQPSVPGCPDTGCLVDLNERCPSELRSGGGLACRSACEAFGKPEFCCNGAYGNPDTCHPSQYSQLFKSACPKSYSYAYDDATSTFTCNHTDYTITFCPQSNPYSGKPNKHALRRPSHEQLEDDVWLASLKKTSGAGGSSMASWSASGGFQAALAIAVAVVLAAAQGGHPRFSLL

SEQ ID NO: 30613 - DNA, 1257 bp, Triticum aestivum
cctggtgtgtactactgtaacttggcaacttgcaatggcttctcctttgctcttgtgcatcctcctggtggtatttggcaactacctttccatttctgctgcaggcgacggtgggcaaagcttcgttgtggtgtcaaccaggtcatttcagacacaagatgtctgctccacctccacatccagagtgacgcggcggccaaaccgcgccggcgccgctgtgccgctggtgcacaggcacggaccctgtgccaagtcgccgtccaccgacaagccatcatctttcgccgagacacttcacagaagccgcgtccgcgcagactacatcatgagcagagcactgagggggaggggcaccaccaagatgcaggaacaagaggagggcaaggtgagcatgccggcccacctgggcacctccgtggactcgcaagagtacgtggtgacgttgggcctgggcacgccggccgtggagcaggtcctcctcatggacaccggcagcgacctgtcctgggtgcagtgcgcgccatgtaacttcaccgactgctaccctcagaaggatcccttgttcgacccgcgcaagtcgtccacgtacgctcccatcccctgcggctccgacgtttgcaagagactccagtccgaccacttcgacaatggctgcagcatgaatggcaatggcacccagtcccagtgcgggtatcgagtcgagtatggaggaggattaaagaccagaggcgtgtacagcaacgaggcgctcacgatggcgcccggcgtcgtcatcaaggacttccatttcggatgtgcataccagcagattggctccgacgacaagtctgacggcctgctcgggctcggtggcgcgcccgagtcgctccctgttcagacctccgcggtgtacggcggctctttctcctactgcctcccgccggtgagcagcggcaccgggttcctcgccctcggcgcgcccaccaacacctcgggcttctccttcacgcccatgacccccttcatggattacgctaccttctatctggtgaagctcaccggcatcagcgtcggcgggaagcagctccgcatcccaccgaaggtgttcgaggggggcctgatcgtagactgcggtaatatcatctcacatctgccatcgacgccctacgcgaaactgcagtccgcgttccgagcggccatggcggcttacccgctcatcccgagcgacgagtatgacacatgctacaacttcaccggatacaacaacgtcaccgtgcc

SEQ ID NO: 30614 - protein, 418 aa, Triticum aestivum
LVCTTVTWQLAMASPLLLCILLVVFGNYLSISAAGDGGQSFVVVSTRSFQTQDVCSTSTSRVTRRPNRAGAAVPLVHRHGPCAKSPSTDKPSSFAETLHRSRVRADYIMSRALRGRGTTKMQEQEEGKVSMPAHLGTSVDSQEYVVTLGLGTPAVEQVLLMDTGSDLSWVQCAPCNFTDCYPQKDPLFDPRKSSTYAPIPCGSDVCKRLQSDHFDNGCSMNGNGTQSQCGYRVEYGGGLKTRGVYSNEALTMAPGVVIKDFHFGCAYQQIGSDDKSDGLLGLGGAPESLPVQTSAVYGGSFSYCLPPVSSGTGFLALGAPTNTSGFSFTPMTPFMDYATFYLVKLTGISVGGKQLRIPPKVFEGGLIVDCGNIISHLPSTPYAKLQSAFRAAMAAYPLIPSDEYDTCYNFTGYNNVTV

SEQ ID NO: 30615 - protein, 407 aa, Triticum aestivum
MASPLLLCILLVVFGNYLSISAAGDGGQSFVVVSTRSFQTQDVCSTSTSRVTRRPNRAGAAVPLVHRHGPCAKSPSTDKPSSFAETLHRSRVRADYIMSRALRGRGTTKMQEQEEGKVSMPAHLGTSVDSQEYVVTLGLGTPAVEQVLLMDTGSDLSWVQCAPCNFTDCYPQKDPLFDPRKSSTYAPIPCGSDVCKRLQSDHFDNGCSMNGNGTQSQCGYRVEYGGGLKTRGVYSNEALTMAPGVVIKDFHFGCAYQQIGSDDKSDGLLGLGGAPESLPVQTSAVYGGSFSYCLPPVSSGTGFLALGAPTNTSGFSFTPMTPFMDYATFYLVKLTGISVGGKQLRIPPKVFEGGLIVDCGNIISHLPSTPYAKLQSAFRAAMAAYPLIPSDEYDTCYNFTGYNNVTV

SEQ ID NO: 30616 - protein, 310 aa, Triticum aestivum
MSRALRGRGTTKMQEQEEGKVSMPAHLGTSVDSQEYVVTLGLGTPAVEQVLLMDTGSDLSWVQCAPCNFTDCYPQKDPLFDPRKSSTYAPIPCGSDVCKRLQSDHFDNGCSMNGNGTQSQCGYRVEYGGGLKTRGVYSNEALTMAPGVVIKDFHFGCAYQQIGSDDKSDGLLGLGGAPESLPVQTSAVYGGSFSYCLPPVSSGTGFLALGAPTNTSGFSFTPMTPFMDYATFYLVKLTGISVGGKQLRIPPKVFEGGLIVDCGNIISHLPSTPYAKLQSAFRAAMAAYPLIPSDEYDTCYNFTGYNNVTV

SEQ ID NO: 30617 - DNA, 1425 bp, Triticum aestivum
ctacttcaaatagacttggaatgggccattagtacgagttggtgtggtgtgcatcgcgatctatggacatggacatggaggagcctccccacctgttcctgtgccccatctccatggagctcatgcaggagcccgtcacggtgtccaccggcgtcacctacgaccgccgcagcatcgagcgctggctcttctcgtacggccgggccacctgcccggccaccatgcagccgctcgccaaccttgacctcaccccgaaccacaccctcgcgcgcgtcatctcctcctggctcgaccgcggctccccttcctcctcctcctcgtcttcgtcgtcgccgtccacgtcgtcgctgtcgagtccggtccacgagctggggacgccgctgacgaggatgctggaggaggagcggctgcggtcggcgctgggcgacctcgaggagacgccgttcaaggtgaccgcgctcaagagcatgcggagctgcatggcgggcgacgtggccatgcagatcatcttcgtcgcctcgggcggcgttgaggcggtcggccgcgtgatggcgcaggcgctggccgagagcggcgcgggaggcgacttctccgcgttcacggtgtgcgaggaggccgccgcggtgctcgccgcgctcccgctctccgacaaggcgtcggtggggctcgttcttgcgccggagtgcctgaggcccgtcatggcgttgctccagcgcggcagcgcggaggcgaggttgcacgccatggacatcctcaccaagatctccagtgccggcgccggtgaccactggactgccggcatcgacgtcgacgacgtgctcaagtccctcctcgagctcctgtctgacgaggtctccgcgcgcctcagctcgcgcgcgctcgacgtgctgctggacgtcgtggagcggtcgccgagcgggcgcgccaaggccgtggaggtcggcgcggtgcacgtcctcgtcgagctcctcgtcgtggacgccgacgaccgccacgtcgccgagcggatactgctgcttctcaagcggctgtgcaagtgccccgagggccgcctcgccttcgccgagcacgacctgtcggtcgcggccgtggcgaggacaatgctgagggtgtcggatctggccacgcagctggccgtcaaggtgctgtggctcgtgtccatggtggcgcagtcggagaaggtgctcgaggacatggtgctcaccggcgccgtggcgaagctgctggggctgctgcacgtcgagagcgcgccgtccacgaagcaaaagacggtgaggatggtgaggatccacggcgtgttctggaggcagtacccttgcttccccaccgacctcaaggattacttgaggttgctcgattgatttgttcattagttccagataatctgcaagaaaagtgaacaaaaaccgtgaattttcttatagt

SEQ ID NO: 30618 - protein, 432 aa, Triticum aestivum
MDMDMEEPPHLFLCPISMELMQEPVTVSTGVTYDRRSIERWLFSYGRATCPATMQPLANLDLTPNHTLARVISSWLDRGSPSSSSSSSSSPSTSSLSSPVHELGTPLTRMLEEERLRSALGDLEETPFKVTALKSMRSCMAGDVAMQIIFVASGGVEAVGRVMAQALAESGAGGDFSAFTVCEEAAAVLAALPLSDKASVGLVLAPECLRPVMALLQRGSAEARLHAMDILTKISSAGAGDHWTAGIDVDDVLKSLLELLSDEVSARLSSRALDVLLDVVERSPSGRAKAVEVGAVHVLVELLVVDADDRHVAERILLLLKRLCKCPEGRLAFAEHDLSVAAVARTMLRVSDLATQLAVKVLWLVSMVAQSEKVLEDMVLTGAVAKLLGLLHVESAPSTKQKTVRMVRIHGVFWRQYPCFPTDLKDYLRLLD

SEQ ID NO: 30619 - protein, 430 aa, Triticum aestivum
MDMEEPPHLFLCPISMELMQEPVTVSTGVTYDRRSIERWLFSYGRATCPATMQPLANLDLTPNHTLARVISSWLDRGSPSSSSSSSSSPSTSSLSSPVHELGTPLTRMLEEERLRSALGDLEETPFKVTALKSMRSCMAGDVAMQIIFVASGGVEAVGRVMAQALAESGAGGDFSAFTVCEEAAAVLAALPLSDKASVGLVLAPECLRPVMALLQRGSAEARLHAMDILTKISSAGAGDHWTAGIDVDDVLKSLLELLSDEVSARLSSRALDVLLDVVERSPSGRAKAVEVGAVHVLVELLVVDADDRHVAERILLLLKRLCKCPEGRLAFAEHDLSVAAVARTMLRVSDLATQLAVKVLWLVSMVAQSEKVLEDMVLTGAVAKLLGLLHVESAPSTKQKTVRMVRIHGVFWRQYPCFPTDLKDYLRLLD

SEQ ID NO: 30620 - protein, 428 aa, Triticum aestivum
MEEPPHLFLCPISMELMQEPVTVSTGVTYDRRSIERWLFSYGRATCPATMQPLANLDLTPNHTLARVISSWLDRGSPSSSSSSSSSPSTSSLSSPVHELGTPLTRMLEEERLRSALGDLEETPFKVTALKSMRSCMAGDVAMQIIFVASGGVEAVGRVMAQALAESGAGGDFSAFTVCEEAAAVLAALPLSDKASVGLVLAPECLRPVMALLQRGSAEARLHAMDILTKISSAGAGDHWTAGIDVDDVLKSLLELLSDEVSARLSSRALDVLLDVVERSPSGRAKAVEVGAVHVLVELLVVDADDRHVAERILLLLKRLCKCPEGRLAFAEHDLSVAAVARTMLRVSDLATQLAVKVLWLVSMVAQSEKVLEDMVLTGAVAKLLGLLHVESAPSTKQKTVRMVRIHGVFWRQYPCFPTDLKDYLRLLD

SEQ ID NO: 30621 - DNA, 1062 bp, Triticum aestivum
cgaaaagattccccttccagcctggtgcccgccggcggccgccctcctgcagctcgacttctcctgcagggctgcaggctccagcctctgccggccgcctccctcccgcagcctggtgcccaccggccgtcttcggatccccttctgctcgccctcccgcagccccgtgcggtggtgcccgccgaccgcagcaaggaaacagcttaggacatggcaatggctgtggaggcgcgtctccggcaggagaaggtgaagaagtttgaagatttcgttgaccggcggctcaagcctgacctcgttaacgccatagcccagcgcgataacttgttccagcagcagaagacattcttggatttgaagaagaacatcgaaaatttggaaaagaatggtgtaacgagtatgcgatctatggtcaatcttgggtcagaggtgtacatgcaggcagaagtgccggacacgaagcacatctttgtggatattggtctaggttttcatgtggagtttacttggcaagaggctttgcagtttatatctgtaagagaagcaaggttggccagacaaatagacgagtacacacacctcatagcgagcataaaagcacagatcaagttggtgtgtgaaggtatccgcgaactcctgcagttcccggcggagtgaacggccaggatcaaacttgcggcagagagatgcttacacaccaaacttgcggcagagagatagagatgcttggtagagggatatgatgtatcttgccatggatttttttgaagattcttgcaacaagctgtatgccaagaatgcagctctcccaagtcccaatgttgactaggaggcattgtgtaaactaaatataggtaaaagaagtggcaaatgagaatattgtgatcattgaacttttgtttaaattccgtgaaggttgttgcaaatcatcaagtgtctacacttgatgtgagttggtatttgcaaactgaattttgctaggaaagtgttgggaaatgcaatgtgtttcagatgattgcagcaaatgcaatgtgttgggaaataatacctttcttgctgccc

SEQ ID NO: 30622 - protein, 148 aa, Triticum aestivum
MAMAVEARLRQEKVKKFEDFVDRRLKPDLVNAIAQRDNLFQQQKTFLDLKKNIENLEKNGVTSMRSMVNLGSEVYMQAEVPDTKHIFVDIGLGFHVEFTWQEALQFISVREARLARQIDEYTHLIASIKAQIKLVCEGIRELLQFPAE

SEQ ID NO: 30623 - protein, 146 aa, Triticum aestivum
MAVEARLRQEKVKKFEDFVDRRLKPDLVNAIAQRDNLFQQQKTFLDLKKNIENLEKNGVTSMRSMVNLGSEVYMQAEVPDTKHIFVDIGLGFHVEFTWQEALQFISVREARLARQIDEYTHLIASIKAQIKLVCEGIRELLQFPAE

SEQ ID NO: 30624 - protein, 86 aa, Triticum aestivum
KRFPFQPGARRRPPSCSSTSPAGLQAPASAGRLPPAAWCPPAVFGSPSARPPAAPCGGARRPQQGNSLGHGNGCGGASPAGEGEEV

SEQ ID NO: 30625 - DNA, 509 bp, Triticum aestivum
catcctaatcgaaaacagtatccaaagactcgcgtcgctctcgtgtcgcaccaaccaaccacactcgaacggggattcccactcgaacgccgccgcttcgcacgatggcgacggggcacgccttccggcgcctggcgcggcggatgctgagcaacgtgccggagtcgaccgtctatgggggcccgcggccgcaggaggcggcggcggcgcggcgcgtgacggtgacgaccctccgcgggaagcaccgccggggggagcccatcaccgttgtcaccgcctacgactacccctccgccgtccacgtcgactccgcggggatcgacgtctgcctcgtcggcgactccgccgccatggtcgttcacggccacgacaccactctccccatctccctcgacgtcatgctcgagcactgccgcgccgtggcgcgaggcgcctcgcggccgctcctcgtcggcgacctcttcttcggttgctacgagtcctctttcacgcaggctggtgactctgcg

SEQ ID NO: 30626 - protein, 166 aa, Triticum aestivum
ILIENSIQRLASLSCRTNQPHSNGDSHSNAAASHDGDGARLPAPGAADAEQRAGVDRLWGPAAAGGGGGAARDGDDPPREAPPGGAHHRCHRLRLPLRRPRRLRGDRRLPRRRLRRHGRSRPRHHSPHLPRRHARALPRRGARRLAAAPRRRPLLRLLRVLFHAGW

SEQ ID NO: 30627 - protein, 135 aa, Triticum aestivum
MATGHAFRRLARRMLSNVPESTVYGGPRPQEAAAARRVTVTTLRGKHRRGEPITVVTAYDYPSAVHVDSAGIDVCLVGDSAAMVVHGHDTTLPISLDVMLEHCRAVARGASRPLLVGDLFFGCYESSFTQAGDSA

SEQ ID NO: 30628 - protein, 122 aa, Triticum aestivum
MLSNVPESTVYGGPRPQEAAAARRVTVTTLRGKHRRGEPITVVTAYDYPSAVHVDSAGIDVCLVGDSAAMVVHGHDTTLPISLDVMLEHCRAVARGASRPLLVGDLFFGCYESSFTQAGDSA

SEQ ID NO: 30629 - DNA, 1501 bp, Triticum aestivum
atacctacatagtcttctgccagtttgagtactcacgacgaacgccgtccacacgccccagagcacttcgaacacgaggccgccagcgagcatgggcaagggagctggcgccgccggcgtggacgagccgctgctcccggagctctcgggcgggcacggcggcggggcgtcggtctccggcgcggtgttcaacctgtccacgagcatcatcggcgccggcattatgtcgatcccggcggcaatgcgcgtgctcggggtcgtccccgcgctcgccctcatcgcggccgtcgccctcctctccgacgtctccgtggagttcatgctgcggtacacggcctgggccagcggcacgccctcgtacgcggggatcatgggcgacgcgttcggccgccgcgccggcgccgcggcgctcaacatcttcatagccttcaccaccgccggcaccctcgtcgtctacctcatcatcataggggatgtgctgtccgggagcgtggaggggggaggcgagcacgccggggtgctgcaggagctgttcggccggcagtggtggaccggcagggagtttgtgatactggccacggccgtcgtcgttctgctgccgctggtgctcctccgccgcgtcgattcgctgaggtacacatcggcagtgtccatccttctggcggcggtgttcatgctcatcacgatggggatcgcggtctacactgtcttcaccggcactgcgaagatgccgcggatgctgccggacttctccaccctcgcgtcccccttcgagctcttcaccgccgtcccggtcatcgtcgtcgccttcaccttccacttcaacgtgcacccgatccgcgcggagctcagcaagacgtcggacatgaagtcggcggtgcgcatctcgctggtgctctgcgccgccatctacgccgcggtgggcttcttcggcttcctcctcttcggggacgccaccatgcccgacgtgctcgccaacttcgaccgcagctccggctccggcgtcccgcaggcgctcaacgacgccgcgcgcctcagctacgcgctgcacctcgtgctcgtcttcccgctcctccactactcgctccgcgtcaacgtcgacgagctcctcttcccaggccgccgcccgctggccaccgacacgcgccgcttcgtggcgctcacggccgtgctcatggcggtgctctacgtgctcgccatcgccatccccagcatctggacgctcttccagtactcgggctccacgttcgccgtctgcatatcgcttatcttccctggcgccatcgttctcagggatgttcacggaatagcgaagaggaaagacaaggcaatggcagcgatgatgatcactctggcggtgatcacgagcagcatcgccattgcttccaacgtcatgagctccatcaagggcgaagtgaaaggtgttaatgccggagctagctagcatgtacagtttcattatttatatagctataatataaatcaaaattctttcacccgc

SEQ ID NO: 30630 - protein, 450 aa, Triticum aestivum
MGKGAGAAGVDEPLLPELSGGHGGGASVSGAVFNLSTSIIGAGIMSIPAAMRVLGVVPALALIAAVALLSDVSVEFMLRYTAWASGTPSYAGIMGDAFGRRAGAAALNIFIAFTTAGTLVVYLIIIGDVLSGSVEGGGEHAGVLQELFGRQWWTGREFVILATAVVVLLPLVLLRRVDSLRYTSAVSILLAAVFMLITMGIAVYTVFTGTAKMPRMLPDFSTLASPFELFTAVPVIVVAFTFHFNVHPIRAELSKTSDMKSAVRISLVLCAAIYAAVGFFGFLLFGDATMPDVLANFDRSSGSGVPQALNDAARLSYALHLVLVFPLLHYSLRVNVDELLFPGRRPLATDTRRFVALTAVLMAVLYVLAIAIPSIWTLFQYSGSTFAVCISLIFPGAIVLRDVHGIAKRKDKAMAAMMITLAVITSSIAIASNVMSSIKGEVKGVNAGAS

SEQ ID NO: 30631 - protein, 406 aa, Triticum aestivum
MSIPAAMRVLGVVPALALIAAVALLSDVSVEFMLRYTAWASGTPSYAGIMGDAFGRRAGAAALNIFIAFTTAGTLVVYLIIIGDVLSGSVEGGGEHAGVLQELFGRQWWTGREFVILATAVVVLLPLVLLRRVDSLRYTSAVSILLAAVFMLITMGIAVYTVFTGTAKMPRMLPDFSTLASPFELFTAVPVIVVAFTFHFNVHPIRAELSKTSDMKSAVRISLVLCAAIYAAVGFFGFLLFGDATMPDVLANFDRSSGSGVPQALNDAARLSYALHLVLVFPLLHYSLRVNVDELLFPGRRPLATDTRRFVALTAVLMAVLYVLAIAIPSIWTLFQYSGSTFAVCISLIFPGAIVLRDVHGIAKRKDKAMAAMMITLAVITSSIAIASNVMSSIKGEVKGVNAGAS

SEQ ID NO: 30632 - protein, 400 aa, Triticum aestivum
MRVLGVVPALALIAAVALLSDVSVEFMLRYTAWASGTPSYAGIMGDAFGRRAGAAALNIFIAFTTAGTLVVYLIIIGDVLSGSVEGGGEHAGVLQELFGRQWWTGREFVILATAVVVLLPLVLLRRVDSLRYTSAVSILLAAVFMLITMGIAVYTVFTGTAKMPRMLPDFSTLASPFELFTAVPVIVVAFTFHFNVHPIRAELSKTSDMKSAVRISLVLCAAIYAAVGFFGFLLFGDATMPDVLANFDRSSGSGVPQALNDAARLSYALHLVLVFPLLHYSLRVNVDELLFPGRRPLATDTRRFVALTAVLMAVLYVLAIAIPSIWTLFQYSGSTFAVCISLIFPGAIVLRDVHGIAKRKDKAMAAMMITLAVITSSIAIASNVMSSIKGEVKGVNAGAS

SEQ ID NO: 30633 - DNA, 1440 bp, Triticum aestivum
atcagaaatccaaagccaaaaaccactctctaaacccgacacaaaaactcaagcccgaacccaagaaagcttccttcccgagacgagatcaagatggctcccgagctggccggcaagatgaccgccaaggccgccgtggcggcggccaagcccgcgacgaaggcgtacgtgacgttcctggcgggggcgggggactactggatgggcgtggtggggcttgccaagggcctgcgcaaggttgggtcggcctacccgctggtggtggccgtgctgcccgacgtgcccgagctccaccgcaagatcctcgtctcccagggctgcatcgtccgcgagatcgctcccgtgtacccgcccgagaaccacacccagtttgccatggcctactacgtcatcaactactccaagctccgcatctgggagtttgtggagtacgagaggatggtgtacctcgacgccgacatccaggtgttcgacaacatcgacgagttgtttgatctgcccaaggggcatttctacgccgtgatggactgcttctgcgagaagacgtggagccacaccccgcagtaccagatcggctactgccagcagtgtcccgacaaggtgacgtggccggccgccgagatgggcccgccgccggcgctctacttcaacgccggcatgttcgtgcacgagcccagcatggccaccgccaaggcgctccttgacaccctccgcgtgacgccgacgaccccattcgcggagcaggatttcctcaacatgttcttcagggagcagtacaagccgatcccgctggtctacaaccttgttctggcgatgctctggaggcacccggagaacgtgcagctggagaaggtcaaggtggtgcactactgcgctgcgggatcgaagccatggaggttcacgggcaaagaggagaacatggacagggaggacatcaagatcctcgccaggaactggtgggacatctacaacgacgagagcctcgatttcaagggcctgcccgccctggccgccgacgccgacgagctcgaggcggcggccaagaagccgctccgcgcggcgcttgcggaagccggcaccgtcaagtacgtcaccgcgccctcggctgcgtgatccccggttgcctagctccggcccgtgccactgtggtcatcaaagcaggaagccgggcacctataagcatttgcattttggtattttgcgtctgttcggttccaagttagcagtatcatttcaagtttaagataggatcgaaagagtccacgtatgtgaatatcctcgaccctttgtgaagtagagtgctgagtcgtcctgtatgaaagaattatgtgtgaatcaataggaagctttaaaaattatggcatatatttttcacgtcaaaaaaaaaaaaaaaaaaaaaaaaggagggggggggagggaaaaaaaaaaaaaaaagagctt

SEQ ID NO: 30634 - protein, 339 aa, Triticum aestivum
MAPELAGKMTAKAAVAAAKPATKAYVTFLAGAGDYWMGVVGLAKGLRKVGSAYPLVVAVLPDVPELHRKILVSQGCIVREIAPVYPPENHTQFAMAYYVINYSKLRIWEFVEYERMVYLDADIQVFDNIDELFDLPKGHFYAVMDCFCEKTWSHTPQYQIGYCQQCPDKVTWPAAEMGPPPALYFNAGMFVHEPSMATAKALLDTLRVTPTTPFAEQDFLNMFFREQYKPIPLVYNLVLAMLWRHPENVQLEKVKVVHYCAAGSKPWRFTGKEENMDREDIKILARNWWDIYNDESLDFKGLPALAADADELEAAAKKPLRAALAEAGTVKYVTAPSAA

SEQ ID NO: 30635 - protein, 331 aa, Triticum aestivum
MTAKAAVAAAKPATKAYVTFLAGAGDYWMGVVGLAKGLRKVGSAYPLVVAVLPDVPELHRKILVSQGCIVREIAPVYPPENHTQFAMAYYVINYSKLRIWEFVEYERMVYLDADIQVFDNIDELFDLPKGHFYAVMDCFCEKTWSHTPQYQIGYCQQCPDKVTWPAAEMGPPPALYFNAGMFVHEPSMATAKALLDTLRVTPTTPFAEQDFLNMFFREQYKPIPLVYNLVLAMLWRHPENVQLEKVKVVHYCAAGSKPWRFTGKEENMDREDIKILARNWWDIYNDESLDFKGLPALAADADELEAAAKKPLRAALAEAGTVKYVTAPSAA

SEQ ID NO: 30636 - protein, 303 aa, Triticum aestivum
MGVVGLAKGLRKVGSAYPLVVAVLPDVPELHRKILVSQGCIVREIAPVYPPENHTQFAMAYYVINYSKLRIWEFVEYERMVYLDADIQVFDNIDELFDLPKGHFYAVMDCFCEKTWSHTPQYQIGYCQQCPDKVTWPAAEMGPPPALYFNAGMFVHEPSMATAKALLDTLRVTPTTPFAEQDFLNMFFREQYKPIPLVYNLVLAMLWRHPENVQLEKVKVVHYCAAGSKPWRFTGKEENMDREDIKILARNWWDIYNDESLDFKGLPALAADADELEAAAKKPLRAALAEAGTVKYVTAPSAA

SEQ ID NO: 30637 - DNA, 951 bp, Triticum aestivum
atatcacaagaagccgaaccattccaagtactgtcgagcagaagcctaaagcgagtgacatttcccccttccgagctagttcaagaaaccaaaatggcctccaaccagaaccaggccagctaccacgccggcgagaccaaggcccgtacagaggagaagaccgggcagatgatgggcgcgaccaaggacaaggccgggcagaccacggaggccaccaagcagaaggccggcgagacggccgaggcaacgaagcagaagactggccaggccacggaggctaccaagcagaaggccggcgagacggccgatgccaccaagcagaaggccgccgaggccaaggacaagacggcgcagacggcgcaggcggccaaggagaagacgtacgagacggcgcagtcggccaaggagcgcgccgcccagggcaaggaccagaccgccagcaccctcggcgagaagacggaggcggcgaagcagaaggccgccgagaccacggaggcggccaggcagaaggccgccgaggcgaccgaggcggccaagcagaaggcgtcggagacggcgcagtacaccaaggagtccgccgtcgccggcaaggacaagaccggcagcgtcctccagcaggccggcgagacggtggtgaacgccgtggtgggcgccaaggacgccgtggccaacacgctgggcatgggcggtgacaacgccaccaaggacaccaccaccggcgccaccaccaaggacaccaccaccaggaatcactagacgcatgcgttcgcgcttgatttgctttcctgtagtcgtgtttggtcgttcgcgggccttctacatattttgtatgtttccactctttcgtgatttcagctcatttagtgtaagtttgccttcgatttgatgtactactcgtgtccggttctgtaatagtattgagttattattatgatccatgtactttggtgt

SEQ ID NO: 30638 - protein, 251 aa, Triticum aestivum
ISQEAEPFQVLSSRSLKRVTFPPSELVQETKMASNQNQASYHAGETKARTEEKTGQMMGATKDKAGQTTEATKQKAGETAEATKQKTGQATEATKQKAGETADATKQKAAEAKDKTAQTAQAAKEKTYETAQSAKERAAQGKDQTASTLGEKTEAAKQKAAETTEAARQKAAEATEAAKQKASETAQYTKESAVAGKDKTGSVLQQAGETVVNAVVGAKDAVANTLGMGGDNATKDTTTGATTKDTTTRNH

SEQ ID NO: 30639 - protein, 229 aa, Triticum aestivum
ITRSRTIPSTVEQKPKASDISPFRASSRNQNGLQPEPGQLPRRRDQGPYRGEDRADDGRDQGQGRADHGGHQAEGRRDGRGNEAEDWPGHGGYQAEGRRDGRCHQAEGRRGQGQDGADGAGGQGEDVRDGAVGQGARRPGQGPDRQHPRREDGGGEAEGRRDHGGGQAEGRRGDRGGQAEGVGDGAVHQGVRRRRQGQDRQRPPAGRRDGGERRGGRQGRRGQHAGHGR

SEQ ID NO: 30640 - protein, 220 aa, Triticum aestivum
MASNQNQASYHAGETKARTEEKTGQMMGATKDKAGQTTEATKQKAGETAEATKQKTGQATEATKQKAGETADATKQKAAEAKDKTAQTAQAAKEKTYETAQSAKERAAQGKDQTASTLGEKTEAAKQKAAETTEAARQKAAEATEAAKQKASETAQYTKESAVAGKDKTGSVLQQAGETVVNAVVGAKDAVANTLGMGGDNATKDTTTGATTKDTTTRNH

SEQ ID NO: 30641 - DNA, 1767 bp, Triticum aestivum
tttttagccgatcagtatcctccacaagaaaaaaaatactataagcgcaatagaaaaatagtgatccctcaataagaaaatcaagaaaagatttccttttcttcttgggctcccttccaccaccaacctcttctccggccggccgagttgtcccgctccggctgcgtcttctccggcgagaggtgtagctaggttgcctgctcttcctttgagcggtctcctcccggcagggctgaggagatctctcgggacctcgggactggggcgtgtatgatggggatttcgcttatgccgatgaagacgcccacgcggcttctgtggagcaccagcttcttccgccacaagctcgccgccatgatcgcctcctcgtcctgcttcttataagagcccctccgccgcgcagcagctgtatatatacgtctttttcatttgattccgccccccgttcgatcgacaaccaaccaaggcaacttcttgaagctttctctgcgatggagcccggccggctcatcttcaacacgtcgggctccggcaacggacagatgctcttcatggactgcggcgccggcggcatcgccggcgcggccggcatgttccatcgaggggtgagaccggtcctcggcggcatggaagaagggcgcggcgtgaagcggcccttcttcacctcgccggatgacatgctcgaggaggagtactacgacgagcagctcccggagaagaagcggcgcctcaccccggagcaggtccacctgctggagaggagcttcgaggaggagaataagctggagccggagaggaagacggagctggcccgcaagctcgggctgcagccacgccaggtggccgtctggttccagaaccgccgcgcccggtggaagacaaagacgctggagcgcgacttcgaccgcctcaaggcgtccttcgacgccctccgggccgaccacgacgccctcctccaggacaaccaccggctccggtcacaggtggtaacgttgaccgagaagatgcaagataaggaggcgccggaaggcagcttcggtgcagccgtcgacgccttggagccggagcaggcggcggcggaggcgaaggcttccttggccaacgccgaggaacatgccgcggcagcggaggcgttcgaggtggtgcagcagcagctgcatgtgaaggacgaggagaggctgagcccggggagcggcgggagcgcggtgctggacgcgagggacgcgctgctcgggagcggatgcggtctcgccggcgtggtggacagcagcgtggactcgtactgcttcccggggggcgccggcggcgacgagtaccacgagtgcgtgatgggccccgtggcgggcggcatccagtcggaggaggacgacggcgcgggcagcgacgagggctgcagctactaccccgacgacgccgccgtcttcttcgccgccgcgcaagggcacggccaccatcacacggacgacgacgatcagcaggacgacggccagatcagctactggatgtggaactaggctcgcgcacgcatcaagaagcgtgcgtgcgtgcgccgtggaatcgatcaatttcggagtatatcagtaaaagaaatcgtggcgttttgttttctctccttgtatgcttcccgctgtaatcttgggtcactacgatcgaccaagttgtatgcatatgcattgtactacgagttagggtaatacatcggtggtaaaatctgtcgtgatgtacgggaaataagtgaacggagtcagagcctcattcttatggcac

SEQ ID NO: 30642 - protein, 340 aa, Triticum aestivum
MEPGRLIFNTSGSGNGQMLFMDCGAGGIAGAAGMFHRGVRPVLGGMEEGRGVKRPFFTSPDDMLEEEYYDEQLPEKKRRLTPEQVHLLERSFEEENKLEPERKTELARKLGLQPRQVAVWFQNRRARWKTKTLERDFDRLKASFDALRADHDALLQDNHRLRSQVVTLTEKMQDKEAPEGSFGAAVDALEPEQAAAEAKASLANAEEHAAAAEAFEVVQQQLHVKDEERLSPGSGGSAVLDARDALLGSGCGLAGVVDSSVDSYCFPGGAGGDEYHECVMGPVAGGIQSEEDDGAGSDEGCSYYPDDAAVFFAAAQGHGHHHTDDDDQQDDGQISYWMWN

SEQ ID NO: 30643 - protein, 323 aa, Triticum aestivum
MLFMDCGAGGIAGAAGMFHRGVRPVLGGMEEGRGVKRPFFTSPDDMLEEEYYDEQLPEKKRRLTPEQVHLLERSFEEENKLEPERKTELARKLGLQPRQVAVWFQNRRARWKTKTLERDFDRLKASFDALRADHDALLQDNHRLRSQVVTLTEKMQDKEAPEGSFGAAVDALEPEQAAAEAKASLANAEEHAAAAEAFEVVQQQLHVKDEERLSPGSGGSAVLDARDALLGSGCGLAGVVDSSVDSYCFPGGAGGDEYHECVMGPVAGGIQSEEDDGAGSDEGCSYYPDDAAVFFAAAQGHGHHHTDDDDQQDDGQISYWMWN

SEQ ID NO: 30644 - protein, 320 aa, Triticum aestivum
MDCGAGGIAGAAGMFHRGVRPVLGGMEEGRGVKRPFFTSPDDMLEEEYYDEQLPEKKRRLTPEQVHLLERSFEEENKLEPERKTELARKLGLQPRQVAVWFQNRRARWKTKTLERDFDRLKASFDALRADHDALLQDNHRLRSQVVTLTEKMQDKEAPEGSFGAAVDALEPEQAAAEAKASLANAEEHAAAAEAFEVVQQQLHVKDEERLSPGSGGSAVLDARDALLGSGCGLAGVVDSSVDSYCFPGGAGGDEYHECVMGPVAGGIQSEEDDGAGSDEGCSYYPDDAAVFFAAAQGHGHHHTDDDDQQDDGQISYWMWN

SEQ ID NO: 30645 - DNA, 1556 bp, Triticum aestivum
ttcgcacgagaccattacctagaacatcctaatcgaaaactccaggtcagatctcgccgcccaccacggccgcgcacaatgggctctgcacattcgtcccactcctccatctctaccgcggccgacgaaggcgacgatgatccatcgactgcctcagcctcggagccctcggcccggccccctcccgcccaagcgccggctccaccggcctctgcgtccaaggtgctggagcaggagcccgaggtgctaccctgccgagccgccgactcgccgctctcgccgcaaccatccgtaacgggcaccccacgcctcctcggccccaacatcaaggtctgggacccctgccacgtgctccttcccccaccgtcgctgcaccagcacctcccgcagcaggggaggacggaggcgctgctggaggtggtaatagttagccacggggaatgtgcgttcgcgatgcgacccgacctggttggtgggcgatggccggcagtggccctcacggcgcgcggggagcgacaggcgcgcgctctgtcagtgttcctgcgctcccgtggttcgcagctggccgctgcgtggacgtcgcccctcgaccgttcccgcgctactgctgaacttgtctgccgggaacttgattttccagaggagcagatccaagtatctgatgctttgactgagatgagtcatggtcagtgggagggttgcccaaaatcagaaatttataccccagaaatggttaatctgatggacagcacccagcctgatttctcagcaccttcaggagagtcactcaggcaggtgcagttcaggatgatggagttcctgaaccgaacaatcataaggttaccagaaaaggtggcaatgggggatacactatcacaacaaaatgacgcaaagggtttatctcggcagagctccaccaattctgtccaagatggcccatcttgggatttgctttacaggctcaatcggcatagcctccaaaggaagaaatctggtaaaagccgtctccagtttgtcacttcggttgacaatgataccgaggatgagttctccctgaaagacataaaccaaaggcatcgccttcacgaaacaagtctggggagctctacaacctccattgcaattttcagccatgcaatccctattcgatgtctccttgcgggcttgttggactgcaaccctgtgatgtctcagaggatatgtatagacgattcatctgtcactgttcttgaacattcgcttagaaccgggtggcgaataaagaggctaaatgatactgggcatctcaggcttctctagctgcaagctgttgcgctgcagctggaatctaactgatgtgtgtttatgtgtcgtaaagaaaccatcagatcatattatgcaaatcagaagctatggttgtcggttcatgttcacctatgcctcaatggggaatgcaagtcctccgattgttgttattttgcatttattaccatgcctaaattccgggaagaactgccctgtgattgtgttaccctgtgattgttaatcaatattttatcaagtgtaatttccaactc

SEQ ID NO: 30646 - protein, 432 aa, Triticum aestivum
FARDHYLEHPNRKLQVRSRRPPRPRTMGSAHSSHSSISTAADEGDDDPSTASASEPSARPPPAQAPAPPASASKVLEQEPEVLPCRAADSPLSPQPSVTGTPRLLGPNIKVWDPCHVLLPPPSLHQHLPQQGRTEALLEVVIVSHGECAFAMRPDLVGGRWPAVALTARGERQARALSVFLRSRGSQLAAAWTSPLDRSRATAELVCRELDFPEEQIQVSDALTEMSHGQWEGCPKSEIYTPEMVNLMDSTQPDFSAPSGESLRQVQFRMMEFLNRTIIRLPEKVAMGDTLSQQNDAKGLSRQSSTNSVQDGPSWDLLYRLNRHSLQRKKSGKSRLQFVTSVDNDTEDEFSLKDINQRHRLHETSLGSSTTSIAIFSHAIPIRCLLAGLLDCNPVMSQRICIDDSSVTVLEHSLRTGWRIKRLNDTGHLRLL

SEQ ID NO: 30647 - protein, 406 aa, Triticum aestivum
MGSAHSSHSSISTAADEGDDDPSTASASEPSARPPPAQAPAPPASASKVLEQEPEVLPCRAADSPLSPQPSVTGTPRLLGPNIKVWDPCHVLLPPPSLHQHLPQQGRTEALLEVVIVSHGECAFAMRPDLVGGRWPAVALTARGERQARALSVFLRSRGSQLAAAWTSPLDRSRATAELVCRELDFPEEQIQVSDALTEMSHGQWEGCPKSEIYTPEMVNLMDSTQPDFSAPSGESLRQVQFRMMEFLNRTIIRLPEKVAMGDTLSQQNDAKGLSRQSSTNSVQDGPSWDLLYRLNRHSLQRKKSGKSRLQFVTSVDNDTEDEFSLKDINQRHRLHETSLGSSTTSIAIFSHAIPIRCLLAGLLDCNPVMSQRICIDDSSVTVLEHSLRTGWRIKRLNDTGHLRLL

SEQ ID NO: 30648 - protein, 281 aa, Triticum aestivum
MRPDLVGGRWPAVALTARGERQARALSVFLRSRGSQLAAAWTSPLDRSRATAELVCRELDFPEEQIQVSDALTEMSHGQWEGCPKSEIYTPEMVNLMDSTQPDFSAPSGESLRQVQFRMMEFLNRTIIRLPEKVAMGDTLSQQNDAKGLSRQSSTNSVQDGPSWDLLYRLNRHSLQRKKSGKSRLQFVTSVDNDTEDEFSLKDINQRHRLHETSLGSSTTSIAIFSHAIPIRCLLAGLLDCNPVMSQRICIDDSSVTVLEHSLRTGWRIKRLNDTGHLRLL

SEQ ID NO: 30649 - DNA, 1728 bp, Triticum aestivum
agcgttctactcctctcttttgtttcccctcgacggcggcggcggcggcggcaaccagggtttagaggaggagaagcttgctcggcgcaaaaccctagccccgcaccttcatctacggattcatcgcgcctctgcagcgcatccttgccgagtgccccgcctcgctgcatcggcggtcgcgatgagggtgaaggtgatatcgcgctcgaccgacgacttcacgcgcgagcgcagccaggacctgcagaaagtattccgcaattatgatccagcactccgtagtcaagagaaagctgttgagtacactcgagcccttaatgctgcaaagttagagaagatatttgccaggccatttattggagcaatggatggtcacattgatgctgtttcgtgcatggcgaagaactccaattatgtgaaagctatgttttctggctcgatggatggggatattcgactatgggacattgctgcaaggaagacagtctgccagttccctggacaccagggtgctgtgagaggtttggcaacatctaccgacggcgatcttctgatatcctgtggtgttgattgcactgttcgactctggaaagatcctatgcgtaagatgatggacactaatgatgctattggagatgcttcccagccgtcagcagtctatacatggaagcatgcattttggggtgttgaccaccagtgggatcgtaatgttttcgcaactgtaggtgctcaggtagatatatgggaccataacaggtcggagccaataaataccttcgaatggggtaaagatacagttctttctgtgcggtttaatcctggagaacctgatgttttacttacatcatctagtgatcggagtttaacactttttgacctgcgcatgtcatccccagctagaaagttaatcatgaagacaaggtgcaattcagtttgctggaaccctagggagcccatgaacttcactgctgcaaacgaagatacaaactgttattcttttgatgctagaaagctgaatgaagccaaggttgttcacaagggtcatgtttcagcagtgatggatgttgattacaacccaacaggacgggaatttgttactggttcctacgatagaacggtacggatcttcaattataacggtgatcatagcagggagatataccatactaagaggatgcaaagggtgttttgtgtgaaatacacatatgatgggacctatctagtttctggcagtgatgacacaaatcttcgtctgtggaagtccaaagcttcagaacaattgggagttattcttccaagggaacgcaaaaagcaagaatatcttgatgctgtcaaggcgcggtataatcaccttccagaaatcaggcggattgacaaacataagcacttgcccaagccgatctacaaggcaggcaagataaggcgcgccatgattgaagcagaaagccggaaagaagaaagaaggcgagcgcacagtgctccagggagcaggactatgcagcccttcagaaagagaaggctcatcacagaagttgagtagggtgggatctgaccatcgcgaggccaaacaaagtggcattacgttggagtattatttttggtcgagtgtgagtgatgggaagctgggaacatatttattatgtgtagtgtcatgttgttacttgcaaaccttggacaacgtaccggattacttttgagaaggaaataaagaggacttgttgtatgggc

SEQ ID NO: 30650 - protein, 512 aa, Triticum aestivum
AFYSSLLFPLDGGGGGGNQGLEEEKLARRKTLAPHLHLRIHRASAAHPCRVPRLAASAVAMRVKVISRSTDDFTRERSQDLQKVFRNYDPALRSQEKAVEYTRALNAAKLEKIFARPFIGAMDGHIDAVSCMAKNSNYVKAMFSGSMDGDIRLWDIAARKTVCQFPGHQGAVRGLATSTDGDLLISCGVDCTVRLWKDPMRKMMDTNDAIGDASQPSAVYTWKHAFWGVDHQWDRNVFATVGAQVDIWDHNRSEPINTFEWGKDTVLSVRFNPGEPDVLLTSSSDRSLTLFDLRMSSPARKLIMKTRCNSVCWNPREPMNFTAANEDTNCYSFDARKLNEAKVVHKGHVSAVMDVDYNPTGREFVTGSYDRTVRIFNYNGDHSREIYHTKRMQRVFCVKYTYDGTYLVSGSDDTNLRLWKSKASEQLGVILPRERKKQEYLDAVKARYNHLPEIRRIDKHKHLPKPIYKAGKIRRAMIEAESRKEERRRAHSAPGSRTMQPFRKRRLITEVE

SEQ ID NO: 30651 - protein, 452 aa, Triticum aestivum
MRVKVISRSTDDFTRERSQDLQKVFRNYDPALRSQEKAVEYTRALNAAKLEKIFARPFIGAMDGHIDAVSCMAKNSNYVKAMFSGSMDGDIRLWDIAARKTVCQFPGHQGAVRGLATSTDGDLLISCGVDCTVRLWKDPMRKMMDTNDAIGDASQPSAVYTWKHAFWGVDHQWDRNVFATVGAQVDIWDHNRSEPINTFEWGKDTVLSVRFNPGEPDVLLTSSSDRSLTLFDLRMSSPARKLIMKTRCNSVCWNPREPMNFTAANEDTNCYSFDARKLNEAKVVHKGHVSAVMDVDYNPTGREFVTGSYDRTVRIFNYNGDHSREIYHTKRMQRVFCVKYTYDGTYLVSGSDDTNLRLWKSKASEQLGVILPRERKKQEYLDAVKARYNHLPEIRRIDKHKHLPKPIYKAGKIRRAMIEAESRKEERRRAHSAPGSRTMQPFRKRRLITEVE

SEQ ID NO: 30652 - protein, 391 aa, Triticum aestivum
MDGHIDAVSCMAKNSNYVKAMFSGSMDGDIRLWDIAARKTVCQFPGHQGAVRGLATSTDGDLLISCGVDCTVRLWKDPMRKMMDTNDAIGDASQPSAVYTWKHAFWGVDHQWDRNVFATVGAQVDIWDHNRSEPINTFEWGKDTVLSVRFNPGEPDVLLTSSSDRSLTLFDLRMSSPARKLIMKTRCNSVCWNPREPMNFTAANEDTNCYSFDARKLNEAKVVHKGHVSAVMDVDYNPTGREFVTGSYDRTVRIFNYNGDHSREIYHTKRMQRVFCVKYTYDGTYLVSGSDDTNLRLWKSKASEQLGVILPRERKKQEYLDAVKARYNHLPEIRRIDKHKHLPKPIYKAGKIRRAMIEAESRKEERRRAHSAPGSRTMQPFRKRRLITEVE

SEQ ID NO: 30653 - DNA, 1288 bp, Triticum aestivum
ccaaagcagttggtcgctcgctcgctcgctcgccaccgccgcgttggacttttccctcgccggagaaaccgccgcgaccacagccgcaaccgccgcagccgcctccggaggaggagggtagtaccaccagggaaggaggaggccatggcggggaggtacgaccgcaaccccttcgacgaggatgacgtcaaccccttcgcgggaggaggtgtacctccggcttctaattctcggatgccacctcttcctcacgagcctgctggattctataatgatcgtgctgctaccgtggacatacctcttggttcatcgaaggacttgaagcaaaaggagaaagaactgcagtcgaaggaggctgagcttaacaaacgggaaagagaacttaaaagaagggaagaagctgcagctagagctggtattgtcattgaaaccaaaaactggccaccatttatgcccatcattcatcatgacatttcaaatgagataccaatccacctacaaaggatgcagtaccttgcattttgttcattgttgggattgacgttatgcctcttttggaacatcattgcaactaccgcagcatggattaaaggggcaggtgttgtcatctggttgctagcaatcatctacttcatctctggtgtccctggggcgtatgtgttatggtatcggccgctttataatgcaatgaggactgaaagcgctctgaagtttggatggttttttctgctgtacttgatccatataatattctgcatctggtcagctgtgtctcccccatttcctttcaaaggaaaatctatcgctgggtttttgcctgcaattgacgtcataggcagtaatgttattgtggggatattttattttgttggattcggactgttctgccttgaagcactgctcagcattgtggtgatccagcaagtatacatgtacttccgtggaagtggaaaggctgcgcagatgaggcaagaggcagcacgcggtgccatgagatcggccttctgatagagcggtctcgttgatgaatggatgagaataggatgtgccaatcgttgatggcgtcttgtctttgtacatccctatacatatctctgtgcgtggctgtctggctgagagagaatacttgtagctatagatcttcgtgcattcttgtaatatatatgagtgcttcatttctttcctaggccccagatccatgtgctttatatgtagcttaatcttttgggagatacaacttccaacatcactattctgacgagcttgcttgcaatgtcactgtattatg

SEQ ID NO: 30654 - protein, 335 aa, Triticum aestivum
PKQLVARSLARHRRVGLFPRRRNRRDHSRNRRSRLRRRRVVPPGKEEAMAGRYDRNPFDEDDVNPFAGGGVPPASNSRMPPLPHEPAGFYNDRAATVDIPLGSSKDLKQKEKELQSKEAELNKRERELKRREEAAARAGIVIETKNWPPFMPIIHHDISNEIPIHLQRMQYLAFCSLLGLTLCLFWNIIATTAAWIKGAGVVIWLLAIIYFISGVPGAYVLWYRPLYNAMRTESALKFGWFFLLYLIHIIFCIWSAVSPPFPFKGKSIAGFLPAIDVIGSNVIVGIFYFVGFGLFCLEALLSIVVIQQVYMYFRGSGKAAQMRQEAARGAMRSAF

SEQ ID NO: 30655 - protein, 287 aa, Triticum aestivum
MAGRYDRNPFDEDDVNPFAGGGVPPASNSRMPPLPHEPAGFYNDRAATVDIPLGSSKDLKQKEKELQSKEAELNKRERELKRREEAAARAGIVIETKNWPPFMPIIHHDISNEIPIHLQRMQYLAFCSLLGLTLCLFWNIIATTAAWIKGAGVVIWLLAIIYFISGVPGAYVLWYRPLYNAMRTESALKFGWFFLLYLIHIIFCIWSAVSPPFPFKGKSIAGFLPAIDVIGSNVIVGIFYFVGFGLFCLEALLSIVVIQQVYMYFRGSGKAAQMRQEAARGAMRSAF

SEQ ID NO: 30656 - protein, 257 aa, Triticum aestivum
MPPLPHEPAGFYNDRAATVDIPLGSSKDLKQKEKELQSKEAELNKRERELKRREEAAARAGIVIETKNWPPFMPIIHHDISNEIPIHLQRMQYLAFCSLLGLTLCLFWNIIATTAAWIKGAGVVIWLLAIIYFISGVPGAYVLWYRPLYNAMRTESALKFGWFFLLYLIHIIFCIWSAVSPPFPFKGKSIAGFLPAIDVIGSNVIVGIFYFVGFGLFCLEALLSIVVIQQVYMYFRGSGKAAQMRQEAARGAMRSAF

SEQ ID NO: 30657 - DNA, 636 bp, Triticum aestivum
acaagcaccaaaccccacacccgcacccaagaaagcaagcagagcattctccactttcccctccctcgccatggcagccaaggcccccgccctcgcggcggcgctcctcctcctcgccgccgccgccctcctgctcgcccgcggcgccgaggccggggccacggaggtgccgctgagctgggagctgggcgtggaggacgtcgccgacgacgggttcggcttcgcgggcgccggcggcgacgaggcggtggcggcgcggcgcgtgctgcagagcggcaacgggtacatcagctacggcgcgctgcggagggacaacgtgccctgctccgtgcgcggctcctcctactacaactgccgccccggcggccaggccaacccctactcccgcggctgctccgccatcacgcgctgccgcggctgattgggccacccgccgctccgcccccgcccccgccccggttggttggttgagatgctgctccgtgctctccttcgccgcagatgcagagtacatttctttcatgctgctgttttactagtactcaattccaagaggtcgtgtccgttgatgtaaatcgaaatccaagccgtattgtataaactgatggattggtggatgattggttgatttctttc

SEQ ID NO: 30658 - protein, 156 aa, Triticum aestivum
TSTKPHTRTQESKQSILHFPLPRHGSQGPRPRGGAPPPRRRRPPARPRRRGRGHGGAAELGAGRGGRRRRRVRLRGRRRRRGGGGAARAAERQRVHQLRRAAEGQRALLRARLLLLQLPPRRPGQPLLPRLLRHHALPRLIGPPAAPPPPPPRLVG

SEQ ID NO: 30659 - protein, 139 aa, Triticum aestivum
QAPNPTPAPKKASRAFSTFPSLAMAAKAPALAAALLLLAAAALLLARGAEAGATEVPLSWELGVEDVADDGFGFAGAGGDEAVAARRVLQSGNGYISYGALRRDNVPCSVRGSSYYNCRPGGQANPYSRGCSAITRCRG

SEQ ID NO: 30660 - protein, 116 aa, Triticum aestivum
MAAKAPALAAALLLLAAAALLLARGAEAGATEVPLSWELGVEDVADDGFGFAGAGGDEAVAARRVLQSGNGYISYGALRRDNVPCSVRGSSYYNCRPGGQANPYSRGCSAITRCRG

SEQ ID NO: 30661 - DNA, 1138 bp, Triticum aestivum
gagaaacttcttttacttccgcgcggcgatctccactcccgtccaaacccatccaactcaccgcccaaggtcgccgcggatccagtagcctcgtcggagcggagatgaagatcacggcgctcgtcgtgctgaagccgtcggcgggaggcgccgggggctcctcctccagcggcgggcagggctcggaggcgctcgtgctggccaacgccacggacgtcagccacttcggcttcttccagcgcggcgccgcccgcgagttcatcgtcttcgtcgcccgcaccgtcgcccagcgcacccagcccggccagcgccagtccgtccagcacgaagaatacaaggttcactcacacaacagaaatggcctctgcgtggtggcattcatggatgatcactatcctgtacgaagtgcattttctcttctgaataaggtacttgacgaataccagaaggcttttggggatgcttggaaagctgccacagcagattccactcaagagtggcctttcctgatggaagctttgacaaaatttcaggatcctgcagaggctgacaagttaacaaaaatccagagggacttggatgaaacaaaaattatcctacataaaactatagagaatgtccttcaaagaggagagaggttggatagcttggttgaaaaaagctcagacctgagtgctgcttcacagatgttctataagcaggcgaagaaaacaaacagttgttgtactatactttgaagtttgaagtgtgatcctgcaattatcttggaaggctccaggttaatgctgttttccgacaaagatcctgatactgttatacttgctccttgtaccttcagttacgcctctgctcccgtttctcagaaagaaaatcaaccggatattgttgtgctgtactaagtctggttgcccatgaaagtgtctgtgaggcacgggatcaatactgtaaatctgttattctttggtgacgccttcgaatagcaactaacatcacttagcaatggccaacatcattgtcttccctgcttagattgtcgctatctcatttctcaagtatgttggagcacagttgctgcccttacattatgtactgtatgttggaacactggttgctcataatttatgttgtgatattgtgt

SEQ ID NO: 30662 - protein, 244 aa, Triticum aestivum
ETSFTSARRSPLPSKPIQLTAQGRRGSSSLVGAEMKITALVVLKPSAGGAGGSSSSGGQGSEALVLANATDVSHFGFFQRGAAREFIVFVARTVAQRTQPGQRQSVQHEEYKVHSHNRNGLCVVAFMDDHYPVRSAFSLLNKVLDEYQKAFGDAWKAATADSTQEWPFLMEALTKFQDPAEADKLTKIQRDLDETKIILHKTIENVLQRGERLDSLVEKSSDLSAASQMFYKQAKKTNSCCTIL

SEQ ID NO: 30663 - protein, 210 aa, Triticum aestivum
MKITALVVLKPSAGGAGGSSSSGGQGSEALVLANATDVSHFGFFQRGAAREFIVFVARTVAQRTQPGQRQSVQHEEYKVHSHNRNGLCVVAFMDDHYPVRSAFSLLNKVLDEYQKAFGDAWKAATADSTQEWPFLMEALTKFQDPAEADKLTKIQRDLDETKIILHKTIENVLQRGERLDSLVEKSSDLSAASQMFYKQAKKTNSCCTIL

SEQ ID NO: 30664 - DNA, 927 bp, Triticum aestivum
accaccctccctccatccacacctcagcctcagctcacctgctcctgctctccttgcctccctccatccgtcctccttgggattgggagagaagagaccacgagcaactcatccaaacaatgaagagcaggacgcagagcggccgcggaggagccatggtcgccgacgggggcagcaagatggagcgcaaggaggtggagaagaaccggcggctgcacatgaagggactctgcctcaagctctcctccctcctcccctcctcctcctcagcccaccacctccgccattattcttcctcgccgccgtccagcaacaaggacgcgacgacgcagctggaccagctggacagcgcggcggcgtacatcaagaagctcaagagccgggtcgacgaactcaagcgccgcaagcaggccgtcgtctccggcaccgctggctgctcgtcctccgtctccgccggcgactacaagggagcagcactgtccacaactgcgctgcctgtgatcgaggtgcggcaccaggacggaacgctggacgtggcgctggcgagcgaggccgggcggccgttccggctgcacgaggtgatcgccgtcctggagcaggagggcgccgaggtggtcagcgccagcttttcggtcgtgggtgacaagatcttctacacggtccattcccaggcattgtacccccgcatcggcctcgaggccggccgggtcgcccaccggctgcgcggcctcgccgcagccgcagccatctcgccgtcggtcctcctgacatgatctctttctctctttcttcgttgttttgccatggtgacagattagctgatctatgggcagcttagcttagtactgctctactctgctcgtgagtgagcttcaggtttgtctgaaatctactagtgtaggcacgtgcttgcgtatcctcctttct

SEQ ID NO: 30665 - protein, 256 aa, Triticum aestivum
HPPSIHTSASAHLLLLSLPPSIRPPWDWERRDHEQLIQTMKSRTQSGRGGAMVADGGSKMERKEVEKNRRLHMKGLCLKLSSLLPSSSSAHHLRHYSSSPPSSNKDATTQLDQLDSAAAYIKKLKSRVDELKRRKQAVVSGTAGCSSSVSAGDYKGAALSTTALPVIEVRHQDGTLDVALASEAGRPFRLHEVIAVLEQEGAEVVSASFSVVGDKIFYTVHSQALYPRIGLEAGRVAHRLRGLAAAAAISPSVLLT

SEQ ID NO: 30666 - protein, 217 aa, Triticum aestivum
MKSRTQSGRGGAMVADGGSKMERKEVEKNRRLHMKGLCLKLSSLLPSSSSAHHLRHYSSSPPSSNKDATTQLDQLDSAAAYIKKLKSRVDELKRRKQAVVSGTAGCSSSVSAGDYKGAALSTTALPVIEVRHQDGTLDVALASEAGRPFRLHEVIAVLEQEGAEVVSASFSVVGDKIFYTVHSQALYPRIGLEAGRVAHRLRGLAAAAAISPSVLLT

SEQ ID NO: 30667 - protein, 213 aa, Triticum aestivum
PPSLHPHLSLSSPAPALLASLHPSSLGLGEKRPRATHPNNEEQDAERPRRSHGRRRGQQDGAQGGGEEPAAAHEGTLPQALLPPPLLLLSPPPPPLFFLAAVQQQGRDDAAGPAGQRGGVHQEAQEPGRRTQAPQAGRRLRHRWLLVLRLRRRLQGSSTVHNCAACDRGAAPGRNAGRGAGERGRAAVPAARGDRRPGAGGRRGGQRQLFGRG

SEQ ID NO: 30668 - DNA, 586 bp, Triticum aestivum
ccacaacccagaggcatcagccagctcctcacgaacgcacggtcgcagagacaccgcacgagagcagctccaccacttccctcccacacgagcccaagaagcaaccatggcggcggcgaaggccaccctcgtctgcttcatggtcatggctctcgcgacggcgctgctggcagtgccgggcgcggtggaggcggcgacgtgcagcccgacgcagctgaccccgtgcgcgccggccatcatcgggaacgcggcgccgagcgcggcgtgctgcgggaagctcaaggcgcacccggcgagctgcctgtgcaagtacaagaaggaccccaacctgcagcgctacgtcaactcccccagcggcaagaaggtcttcaccgcgtgcaagctgcgcctgccaagctgctgaactagctattggtgccacgagcttcgtccatgtccctcgcgcgttgcacgtacactacgtacgctggagtaccgagagtgtgtgaggtataataataaaacgaggcgagtgctgtatactttatatattaaacagaaataaattgacagcgctgtactactttggtacggtgcccgttatgtc

SEQ ID NO: 30669 - protein, 135 aa, Triticum aestivum
PQPRGISQLLTNARSQRHRTRAAPPLPSHTSPRSNHGGGEGHPRLLHGHGSRDGAAGSAGRGGGGDVQPDAADPVRAGHHRERGAERGVLREAQGAPGELPVQVQEGPQPAALRQLPQRQEGLHRVQAAPAKLLN

SEQ ID NO: 30670 - protein, 133 aa, Triticum aestivum
HNPEASASSSRTHGRRDTAREQLHHFPPTRAQEATMAAAKATLVCFMVMALATALLAVPGAVEAATCSPTQLTPCAPAIIGNAAPSAACCGKLKAHPASCLCKYKKDPNLQRYVNSPSGKKVFTACKLRLPSC

SEQ ID NO: 30671 - protein, 98 aa, Triticum aestivum
MAAAKATLVCFMVMALATALLAVPGAVEAATCSPTQLTPCAPAIIGNAAPSAACCGKLKAHPASCLCKYKKDPNLQRYVNSPSGKKVFTACKLRLPSC

SEQ ID NO: 30672 - DNA, 987 bp, Triticum aestivum
aatcgaaaaaaaattctcgagccagcttcttcacctcccgccgacgccactgttgctgctggtcgacctatcttcttcgcggctctgagtccgccaccggcgaaaaagggatcggccgcgtgccgccgtgaggaaaggttgatccatggacctgtcaccaaaccccgagagcccgaatgccccgggcggctgtggcggcagcggcgccggtggatctagcggcggtggaggggcgtcctcgtctgctgggggtggaggcacgccgcagacgcccagccggtacgaggcgcagaagcggcgggactggaacacgttcgggcagtacctgcggaaccaccggccgccgctgagcctcgcgcagtgcagcggcgcgcacgtgctggagtttctgcggtacctggaccagttcggcaagaccaaggtgcacacggcgtcgtgccccttcttcggccacccgaacccgccggcgccctgcccctgcccactgcgtcaggcgtgggggagcctcgacgcgctcgtgggacgccttcgcgccgcgttcgaggagcacggcggccgccccgagtccaaccccttcgccgcccgcgcggtccgcctgttcctccgcgaggtccgcgagcaccaggctcgcgcgcgcggcgtcagctacgagaagaagaagcgcaagaagccgacgcctggtgacgccagcagcagcggcagccaccaggctccacccccgccgccaccgccccccgctggtgcggcctgctgaggaggagagaggacctgtactgcgcacgtgcccatttggtatgccggaccgatgatgagcatattttatgtaggtctcgatcgattaactgcttgtgcatgcatgcattgttttactaccattctgccgggcttaagatctagactagatgattcagacttttattgatcgtgctacgtccatttgctagttattatttgcttctgcttaatttctactgccaagctttctcc

SEQ ID NO: 30673 - protein, 202 aa, Triticum aestivum
MDLSPNPESPNAPGGCGGSGAGGSSGGGGASSSAGGGGTPQTPSRYEAQKRRDWNTFGQYLRNHRPPLSLAQCSGAHVLEFLRYLDQFGKTKVHTASCPFFGHPNPPAPCPCPLRQAWGSLDALVGRLRAAFEEHGGRPESNPFAARAVRLFLREVREHQARARGVSYEKKKRKKPTPGDASSSGSHQAPPPPPPPPAGAAC

SEQ ID NO: 30674 - DNA, 491 bp, Triticum aestivum
agctagcgttcatccatcagaacgacatcattcgagcgacatcgtctccatagccacaagtacacaagaaactacgtacggttgttcagaggaaaccgactggtggtaggccatggccggagcctacgtgcgcacggcgatcatgctcgcgctcggctgcgcgctggccatcgccgcagacgctctggagccgagcgggtgggtgagggcgcatgccaccttctacggcggcagcgacgcctccggcaccatgggcggtgcgtgcgggtacgggaacctgtacgcgcaggggtacggcacgcggacgacggcgctgagcacggcgctcttcagcgacggcggcgcgtgcgggcagtgctacaaggtggtgtgcgaccgcaagacggacaagacgtggtgcaagcccggcgtgtccgtcaccgtcaccgccaccaacttctgcccgcccaactgggaactccccagcgacaagggcggctggtgcaacccgc

SEQ ID NO: 30675 - protein, 126 aa, Triticum aestivum
MAGAYVRTAIMLALGCALAIAADALEPSGWVRAHATFYGGSDASGTMGGACGYGNLYAQGYGTRTTALSTALFSDGGACGQCYKVVCDRKTDKTWCKPGVSVTVTATNFCPPNWELPSDKGGWCNP

SEQ ID NO: 30676 - protein, 116 aa, Triticum aestivum
MLALGCALAIAADALEPSGWVRAHATFYGGSDASGTMGGACGYGNLYAQGYGTRTTALSTALFSDGGACGQCYKVVCDRKTDKTWCKPGVSVTVTATNFCPPNWELPSDKGGWCNP

SEQ ID NO: 30677 - protein, 80 aa, Triticum aestivum
MGGACGYGNLYAQGYGTRTTALSTALFSDGGACGQCYKVVCDRKTDKTWCKPGVSVTVTATNFCPPNWELPSDKGGWCNP

SEQ ID NO: 30678 - DNA, 1200 bp, Triticum aestivum
  misc_feature (466)..(466): n is a, c, g, or t
  misc_feature (492)..(492): n is a, c, g, or t
aaagaaagaaacgggcaatcagaaagccttctcttccaagaagtgacgcgggagaggggcagagcggcgcaagccatggccatggcggagcagcagcagcagatcgagcacagccacctcgccatcagaggcctcaacctccacgtagcccaagcaggcacaggcgagctcgggacggtgctgttcctgcacggcttcccggagatatggtactcgtggcgccaccagatgctggccgtggccgccgccgggtaccgcgccatcgcgccggactggcgggggtatggcctctccgaccagccaccggagccagaggcggcggtgtaccgcgacctggaagaggatctccttgccgtcctggatgcactatccgttcccaaggcttaccttgtggcaaaggatttcggagccatgccagcttatgattttgctcttcgtcaccccaaccgcacatgcggtgttatgngtttgggtatcccttttcttcacggnggcttccttccttcactggccatgcccgaaggcttctatatactgcgttggcgggaaccaggaagagcagaggcagactttggcaggtatgacgtcaagcgagtcgtgcgcaccatctacattctcttctctagaagcgaaatcccgacagcgaaggaagatcaagaaatcatggatctcgcggacctgtcgactccccttccagagtggttcaccgaggaggatcttgcagtctacacgtccctctatgagaaatcaggtttcgtgtatccactgcagatgccatacaggtctctccataagaggcatccaatcgaagacccaaaatttgaagtcccggtgttcgtcgtcatgggggagaaagactacgtgatcaagttccccggggtcgaggccgtcttgaaaaatggcaccatggagaagtttgcgccagatctgaagatcacttacatccctgaaggaagccatttcgttcaggagcaatttccggacaaggtcaatgagctcctccttggcttcctcaaggaccatcctgtggcttgacacacggggtctagtctactatgcttggcctgccctcggtctcataagaaccctactccgtgcacattccgcagtgttatgaacatatgatgcgtgcttccattgaagtgaaggatatgctagtttcatcaacaatctttaataaatacgtatgtatgttgggtc

SEQ ID NO: 30679 - protein, 344 aa, Triticum aestivum
  misc_feature (156)..(156): Xaa can be any naturally occurring amino acid
  misc_feature (164)..(164): Xaa can be any naturally occurring amino acid
KERNGQSESLLFQEVTRERGRAAQAMAMAEQQQQIEHSHLAIRGLNLHVAQAGTGELGTVLFLHGFPEIWYSWRHQMLAVAAAGYRAIAPDWRGYGLSDQPPEPEAAVYRDLEEDLLAVLDALSVPKAYLVAKDFGAMPAYDFALRHPNRTCGVMXLGIPFLHXGFLPSLAMPEGFYILRWREPGRAEADFGRYDVKRVVRTIYILFSRSEIPTAKEDQEIMDLADLSTPLPEWFTEEDLAVYTSLYEKSGFVYPLQMPYRSLHKRHPIEDPKFEVPVFVVMGEKDYVIKFPGVEAVLKNGTMEKFAPDLKITYIPEGSHFVQEQFPDKVNELLLGFLKDHPVA

SEQ ID NO: 30680 - protein, 319 aa, Triticum aestivum
  misc_feature (131)..(131): Xaa can be any naturally occurring amino acid
  misc_feature (139)..(139): Xaa can be any naturally occurring amino acid
MAMAEQQQQIEHSHLAIRGLNLHVAQAGTGELGTVLFLHGFPEIWYSWRHQMLAVAAAGYRAIAPDWRGYGLSDQPPEPEAAVYRDLEEDLLAVLDALSVPKAYLVAKDFGAMPAYDFALRHPNRTCGVMXLGIPFLHXGFLPSLAMPEGFYILRWREPGRAEADFGRYDVKRVVRTIYILFSRSEIPTAKEDQEIMDLADLSTPLPEWFTEEDLAVYTSLYEKSGFVYPLQMPYRSLHKRHPIEDPKFEVPVFVVMGEKDYVIKFPGVEAVLKNGTMEKFAPDLKITYIPEGSHFVQEQFPDKVNELLLGFLKDHPVA

SEQ ID NO: 30681 - protein, 317 aa, Triticum aestivum
  misc_feature (129)..(129): Xaa can be any naturally occurring amino acid
  misc_feature (137)..(137): Xaa can be any naturally occurring amino acid
MAEQQQQIEHSHLAIRGLNLHVAQAGTGELGTVLFLHGFPEIWYSWRHQMLAVAAAGYRAIAPDWRGYGLSDQPPEPEAAVYRDLEEDLLAVLDALSVPKAYLVAKDFGAMPAYDFALRHPNRTCGVMXLGIPFLHXGFLPSLAMPEGFYILRWREPGRAEADFGRYDVKRVVRTIYILFSRSEIPTAKEDQEIMDLADLSTPLPEWFTEEDLAVYTSLYEKSGFVYPLQMPYRSLHKRHPIEDPKFEVPVFVVMGEKDYVIKFPGVEAVLKNGTMEKFAPDLKITYIPEGSHFVQEQFPDKVNELLLGFLKDHPVA

SEQ ID NO: 30682 - DNA, 677 bp, Triticum aestivum
ctcataacacaaggaacaaacgcccaagagtttcccctgtaataaacatctctccagaaacaggagaagggtccagcttacagtcaaaaaatgcggggaaaactagcaaagagcctgtgaaggtggctccaaaggaacccatcttcacctgcccggtgtgttggaacaagttggacgagcccgccacaacaatgtgcggccacatcttctgtacaaactgcatcaagcaagccatccagtaccagaagaaatgtcctacctgccggaagcacctgaagatgaacaatttccatcgcatttaccttcctaacacctcccgttaagggtcaggagtcctcccagggagaaccatggtggatcttctgcttgggagcattgtgtatcatcatcacctagatgaatgtatggaaatgggtcggtaggagttcatcgtcctgatgaccggactggataaccttctgcctgaaatgggttaacctgataaagatagtggatagccttctgcctgaaatgggtttaacctgataaacagagtggatagccttcttctgcctgaaatgggttttacaaatttgcctgtagccttctgtatattgtttgcggcaacttaaaaatgttgtatgtattaggctaatagccttgtacccttctcttctccatagttggtcgatgtaact

SEQ ID NO: 30683 - protein, 106 aa, Triticum aestivum
HNTRNKRPRVSPVINISPETGEGSSLQSKNAGKTSKEPVKVAPKEPIFTCPVCWNKLDEPATTMCGHIFCTNCIKQAIQYQKKCPTCRKHLKMNNFHRIYLPNTSR

SEQ ID NO: 30684 - protein, 43 aa, Triticum aestivum
MCGHIFCTNCIKQAIQYQKKCPTCRKHLKMNNFHRIYLPNTSR

SEQ ID NO: 30685 - DNA, 1377 bp, Triticum aestivum
cccgccccgccccgccccttccctccctcccttcctcccccaaattcgcccaacaccttcggaaccccaatggcgagctttaacgccgccggcgccggcgccgccaaccccaaccctaacaaatccctcgaggtgcgtgcgcttggccaatactgttgcccttggtctaaatggctaaaacctaatgtgtgggtcgattcgaccggggactgccttcgtttcgtgcaggtgaatccggcgcccggggactcggtttccagcctcagcttcagccccaaggcgaaccacctaattgccacctcctgggacaaccaggttcggtgctgggaggttcagcctggcggccaatgccaggcgaaggcgtctatttcgcacgatcagccagtcttgtgctctgcctggaaggatgacgggactactgttttttcgggaggttgtgacaaagtggtgaagatgtggccgctgctgtctggcggccaggccacggccttctcagggcatgaggcgccggtcaaagaactcgcctggataccacagatgagccttcttgtcagtgggtcttgggataagactctgaggtactgggacattcggcaacctaatccagctcatgttcagcaacttccggagcgctgctatgcactctcacttagttatcctctaatggcggtcggtactgctgatcgcaacgtagttatcttcaatctgcagaatccacaggctgaattcaagaggatcgtgtcacctttgaaattccagacaaggtgtatcgccgccttccctgatcaacaaggattcttggttggatcaatagagggacgcgttggtgttcatcatgtagatgattctaatcaaagcaagaatttcacattcaaatgtcaccgcgagggcaatgatatattctctgttaactcgctgaactttcatcctgtgcaccatacatttgctactgcaggctctgatggaggtttcaacttttgggacaaggacagtaaacaaagactgaaggcttttagtaagtgcccatcacccatcacatgcagcacatttaatcaggatggctcaatctttgcttatgcggtatgctatgattggagcaagggtgccgagaagcataatccttctactgcaaagacaaatatctttctgcatagcgtgcaggaatctgatgtcaaaggaaagccccgtactggaaaaaagtagacttggaaatggcaagctgcagatctgtgctccgaacctgatgagtttgccgtcgcttgatgctaattacccgcacgagtgttttaatcttttagatcttgactctgtagggcattccttcatctctgagactgcaggcgtatcttctataatgtttaaacacaataaagtggg

SEQ ID NO: 30686 - protein, 400 aa, Triticum aestivum
PAPPRPFPPSLPPPNSPNTFGTPMASFNAAGAGAANPNPNKSLEVRALGQYCCPWSKWLKPNVWVDSTGDCLRFVQVNPAPGDSVSSLSFSPKANHLIATSWDNQVRCWEVQPGGQCQAKASISHDQPVLCSAWKDDGTTVFSGGCDKVVKMWPLLSGGQATAFSGHEAPVKELAWIPQMSLLVSGSWDKTLRYWDIRQPNPAHVQQLPERCYALSLSYPLMAVGTADRNVVIFNLQNPQAEFKRIVSPLKFQTRCIAAFPDQQGFLVGSIEGRVGVHHVDDSNQSKNFTFKCHREGNDIFSVNSLNFHPVHHTFATAGSDGGFNFWDKDSKQRLKAFSKCPSPITCSTFNQDGSIFAYAVCYDWSKGAEKHNPSTAKTNIFLHSVQESDVKGKPRTGKK

SEQ ID NO: 30687 - protein, 377 aa, Triticum aestivum
MASFNAAGAGAANPNPNKSLEVRALGQYCCPWSKWLKPNVWVDSTGDCLRFVQVNPAPGDSVSSLSFSPKANHLIATSWDNQVRCWEVQPGGQCQAKASISHDQPVLCSAWKDDGTTVFSGGCDKVVKMWPLLSGGQATAFSGHEAPVKELAWIPQMSLLVSGSWDKTLRYWDIRQPNPAHVQQLPERCYALSLSYPLMAVGTADRNVVIFNLQNPQAEFKRIVSPLKFQTRCIAAFPDQQGFLVGSIEGRVGVHHVDDSNQSKNFTFKCHREGNDIFSVNSLNFHPVHHTFATAGSDGGFNFWDKDSKQRLKAFSKCPSPITCSTFNQDGSIFAYAVCYDWSKGAEKHNPSTAKTNIFLHSVQESDVKGKPRTGKK

SEQ ID NO: 30688 - protein, 249 aa, Triticum aestivum
MWPLLSGGQATAFSGHEAPVKELAWIPQMSLLVSGSWDKTLRYWDIRQPNPAHVQQLPERCYALSLSYPLMAVGTADRNVVIFNLQNPQAEFKRIVSPLKFQTRCIAAFPDQQGFLVGSIEGRVGVHHVDDSNQSKNFTFKCHREGNDIFSVNSLNFHPVHHTFATAGSDGGFNFWDKDSKQRLKAFSKCPSPITCSTFNQDGSIFAYAVCYDWSKGAEKHNPSTAKTNIFLHSVQESDVKGKPRTGKK

SEQ ID NO: 30689 - DNA, 981 bp, Triticum aestivum
agtcgctcgcgcgggcaatccaaacctttccctattcttgcaaggtctcggaaacggaaaggcccctgctccgctgcgcgtttgcgagtttgggaagaatccttgcctgccggagggggggaaacgggcgagatggggcgagggcgcagcgagataaagaggatcgacaaccccacgcagcgccagtccaccttctacaagcgcagggacggcctcttcaagaaggcccgggagctcgccgtcctctgcgacgccgacctcctcctcctcctcttctccgcctccggcaagctctaccagtacctcgcgcccaccgtcccctctgtcaaggagttcgtcgagaggtacgaggcttcgacgcacaccaaagtttggtccgacatccgccaggagaggcgccgcgagctggagaaggtggccaagatgtgcgacctcttggagaaggaactgaggttcatgacggtggacgacggggagcggtacacggtgccgtcgctggcggcgctggagcacaacctggaggcggccatgcacaaggtgcgctccgagaaggaccgcaagatcggcggcgagatgagctacctcgagaacatgatcagggggaaacaagcggagcgctacggtctgtgtgacaagctcgctcatgctcagagcctcaaggtcgttgaaggtggatccacctcgctgaacaacggcctggacctcaaacttggattcaactaggaacgggtgaaagcttctggccgtggggttctgctctagtgttgcttttgagctcgagtgttgtgtcaggttgaaatattctgcaatttccttcgaagggattgtatgaacttgtaagagaccactgtcttatgagatgtttggcttaggctggactgggctgtgcgttgtacctccaataggtggaatgtgataccagtccagtattgcaataatgtagttaacggtcaccttatgctctagttcatgcgttctttg

SEQ ID NO: 30690 - protein, 240 aa, Triticum aestivum
SRSRGQSKPFPILARSRKRKGPCSAARLRVWEESLPAGGGETGEMGRGRSEIKRIDNPTQRQSTFYKRRDGLFKKARELAVLCDADLLLLLFSASGKLYQYLAPTVPSVKEFVERYEASTHTKVWSDIRQERRRELEKVAKMCDLLEKELRFMTVDDGERYTVPSLAALEHNLEAAMHKVRSEKDRKIGGEMSYLENMIRGKQAERYGLCDKLAHAQSLKVVEGGSTSLNNGLDLKLGFN

SEQ ID NO: 30691 - protein, 209 aa, Triticum aestivum
SLARAIQTFPYSCKVSETERPLLRCAFASLGRILACRRGGNGRDGARAQRDKEDRQPHAAPVHLLQAQGRPLQEGPGARRPLRRRPPPPPLLRLRQALPVPRAHRPLCQGVRREVRGFDAHQSLVRHPPGEAPRAGEGGQDVRPLGEGTEVHDGGRRGAVHGAVAGGAGAQPGGGHAQGALREGPQDRRRDELPREHDQGETSGALRSV

SEQ ID NO: 30692 - protein, 196 aa, Triticum aestivum
MGRGRSEIKRIDNPTQRQSTFYKRRDGLFKKARELAVLCDADLLLLLFSASGKLYQYLAPTVPSVKEFVERYEASTHTKVWSDIRQERRRELEKVAKMCDLLEKELRFMTVDDGERYTVPSLAALEHNLEAAMHKVRSEKDRKIGGEMSYLENMIRGKQAERYGLCDKLAHAQSLKVVEGGSTSLNNGLDLKLGFN

SEQ ID NO: 30693 - DNA, 937 bp, Triticum aestivum
gattaagcaagcatctgccttcaatatctcctgtattttctcatctaattagccacgcttgaagttcatacttgaaccatatttcctgctcttcttcgtgctaatcggctggccacttccagaaaccaatttctgtcctcagttttagtattgtgattctagattagaaaaaagagaaccaggtgatcgagcgaggtgaggcaatgggaggcaccctgcggttcctgtcggatgtgctgctaggtagcagcagccagaggcagcacagcaagaagcggaggcagttcaacacggtggagctcaaggtgaagatggactgcgacggctgcgagctcaagatccggaacaccctcgccaacatgagaggagctcagtcggtggagatcaaccggaagcagcacaaggtgacggtgaaggggttcgtggagccgcagcgtgtgctgaggagagtccagtcgacggggaagcgggccgagctctggccgtacgtgccttacacaaacccctacatggcgccggtgtacgacaagcgggctcccgccggccacgtgcgcaaggtggaaggtgtcatgccggtctccaccgggcaggaggagcgcctcgccacgatcttcagcgacgacaacccaaacgcctgctccgtcatgtagtcatgctcatgcaagtcactgcgccaaaagaccctttgcttcttcttcctttttcgggggtgattcctaccaaacgaccctctgctgaactttctccaccgacagactataaaatagcccattagtagaactactattacaaaactcgtcaacgatgcttgtaacaaaagactcatatttttaataatttaacaaagtactgtaatatatggtgaacgctatggtgaagctgatgctagcaagatttcatcgtatttcagaaatttaaaattatttgaagctagccc

SEQ ID NO: 30694 - protein, 148 aa, Triticum aestivum
MGGTLRFLSDVLLGSSSQRQHSKKRRQFNTVELKVKMDCDGCELKIRNTLANMRGAQSVEINRKQHKVTVKGFVEPQRVLRRVQSTGKRAELWPYVPYTNPYMAPVYDKRAPAGHVRKVEGVMPVSTGQEERLATIFSDDNPNACSVM

SEQ ID NO: 30695 - protein, 112 aa, Triticum aestivum
MDCDGCELKIRNTLANMRGAQSVEINRKQHKVTVKGFVEPQRVLRRVQSTGKRAELWPYVPYTNPYMAPVYDKRAPAGHVRKVEGVMPVSTGQEERLATIFSDDNPNACSVM

SEQ ID NO: 30696 - protein, 96 aa, Triticum aestivum
MRGAQSVEINRKQHKVTVKGFVEPQRVLRRVQSTGKRAELWPYVPYTNPYMAPVYDKRAPAGHVRKVEGVMPVSTGQEERLATIFSDDNPNACSVM

SEQ ID NO: 30697 - DNA, 1435 bp, Triticum aestivum
gaaaagcaaatcgtgcccaaccaaaccctagccccctccccagcccatggcgaagttcggcgagggcgacgctcggtggatcgtgcaggagcgcgccgacggtgccaacgtccacaactggcactgggcggagcgcgactgtctcgactggtctcgcgcgcttctctccaagctcctcgcgggcctccccgtcctctccggagagggcggcctcaccctccgcaccaccaccctcgacaagctcgatggcgaggcctacgtcaacatccgcaagggcaaggtcatcccagggtacgagctttccctcacgctcgcctgggaggccgatgccacaaccgagtcgggggtcgtcaaggtcaccggcaccgctgaggtaccctacctcgctgacgagaacgccgacgaggaccccgaactccgcatcactgttcgcggtgacgacggccccctcgcgcgccgggccaaggatgccttcatcgcccatggcaagcctctggttattacgaagatccgggattatgtcgccgccatggcgaatggtggccccgccaaggacgagatagattctaagaagatttccaccaaggctgccccagcggccggtggcgcagctgttgctcctgctccttcagtgaaggtaacagcagcgccagtgcaggcgccagcagctaaggagaagaaggcgaatggcaaggataaggaaggattcaagactatcgagatgacagagaagttcaactgccgctccaaggacatctatgagatcttgatggatgacaacaggtggaagggtttcacacagagcaatgcgaggatcagcaaggatgttggtgggcagtttagcctctttgatgggtccatcacaggtgttaatgaggagctgcaggaagggaagctgatcgtgcagaaatggcggtttgggagctgggctgatggcgtccattctacagtcaggttggtgtttgatgagcctgagtcaggagtgacaacaataaagctcaaacaaactgatgtgccagaggaagacaggtatgggaactcaaccgtggtggagaacactgagagaggctggaaagagctcatcttccagaggatacgtgcagtgttcggttttggggtctgaaaaagcatctttgacatccagcttcaatgaagtcgatcctgccttttcatggctatccatgttttgctgtcttagtttattcgatgctgatcgacacacaaaacttcgtgaacttccgggaattgaaaaatactccgtgttaccttgtattcatcacgctgggttgtgctttgaagtcgtcactcatgaaagtttgagcttgtgactcatgtagaggccggcgaaagatggtcgctgagtgactattatttttattccttgcgtctgtatgacatggtaccagataaattgtattgaagtttctagttctac

SEQ ID NO: 30698 - protein, 358 aa, Triticum aestivum
MAKFGEGDARWIVQERADGANVHNWHWAERDCLDWSRALLSKLLAGLPVLSGEGGLTLRTTTLDKLDGEAYVNIRKGKVIPGYELSLTLAWEADATTESGVVKVTGTAEVPYLADENADEDPELRITVRGDDGPLARRAKDAFIAHGKPLVITKIRDYVAAMANGGPAKDEIDSKKISTKAAPAAGGAAVAPAPSVKVTAAPVQAPAAKEKKANGKDKEGFKTIEMTEKFNCRSKDIYEILMDDNRWKGFTQSNARISKDVGGQFSLFDGSITGVNEELQEGKLIVQKWRFGSWADGVHSTVRLVFDEPESGVTTIKLKQTDVPEEDRYGNSTVVENTERGWKELIFQRIRAVFGFGV

SEQ ID NO: 30699 - protein, 197 aa, Triticum aestivum
MANGGPAKDEIDSKKISTKAAPAAGGAAVAPAPSVKVTAAPVQAPAAKEKKANGKDKEGFKTIEMTEKFNCRSKDIYEILMDDNRWKGFTQSNARISKDVGGQFSLFDGSITGVNEELQEGKLIVQKWRFGSWADGVHSTVRLVFDEPESGVTTIKLKQTDVPEEDRYGNSTVVENTERGWKELIFQRIRAVFGFGV

SEQ ID NO: 30700 - protein, 186 aa, Triticum aestivum
KANRAQPNPSPLPSPWRSSARATLGGSCRSAPTVPTSTTGTGRSATVSTGLARFSPSSSRASPSSPERAASPSAPPPSTSSMARPTSTSARARSSQGTSFPSRSPGRPMPQPSRGSSRSPAPLRYPTSLTRTPTRTPNSASLFAVTTAPSRAGPRMPSSPMASLWLLRRSGIMSPPWRMVAPPRTR

SEQ ID NO: 30701 - DNA, 668 bp, Triticum aestivum
aactaaccagttgaattgaatgatagcattcgctaaaatctgcaaagcgcacacagctggagctcgagcagcccctccactagcacatgcaggccgggcggagcgccatggaggccaccaaggaggcggcggcgaacgtgggcgcctcggcgtgctccggcctggagaagacgcgggccaccctgcagggccagggtggacaaggccacggcgcacggcgccgccgagagggaggcggccgagacgaggacgcgggagcgcgtgcacggcgccgaggaggtcaagcgggacgccatgctcgccaacgccgccgccaaggagcgggcctgcgccggggcgtaccacctgtcgcagggcgcgcccgggattgtgccgggcggcgcccccgttggcggccgcgtcgaggccggcgtggccgagagccggccgctcggcgccgccacgggcaccggcaggcccagcgccgcccataacccgcgcgtcggtggcggcgccgccccggcgactggcaccggcgggcagtaccagtaagacccccgtaggactacggccatgtatgcgtatgcgtatgtatccggttcaggtgtatcagcatcagtgtagcagagcaataattatcttccgaccgtgacaaactatgttgatcagaccgcttttcacggcctctc

SEQ ID NO: 30702 - protein, 203 aa, Triticum aestivum
MIAFAKICKAHTAGARAAPPLAHAGRAERHGGHQGGGGERGRLGVLRPGEDAGHPAGPGWTRPRRTAPPRGRRPRRGRGSACTAPRRSSGTPCSPTPPPRSGPAPGRTTCRRARPGLCRAAPPLAAASRPAWPRAGRSAPPRAPAGPAPPITRASVAAPPRRLAPAGSTSKTPVGLRPCMRMRMYPVQVYQHQCSRAIIIFRP

SEQ ID NO: 30703 - protein, 128 aa, Triticum aestivum
MQAGRSAMEATKEAAANVGASACSGLEKTRATLQGQGGQGHGARRRREGGGRDEDAGARARRRGGQAGRHARQRRRQGAGLRRGVPPVAGRARDCAGRRPRWRPRRGRRGREPAARRRHGHRQAQRRP

SEQ ID NO: 30704 - protein, 121 aa, Triticum aestivum
MEATKEAAANVGASACSGLEKTRATLQGQGGQGHGARRRREGGGRDEDAGARARRRGGQAGRHARQRRRQGAGLRRGVPPVAGRARDCAGRRPRWRPRRGRRGREPAARRRHGHRQAQRRP

SEQ ID NO: 30705 - DNA, 1095 bp, Triticum aestivum
  misc_feature (63)..(63): n is a, c, g, or t
acaagtcattcctcattcgtggcactagaccaatcgcgagtgaaaaatgagcagcggcggcgngcattgggtgctcggggagcggtgacggcgacggtggcatggtggcgccgttcgtggccaagacgtacgcgatggtggacgacccggcgaccgacgccgtggtcgcgtgggggccggccagcaacagcttcgtcgtcgccgaccccttcgccttctcgcgcgcgctgctcccggcccacttcaagcacgccaacttctccagcttcgtccggcagctcaacacctacggcttccgcaaggtggacccggaccgctgggagttcgcgcacgcctgcttcctccgcggccagacgcacctcctgccccgcatcgtccggcgccggagcggcggcaagcgtggcaaggaagacgccgacgaggaggatgaagacatcagcagcaagatgctagccatggaggtggtccggctgaaggaggagcagagggccaccgaggaccgcttggcggcgatgtggcgtcgggtgcaggacgccgagcgccggcccaagctgatgctcgccttcctcctcaaggtcgtcggagaccccgacgtgctgcgccgcctcgtaggcaactcgagcagcggcggcgtattattccccggcgagggcgcagaggccaaaagacggcggctgcttctcgacggggaaggccaggtgagcaagaagaagatgcgcgtcgacggcgacgggctgttgtgcggcatcaaccggcaggacgccttcgtgcgggaacccagggtcgacttcactggtttctacaccggaggcgacgggtttagcgaggtgccggtggacgacccgccgtacgctttccccatggacggcggctactgagttggttaagctggtgtttccaatttgtgtactgtacgtaatacatagggactttttggctttttagacgacgtggtaggagtacttcgtggcaaactactttgtgagcaaggagagctacgctcagatggtttttattttatttttggtgaagcagcccatcaaggtttaagtccgatgtacacactttgttgagtttattacagtatatacgttc

SEQ ID NO: 30706 - protein, 258 aa, Triticum aestivum
MVAPFVAKTYAMVDDPATDAVVAWGPASNSFVVADPFAFSRALLPAHFKHANFSSFVRQLNTYGFRKVDPDRWEFAHACFLRGQTHLLPRIVRRRSGGKRGKEDADEEDEDISSKMLAMEVVRLKEEQRATEDRLAAMWRRVQDAERRPKLMLAFLLKVVGDPDVLRRLVGNSSSGGVLFPGEGAEAKRRRLLLDGEGQVSKKKMRVDGDGLLCGINRQDAFVREPRVDFTGFYTGGDGFSEVPVDDPPYAFPMDGGY

SEQ ID NO: 30707 - protein, 247 aa, Triticum aestivum
MVDDPATDAVVAWGPASNSFVVADPFAFSRALLPAHFKHANFSSFVRQLNTYGFRKVDPDRWEFAHACFLRGQTHLLPRIVRRRSGGKRGKEDADEEDEDISSKMLAMEVVRLKEEQRATEDRLAAMWRRVQDAERRPKLMLAFLLKVVGDPDVLRRLVGNSSSGGVLFPGEGAEAKRRRLLLDGEGQVSKKKMRVDGDGLLCGINRQDAFVREPRVDFTGFYTGGDGFSEVPVDDPPYAFPMDGGY

SEQ ID NO: 30708 - protein, 150 aa, Triticum aestivum
  misc_feature (21)..(21): Xaa can be any naturally occurring amino acid
TSHSSFVALDQSRVKNEQRRXALGARGAVTATVAWWRRSWPRRTRWWTTRRPTPWSRGGRPATASSSPTPSPSRARCSRPTSSTPTSPASSGSSTPTASARWTRTAGSSRTPASSAARRTSCPASSGAGAAASVARKTPTRRMKTSAARC

SEQ ID NO: 30709 - DNA, 977 bp, Triticum aestivum
tcgatagggcatcaacagtgtgggacacaatggtagcaagtggtgtaaggccgaacattgttttgtattcggcgatgattgatggctttgcccggtgtgggaagatgattaaggccgaactgttatttgaagagatggttgaggcaaaatgtatgccaaatatcatgacttatagctcgatggttcggggatatttccaaattggagattcagcacaggctctttctatctgggaggaaatgctaagtgctgggtgcacaccaaatgctgttacttatagcatattgcatcagtggattgtgcaatgtagggaaatcaaaggatgctatgatggtctggaagcacatgcttggtcgtggctgtgcacccgatacaattgcttatacttccatgatcaagggcttgtgtgcttctgggatggtagatggcggtctacgactgttctgtgacatgttggcaaggggtgatgctgatccagatgttatctgttataatgtattgcttgatgggttgctcagggcgaaggaccttcctagggcaatggacttactcaaccagatgcttgaccatggttgtgatccagacacagtgacctgcaataccttcttgcgggagattgaggttggacagggtaaagggagggagttcttagagggcctagtgttgaggttatgcaatagaaaaaggaataaggcagctgcggaggtcatgatggtgatgctggctaagtatattgtgccagaggctgccattttggagatggtggtcagaggtgtttgccggcggaagagggttcggagagtgattgacaaatgttgggatgagatttggaggttctgaggattttttttctcaatgatttcttgataatactataggagcacacacttgcttgagtttttctgaactccatttgttgtacgctgtaatattgtggtactaactcattcattcatatcaagattttacacaataaa

SEQ ID NO: 30710 - protein, 191 aa, Triticum aestivum
MLLLIAYCISGLCNVGKSKDAMMVWKHMLGRGCAPDTIAYTSMIKGLCASGMVDGGLRLFCDMLARGDADPDVICYNVLLDGLLRAKDLPRAMDLLNQMLDHGCDPDTVTCNTFLREIEVGQGKGREFLEGLVLRLCNRKRNKAAAEVMMVMLAKYIVPEAAILEMVVRGVCRRKRVRRVIDKCWDEIWRF

SEQ ID NO: 30711 - protein, 170 aa, Triticum aestivum
MMVWKHMLGRGCAPDTIAYTSMIKGLCASGMVDGGLRLFCDMLARGDADPDVICYNVLLDGLLRAKDLPRAMDLLNQMLDHGCDPDTVTCNTFLREIEVGQGKGREFLEGLVLRLCNRKRNKAAAEVMMVMLAKYIVPEAAILEMVVRGVCRRKRVRRVIDKCWDEIWRF

SEQ ID NO: 30712 - protein, 169 aa, Triticum aestivum
MVWKHMLGRGCAPDTIAYTSMIKGLCASGMVDGGLRLFCDMLARGDADPDVICYNVLLDGLLRAKDLPRAMDLLNQMLDHGCDPDTVTCNTFLREIEVGQGKGREFLEGLVLRLCNRKRNKAAAEVMMVMLAKYIVPEAAILEMVVRGVCRRKRVRRVIDKCWDEIWRF

SEQ ID NO: 30713 - DNA, 1283 bp, Triticum aestivum
ataatttcgcctaatatcctcccgcgccgcgcgtctgcgcgggcaccacaaaccagaagaagaaatggcagcgggccccacgccatccaccgccgcgtccttccggccgcccctgccgcctccgccgccgtgcttcgactatcggtccgcgtcgctcgccgacacgcgtgccagcgcagccgcggcggacccagcgttggctgggttggtcgagtccggcgcactggtacgcgtcccgcggcggcggttcgggccggtgccggcgtggcggccgccggacttcgctgagcccgaggacgtgtggatcctcgggacctcgcacctctccgcggagtccgccgacgaggtcgagcgcgtgctccgtgccgtccgccccgacaacgtcgtcgtcgaactctgccggagcagagccgggatcatgtacgcttccgacgacgcctccggcgagccgctgttgaaatccaacatgttctcgctcggcggcgccaagttcttcggagccgtcaaccggagcatcaacctgggtggacagagtgctcttgctctgcgtttgctcctagctgttttttcgtccaagatttcttctggcgcgaaccggccgtttggggaggagttccgagcagctaggagggtgtctgaagatattggcgctcagctcgttcttggggatcgccctattgaaataactcttgaacgagctttgaaatccctcagctgggatgaaaagactaaactcgtaatctcattattccgtggaatcacttcaacgactgatatgccgcaggatgagaaagctgcggttagcccgtacgagctgtacgagaagcttagcagctcatatccttcactgctacagcctctcgtacatgagcgcgacatgttcatggcttggtccctaaagaggagcaaggccgtgaacaagagcaagacggtggttggggtcatcgggaaggggcatatgaacggcgtggtgtacgcgctgatctctgaccagggggacctgaggttccgcgacctcgtcggcagggaatcgtcggagacctgggctagctccgtcgtcaagggcctggtcagggatacggtgatagggctcgctctctgggctctgtacgaactgctgcaagctgccgccgtacatataaagctgtagctgaagtccatttttactggcaaagactgacattcgtaaccgtgcacgctctttgcaacgtccatgcagcttgagattgtaaagtcaagtgaagtactccatatgtaacttctataagacgttaagggattcc

SEQ ID NO: 30714 - protein, 361 aa, Triticum aestivum
MAAGPTPSTAASFRPPLPPPPPCFDYRSASLADTRASAAAADPALAGLVESGALVRVPRRRFGPVPAWRPPDFAEPEDVWILGTSHLSAESADEVERVLRAVRPDNVVVELCRSRAGIMYASDDASGEPLLKSNMFSLGGAKFFGAVNRSINLGGQSALALRLLLAVFSSKISSGANRPFGEEFRAARRVSEDIGAQLVLGDRPIEITLERALKSLSWDEKTKLVISLFRGITSTTDMPQDEKAAVSPYELYEKLSSSYPSLLQPLVHERDMFMAWSLKRSKAVNKSKTVVGVIGKGHMNGVVYALISDQGDLRFRDLVGRESSETWASSVVKGLVRDTVIGLALWALYELLQAAAVHIKL

SEQ ID NO: 30715 - protein, 243 aa, Triticum aestivum
MYASDDASGEPLLKSNMFSLGGAKFFGAVNRSINLGGQSALALRLLLAVFSSKISSGANRPFGEEFRAARRVSEDIGAQLVLGDRPIEITLERALKSLSWDEKTKLVISLFRGITSTTDMPQDEKAAVSPYELYEKLSSSYPSLLQPLVHERDMFMAWSLKRSKAVNKSKTVVGVIGKGHMNGVVYALISDQGDLRFRDLVGRESSETWASSVVKGLVRDTVIGLALWALYELLQAAAVHIKL

SEQ ID NO: 30716 - protein, 227 aa, Triticum aestivum
MFSLGGAKFFGAVNRSINLGGQSALALRLLLAVFSSKISSGANRPFGEEFRAARRVSEDIGAQLVLGDRPIEITLERALKSLSWDEKTKLVISLFRGITSTTDMPQDEKAAVSPYELYEKLSSSYPSLLQPLVHERDMFMAWSLKRSKAVNKSKTVVGVIGKGHMNGVVYALISDQGDLRFRDLVGRESSETWASSVVKGLVRDTVIGLALWALYELLQAAAVHIKL

SEQ ID NO: 30717 - DNA, 456 bp, Triticum aestivum
acatccactccctcctccgcctccagatcctctcccgcgcccccgtctccgccgccctccgcccccggtctccggcgatctacaggagtagatcgcccccggagaccccgcgccccgaccatggcgaccttcgcgaagcctgagaacgcgctcaagagagcggaggagttgatacatgttggacaaaagcaggcagcgctgcaggcgctgcatgatctcattacatcaaagagatacagatcatggcaaaagcctcttgagaagatcatgatgaagtatgtcgagctgtgtgtagatctaaggaagggcagatttgccaaagatggccttattcagtacagaattgtctgccagcaagtcaacgtgtcatctctggaggaggtcataaaacactttatgcagctgtccaatgagaaagctgaggaagccaggaatcaggcacaagcactggaagat

SEQ ID NO: 30718 - protein, 152 aa, Triticum aestivum
TSTPSSASRSSPAPPSPPPSAPGLRRSTGVDRPRRPRAPTMATFAKPENALKRAEELIHVGQKQAALQALHDLITSKRYRSWQKPLEKIMMKYVELCVDLRKGRFAKDGLIQYRIVCQQVNVSSLEEVIKHFMQLSNEKAEEARNQAQALED

SEQ ID NO: 30719 - protein, 112 aa, Triticum aestivum
MATFAKPENALKRAEELIHVGQKQAALQALHDLITSKRYRSWQKPLEKIMMKYVELCVDLRKGRFAKDGLIQYRIVCQQVNVSSLEEVIKHFMQLSNEKAEEARNQAQALED

SEQ ID NO: 30720 - DNA, 1234 bp, Triticum aestivum
ctaatcgaaaacacacacacacacaccattattttcccctccctcctcctgaccacccacccacctaccagccaccgaggcggccgatctcccctccccacccgcgccgcgccaccgccaccgccgccgccgccgccgccgccggcagccgttcgtctcgagattgacctttggtgactgttagaaaccacaggcggtgaagatggcgcagcctgctgagctttcccgtgaggagaatgtgtacatggctaagcttgcagagcaggctgagaggtacgaagagatggtcgagttcatggagaaggtggccaagacaattgactctgaggagctcaccgtcgaggagcgcaaccttctatcagttgcttacaagaatgttattggtgcccgccgtgcctcgtggcgcatcatttcctccatcgagcagaaggaagagagccgtggcaatgaggaccgtgtcacactcatcaaggactaccgtggaaagattgaggttgagctcactaagatctgtgatggtatcctcaagcttcttgattcccaccttgtcccctcatccaccgctccagagtccaaggtcttctacctgaagatgaagggtgattactataggtaccttgcagagttcaagagtggaactgagaggaaggatgctgctgagaacaccatggtggcatacaaagctgctcaggagattgcactgaaagagctgcccccgactcatcctattaggcttgggctggcactcaacttctcggtgttctattatgagatcctcaactctccagaccgtgcttgtgacctcgccaagcaggcttttgatgaggccatctcggaactggactctctgagcgaggagtcctacaaggacagcactttgatcatgcagcttctgcgtgataacctgacgctgtggacttctgacatctcggaggacgctgctgaagaaatgaaggatgctcccaagggtgaatctggagatggacagtaaacactgtctatgtgcccagaaacttgtctttctcgcttgttcagtgtagattgtaatgtcgccgtggttgctggtaattggaggctccaatttgtgttgtgatagggaagcttgtagctgccttgcttgctcggtggcctgattatcgggctgcactggttattgcctcttgttgaacctttgtgttactttggtgattctagaaattttctgctgctcttgtttgtggccccttgcctttgt

SEQ ID NO: 30721 - protein, 262 aa, Triticum aestivum
MAQPAELSREENVYMAKLAEQAERYEEMVEFMEKVAKTIDSEELTVEERNLLSVAYKNVIGARRASWRIISSIEQKEESRGNEDRVTLIKDYRGKIEVELTKICDGILKLLDSHLVPSSTAPESKVFYLKMKGDYYRYLAEFKSGTERKDAAENTMVAYKAAQEIALKELPPTHPIRLGLALNFSVFYYEILNSPDRACDLAKQAFDEAISELDSLSEESYKDSTLIMQLLRDNLTLWTSDISEDAAEEMKDAPKGESGDGQ

SEQ ID NO: 30722 - protein, 248 aa, Triticum aestivum
MAKLAEQAERYEEMVEFMEKVAKTIDSEELTVEERNLLSVAYKNVIGARRASWRIISSIEQKEESRGNEDRVTLIKDYRGKIEVELTKICDGILKLLDSHLVPSSTAPESKVFYLKMKGDYYRYLAEFKSGTERKDAAENTMVAYKAAQEIALKELPPTHPIRLGLALNFSVFYYEILNSPDRACDLAKQAFDEAISELDSLSEESYKDSTLIMQLLRDNLTLWTSDISEDAAEEMKDAPKGESGDGQ

SEQ ID NO: 30723 - protein, 235 aa, Triticum aestivum
MVEFMEKVAKTIDSEELTVEERNLLSVAYKNVIGARRASWRIISSIEQKEESRGNEDRVTLIKDYRGKIEVELTKICDGILKLLDSHLVPSSTAPESKVFYLKMKGDYYRYLAEFKSGTERKDAAENTMVAYKAAQEIALKELPPTHPIRLGLALNFSVFYYEILNSPDRACDLAKQAFDEAISELDSLSEESYKDSTLIMQLLRDNLTLWTSDISEDAAEEMKDAPKGESGDGQ

SEQ ID NO: 30724 - DNA, 882 bp, Triticum aestivum
ctcactttccccagcagagcaagcaaccacctcggagaggcagagcgcaatggcaatggcgtccatcctcgtgcaggtgtccgccctgctcctcaacctcatcgccttcggcctcgccgtcgccgccgagcagcgccgcagcaaggccacggtgacgccggatctggccaaggagtacgactactgcgtctacgactcggacgtcgccaccggctacggcgtcggcgcgctgctcctcctcgtcgccgcgcaggccgtcgtcatgctcgccagccgctgcttctgctgcggccgcgggctcaagccggggggctcgcgcgcctgcgccctcatgctcttcctcttctcatggttgaccttcctcgtcgcagcggcgtgtttgctggcaggatcagtccgtaatgcataccacacccggtacagggggatcttcaacggcgacccgctctcttgcgagacgctgcgcaagggcgtcttcgctgctggtgcagccttcaccttcttcaccgccatcctcagcgagttctactacatcagctactccaaatcccgggatgccgccggcggcgctccatacggcggctccagcatcggcatgggcccttacacttaaggagcttgtgtgctggaggtttatggaaaggttcagtccgtttcactttcagggcggatcatgcatatgtagttcgtggagtgcggtgttcttgtttttttttataaaggtgttcttgttaacattagagtggtagatacggtggaaatgagttcgctgtcttcactggttatgtatgagattgcctggtgtgcatccggacatttcgttgttgcagatgttgggtgtaattggtatctccaaatgatattaatatatttcatttgttc

SEQ ID NO: 30725 - protein, 203 aa, Triticum aestivum
SLSPAEQATTSERQSAMAMASILVQVSALLLNLIAFGLAVAAEQRRSKATVTPDLAKEYDYCVYDSDVATGYGVGALLLLVAAQAVVMLASRCFCCGRGLKPGGSRACALMLFLFSWLTFLVAAACLLAGSVRNAYHTRYRGIFNGDPLSCETLRKGVFAAGAAFTFFTAILSEFYYISYSKSRDAAGGAPYGGSSIGMGPYT

SEQ ID NO: 30726 - protein, 187 aa, Triticum aestivum
MAMASILVQVSALLLNLIAFGLAVAAEQRRSKATVTPDLAKEYDYCVYDSDVATGYGVGALLLLVAAQAVVMLASRCFCCGRGLKPGGSRACALMLFLFSWLTFLVAAACLLAGSVRNAYHTRYRGIFNGDPLSCETLRKGVFAAGAAFTFFTAILSEFYYISYSKSRDAAGGAPYGGSSIGMGPYT

SEQ ID NO: 30727 - protein, 185 aa, Triticum aestivum
MASILVQVSALLLNLIAFGLAVAAEQRRSKATVTPDLAKEYDYCVYDSDVATGYGVGALLLLVAAQAVVMLASRCFCCGRGLKPGGSRACALMLFLFSWLTFLVAAACLLAGSVRNAYHTRYRGIFNGDPLSCETLRKGVFAAGAAFTFFTAILSEFYYISYSKSRDAAGGAPYGGSSIGMGPYT

SEQ ID NO: 30728 - DNA, 856 bp, Triticum aestivum
cagctgccaccctgcccagttgctgttgcgcagcctccttcctctagtctcccctcttctccccctgttgccatctccaacctaatctttctcttctcgcggtctgcccgacggattccaaaagggctcgctcattcgggggaaaagctgttcgccgtggctcccagtctcatccatttcttgtctcttccaggaatctgtgaaattttgtgcctttaaaggcaatccagggtctggtcctgagctgtcggggctctatgtctaagtgggaacctgtcacatttgaggaatctcttagctttgttaagagagttaaggcccgtgactacttgttatacctgtcactgctcaatgtgctcacccggagtgatcagatccctctggaagcttacaacgagcttttacttcttttccgggatcacggagacctgctagaggagctagggaagttcagacccctcccctctttcccaagcactgtgtacagccacaacacaatctggatgttcatattccttatgccctttctgctcctgagccttctcctcgcgtttgagaagccgttggatagcttccttctccgataacccgtcgcgagctaaagatcagcactacgatgaaaatgaccggacacggaatgcgtgcatggactgctgtcttgtgatatcccctcagagcccattgccttattggtgcttttgtgatcatgttcatccttttgtgatccgcccgcataccggtgcgcggatagtatctctgaatctctcggaaggacagactaaatcgattgttttggcttgttcaagacaaacttcagtgtacaattgacaaactaaatgaaagagtttagttttac

SEQ ID NO: 30729 - protein, 109 aa, Triticum aestivum
MSKWEPVTFEESLSFVKRVKARDYLLYLSLLNVLTRSDQIPLEAYNELLLLFRDHGDLLEELGKFRPLPSFPSTVYSHNTIWMFIFLMPFLLLSLLLAFEKPLDSFLLR

SEQ ID NO: 30730 - protein, 72 aa, Triticum aestivum
QLPPCPVAVAQPPSSSLPSSPPVAISNLIFLFSRSARRIPKGLAHSGEKLFAVAPSLIHFLSLPGICEILCL

SEQ ID NO: 30731 - protein, 60 aa, Triticum aestivum
MDCCLVISPQSPLPYWCFCDHVHPFVIRPHTGARIVSLNLSEGQTKSIVLACSRQTSVYN

SEQ ID NO: 30732 - DNA, 1171 bp, Triticum aestivum
gaatatacggttacacccacaagcttcccctgcacacacgcgaccaactcttacgccgccgccgccgccgccggcggagagatggactcccggggcttcgattccacgggccgcgagttttccagcgccacggagatgtgggcccaggagatcggcgccaccgcctccgcctcggcctccgaagtccctccgggcgccgccgccgcggctccaagcaatggggacgccggcgaggaggcgggcggagaagggaagcgcgaggagtggtactccaaaggaatcgcctactggcagggcgtggaggcgtcgaccgagggcgtcctgggagggtacgggtgcgtcaacgacgccgacgtcaagggcagcgccgccttcctccgccctctcctcaccgagcgattcggcgccgcgaagcgccatcttgtcgcgcttgattgtggctcgggcatcgggcgggttacaaagaattttcttatcaagcatttcaatgaggttgatctcgttgagccagtagcccattttctagaagcggcacgggaaaatcttagtagctgtatggatgtagagcaggatacgcataaggctgcaaacttttattgtacacctcttcaggacttcactcctgaggaaggaagatatgatgtgatatggatccagtggtgcatagggcaacttactgatgatgattttatttcattttttaaccgcgcaaaggttgggctcaaaccagatggtttttttgttctgaaagagaacattgcaaaaaatggatttgttttagacaaggaggataacagtgtcactaggtctgatgcatatttcagggagctatttaacaagtgtggattgtatatccacagcatcaagaaccaaaaggagctaccagaggaactatttgctgtcagaatgtacgcattggtgaccagccagccaaaggtcacaaaaaatggcaagagagggcggcctaaaaattcaccccgtataatccgctcttgaaggggggactattgtgccagcgtattgtctggcaatgtactgttgttcacttgtttctagtcgcaatttagctcggtctacattttgttttgagcatgctgtctttttcagagatcaaatccactagttgctgtcgaaacttaatgcatatggcatctagcaccttttgattctg

SEQ ID NO: 30733 - protein, 331 aa, Triticum aestivum
EYTVTPTSFPCTHATNSYAAAAAAGGEMDSRGFDSTGREFSSATEMWAQEIGATASASASEVPPGAAAAAPSNGDAGEEAGGEGKREEWYSKGIAYWQGVEASTEGVLGGYGCVNDADVKGSAAFLRPLLTERFGAAKRHLVALDCGSGIGRVTKNFLIKHFNEVDLVEPVAHFLEAARENLSSCMDVEQDTHKAANFYCTPLQDFTPEEGRYDVIWIQWCIGQLTDDDFISFFNRAKVGLKPDGFFVLKENIAKNGFVLDKEDNSVTRSDAYFRELFNKCGLYIHSIKNQKELPEELFAVRMYALVTSQPKVTKNGKRGRPKNSPRIIRS

SEQ ID NO: 30734 - protein, 304 aa, Triticum aestivum
MDSRGFDSTGREFSSATEMWAQEIGATASASASEVPPGAAAAAPSNGDAGEEAGGEGKREEWYSKGIAYWQGVEASTEGVLGGYGCVNDADVKGSAAFLRPLLTERFGAAKRHLVALDCGSGIGRVTKNFLIKHFNEVDLVEPVAHFLEAARENLSSCMDVEQDTHKAANFYCTPLQDFTPEEGRYDVIWIQWCIGQLTDDDFISFFNRAKVGLKPDGFFVLKENIAKNGFVLDKEDNSVTRSDAYFRELFNKCGLYIHSIKNQKELPEELFAVRMYALVTSQPKVTKNGKRGRPKNSPRIIRS

SEQ ID NO: 30735 - protein, 286 aa, Triticum aestivum
MWAQEIGATASASASEVPPGAAAAAPSNGDAGEEAGGEGKREEWYSKGIAYWQGVEASTEGVLGGYGCVNDADVKGSAAFLRPLLTERFGAAKRHLVALDCGSGIGRVTKNFLIKHFNEVDLVEPVAHFLEAARENLSSCMDVEQDTHKAANFYCTPLQDFTPEEGRYDVIWIQWCIGQLTDDDFISFFNRAKVGLKPDGFFVLKENIAKNGFVLDKEDNSVTRSDAYFRELFNKCGLYIHSIKNQKELPEELFAVRMYALVTSQPKVTKNGKRGRPKNSPRIIRS

SEQ ID NO: 30736 - DNA, 1159 bp, Triticum aestivum
cccaagcgaagccaaaggcagccttcacctgtacgcggcgcccaatctagtccaacccctccgccggcgccagatcgcggaggaccctgccgtctcccgcccattctccgcaaaggtctccatgctcatgagatgcaagcacatttgattttctataagttcaacgggcactaatgttaactgaagtattttcctcgatggaggctgaagctgattttgatgttgaagattccagatcaaacaatgaactgcaggagttgtggccagttggtgagatagacccaaagagagggcgattcccttgttgcattgtctggactcctcttcctgtagtttcatggcttgctccttacatagggcatgttggaatctgtcaggaggatggatctgtcctggattttgctggttcaaatttagtgagcatggataattttgcatatggttctgtcgctagatacctccagctggacagaaagaagtgctgctttcctgctaatctggcggcacatgtatgcgagtggtcatacaaacacacagaagttggaacagcaacatcatgggatggagccctgcaactgggcacgagacatttccagcacaaatactacaacctgttcacctgcaactgttactcattcgtggcaaactgcctgaaccggcttgcccacggtggttcggcggagtggaatgttttgaatgtggcagctcttgtttggctgcacggcgagtgggtggacaaaatgtctatcgttcggtcattcgcgccattcgtaactgtgacgtgcatcggtatttttatggccggctggtctttcctaatagggatattggcgttctgtttgcttctgatagggtggtttgtctttgctgtatactgcacgaaaggtttggtgtgctgatattacattgcgactgaacctggtgaggaattgtggaaataatctgtctgggaccattcatccatgctcgtgattattcgtctgaaacttatcaaaacactgcacctgctaaggcctcctttgctgtgtaggatatgaacactacagaaatgggaaagctgtagaaagtgagatacatgtatctgaaattctatgaatggaaatatgaaaagagatatcatttggttcagacggtatgatttttagcattgagtattttt

SEQ ID NO: 30737 - protein, 241 aa, Triticum aestivum
MLTEVFSSMEAEADFDVEDSRSNNELQELWPVGEIDPKRGRFPCCIVWTPLPVVSWLAPYIGHVGICQEDGSVLDFAGSNLVSMDNFAYGSVARYLQLDRKKCCFPANLAAHVCEWSYKHTEVGTATSWDGALQLGTRHFQHKYYNLFTCNCYSFVANCLNRLAHGGSAEWNVLNVAALVWLHGEWVDKMSIVRSFAPFVTVTCIGIFMAGWSFLIGILAFCLLLIGWFVFAVYCTKGLVC

SEQ ID NO: 30738 - protein, 233 aa, Triticum aestivum
MEAEADFDVEDSRSNNELQELWPVGEIDPKRGRFPCCIVWTPLPVVSWLAPYIGHVGICQEDGSVLDFAGSNLVSMDNFAYGSVARYLQLDRKKCCFPANLAAHVCEWSYKHTEVGTATSWDGALQLGTRHFQHKYYNLFTCNCYSFVANCLNRLAHGGSAEWNVLNVAALVWLHGEWVDKMSIVRSFAPFVTVTCIGIFMAGWSFLIGILAFCLLLIGWFVFAVYCTKGLVC

SEQ ID NO: 30739 - protein, 158 aa, Triticum aestivum
MDNFAYGSVARYLQLDRKKCCFPANLAAHVCEWSYKHTEVGTATSWDGALQLGTRHFQHKYYNLFTCNCYSFVANCLNRLAHGGSAEWNVLNVAALVWLHGEWVDKMSIVRSFAPFVTVTCIGIFMAGWSFLIGILAFCLLLIGWFVFAVYCTKGLVC

SEQ ID NO: 30740 - DNA, 687 bp, Triticum aestivum
gctcctgtgctccgctctgtgcccctgcctgttccatccgtcgcctgcgtgcgtgccccatagaggagatttggtctttaccagagcttacaggaggcgtcgcctagaggtaggataagaataagaataagatggccattggcggagcggcgccgcacgactcgccgggcgggctaccggacttcgagcagccactcctccacgcgcacggtggcctgcaggccggcaaggaccccgccgcggcgcacgaccacgaggcgcagtgctcgccggaggctggcggcgcgacgtccctgcgcacatgcttcaatggcctcaacgctctctccggcgtggggctgctgtccatcccgtacgcactggcggagggcgggtggctcagcctggtgctcctcctcctcgtcgccatggtctgctgctacaccggccagctcctgcagacgtgcatgggcgcgtcgccggacgtgcgcggctacccggacatcggcgcgctcgccttcgggaccaagggccgcttcgccgtctcggccttcatgtacgccgagctctacctcgtcgccatcgggttcctcatactggagggggacaacctcgacaagctgttcccgggcaccagcctcagcctcggcggcgtgctcgtgctctccggcaagtgttaaacacaataaagttggaacgggagggggg

SEQ ID NO: 30741 - protein, 175 aa, Triticum aestivum
MAIGGAAPHDSPGGLPDFEQPLLHAHGGLQAGKDPAAAHDHEAQCSPEAGGATSLRTCFNGLNALSGVGLLSIPYALAEGGWLSLVLLLLVAMVCCYTGQLLQTCMGASPDVRGYPDIGALAFGTKGRFAVSAFMYAELYLVAIGFLILEGDNLDKLFPGTSLSLGGVLVLSGKC

SEQ ID NO: 30742 - protein, 128 aa, Triticum aestivum
MLQWPQRSLRRGAAVHPVRTGGGRVAQPGAPPPRRHGLLLHRPAPADVHGRVAGRARLPGHRRARLRDQGPLRRLGLHVRRALPRRHRVPHTGGGQPRQAVPGHQPQPRRRARALRQVLNTIKLEREG

SEQ ID NO: 30743 - protein, 126 aa, Triticum aestivum
MASTLSPAWGCCPSRTHWRRAGGSAWCSSSSSPWSAATPASSCRRAWARRRTCAATRTSARSPSGPRAASPSRPSCTPSSTSSPSGSSYWRGTTSTSCSRAPASASAACSCSPASVKHNKVGTGGG

SEQ ID NO: 30744 - DNA, 1770 bp, Triticum aestivum
attctaaaattgcctcgactaacaccagcgcagcagctagcttacctccatcgtgtgtgtccgtctgtccatggcgccgtcggagacgatgctggagtcggcggcgtacaggcggatgaaggcggagaacccgtccgagttcgtgccgcgcagcgtcttcttcgcgcgcgacggcggcagcggcatcgaccgccgcaacagcctctgggtcaaggcggcgctcgtctacgagtccgtcaccggcagccacgtcgacgacggcgtcaagcccctcgccaccagcctcttcctccaggtcgcccgcgaatgccgctcccgcatccccgacgacccaccgcagaccaaggccacggtggtgacggacgccctcaaaaaagtaccggctgccgtggctacgcctattgccggcgcgggcggcggcgaagatgactcagaggagaaaccgaacaagacggcggagctgcacgacgaagaaaaggagtcggacgacaagcaggtgatcgacgccgtcttcctcgtcgtcggcttcctcacgaggctggtcaagaccgccgcgggcgtcaggcgcgacgccgtcgacgaggggttcaagtccacgcacatgcaggacatcgtcacggacatgatcaagctggagaaccagctccccctcaagctcatcctcgacgtcgtcgagcacgtccaggacgcggcacgcgccgtcgccgccgaagccaggttcgaggggctccggaaatgcctcgaggggtacaagctcggcttcaaccccgccaccttcttcgacgacgtcgtcaggcccttctgctggtactactcgcccttcttcaacaagcagctgccggccgtggaccgcggcatgttcgacggcaaccacgagatcacgctcctggacttcctgcgcgccagcgtggtgccggcgccgccgggcgcggagaagggggcggccgccggcggcaggacgtcccgcatgccgacggccagggagctgagccgctctggcgtgcggatcgcgccgggggaggacggacgcgcgacggtggagttcgacgaggcgtccgccaggctgcagctgccggcgctggtgtacgacttcaagctggccacggtggcccggaacctgctggcgcgggagtacgaggagcagaacaagccggtgacgcgctacttccagatgatgaacgagctcgtcgacgaggcggccgacgccaagatcctccgccgcgccggcgccgtgcgcggtggcggggcgtccggcgccgaggtgcacgagctggtcaagcgcatcgacggctacgcgacgtacccgtcggtgtacatggccatggacgtgcagatcgcgaaggtgaggcggttccacgacatgaggatgcagaacttcctcgtccgctaccgccccggcgtcatctgggcgtcgtcggtggccgccgtctccttggtcgccattgtcgccgccaggagacgggggtgaggaagccaacggcggctaaccaaggcccgcgcatgaagattgtacaacttgaagtgtaatgttgtgtcttgtggttgtgtaccggtgtacaatgtgtaagtccaagcaaagatgattggatgcggggatttgtgggggctcgccatcctattgctaataatgattaattgcatgatagtccatgcaatttggtgcagattatgccaatccatgtaactgtaatcatagcttcactcatcaccaagatagggggtgagatttggagatgcaaaatggagtacaaatgaggacgtgagatactt

SEQ ID NO: 30745 - protein, 465 aa, Triticum aestivum
MAPSETMLESAAYRRMKAENPSEFVPRSVFFARDGGSGIDRRNSLWVKAALVYESVTGSHVDDGVKPLATSLFLQVARECRSRIPDDPPQTKATVVTDALKKVPAAVATPIAGAGGGEDDSEEKPNKTAELHDEEKESDDKQVIDAVFLVVGFLTRLVKTAAGVRRDAVDEGFKSTHMQDIVTDMIKLENQLPLKLILDVVEHVQDAARAVAAEARFEGLRKCLEGYKLGFNPATFFDDVVRPFCWYYSPFFNKQLPAVDRGMFDGNHEITLLDFLRASVVPAPPGAEKGAAAGGRTSRMPTARELSRSGVRIAPGEDGRATVEFDEASARLQLPALVYDFKLATVARNLLAREYEEQNKPVTRYFQMMNELVDEAADAKILRRAGAVRGGGASGAEVHELVKRIDGYATYPSVYMAMDVQIAKVRRFHDMRMQNFLVRYRPGVIWASSVAAVSLVAIVAARRRG

SEQ ID NO: 30746 - protein, 459 aa, Triticum aestivum
MLESAAYRRMKAENPSEFVPRSVFFARDGGSGIDRRNSLWVKAALVYESVTGSHVDDGVKPLATSLFLQVARECRSRIPDDPPQTKATVVTDALKKVPAAVATPIAGAGGGEDDSEEKPNKTAELHDEEKESDDKQVIDAVFLVVGFLTRLVKTAAGVRRDAVDEGFKSTHMQDIVTDMIKLENQLPLKLILDVVEHVQDAARAVAAEARFEGLRKCLEGYKLGFNPATFFDDVVRPFCWYYSPFFNKQLPAVDRGMFDGNHEITLLDFLRASVVPAPPGAEKGAAAGGRTSRMPTARELSRSGVRIAPGEDGRATVEFDEASARLQLPALVYDFKLATVARNLLAREYEEQNKPVTRYFQMMNELVDEAADAKILRRAGAVRGGGASGAEVHELVKRIDGYATYPSVYMAMDVQIAKVRRFHDMRMQNFLVRYRPGVIWASSVAAVSLVAIVAARRRG

SEQ ID NO: 30747 - protein, 450 aa, Triticum aestivum
MKAENPSEFVPRSVFFARDGGSGIDRRNSLWVKAALVYESVTGSHVDDGVKPLATSLFLQVARECRSRIPDDPPQTKATVVTDALKKVPAAVATPIAGAGGGEDDSEEKPNKTAELHDEEKESDDKQVIDAVFLVVGFLTRLVKTAAGVRRDAVDEGFKSTHMQDIVTDMIKLENQLPLKLILDVVEHVQDAARAVAAEARFEGLRKCLEGYKLGFNPATFFDDVVRPFCWYYSPFFNKQLPAVDRGMFDGNHEITLLDFLRASVVPAPPGAEKGAAAGGRTSRMPTARELSRSGVRIAPGEDGRATVEFDEASARLQLPALVYDFKLATVARNLLAREYEEQNKPVTRYFQMMNELVDEAADAKILRRAGAVRGGGASGAEVHELVKRIDGYATYPSVYMAMDVQIAKVRRFHDMRMQNFLVRYRPGVIWASSVAAVSLVAIVAARRRG

SEQ ID NO: 30748 - DNA, 1114 bp, Triticum aestivum
gagctctagggatgaagtcgccgccgggaacgacgatgatggcggcgctggtgcatctgctggccgccttcagcgccgccgtgttggccgctgccggcggcgagcagccgctgtcgaagatcggcatccaccgggccaccttggcgatccatccgggcgcctccgtcgacgtctcgccgctgctcctcggcctgcaggggcaggaccaagaatgggtgaccatcggatttaacaaccccaagccatccaaggatgactggattggggtcttttcccctgctaatttcagtgactccatttgcccgtcggagaaccaatgggtcgaggcccctcttttgtgcacggctcctattaagttccaatatgcaaactatacgacgtccgactatgcgaagaccggaaaggggtccttgaggcttcagataattaatcagaggagtgatatatcattcgcattgttttctggaggactctcaaatccgaagcttatcacacgttcaaatagcataactttcgcaaacccgaaggctcctgtgtacccacgcttggcacaaggaaagtcctgggatgaaatgacagtgacatggacaagtggatatagtacgaaggaggctacaccgtttgttgaatggggcatacaagggcaaatccaaatcctttctcctgcaggcacccttacgttcagtcgcgacactatgtgtggcccacctgctaggacagttggatggcgcgatcctggtttcatacatacaagcttcctcaaggacctatggcctaatcttaagtacacgtacaggattggccatcggctattcaatggtcaaattgtttggggacgtcagaatagcttcaaagcacctccctatcctggggaggattctttgcaacgtgttgtcatatttggagatttgggcaaggccgagattgatggctcaaacgaatacaatgactttgagcgtggttcaatcaacacaacttaccagctagttaaggacttgaagaatatcgatatggtgatgcatatcggagacatctgctacgccagtggttatctgtcacagtgggatcagttcactgcacaggttgaacccattgcttctacagtaccttacat

SEQ ID NO: 30749 - protein, 370 aa, Triticum aestivum
ALGMKSPPGTTMMAALVHLLAAFSAAVLAAAGGEQPLSKIGIHRATLAIHPGASVDVSPLLLGLQGQDQEWVTIGFNNPKPSKDDWIGVFSPANFSDSICPSENQWVEAPLLCTAPIKFQYANYTTSDYAKTGKGSLRLQIINQRSDISFALFSGGLSNPKLITRSNSITFANPKAPVYPRLAQGKSWDEMTVTWTSGYSTKEATPFVEWGIQGQIQILSPAGTLTFSRDTMCGPPARTVGWRDPGFIHTSFLKDLWPNLKYTYRIGHRLFNGQIVWGRQNSFKAPPYPGEDSLQRVVIFGDLGKAEIDGSNEYNDFERGSINTTYQLVKDLKNIDMVMHIGDICYASGYLSQWDQFTAQVEPIASTVPY

SEQ ID NO: 30750 - protein, 367 aa, Triticum aestivum
MKSPPGTTMMAALVHLLAAFSAAVLAAAGGEQPLSKIGIHRATLAIHPGASVDVSPLLLGLQGQDQEWVTIGFNNPKPSKDDWIGVFSPANFSDSICPSENQWVEAPLLCTAPIKFQYANYTTSDYAKTGKGSLRLQIINQRSDISFALFSGGLSNPKLITRSNSITFANPKAPVYPRLAQGKSWDEMTVTWTSGYSTKEATPFVEWGIQGQIQILSPAGTLTFSRDTMCGPPARTVGWRDPGFIHTSFLKDLWPNLKYTYRIGHRLFNGQIVWGRQNSFKAPPYPGEDSLQRVVIFGDLGKAEIDGSNEYNDFERGSINTTYQLVKDLKNIDMVMHIGDICYASGYLSQWDQFTAQVEPIASTVPY

SEQ ID NO: 30751 - protein, 359 aa, Triticum aestivum
MMAALVHLLAAFSAAVLAAAGGEQPLSKIGIHRATLAIHPGASVDVSPLLLGLQGQDQEWVTIGFNNPKPSKDDWIGVFSPANFSDSICPSENQWVEAPLLCTAPIKFQYANYTTSDYAKTGKGSLRLQIINQRSDISFALFSGGLSNPKLITRSNSITFANPKAPVYPRLAQGKSWDEMTVTWTSGYSTKEATPFVEWGIQGQIQILSPAGTLTFSRDTMCGPPARTVGWRDPGFIHTSFLKDLWPNLKYTYRIGHRLFNGQIVWGRQNSFKAPPYPGEDSLQRVVIFGDLGKAEIDGSNEYNDFERGSINTTYQLVKDLKNIDMVMHIGDICYASGYLSQWDQFTAQVEPIASTVPY

SEQ ID NO: 30752 - DNA, 582 bp, Triticum aestivum
cctaatcgaaaaccgtctcgtctcccccaaccaggcgaaaaccagcatcgcgaacggcaccagaccaaacccccgaatccgagccaaggagcaagggcaaaaccccatctgcggcggcggcggcggcggcggcggcggcgatggagtcggtggaggcgctcgtggcgcacatccagggtctctccgggagcccggacgagctggcgcagctccacggcctcctcaagcaggccgacggcgacgccctgcgcgtccactccgccggcctcctgcccttcctctcccacctccaccccggcgcccactccctcggctacctctacctcctggattctttcgtgtcgtcgtctgctaatctgagggcgcacgccggcggggaccttcttgtgaccgtggccgatttcctcacctcttgctcggccgaccagatacgcatggcgcccgacaaatttttgaatgtctgtagggtgctcaagaacgaggtcatgcagctcaatgcgccgatccgagggattgctccgcttcgggctgctgtccgcaagatccagacatcgtcagagcagcttaccccactccacgctg

SEQ ID NO: 30753 - protein, 147 aa, Triticum aestivum
MESVEALVAHIQGLSGSPDELAQLHGLLKQADGDALRVHSAGLLPFLSHLHPGAHSLGYLYLLDSFVSSSANLRAHAGGDLLVTVADFLTSCSADQIRMAPDKFLNVCRVLKNEVMQLNAPIRGIAPLRAAVRKIQTSSEQLTPLHA

SEQ ID NO: 30754 - protein, 119 aa, Triticum aestivum
PNRKPSRLPQPGENQHRERHQTKPPNPSQGARAKPHLRRRRRRRRRRWSRWRRSWRTSRVSPGARTSWRSSTASSSRPTATPCASTPPASCPSSPTSTPAPTPSATSTSWILSCRRLLI

SEQ ID NO: 30755 - protein, 117 aa, Triticum aestivum
LIENRLVSPNQAKTSIANGTRPNPRIRAKEQGQNPICGGGGGGGGGDGVGGGARGAHPGSLREPGRAGAAPRPPQAGRRRRPARPLRRPPALPLPPPPRRPLPRLPLPPGFFRVVVC

SEQ ID NO: 30756 - DNA, 529 bp, Triticum aestivum
attcactcgttctggttctggacagccacaccacctacccatcctcccagccagaggcacggcacagctagagggaggtgagggaggaagggggagagggacgatcgcagcactgcactgacggagggatgaccaaggacgtggagatggcggcgcggaacggcggcaacggcgccgtcgccggcgaggcctactacccctctcccccggcgcagggcggcgacgccgacgtggacgacgacggcaagcagcggcgcacagggacggtatggacagcgagcgcgcacatcatcaccgccgtcatcggctccggcgtgctctccctcgcctgggcaacggcgcagctgggctgggtcgtcgggccgatcaccctgatgctcttcgcggcgatcacctactacacctccggcctcctcgcggactgctaccgcaccggcgatccgctcaccgggaagaggaactacacctacatgggacgccgtcgcatcctacttgagtcgctggcaagtgtgggcctgtggcgttttcc

SEQ ID NO: 30757 - protein, 133 aa, Triticum aestivum
MTKDVEMAARNGGNGAVAGEAYYPSPPAQGGDADVDDDGKQRRTGTVWTASAHIITAVIGSGVLSLAWATAQLGWVVGPITLMLFAAITYYTSGLLADCYRTGDPLTGKRNYTYMGRRRILLESLASVGLWRF

SEQ ID NO: 30758 - protein, 127 aa, Triticum aestivum
MAARNGGNGAVAGEAYYPSPPAQGGDADVDDDGKQRRTGTVWTASAHIITAVIGSGVLSLAWATAQLGWVVGPITLMLFAAITYYTSGLLADCYRTGDPLTGKRNYTYMGRRRILLESLASVGLWRF

SEQ ID NO: 30759 - protein, 75 aa, Triticum aestivum
MDSERAHHHRRHRLRRALPRLGNGAAGLGRRADHPDALRGDHLLHLRPPRGLLPHRRSAHREEELHLHGTPSHPT

SEQ ID NO: 30760 - DNA, 1214 bp, Triticum aestivum
agctatcatcccgcacccgcacgagctcaaccactctctctctctctctcttctacctctgccccgtcctccatggaggggcgagcgagtgtgtgagttgagtctgacttgcatgtgagccagcctacagcgagcacacggcccatcctagacagagagagagagagagagaggaagtaatcttgcttgcttgcttagttgggttgggttgggttgtgctttgtgtgtgcgtctatggcgctgccggcggagaggcgggcggaggaggccgcgggcgtcggcgggtgccgggcgccggccggccagggcgggctgcccatcgggttccggttccggcccaccgacgaggagctgctgctgcactacctgcgccgcaaggccctctcctgccccctccccgccgacatcatccccgtcgccgacctcgcgcgcctccacccatcggacctgccaggcgaggccgacggcgagcgctacttcttccacctgccggcgacggggtgctggcggaagggcggcggcgcgggcagggcgggcggcagcggcgtgtggagggcctccgggaaggagcggctggtcgtggcgccacgctgcggccggcctatcggcgccaagcggacgctcgtcttctgccgcccaggcggcgcgcgcaccggctgggccatgcacgagtaccgcctgctccccgccggcctcgccgcttacgccacacccaagagcctccacgccgccaaggactgggtggtctgccgcgtgttcaagaaggccacgccagcgcgccacggcacagcggggcggcgtaggggggacgccgacgccgacatgacaccggcgtcaccgtccccggcgtcctcctgcgtgaccgagtcgggcatggaggaggacgatgatgagaccgcctctaacctggcgcggcgagaggattagagcagctgacctgacctcaatcatggtccctgtaattttctaatgagtgcccctttaattcgtcgatctgctaatgtggtactagtccgtagtagcagcagtagtaatcatcagccccaacttatcaggagaaacaaaccgagctcaagcaatcagcaaaccgagctcaagcaatcaaacacctcaccatgtttgacgagtgagctgagactgagagctcactgtgaatcaaagagttcatgttccaacgttaaattggagttcttttgcacaaaaaaaaaaaaaaa

SEQ ID NO: 30761 - protein, 230 aa, Triticum aestivum
MALPAERRAEEAAGVGGCRAPAGQGGLPIGFRFRPTDEELLLHYLRRKALSCPLPADIIPVADLARLHPSDLPGEADGERYFFHLPATGCWRKGGGAGRAGGSGVWRASGKERLVVAPRCGRPIGAKRTLVFCRPGGARTGWAMHEYRLLPAGLAAYATPKSLHAAKDWVVCRVFKKATPARHGTAGRRRGDADADMTPASPSPASSCVTESGMEEDDDETASNLARRED

SEQ ID NO: 30762 - DNA, 1457 bp, Triticum aestivum
atccgtccatatatcgcttcttccgccgctccgcttcccttccacgcgcaccaaccgccgcctgctcttcgattcccccgaggccccagcaggagcagcaaccccttcttctgcttcttgttcttggtgcggtgcgcgggcatggccatcgaccacgagtcgcccttcaaggagctccgcctcaagaacaggaggatcatgggaggcggcgcccctgagccggacgaagaggaggcggaggcgcaggtggcggcggcggcgggggaggaggagcagtggccgcagtggctgcgcccgctgctgtccgcgcgcttcttcgcgcaatgcaagacgcacaccgagtcgcaccggagcggcgagtgcaacatgttctgcctcgactgcgccgccggggcggccgccggcgcggcggcgctctgctcgctgtgcctcgcgcacgcgcaccgcggccaccacaccatccagatccgccgctcctcctaccacgacgtcatccgggtgtcggacatccagcgcttcatggacatcgccggcgtgcagacctacgtcatcaacagcgcgcgcgtcgtcttcctcaacgagcgcccccagcagaagcagcccggcaaggccggcggcggcgccggcggcgccaacctctgcgaggtctgcagccgcagcctcctcgacaacttccgcttctgctccctcggctgcaaggtcgccggctgctcctccgacgggggcggcaacgacaaggcgaggatgatgcgggccagcaggcccggccgcgccaagggctcgtcggactccgaggcggcctcctcctcctctcctctgcgcaatgccgccaggcagagcttcacgccgtccacgccgccgccgcctccgcctccagcggccaagcggcgcaagggcatcccgcaccgcgcgccgttcggcaacctcatcatcgactgctaggcgcgcaccaccccgccattgacaaagctgcgacccacacgcccagttgcagagtgaatggagcgagaaagcggccaccacttcggtgcccgccattgccttcggttgtgcttctcgatgtggattccaccattagcttttcagggagaaagcaggcaggcaagaaagggaggtggatggatggaaacacagctgaaaaagcaccagccttttcttactgcttataatcatcatcatcatcactaggacagaaaccaaaaattaccacaccacagagagattactgtatatgattatggccctgctctactatttctaccacactagacttgagttttgtgataaatgttttgaggtaataccaggcaatgcgccagtggtcagctagctagagtaataagcaattgccacttgttaatcaggttttgtgatagcttgtgctttcttcatctgtaaatatggagtgctgggagaggatgactgcttgttagaaaatatggtgttgctcaaccttc

SEQ ID NO: 30763 - protein, 313 aa, Triticum aestivum
IRPYIASSAAPLPFHAHQPPPALRFPRGPSRSSNPFFCFLFLVRCAGMAIDHESPFKELRLKNRRIMGGGAPEPDEEEAEAQVAAAAGEEEQWPQWLRPLLSARFFAQCKTHTESHRSGECNMFCLDCAAGAAAGAAALCSLCLAHAHRGHHTIQIRRSSYHDVIRVSDIQRFMDIAGVQTYVINSARVVFLNERPQQKQPGKAGGGAGGANLCEVCSRSLLDNFRFCSLGCKVAGCSSDGGGNDKARMMRASRPGRAKGSSDSEAASSSSPLRNAARQSFTPSTPPPPPPPAAKRRKGIPHRAPFGNLIIDC

SEQ ID NO: 30764 - protein, 281 aa, Triticum aestivum
MQDAHRVAPERRVQHVLPRLRRRGGRRRGGALLAVPRARAPRPPHHPDPPLLLPRRHPGVGHPALHGHRRRADLRHQQRARRLPQRAPPAEAARQGRRRRRRRQPLRGLQPQPPRQLPLLLPRLQGRRLLLRRGRQRQGEDDAGQQARPRQGLVGLRGGLLLLSSAQCRQAELHAVHAAAASASSGQAAQGHPAPRAVRQPHHRLLGAHHPAIDKAATHTPSCRVNGARKRPPLRCPPLPSVVLLDVDSTISFSGRKQAGKKGRWMDGNTAEKAPAFSYCL

SEQ ID NO: 30765 - protein, 266 aa, Triticum aestivum
MAIDHESPFKELRLKNRRIMGGGAPEPDEEEAEAQVAAAAGEEEQWPQWLRPLLSARFFAQCKTHTESHRSGECNMFCLDCAAGAAAGAAALCSLCLAHAHRGHHTIQIRRSSYHDVIRVSDIQRFMDIAGVQTYVINSARVVFLNERPQQKQPGKAGGGAGGANLCEVCSRSLLDNFRFCSLGCKVAGCSSDGGGNDKARMMRASRPGRAKGSSDSEAASSSSPLRNAARQSFTPSTPPPPPPPAAKRRKGIPHRAPFGNLIIDC

SEQ ID NO: 30766 - DNA, 813 bp, Triticum aestivum
  misc_feature (214)..(214): n is a, c, g, or t
  misc_feature (217)..(217): n is a, c, g, or t
gaaccctagcttcccctcgtctccctgcctccagccgcacccgccgcggaccccaatccccgatctgacccccccccctcatgccctctccatcctcctcctcaagacgtcaccatcgcctccgttcgtcttctcccgcgccggcgccgtcgaggccgagtcgttccacttcccgctctggcaggtctgcgcggccgcgtgcggggcgttcgtnttntcccgcgccgatgtcgtcgaggccgaggcgttcgacttcccggcctgctgtggctgggtaattcttgtcttgctataactcttcacgtgcagagaagggaagaagaaggggaaaggggatggccgccgacaccgcctacgcgaagcgggtgctgctcgcctgcaacggcggcggtgacgccgtctcgcggggggtcgccgtcggcctcgccaggcacggctgcaggctggtcctgctgggcgacgagggcgccctggccgctacggcggaggaggcgcggcgctgcgcggccggaggggcgtcggccgtcgcggtggtggggctggacctcgcggcctgcgacgaggcggccgtcggcgccgcggtggaggcggcgtggcgctgcttcggccacggcgggctcgacgccctcgtcaactgctgctcctacgagggggaagtgcaagactgcctcagcgtgactgaagatgagtacaacaagaccatgaaagtcaatgcaatcacaccctggcttctgataaaggcgatcgccaaagcggttccgcgattgcgcaatcccggcggctctttgggtattctttgaccccagatcatcg

SEQ ID NO: 30767 - protein, 154 aa, Triticum aestivum
MAADTAYAKRVLLACNGGGDAVSRGVAVGLARHGCRLVLLGDEGALAATAEEARRCAAGGASAVAVVGLDLAACDEAAVGAAVEAAWRCFGHGGLDALVNCCSYEGEVQDCLSVTEDEYNKTMKVNAITPWLLIKAIAKAVPRLRNPGGSLGIL

SEQ ID NO: 30768 - protein, 97 aa, Triticum aestivum
  misc_feature (71)..(72): Xaa can be any naturally occurring amino acid
NPSFPSSPCLQPHPPRTPIPDLTPPPHALSILLLKTSPSPPFVFSRAGAVEAESFHFPLWQVCAAACGAFXXSRADVVEAEAFDFPACCGWVILVLL

SEQ ID NO: 30769 - DNA, 603 bp, Triticum aestivum
aacttgttacagcctacccacataaaatctccgtcgatccaccacaccctgcaatggcgtccgcgctcaccaacgtgagcctgtctaccttcgcgcccacggccaggggcgacgtcctcgcgaggccgcaggtggccgccgcccgcgtcaccttcccgacggcgcaccgcggcagcggcgccctctcctgcagggcgggcgggccggccacgccgccgggcatctccgacaagatgtcggacagcatcaaggaggcccaggagacgtgctcggaggacgccgccagcggggagtgcgcggcggcgtgggacgaggtggaggagctcagcgccgccgccagccacgcccgggacaagctcaaggactccgacccgctggagaactactgcaaggagaaccccgagaccgacgagtgccgcacctacgacagctgagcgtacgtgctaatctcttctggatggcggatggtgaaggtggacgtggtgttcttggctcgtgggagcccgagaaacctgctatgtctcaacctaccgttacttacacgatcgggatgtatgtagtaaaaacgctccaaatattttccctgggacatacgtggttgat

SEQ ID NO: 30770 - protein, 143 aa, Triticum aestivum
LVTAYPHKISVDPPHPAMASALTNVSLSTFAPTARGDVLARPQVAAARVTFPTAHRGSGALSCRAGGPATPPGISDKMSDSIKEAQETCSEDAASGECAAAWDEVEELSAAASHARDKLKDSDPLENYCKENPETDECRTYDS

SEQ ID NO: 30771 - protein, 126 aa, Triticum aestivum
MASALTNVSLSTFAPTARGDVLARPQVAAARVTFPTAHRGSGALSCRAGGPATPPGISDKMSDSIKEAQETCSEDAASGECAAAWDEVEELSAAASHARDKLKDSDPLENYCKENPETDECRTYDS

SEQ ID NO: 30772 - DNA, 805 bp, Triticum aestivum
atcggtctagttagtgttgatctcggctggtgatttcactagtccgcgcaggtgcgaagccggattcggcccgctgctcccctctcgtctcccgtcgtcggacccccggcgacccctcttccaagccgccatcgtcctcacctccagcgcgacttcgtcttctccaccactcgacccagctcagcagcaaggcggcggacgggaggatgatgggaagcaacaaccccggcggcgcagggggagggggagggatggccccgggcacgggggccggcggcagcgacgggcggcatgacgacgaggccgtgctcaccgagttcctctcctccctcatggactacaatcccacgatcccggacgagctcgtggagcactacctcggccgaagcggcttccactgccccgacatacgcctaacaaggctggttgctgtagctgctcaaaagttcatttcagacattgcaagcgactctcttcagcactgcaaagccagggttgcagcacctatcaaagataacaagagcaaacaaccgaaggatagacgccttgtattgaccatggatgatctttcaaaagcattgcgtgagcatggtgttaatctgaaacatccagagtattttgcggacagcccatcagcagggatgcccccctcaacaagagaggagtagaatcgatcgctccttcaacaagagagggctagaatccattgtttcttatatgcgtacccagtgaatgggcgtgtccttccaactttatgtaacaaagccttataagcatgtatgcaatggcagttgatgtattatgg

SEQ ID NO: 30773 - protein, 153 aa, Triticum aestivum
MMGSNNPGGAGGGGGMAPGTGAGGSDGRHDDEAVLTEFLSSLMDYNPTIPDELVEHYLGRSGFHCPDIRLTRLVAVAAQKFISDIASDSLQHCKARVAAPIKDNKSKQPKDRRLVLTMDDLSKALREHGVNLKHPEYFADSPSAGMPPSTREE

SEQ ID NO: 30774 - protein, 152 aa, Triticum aestivum
MGSNNPGGAGGGGGMAPGTGAGGSDGRHDDEAVLTEFLSSLMDYNPTIPDELVEHYLGRSGFHCPDIRLTRLVAVAAQKFISDIASDSLQHCKARVAAPIKDNKSKQPKDRRLVLTMDDLSKALREHGVNLKHPEYFADSPSAGMPPSTREE

SEQ ID NO: 30775 - protein, 138 aa, Triticum aestivum
MAPGTGAGGSDGRHDDEAVLTEFLSSLMDYNPTIPDELVEHYLGRSGFHCPDIRLTRLVAVAAQKFISDIASDSLQHCKARVAAPIKDNKSKQPKDRRLVLTMDDLSKALREHGVNLKHPEYFADSPSAGMPPSTREE

SEQ ID NO: 30776 - DNA, 1402 bp, Triticum aestivum
atccttcttctcactctcaggtctcagcgcgcccatcctctgccccttgggcgtctggtctggatccaagagccggccgccaactgcaatgccgtccctcctggagatcttcctgggatcctgttcctcctcggcgccgccggtggactgggaggcggaggcctacccggagtacgccgactacgccgtcctccccctgctcctcgccttcttccccgccctgcgcctcctcctcaaccagttcctcttcgaggtgttagcaagacgacttatatttggaaagggatatgacaagcttgctgaaacagatgaaaggagaaagaaaatcaataaatttaaggaatcggcatggaaatttgtttattatctttctgcagaactcttttcactatctgtaacatacaatgaatcgtggtttacaaatacaagatacttttgggtagggcctggcgagcagctgtggcccgaccaaaagatgaagctgaagcttaaggctgtatacatgtatgccgctggattttacgtatattctatctttgatcttctgttctgggaaacaagacgcaaggacttcggagtcatgatgtctcaccatgtggcaactattgttctgattgttgtgtcctatatttgcagattatctcgtcctggctcggtcattttacccctccatgatgcaagtgatatattcctagagattggaaagatggccaagtacagtagctgtgagtggctagctgttgtagcatttctactttttgtggcttcatggatccttcttcggctaatagtgtttcctttctggatcctaagaagcacaagttatgaaatagctatgatcgtggacaacgagaacagaaaaatctacagaacttcgtactactatcttttcaacactctcttgttttcacttctggtctttcacatatattggtgggtactgatttatcggatgctcgtcaaacaaattcaatccagaggtcatgttggtgaggatgtccgatccgattctgaaggcgaaaacaaccatgaagattaagctgaaggttgttggatgcttaactgaagaactgtatagttcgcagttgggaatgagaatggtgcaagcgggttgtataaagaatgagaatgtcaaggaggagctagttagcatatccattagtaggaaattcaggcacaaaacgaaaactgaaaaggctcgaatctcggtgccactggaacaagcctccttgatatgtatcttttttgtatattgaatgtataaggtgaggctatcattcagggtcttgaggcatcaatcatacatcgtgatattaatctccatatgtatgtgaagatgtcttttcagaaatactgagcctccgagttataaaaattctcttttatatatgtggtttgcttg

SEQ ID NO: 30777 - protein, 345 aa, Triticum aestivum
SFFSLSGLSAPILCPLGVWSGSKSRPPTAMPSLLEIFLGSCSSSAPPVDWEAEAYPEYADYAVLPLLLAFFPALRLLLNQFLFEVLARRLIFGKGYDKLAETDERRKKINKFKESAWKFVYYLSAELFSLSVTYNESWFTNTRYFWVGPGEQLWPDQKMKLKLKAVYMYAAGFYVYSIFDLLFWETRRKDFGVMMSHHVATIVLIVVSYICRLSRPGSVILPLHDASDIFLEIGKMAKYSSCEWLAVVAFLLFVASWILLRLIVFPFWILRSTSYEIAMIVDNENRKIYRTSYYYLFNTLLFSLLVFHIYWWVLIYRMLVKQIQSRGHVGEDVRSDSEGENNHED

SEQ ID NO: 30778 - protein, 316 aa, Triticum aestivum
MPSLLEIFLGSCSSSAPPVDWEAEAYPEYADYAVLPLLLAFFPALRLLLNQFLFEVLARRLIFGKGYDKLAETDERRKKINKFKESAWKFVYYLSAELFSLSVTYNESWFTNTRYFWVGPGEQLWPDQKMKLKLKAVYMYAAGFYVYSIFDLLFWETRRKDFGVMMSHHVATIVLIVVSYICRLSRPGSVILPLHDASDIFLEIGKMAKYSSCEWLAVVAFLLFVASWILLRLIVFPFWILRSTSYEIAMIVDNENRKIYRTSYYYLFNTLLFSLLVFHIYWWVLIYRMLVKQIQSRGHVGEDVRSDSEGENNHED

SEQ ID NO: 30779 - protein, 187 aa, Triticum aestivum
MKLKLKAVYMYAAGFYVYSIFDLLFWETRRKDFGVMMSHHVATIVLIVVSYICRLSRPGSVILPLHDASDIFLEIGKMAKYSSCEWLAVVAFLLFVASWILLRLIVFPFWILRSTSYEIAMIVDNENRKIYRTSYYYLFNTLLFSLLVFHIYWWVLIYRMLVKQIQSRGHVGEDVRSDSEGENNHED

SEQ ID NO: 30780 - DNA, 571 bp, Triticum aestivum
agggaaacacacaaacatttcccggtctcatcagaagcagaggcgtacaatacaggtcgctgatattttcacccttatcctgaatcttgagtgaccaccggtccaccatgggtctcgtctggatggtggccgcggccgtggcggcggtgctggcgtcgtgggcgttcaacgcgctggtgtacctcgtgtggaggccgcgggccatcactcggcagctccgcgcgcagggcgtcggcgggccgggctacaggttcctcgccggcaacctcgcggagatcaagcggctccgcgccgacaccgccggcgccgcgctggacgtcggcaaccacgacttcgtccccatggtccagccgcacttccacaaatggatccccatccacgggcgcacgttcctgtactggttcggggcgaggccgagcctgtgcatggccgacgtgaacatggtgaagcaggtgctctccgaccgcggcaggctgtaccccaagaacctcgggaacccgcacatcgcccggctgctcggcaaggggctcgtgctcaccgacggcgacgactggaagcgccaccgcaaggt

SEQ ID NO: 30781 - protein, 154 aa, Triticum aestivum
MGLVWMVAAAVAAVLASWAFNALVYLVWRPRAITRQLRAQGVGGPGYRFLAGNLAEIKRLRADTAGAALDVGNHDFVPMVQPHFHKWIPIHGRTFLYWFGARPSLCMADVNMVKQVLSDRGRLYPKNLGNPHIARLLGKGLVLTDGDDWKRHRK

SEQ ID NO: 30782 - protein, 149 aa, Triticum aestivum
MVAAAVAAVLASWAFNALVYLVWRPRAITRQLRAQGVGGPGYRFLAGNLAEIKRLRADTAGAALDVGNHDFVPMVQPHFHKWIPIHGRTFLYWFGARPSLCMADVNMVKQVLSDRGRLYPKNLGNPHIARLLGKGLVLTDGDDWKRHRK

SEQ ID NO: 30783 - DNA, 1617 bp, Triticum aestivum
cccacatcgtatcagtcccagctatcgcacacacctgcaacggccagctcaggagcgggcaagaagagaagacatttattttcttccctcgcgggagatcgatcacagccgggcagccatgggcgaggaggccccggccgcggtcaccgcggcggcgacgtcgccggcgccccacttgctcctcatatgcttcccggggcagggccacgtcaaccccatgctccgcctcgccaagcgcttcgcggccaagggcctcctggtcaccttctcctcgacctcctacgttggaggcaagatcacggcctcctccggggtggaggctggcggcgacggcgtgccgctcggccgcggccgcatccggttcgagttcttggacgacgatttcgacgggaatgacctcgacgacctgatgaggcacctggagacgactggccccgtggtgttcgcggagctgctgaggcgccaggaggaggcggggcggcctgtgacgtgcgtcgtcgggaacccgttcctcccgtgggcgatcgacgtcgcccacgacgccggcatccccacggcagtgctgtgggtgcagtcgtgcgcggtgttctcgctctactaccaccacgtgcacgggctcgtggagttcccgcccgaggacgacctcgacgcccgggtcaacctcccgggcctcccggcgctgtccgtcgccgacgtgccgtcgttcctgctgccgtccaacccctacaagctcctcaccgatgcgatactgaagcagttccgcaccatccacaaggcgtcgtgggtgttcgtcaactccttctacgagctggagcccgacgtggtggacgcgctcccgggcatctcgccgccgccgccgccgctcatccccgtgggcccgctcgtcgagctggaggaggagggcgccgtgcgcggcgacatgatcaaggcggcggacgactgcgtggggtggctggacgcgcaggcgccgcgctccgtcgtgtacgcgtcgctcggcagcgtcgtggtgctgtccgccgaggagctggccgagatggcgcacgggctcgcgtccaccggccgccccttcctgtgggtggttcggccggactgcagcgcgatgctcccggaggggtacctggactccgtcgccgggcgcggcatggtggtgccgtggagcccgcaggacctggtgctcgcgcacccgtccacggcgtgcttcctcacgcactgcggctggaactccacgctggagacgctcgcggcggggcttcccgtggtggcgttcccgcagtggggcgaccagtgcacggacgccaagtacctcgtggaggagttcaagatgggggtgcgcatcggcacgccgctgcggagggactccgtgcgcgacgccgtggaggacgtcgtggccgggccggacgccggcgcgatgctcgagaaggccagagcgtggtgcgcggcggcgaggacggcggtggcggccggcgggtcgtcggaccgccacgtacaggcgtttgttgaccaggttgtggcgggaaccattggcgcacgagcagataaggacattgtggctgcggagcagcaaggtttcgattcatcttctctacgtggaaactaaggattatttcggccatctcc

SEQ ID NO: 30784 - protein, 531 aa, Triticum aestivum
PHRISPSYRTHLQRPAQERARREDIYFLPSREIDHSRAAMGEEAPAAVTAAATSPAPHLLLICFPGQGHVNPMLRLAKRFAAKGLLVTFSSTSYVGGKITASSGVEAGGDGVPLGRGRIRFEFLDDDFDGNDLDDLMRHLETTGPVVFAELLRRQEEAGRPVTCVVGNPFLPWAIDVAHDAGIPTAVLWVQSCAVFSLYYHHVHGLVEFPPEDDLDARVNLPGLPALSVADVPSFLLPSNPYKLLTDAILKQFRTIHKASWVFVNSFYELEPDVVDALPGISPPPPPLIPVGPLVELEEEGAVRGDMIKAADDCVGWLDAQAPRSVVYASLGSVVVLSAEELAEMAHGLASTGRPFLWVVRPDCSAMLPEGYLDSVAGRGMVVPWSPQDLVLAHPSTACFLTHCGWNSTLETLAAGLPVVAFPQWGDQCTDAKYLVEEFKMGVRIGTPLRRDSVRDAVEDVVAGPDAGAMLEKARAWCAAARTAVAAGGSSDRHVQAFVDQVVAGTIGARADKDIVAAEQQGFDSSSLRGN

SEQ ID NO: 30785 - protein, 492 aa, Triticum aestivum
MGEEAPAAVTAAATSPAPHLLLICFPGQGHVNPMLRLAKRFAAKGLLVTFSSTSYVGGKITASSGVEAGGDGVPLGRGRIRFEFLDDDFDGNDLDDLMRHLETTGPVVFAELLRRQEEAGRPVTCVVGNPFLPWAIDVAHDAGIPTAVLWVQSCAVFSLYYHHVHGLVEFPPEDDLDARVNLPGLPALSVADVPSFLLPSNPYKLLTDAILKQFRTIHKASWVFVNSFYELEPDVVDALPGISPPPPPLIPVGPLVELEEEGAVRGDMIKAADDCVGWLDAQAPRSVVYASLGSVVVLSAEELAEMAHGLASTGRPFLWVVRPDCSAMLPEGYLDSVAGRGMVVPWSPQDLVLAHPSTACFLTHCGWNSTLETLAAGLPVVAFPQWGDQCTDAKYLVEEFKMGVRIGTPLRRDSVRDAVEDVVAGPDAGAMLEKARAWCAAARTAVAAGGSSDRHVQAFVDQVVAGTIGARADKDIVAAEQQGFDSSSLRGN

SEQ ID NO: 30786 - protein, 459 aa, Triticum aestivum
MLRLAKRFAAKGLLVTFSSTSYVGGKITASSGVEAGGDGVPLGRGRIRFEFLDDDFDGNDLDDLMRHLETTGPVVFAELLRRQEEAGRPVTCVVGNPFLPWAIDVAHDAGIPTAVLWVQSCAVFSLYYHHVHGLVEFPPEDDLDARVNLPGLPALSVADVPSFLLPSNPYKLLTDAILKQFRTIHKASWVFVNSFYELEPDVVDALPGISPPPPPLIPVGPLVELEEEGAVRGDMIKAADDCVGWLDAQAPRSVVYASLGSVVVLSAEELAEMAHGLASTGRPFLWVVRPDCSAMLPEGYLDSVAGRGMVVPWSPQDLVLAHPSTACFLTHCGWNSTLETLAAGLPVVAFPQWGDQCTDAKYLVEEFKMGVRIGTPLRRDSVRDAVEDVVAGPDAGAMLEKARAWCAAARTAVAAGGSSDRHVQAFVDQVVAGTIGARADKDIVAAEQQGFDSSSLRGN

SEQ ID NO: 30787 - DNA, 1410 bp, Triticum aestivum
gcttctcgccgcgccctctttccccctcccctcccccgcctcgcccactgccccctcgatccagcgcgggagcaccagatggatcggccggcgccggaccagcggcccacgctcttctcgccgtaccagatgcgccgcttcagcctcgcccaccgggtggtgctggcgccgatgacgaggtgcagggccatcggcgggctgccggggccggcgctggcggagtactacgcgcagcgggtcacccagggaggcctgctcatctccgagggcaccgtcgtctcgccggccgggccggggtttcctcacgtccctggaatatacaatcaggagcagatagatggatggaaaaaggtggtggatgctgttcatgctaagggaggcatctttttctgtcaattatggcacgtaggcagagcttctcaccaagtataccagccggacggtgctgctccaatatcctcaactgataagccgatatcagcaaggtggaagatattgctgcctgatggttcatacggaacgtatcccacgccaagccgccttgcgacatcggaaataccagacatagtcgagcaatatcgccaagctgccataaacgccatcaaagcaggtttcgatggcatcgagatccacggcgctcatggctacatcatcgatcagttcctcaaggatggcatcaacgaccgcaccgacgagtatggcggatcgctcaccaaccgttgcaagtttctactcgaggtgacccgagccgtggtatccgccatcagagcagagcgaactgcggtgagggtgtcaccggccatcgaccaccttgacgcctatgactcgaacccaatgcagctaggcatggccgtcgtcgaacggctcaacgctctccagcaggaagccgggcagctcgcctacctccacgtgacacagccaaggtacgcggcctacgggcagacagagtcgggcccgcatggcagcgccgaggaggagagccggctgatgcgcaccctgcggggcgcgtaccgtggcacgttcatgtgcagcggcggctacacgcgggagctcgggctggaggcggtggagagcggcgacgccgacctggtgtcgttcgggcggctgttcatttcgaacccggacctggtcgagcggctcaggctcaacgccggcctcaacaagtacgtgaggaagacgttctacacccctgaccccgtcgtgggctacaccgactacccgttcctcggcaagcctaaatcgcgcatgtagtgtgtacaaggttagtgatcggagatgggatttattgttaagtgtatttgggggaataaggtcatatacgcgcatgtagtgtacacgaattagtgatcggagaacagagatgggtttgtgaaacgtatttgaagaaaataaagtaatatacgtgactgc

SEQ ID NO: 30788 - protein, 416 aa, Triticum aestivum
ASRRALFPPPLPRLAHCPLDPAREHQMDRPAPDQRPTLFSPYQMRRFSLAHRVVLAPMTRCRAIGGLPGPALAEYYAQRVTQGGLLISEGTVVSPAGPGFPHVPGIYNQEQIDGWKKVVDAVHAKGGIFFCQLWHVGRASHQVYQPDGAAPISSTDKPISARWKILLPDGSYGTYPTPSRLATSEIPDIVEQYRQAAINAIKAGFDGIEIHGAHGYIIDQFLKDGINDRTDEYGGSLTNRCKFLLEVTRAVVSAIRAERTAVRVSPAIDHLDAYDSNPMQLGMAVVERLNALQQEAGQLAYLHVTQPRYAAYGQTESGPHGSAEEESRLMRTLRGAYRGTFMCSGGYTRELGLEAVESGDADLVSFGRLFISNPDLVERLRLNAGLNKYVRKTFYTPDPVVGYTDYPFLGKPKSRM

SEQ ID NO: 30789 - protein, 390 aa, Triticum aestivum
MDRPAPDQRPTLFSPYQMRRFSLAHRVVLAPMTRCRAIGGLPGPALAEYYAQRVTQGGLLISEGTVVSPAGPGFPHVPGIYNQEQIDGWKKVVDAVHAKGGIFFCQLWHVGRASHQVYQPDGAAPISSTDKPISARWKILLPDGSYGTYPTPSRLATSEIPDIVEQYRQAAINAIKAGFDGIEIHGAHGYIIDQFLKDGINDRTDEYGGSLTNRCKFLLEVTRAVVSAIRAERTAVRVSPAIDHLDAYDSNPMQLGMAVVERLNALQQEAGQLAYLHVTQPRYAAYGQTESGPHGSAEEESRLMRTLRGAYRGTFMCSGGYTRELGLEAVESGDADLVSFGRLFISNPDLVERLRLNAGLNKYVRKTFYTPDPVVGYTDYPFLGKPKSRM

SEQ ID NO: 30790 - protein, 373 aa, Triticum aestivum
MRRFSLAHRVVLAPMTRCRAIGGLPGPALAEYYAQRVTQGGLLISEGTVVSPAGPGFPHVPGIYNQEQIDGWKKVVDAVHAKGGIFFCQLWHVGRASHQVYQPDGAAPISSTDKPISARWKILLPDGSYGTYPTPSRLATSEIPDIVEQYRQAAINAIKAGFDGIEIHGAHGYIIDQFLKDGINDRTDEYGGSLTNRCKFLLEVTRAVVSAIRAERTAVRVSPAIDHLDAYDSNPMQLGMAVVERLNALQQEAGQLAYLHVTQPRYAAYGQTESGPHGSAEEESRLMRTLRGAYRGTFMCSGGYTRELGLEAVESGDADLVSFGRLFISNPDLVERLRLNAGLNKYVRKTFYTPDPVVGYTDYPFLGKPKSRM

SEQ ID NO: 30791 - DNA, 1294 bp, Triticum aestivum
gcaacaagatcagtgatgaatatttctctgaaaaaaacaagccagattcgccaagcgcccggtctccgctctccacgtaacccttctcccctcccaacctccgcgtcgtcgcaaacccaaatcctcctcccactccagccccccctcatcagatcacgcgagcagggggcaccggaaccggatcgggcgcggcggcggaggcgggcgacggcgatgatgcacggcgtgggcccgtcggacgacgccgcggcggcggcggcgctggagctgcaggagtccgggtgggaggagctgcggcgggaggcgcggaagctggagggggacctggacgtgaagctctcctcgtacgcgcgcctcgccgcgcgctcctcctccgcctccgcctcggcctcggcctcggcggcctcccccaccgccgaccgctcctcctggaagtccacggagctcgagatccaggcgctgctcgacaagctgcaggacgtcaacgacgccatgagccgctgcgccgcgcccgccgcccccgccaccgcttccgtctcccagaagctcgcgcgccaccgcgacatcctgcacgagttcacgcaggagttcaggaggacgcgggggaacctgagctccatgagggagcacgccgacctgctcagctccgtgcgcggcgacatcaccgagtccaaggctaccggcggcatgtcgccgagggtacatttgctccgggagagggcttccattcacggcagcgtcaaccagatagacgaggtaattgggcaagctcaaagcacaagagcagccctatccaatcagagggccttgtttggagatgttcaggggaaagtcaagcagttgggtgaaaaattccctgtggtccgaggcctccttggcgccatcaagaggaagaaatcaaaggacacgatcatcctttcagcagtaatcgcggcctgcaccatctttttgatcatctactggctctcaaaatgatcggtccgttgttgggaaagctcgcgacggggacttcctctctcaccacagaatgactgacaagtgaccaacagatggcacgataaaagactggtgattattatccatttcttagggctagtacgagggaatgggagatcccgttgtgtttagctctcaccgtgctgccctcgacatatcttgtttttggagatctcccttgtcatttataccttagatcaattttgtttggtgaattgagatgttgcttgtttcgagtaaatacgatgacacacttctgacacttccatcttacaatgggaattgagctgttgcttgt

SEQ ID NO: 30792 - protein, 324 aa, Triticum aestivum
ATRSVMNISLKKTSQIRQAPGLRSPRNPSPLPTSASSQTQILLPLQPPLIRSREQGAPEPDRARRRRRATAMMHGVGPSDDAAAAAALELQESGWEELRREARKLEGDLDVKLSSYARLAARSSSASASASASAASPTADRSSWKSTELEIQALLDKLQDVNDAMSRCAAPAAPATASVSQKLARHRDILHEFTQEFRRTRGNLSSMREHADLLSSVRGDITESKATGGMSPRVHLLRERASIHGSVNQIDEVIGQAQSTRAALSNQRALFGDVQGKVKQLGEKFPVVRGLLGAIKRKKSKDTIILSAVIAACTIFLIIYWLSK

SEQ ID NO: 30793 - protein, 319 aa, Triticum aestivum
MNISLKKTSQIRQAPGLRSPRNPSPLPTSASSQTQILLPLQPPLIRSREQGAPEPDRARRRRRATAMMHGVGPSDDAAAAAALELQESGWEELRREARKLEGDLDVKLSSYARLAARSSSASASASASAASPTADRSSWKSTELEIQALLDKLQDVNDAMSRCAAPAAPATASVSQKLARHRDILHEFTQEFRRTRGNLSSMREHADLLSSVRGDITESKATGGMSPRVHLLRERASIHGSVNQIDEVIGQAQSTRAALSNQRALFGDVQGKVKQLGEKFPVVRGLLGAIKRKKSKDTIILSAVIAACTIFLIIYWLSK

SEQ ID NO: 30794 - protein, 253 aa, Triticum aestivum
MMHGVGPSDDAAAAAALELQESGWEELRREARKLEGDLDVKLSSYARLAARSSSASASASASAASPTADRSSWKSTELEIQALLDKLQDVNDAMSRCAAPAAPATASVSQKLARHRDILHEFTQEFRRTRGNLSSMREHADLLSSVRGDITESKATGGMSPRVHLLRERASIHGSVNQIDEVIGQAQSTRAALSNQRALFGDVQGKVKQLGEKFPVVRGLLGAIKRKKSKDTIILSAVIAACTIFLIIYWLSK

SEQ ID NO: 30795 - DNA, 1067 bp, Triticum aestivum
aaaacccccaccgcacgccccacccgcgtcgcaggcatgcctctctcgctcggcgccgaccacctcgccgcgcccggcgcgcgcgctccgcctgcgcgggtgggcacgggcatgggcatggacacgtccctctcgctgggcggtgccgccgcctacctcccgctcaacgagaacgactccctcgacatgctcctcttcgacgtcctccgcgaggcctccgccgtggccgccgcctcgccctcctcgtcctcctctcccccgacgaagacggcgacggccattgccgccgctggcgccgacgcgatcgagagcggcggggcatgcgcggccgggagggccgcggagcgcccgcactaccgcggggtgaggcggcggccgtggggcaagtacgcggcggagatccgggacccgtcgcggcccggcacgcgcctgtggctcggcaccttcggcacggccgaggaggcggccgtcgcgtacgaccgcgccgcgttccgcctgcgcggcgccaaggcgctgctcaacttcccgccggccgtgggggcgcacgaggcgcgccgcggcggcgccaatgaggcgaggtgaatgctacgtgcgttcgttctctcgccgatcgttcctctctctcttagctgcgtgttgttagcttcttagtttaggcatcgaaacattgaattcccattctgtaaccgttcattcatgcgtggtgtggtctgtggtggaccaatttgcatttcgtgggtatcgtctctagcttcgggcgaaggtgctattttggtgatctctctacggttatcaacagatatcaatcatcaattgtacagtagtactactaccagtctcgtctgaaattttacgaaatctggagaaatgtgtgaaccggtaatgagaagacagattccctcgacaaaccttgtattcatctacgattcctcggctcctttgatttaaaggaattttataggatttctgaaggactgagatccttagaattttttttttcctatgtttgttctttgatttataggattggattctataggaatttttcctatggattcttttgtgct

SEQ ID NO: 30796 - protein, 193 aa, Triticum aestivum
KTPTARPTRVAGMPLSLGADHLAAPGARAPPARVGTGMGMDTSLSLGGAAAYLPLNENDSLDMLLFDVLREASAVAAASPSSSSSPPTKTATAIAAAGADAIESGGACAAGRAAERPHYRGVRRRPWGKYAAEIRDPSRPGTRLWLGTFGTAEEAAVAYDRAAFRLRGAKALLNFPPAVGAHEARRGGANEAR

SEQ ID NO: 30797 - protein, 189 aa, Triticum aestivum
NPHRTPHPRRRHASLARRRPPRRARRARSACAGGHGHGHGHVPLAGRCRRLPPAQRERLPRHAPLRRPPRGLRRGRRLALLVLLSPDEDGDGHCRRWRRRDRERRGMRGREGRGAPALPRGEAAAVGQVRGGDPGPVAARHAPVARHLRHGRGGGRRVRPRRVPPARRQGAAQLPAGRGGARGAPRRRQ

SEQ ID NO: 30798 - protein, 181 aa, Triticum aestivum
MPLSLGADHLAAPGARAPPARVGTGMGMDTSLSLGGAAAYLPLNENDSLDMLLFDVLREASAVAAASPSSSSSPPTKTATAIAAAGADAIESGGACAAGRAAERPHYRGVRRRPWGKYAAEIRDPSRPGTRLWLGTFGTAEEAAVAYDRAAFRLRGAKALLNFPPAVGAHEARRGGANEAR

SEQ ID NO: 30799 - DNA, 461 bp, Triticum aestivum
gacccgaggcatggggcccaaccctagcctggacatgctggccgccgccgcggggatggagtcggcggccgaggcggcggcggcggcggctgcggcggaggcgcagcccaggggccgcgtggtgcggatcatcgtgcacgacgccgacgccaccgactcctcctccagcgaggacgagtcggcgccgccgccgccgctggccacgatgccgacgaccaaggaggagcgccggagggagcgcaagaagcgccgccgcgtcatgaaggccgggaggagggaggactcggggctgccgccgccgcaggcgtccgccggggcgcgcacgccctcggtgcgctaccgcggcgtgcgccagcgccgctggggcaagttcgcctcggagatccgcgacccgatccagggccgccgcctctggctcggcaccttcgacaccgccgaggaggccgccgccgcctacgacg

SEQ ID NO: 30800 - protein, 153 aa, Triticum aestivum
TRGMGPNPSLDMLAAAAGMESAAEAAAAAAAAEAQPRGRVVRIIVHDADATDSSSSEDESAPPPPLATMPTTKEERRRERKKRRRVMKAGRREDSGLPPPQASAGARTPSVRYRGVRQRRWGKFASEIRDPIQGRRLWLGTFDTAEEAAAAYD

SEQ ID NO: 30801 - protein, 150 aa, Triticum aestivum
MGPNPSLDMLAAAAGMESAAEAAAAAAAAEAQPRGRVVRIIVHDADATDSSSSEDESAPPPPLATMPTTKEERRRERKKRRRVMKAGRREDSGLPPPQASAGARTPSVRYRGVRQRRWGKFASEIRDPIQGRRLWLGTFDTAEEAAAAYD

SEQ ID NO: 30802 - protein, 142 aa, Triticum aestivum
MLAAAAGMESAAEAAAAAAAAEAQPRGRVVRIIVHDADATDSSSSEDESAPPPPLATMPTTKEERRRERKKRRRVMKAGRREDSGLPPPQASAGARTPSVRYRGVRQRRWGKFASEIRDPIQGRRLWLGTFDTAEEAAAAYD

SEQ ID NO: 30803 - DNA, 1029 bp, Triticum aestivum
ctgcttcgacttctcttctcttcacaagtcacaaggaagaaaggatacagggagagagggccacaccaccatccccagccgcagccgagccgaggttttcctccgacgagcgaaaccaagccgcatcacccccccacgcgcaccaatggacgcgaccgcggcggcggccggaggaggagatgggacgcagaggacactgaacccttatgtgactggtaactcggtgattgcaatgaaatacaaggatggtgtgatcatggcatgtgatactggagcctcctatgggtcaactttgcgatacaagagtgtggagcgtatcaaggcggttggaaagcatagccttattggagggagtggggagttcagtgatttccaggagattttgcgctatctggatgaattaactttgaatgatcatatgtgggatgatgggaactcattgggccccaaggaaatccatgcctacctgacaagagtaatgtacaacaggcgcaataagtttgaccctctatggaactccctggtgcttggtggagtgaaaaagggcccaaagggcgatgagaagtatcttggcatggttaacatgattggtacacactttgaggagaaccacattgccactggatttgggaaccatatggcaatcccaatacttcgtggtgaatggcgcgaggacatgacttttgaagaagccgttaagctgattgagaagtgcttgctggtcctgctgtaccgtgaccggtcatccatcaacaaattccagattgccaagatcacgaccgagggatcaaccatctacccgccgtatgctctgaagaccaactgggggtttgccgcctttgagaacccgtccaagggtgctgtaggaacatggtaggccatgagcttggaaacgaagcaaactgtgctgctgaaacagtttcagcccttgtgagcgtttgatccgaatatgactgaagtccacatttgctctgtatgacatgtttataatttgacttaaaagtctttgtgaacgtttaaggttgatct

SEQ ID NO: 30804 - protein, 291 aa, Triticum aestivum
CFDFSSLHKSQGRKDTGREGHTTIPSRSRAEVFLRRAKPSRITPPRAPMDATAAAAGGGDGTQRTLNPYVTGNSVIAMKYKDGVIMACDTGASYGSTLRYKSVERIKAVGKHSLIGGSGEFSDFQEILRYLDELTLNDHMWDDGNSLGPKEIHAYLTRVMYNRRNKFDPLWNSLVLGGVKKGPKGDEKYLGMVNMIGTHFEENHIATGFGNHMAIPILRGEWREDMTFEEAVKLIEKCLLVLLYRDRSSINKFQIAKITTEGSTIYPPYALKTNWGFAAFENPSKGAVGTW

SEQ ID NO: 30805 - protein, 243 aa, Triticum aestivum
MDATAAAAGGGDGTQRTLNPYVTGNSVIAMKYKDGVIMACDTGASYGSTLRYKSVERIKAVGKHSLIGGSGEFSDFQEILRYLDELTLNDHMWDDGNSLGPKEIHAYLTRVMYNRRNKFDPLWNSLVLGGVKKGPKGDEKYLGMVNMIGTHFEENHIATGFGNHMAIPILRGEWREDMTFEEAVKLIEKCLLVLLYRDRSSINKFQIAKITTEGSTIYPPYALKTNWGFAAFENPSKGAVGTW

SEQ ID NO: 30806 - protein, 214 aa, Triticum aestivum
MKYKDGVIMACDTGASYGSTLRYKSVERIKAVGKHSLIGGSGEFSDFQEILRYLDELTLNDHMWDDGNSLGPKEIHAYLTRVMYNRRNKFDPLWNSLVLGGVKKGPKGDEKYLGMVNMIGTHFEENHIATGFGNHMAIPILRGEWREDMTFEEAVKLIEKCLLVLLYRDRSSINKFQIAKITTEGSTIYPPYALKTNWGFAAFENPSKGAVGTW

SEQ ID NO: 30807 - DNA, 1542 bp, Triticum aestivum
gtgtgtcccttcccggaagaattccccaattaaaagatctctctctctctctctctctcgtcacatccacctcactccctcgcttcctgctgccattccgcggccggacatgtcgtcgtcgggggccggcgaggagggcgccgccgcgccgcaggggccgctgcccgtggagcaccgcaagggcgccaacgggctcgacaaggtcgtcctccgcgaggcccggcgcatctccgccgaggtgtacctgtatggtggccatgtaacatcatggaaagatgagcatggggaggagctgcttttcgttagtaataaggctattttcaaacctccaaaagctatacgtggaggtataccaatctgctttcctcagttttccaacttcggacagctggaagctcatggatttgcaaggaacaagatctggagtgttgacactgatccaccaccatttccagtaccaatctctagtagagcttacatcgatttaatccttaaacctactgatgaagacttaaagatctggccacatagttttgagtaccgtctgagggttgcacttggacctggtggagatctgatgctgacttcacgtataaggaatacgaatgcagatggaaagccattctcttttacctttgcatatcacacgtacttctcaatttctgatataagtgagatacgagtagaaggcctggaaactctggattacctagacaacttacaagatagggcccgcttcactgaacaaggcgatgctattgtttttgaatctgagttggacagaatatatctgggcacgccgtcaaaaattgccattattgatcatgagaaaaaaagaacatttgttgtgaggaaaggaggacttccggatgctgttgtttggaacccatgggacaaaaaagctaaggcaatggcagattttggggatgacgaatataaacgcatggtatgtgtggaagcagctgctatagaaaaggcgattactctgaagcctggcgaggagtggactggaaaattggaactatctgcagttccgtctagttattacagtggtcaattggacccagatcgtgttattcaggattcagttgttccggaggattcagtcagctagcccttagtcaagttctgtgcaggtagactattaatatcatatgcacaagggaaatggcagccacgagtgtccaaacatttcttccattctattcaaatctttgttattttcagcgtaccgaccggaacagagcgaaaatctcaacactggtttctgtttcgggatccacatgacataaagggacaaatcagtgtttgtgccctgcatagggatgatcgaagaaacatcttagatgggttgtaaaataaatttataactgtattttctttatcagtttcttttattcccagatgagtaagtttcatagtgtggccaaaaggcgaagacgatgttgaaccacctttcagataaacacacatgatgtgtaaacatgccaaggttttgagttgcatggcttgttggtggttgcggaaccatgcttattttgg

SEQ ID NO: 30808 - protein, 370 aa, Triticum aestivum
CVPSRKNSPIKRSLSLSLSRHIHLTPSLPAAIPRPDMSSSGAGEEGAAAPQGPLPVEHRKGANGLDKVVLREARRISAEVYLYGGHVTSWKDEHGEELLFVSNKAIFKPPKAIRGGIPICFPQFSNFGQLEAHGFARNKIWSVDTDPPPFPVPISSRAYIDLILKPTDEDLKIWPHSFEYRLRVALGPGGDLMLTSRIRNTNADGKPFSFTFAYHTYFSISDISEIRVEGLETLDYLDNLQDRARFTEQGDAIVFESELDRIYLGTPSKIAIIDHEKKRTFVVRKGGLPDAVVWNPWDKKAKAMADFGDDEYKRMVCVEAAAIEKAITLKPGEEWTGKLELSAVPSSYYSGQLDPDRVIQDSVVPEDSVS

SEQ ID NO: 30809 - protein, 334 aa, Triticum aestivum
MSSSGAGEEGAAAPQGPLPVEHRKGANGLDKVVLREARRISAEVYLYGGHVTSWKDEHGEELLFVSNKAIFKPPKAIRGGIPICFPQFSNFGQLEAHGFARNKIWSVDTDPPPFPVPISSRAYIDLILKPTDEDLKIWPHSFEYRLRVALGPGGDLMLTSRIRNTNADGKPFSFTFAYHTYFSISDISEIRVEGLETLDYLDNLQDRARFTEQGDAIVFESELDRIYLGTPSKIAIIDHEKKRTFVVRKGGLPDAVVWNPWDKKAKAMADFGDDEYKRMVCVEAAAIEKAITLKPGEEWTGKLELSAVPSSYYSGQLDPDRVIQDSVVPEDSVS

SEQ ID NO: 30810 - DNA, 869 bp, Triticum aestivum
atcggtacttaggttgtgatcccttcaccactgcgccatgcccacatccaaggcatttctcatcttggtgctcgccgtgctcactcccatggcggcgacctcccaggacacggcgacgaacctcaccctccacaacctgtgcgcgtaccctgtgtggccgctcatcactccgaacatcggcctccccgccatccccgacctggacgacgccgccagccgcctcgacgggggcggagaggggctcgtcaccctggcgttcccttccggcgcgtggtccggccgcgtcgtggcgcgcaccggctgcagcagcagcgatgactacgactcctcctccccctcctcctcctcgacggcggcggtggccaggtgcgtcacgggcatgccgccggcgccggtgacggtggcgcaggtgagcgtgcacgggtccggcgggctggcggagtacagcgtgagcctggtggacgggttcaacctgccggtgatggtgacgccgcacgggttcgagcagggccggcagtgcccgtccctcggctgcgccgtggacctcgacgtggactgcccccgcgacgccagggcccccgccggcgggtgcagggcccagggtcaggggcacttcttcaaggagaggtgcccggacactcggacgacgccgacggacgtggaggccacgccacagcgctgcctccagcccggcgagctcaagatcgtcttctgccccgattcttccgactagtcacttgctaccacacacactaggctagctagaccggctgtgtgtcactcacgatgccggttatataataagctaagcgattgattgctgattcgctaagccagattcaaccgaataatatgttaactattcttct

SEQ ID NO: 30811 - protein, 231 aa, Triticum aestivum
MPTSKAFLILVLAVLTPMAATSQDTATNLTLHNLCAYPVWPLITPNIGLPAIPDLDDAASRLDGGGEGLVTLAFPSGAWSGRVVARTGCSSSDDYDSSSPSSSSTAAVARCVTGMPPAPVTVAQVSVHGSGGLAEYSVSLVDGFNLPVMVTPHGFEQGRQCPSLGCAVDLDVDCPRDARAPAGGCRAQGQGHFFKERCPDTRTTPTDVEATPQRCLQPGELKIVFCPDSSD

SEQ ID NO: 30812 - protein, 214 aa, Triticum aestivum
MAATSQDTATNLTLHNLCAYPVWPLITPNIGLPAIPDLDDAASRLDGGGEGLVTLAFPSGAWSGRVVARTGCSSSDDYDSSSPSSSSTAAVARCVTGMPPAPVTVAQVSVHGSGGLAEYSVSLVDGFNLPVMVTPHGFEQGRQCPSLGCAVDLDVDCPRDARAPAGGCRAQGQGHFFKERCPDTRTTPTDVEATPQRCLQPGELKIVFCPDSSD

SEQ ID NO: 30813 - protein, 131 aa, Triticum aestivum
RYLGCDPFTTAPCPHPRHFSSWCSPCSLPWRRPPRTRRRTSPSTTCARTLCGRSSLRTSASPPSPTWTTPPAASTGAERGSSPWRSLPARGPAASWRAPAAAAAMTTTPPPPPPPRRRRWPGASRACRRRR

SEQ ID NO: 30814 - DNA, 368 bp, Triticum aestivum
catgcttctctgattcaagatctaagaaactgtacgacgatttagctgtgtacttctgttcccactcatcttcatacttggattactctcctgagcagagaagcatgttaagaatgttgttctggaaaggcatctgtaagtgcctggtggaggtggtctctgaagagactgacagtttctcttatgttaagaaatgcatcgaatggttggtacctctgttgaatctctgtaatgatggtcaacctgaattcgtggatgagtggtctgctgctatcaagtgtctcattgttgctcagaaaagttggtcaagtgatatgctgcaggtgcacagtaccacatccttaagtgaagggaaactttgatgctag

SEQ ID NO: 30815 - protein, 119 aa, Triticum aestivum
CFSDSRSKKLYDDLAVYFCSHSSSYLDYSPEQRSMLRMLFWKGICKCLVEVVSEETDSFSYVKKCIEWLVPLLNLCNDGQPEFVDEWSAAIKCLIVAQKSWSSDMLQVHSTTSLSEGKL

SEQ ID NO: 30816 - protein, 85 aa, Triticum aestivum
MLRMLFWKGICKCLVEVVSEETDSFSYVKKCIEWLVPLLNLCNDGQPEFVDEWSAAIKCLIVAQKSWSSDMLQVHSTTSLSEGKL

SEQ ID NO: 30817 - protein, 82 aa, Triticum aestivum
MLFWKGICKCLVEVVSEETDSFSYVKKCIEWLVPLLNLCNDGQPEFVDEWSAAIKCLIVAQKSWSSDMLQVHSTTSLSEGKL

SEQ ID NO: 30818 - DNA, 1408 bp, Triticum aestivum
gaacatcctaatcgaaaaagattggcgttcaaacagtccagttccagcccgactcgggccgcacccatgtctcgtctcatcccccggcggctccaccgcgccgtctccgccggcggcgcgacctcctcgagcccctcaaatctccgcagcagcgacgccaccaccgccgccacctcaaatgcgatcgtcagcctcgtcgcggcaggcggcgacggcggcagcctggaggcggacctggaccgcctcggcccgcccctctccgacgccgccgtgtcggcggcgctccgcgcgctcacggaccgcggcgtccccgcgttccgcttcttcgcatggctctcccggcacaggggcgtccccccgagcgcccgcgcccacaacctgctcgtccagaacgccggcaggctggccgactaccccaccatggcccgcgccctcgacctagtgtcggcgcgacggctcccccttaccgagcaggcgttcttgttcctggaggccgccgcgaggtcgtcctcatctgcgagcagcgtggatgacgcggtgagggcgactctgacggttttggatggtgccggtggcccgtgccgcgcgtccggcgtgttctcgctggtcaaggcgttggcctcgatcggcgagttcgacgcggccgtctgggtgatcgaggagacggccaggagagcgagctactacaacgtcctcttggctgccaagtgcaaggctggtgacttccggggcgcccgcgaggtgttcgacggaatgaggaaggggagctgcggcccaaatgccaactcctggaactacctcctcgggtgcctgctgaagaatggcagggccaccgaagcatgcgacctcgttgagaccatggagaggtcgggacacgacgacatcccaaactcactgtcgtacgagatcctcacataccatgcctgcaaggcggggaagatggattcggcaaggcagattctcgatcagttgttctcagaaaatctgacgccgaggattacaatccacacagccttcatcaaagggtacttctatactgggagaatcaaagatgcttgcgattatgtgagggctatgagcaccagggattcacactccaccaacaggaactacagcctgctcgccaagctgttgcacaggtcggggaggatcgtcgaggctggaagtgtcctgtatgagttgatggagaagggcctcaggcctgaccattctgcttatgttacagtgtccaaaggtttgcacaagatgggaaggggagatctgtgtgctgaattgaagtccttgtttcagaatttcattgtacagtcaggtttggaacactgatttacgtttgagctcttgttgagtcatctacttgagtgaaacttgcttgtccacataagatatttaggtgccatttatgccttcc

SEQ ID NO: 30819 - protein, 440 aa, Triticum aestivum
EHPNRKRLAFKQSSSSPTRAAPMSRLIPRRLHRAVSAGGATSSSPSNLRSSDATTAATSNAIVSLVAAGGDGGSLEADLDRLGPPLSDAAVSAALRALTDRGVPAFRFFAWLSRHRGVPPSARAHNLLVQNAGRLADYPTMARALDLVSARRLPLTEQAFLFLEAAARSSSSASSVDDAVRATLTVLDGAGGPCRASGVFSLVKALASIGEFDAAVWVIEETARRASYYNVLLAAKCKAGDFRGAREVFDGMRKGSCGPNANSWNYLLGCLLKNGRATEACDLVETMERSGHDDIPNSLSYEILTYHACKAGKMDSARQILDQLFSENLTPRITIHTAFIKGYFYTGRIKDACDYVRAMSTRDSHSTNRNYSLLAKLLHRSGRIVEAGSVLYELMEKGLRPDHSAYVTVSKGLHKMGRGDLCAELKSLFQNFIVQSGLEH

SEQ ID NO: 30820 - protein, 418 aa, Triticum aestivum
MSRLIPRRLHRAVSAGGATSSSPSNLRSSDATTAATSNAIVSLVAAGGDGGSLEADLDRLGPPLSDAAVSAALRALTDRGVPAFRFFAWLSRHRGVPPSARAHNLLVQNAGRLADYPTMARALDLVSARRLPLTEQAFLFLEAAARSSSSASSVDDAVRATLTVLDGAGGPCRASGVFSLVKALASIGEFDAAVWVIEETARRASYYNVLLAAKCKAGDFRGAREVFDGMRKGSCGPNANSWNYLLGCLLKNGRATEACDLVETMERSGHDDIPNSLSYEILTYHACKAGKMDSARQILDQLFSENLTPRITIHTAFIKGYFYTGRIKDACDYVRAMSTRDSHSTNRNYSLLAKLLHRSGRIVEAGSVLYELMEKGLRPDHSAYVTVSKGLHKMGRGDLCAELKSLFQNFIVQSGLEH

SEQ ID NO: 30821 - protein, 300 aa, Triticum aestivum
MARALDLVSARRLPLTEQAFLFLEAAARSSSSASSVDDAVRATLTVLDGAGGPCRASGVFSLVKALASIGEFDAAVWVIEETARRASYYNVLLAAKCKAGDFRGAREVFDGMRKGSCGPNANSWNYLLGCLLKNGRATEACDLVETMERSGHDDIPNSLSYEILTYHACKAGKMDSARQILDQLFSENLTPRITIHTAFIKGYFYTGRIKDACDYVRAMSTRDSHSTNRNYSLLAKLLHRSGRIVEAGSVLYELMEKGLRPDHSAYVTVSKGLHKMGRGDLCAELKSLFQNFIVQSGLEH

SEQ ID NO: 30822 - DNA, 640 bp, Triticum aestivum
acaccaaaacaaccagatctcaggctcatagctcagacaatggagaagtccccagccacagcaggataccatcatgcaccacttttccaagagccacttggtattctcatccttttcatcctcacctggtgcatctcgaagcttcaaagtctccttcccacttcttgttgccaatcctgcacttgtactgtctccccgacaacctcgacgccggtcctcgccgagacgaagatatcgaaggcaccaaataagagtgaatatgatgagatgaatgcgacgcagtcagatgccgaggtagccatgagaaagatgggacttgattttgatcaagagaaaagctgcgaatatatttctacgcttttcgatgaagacgagccaagcttcaaggaagtgaaaatggcattcttggtttttgatgagaacaatgatgggtacatcgatgcattggatttgcgacgagtcctccacaacttagggttaggcgaccgggtaggggtcaatgagtctgagcagatgattgctagatatgacatgaacaataacaagaggttagatttgatggagttcactaaggttttggaggacagcttttgctagacccctttatttctgtatttttttcctatatctgtagatgcat

SEQ ID NO: 30823 - protein, 198 aa, Triticum aestivum
TPKQPDLRLIAQTMEKSPATAGYHHAPLFQEPLGILILFILTWCISKLQSLLPTSCCQSCTCTVSPTTSTPVLAETKISKAPNKSEYDEMNATQSDAEVAMRKMGLDFDQEKSCEYISTLFDEDEPSFKEVKMAFLVFDENNDGYIDALDLRRVLHNLGLGDRVGVNESEQMIARYDMNNNKRLDLMEFTKVLEDSFC

SEQ ID NO: 30824 - protein, 185 aa, Triticum aestivum
MEKSPATAGYHHAPLFQEPLGILILFILTWCISKLQSLLPTSCCQSCTCTVSPTTSTPVLAETKISKAPNKSEYDEMNATQSDAEVAMRKMGLDFDQEKSCEYISTLFDEDEPSFKEVKMAFLVFDENNDGYIDALDLRRVLHNLGLGDRVGVNESEQMIARYDMNNNKRLDLMEFTKVLEDSFC

SEQ ID NO: 30825 - protein, 109 aa, Triticum aestivum
MNATQSDAEVAMRKMGLDFDQEKSCEYISTLFDEDEPSFKEVKMAFLVFDENNDGYIDALDLRRVLHNLGLGDRVGVNESEQMIARYDMNNNKRLDLMEFTKVLEDSFC

SEQ ID NO: 30826 - DNA, 762 bp, Triticum aestivum
  misc_feature (435)..(436): n is a, c, g, or t
aacttcataagccataacaagttcgaagactgaaggtgcaaaaggttcacagcagagttgtctgatacgtcgcgccacacagcacttccaagctgctcatctgtgcacgtggcgcagtttaacttggttcagttggttacccgtggcttcaccgaaaccgacctgacccctggctgatctcccttgtcctgcgttttcgctctcgcctgacgttctgatttgatgcttgtggtttgtttagtgtagtaggttcctatcatgttctttatatactcattatatttgagtttggcagttgttaaaagaaggcagttcataacagtgttatgtctctgctgtgtatttttcattttgttttacattaggttcctttgccaaaatgtgatggtaatggtaatctgaatgaaacattcgatccggctattcttattctannaaaaaaaaaaaaaaaaaaaaaaaaaaaaaaaaaaaaaaaaaaaaaaaaaaaaaaaaaaaaaaaaaaaaaaaaaaaaaaaaaaaaaagaaaaaaaaaaaaaaaaaggttaatcaaaaccgccacaccccaaggggggccccgaaaccaaattccccaaaaaggaagccaaaaaacccgcgtcaatgggccgccttttaaaaaggcggggagggaaaaaacccgggggaaaccaaaataaaccccttggaaaaaaacccccttttcccaagtggggaaaaagaaaaaaagccccccccaaacccccttcccaaaaagtggccaacccg

SEQ ID NO: 30827 - protein, 47 aa, Triticum aestivum
  misc_feature (11)..(12): Xaa can be any naturally occurring amino acid
MKHSIRLFLFXXKKKKKKKKKKKKKKKKKKKKKKKKKKKKEKKKKKG

SEQ ID NO: 30828 - protein, 47 aa, Triticum aestivum
MFFIYSLYLSLAVVKRRQFITVLCLCCVFFILFYIRFLCQNVMVMVI

SEQ ID NO: 30829 - protein, 48 aa, Triticum aestivum
MGRLLKRRGGKKPGGNQNKPLGKKPPFPKWGKRKKAPPKPPSQKVANP

SEQ ID NO: 30830 - DNA, 1687 bp, Triticum aestivum
agaacatcataatcgaaaatcgcctccgctcgctcccatcctcattccccagtcgccgcccaagtcaaaaagagggggaagcttctccaccagagtccccaagcccatgaacgactagtcgctgcgaagcaccaaccctagaacccaaccctactctctcccctcctcggctcctcccctcgcgagcggcgacgaagaggccatggatacctccggcggcggcaccgccgcgggcggggccgcgcagatccaggggatggcgacacacggcggccgctacgtgctctacaacgtctacggcaacctcttcgaggtcgcctccaagtacgcccctcccatccgccccatcggccgaggcgcctacggcattgtctgcgcggcggttagttcggatacaggagaggaggttgcgatcaagaagattggaaatgcgtttgacaaccacatcgatgccaagcggacgctgagagaaataaagcttcttcgccacatggaccatgagaatattcttgccataaaggatttaatacgccccccaagaagagatgattttaaggatgtgtacattgttactgagttgatggacaccgacctccatcagatcattcgctcaaatcaatcattgactgatgaccattgccagtacttcttgtatcagttgcttcgagggctaaaatatgtgcactcagcaaatgtcttgcaccgtgatctgaagccaagcaatttgttcctaaacgcaaattgcgatctcaagattgcagactttgggcttgcaaggaccacttcagaaaccgatctcatgacagagtatgtggtcactcgttggtaccgagcaccagagttgctgttgaactgttcacaatatactgctgctattgatgtctggtcagttgggtgtatacttggtgaaattattactcgtcaacccctatttcctggaagagattacatccaacagttaaaattgatcactgagctgataggatcaccagatgattcgagcctgggatttcttcggagtgacaatgcacgaagatacatgaagcaattaccacagtacccaaggcaggacttccgcctgcgcttccgcaacatgtctgatggtgcagttgatctgttagaaagaatgctggtgtttgacccaagcagacgcatcactgttgacgaggctctgcaccacccatacttggcttctcttcatgacatcaatgaagaacccacttgcccggcacctttcagctttgattttgagcaaccatcttttacagaagaacatatgaaagagctcatctggagggaaactttagcatttaaccctgatcctccctactaagagccaagaccaaattaccagctgagggcattgaagatctacctctagctctagtgaagccgatatttccatgtcttgtgcatctatttattttatgctcgcttattgggcgaatgggcatggattatttgttgctgtaactatttcttttggggcctttctgaagaaacgacatttgtatgagatggcttgcgcctgggcttgtattataccggttgattgaataaattcttcttgtgtatctaaggcttgtaattttgtgtacacttatttaaacatccaaaaaaaaaaaaaaaaaagcttatcgataccgtcgacctgtttaaacacaataaagttggaactggagggggg

SEQ ID NO: 30831 - protein, 376 aa, Triticum aestivum
MDTSGGGTAAGGAAQIQGMATHGGRYVLYNVYGNLFEVASKYAPPIRPIGRGAYGIVCAAVSSDTGEEVAIKKIGNAFDNHIDAKRTLREIKLLRHMDHENILAIKDLIRPPRRDDFKDVYIVTELMDTDLHQIIRSNQSLTDDHCQYFLYQLLRGLKYVHSANVLHRDLKPSNLFLNANCDLKIADFGLARTTSETDLMTEYVVTRWYRAPELLLNCSQYTAAIDVWSVGCILGEIITRQPLFPGRDYIQQLKLITELIGSPDDSSLGFLRSDNARRYMKQLPQYPRQDFRLRFRNMSDGAVDLLERMLVFDPSRRITVDEALHHPYLASLHDINEEPTCPAPFSFDFEQPSFTEEHMKELIWRETLAFNPDPPY

SEQ ID NO: 30832 - protein, 358 aa, Triticum aestivum
MATHGGRYVLYNVYGNLFEVASKYAPPIRPIGRGAYGIVCAAVSSDTGEEVAIKKIGNAFDNHIDAKRTLREIKLLRHMDHENILAIKDLIRPPRRDDFKDVYIVTELMDTDLHQIIRSNQSLTDDHCQYFLYQLLRGLKYVHSANVLHRDLKPSNLFLNANCDLKIADFGLARTTSETDLMTEYVVTRWYRAPELLLNCSQYTAAIDVWSVGCILGEIITRQPLFPGRDYIQQLKLITELIGSPDDSSLGFLRSDNARRYMKQLPQYPRQDFRLRFRNMSDGAVDLLERMLVFDPSRRITVDEALHHPYLASLHDINEEPTCPAPFSFDFEQPSFTEEHMKELIWRETLAFNPDPPY

SEQ ID NO: 30833 - protein, 280 aa, Triticum aestivum
MDHENILAIKDLIRPPRRDDFKDVYIVTELMDTDLHQIIRSNQSLTDDHCQYFLYQLLRGLKYVHSANVLHRDLKPSNLFLNANCDLKIADFGLARTTSETDLMTEYVVTRWYRAPELLLNCSQYTAAIDVWSVGCILGEIITRQPLFPGRDYIQQLKLITELIGSPDDSSLGFLRSDNARRYMKQLPQYPRQDFRLRFRNMSDGAVDLLERMLVFDPSRRITVDEALHHPYLASLHDINEEPTCPAPFSFDFEQPSFTEEHMKELIWRETLAFNPDPPY

SEQ ID NO: 30834 - DNA, 1459 bp, Triticum aestivum
agacacccaacttgtcaccaccatcctctcctcctcctcctcctctatccagtgagctcgagtcggcactgcactctctctgccagctccggatcgatctcggcttcttgatcgatccatcgtttgttgtctggcctagcacactcgggttcttggtccagtcgatcatggtgcagccggtgttcgacgcggcggtgctgagcggccgggcggacatcccgtcgcagttcatctggcccgagggcgagagcccgaccccggacgccgccgaggagctgcacgtcccgctcatcgacatcggcggcatgctctccggcgaccccgccgcggccgccgaggtgacgcgcctcgtgggcgaggcctgcgagcggcacggcttcttccaggtcgtgaaccacggtatcgacgccgagctgctggccgacgcgcaccgctgcgtggacaacttcttcacgatgcccctcccggagaagcagcgcgcgctgcgccaccccggcgagtcgtgcggctacgccagcagcttcaccggccggttcgcgtccaagctgccgtggaaggagaccctgtccttccgctcctgcccctccgaccccgccctcgtcgtcgactacatcgtcgccaccctcggcgaggaccaccgccgcctcggggaggtgtacgctcggtactgctcggagatgagccgtctgtcgctggagatcatggaggtgctcggggagagcctgggcgtcggccgcgcccactaccggcgcttcttcgagggcaacgactccatcatgcgcctcaactactacccgccgtgccagcggccgttggagacgctgggcacgggcccgcattgcgacccgacgtccctgaccatcctccaccaggacaacgtcggcggcctgcaggtgcacacggagggccggtggcgctccatccgaccccgcgccgacgccttcgtggtcaacatcggcgacaccttcatggcgctgtctaacggacggtacaagagctgcctccacagagcggtggtgaacagccgggtcccgaggaagtcgctggccttcttcctgtgcccggagatggacaaggtggtggcgccgccggggacgctggtggacgccgccaacccgcgcgcctacccggacttcacgtggcggtcgctgctggacttcacgcagaagcactaccgggccgacatgaagaccctcgaggtcttctcctcctggatcgtccagcagcagcagccccagcccgccaggacatgatggattgctctgctcctcccaccattagccagccattgattcagcttagctgctgagactgagaaaagagagacatcgtcatccgtcgatcgaatgttattattacagcttaattggttgatctagtggtagcacgtacgtacgaagaagcatggatggatggcaggatttcctagatgataatttcctaaaaccgagtcgtcgtc

SEQ ID NO: 30835 - protein, 416 aa, Triticum aestivum
TPNLSPPSSPPPPPLSSELESALHSLCQLRIDLGFLIDPSFVVWPSTLGFLVQSIMVQPVFDAAVLSGRADIPSQFIWPEGESPTPDAAEELHVPLIDIGGMLSGDPAAAAEVTRLVGEACERHGFFQVVNHGIDAELLADAHRCVDNFFTMPLPEKQRALRHPGESCGYASSFTGRFASKLPWKETLSFRSCPSDPALVVDYIVATLGEDHRRLGEVYARYCSEMSRLSLEIMEVLGESLGVGRAHYRRFFEGNDSIMRLNYYPPCQRPLETLGTGPHCDPTSLTILHQDNVGGLQVHTEGRWRSIRPRADAFVVNIGDTFMALSNGRYKSCLHRAVVNSRVPRKSLAFFLCPEMDKVVAPPGTLVDAANPRAYPDFTWRSLLDFTQKHYRADMKTLEVFSSWIVQQQQPQPART

SEQ ID NO: 30836 - protein, 361 aa, Triticum aestivum
MVQPVFDAAVLSGRADIPSQFIWPEGESPTPDAAEELHVPLIDIGGMLSGDPAAAAEVTRLVGEACERHGFFQVVNHGIDAELLADAHRCVDNFFTMPLPEKQRALRHPGESCGYASSFTGRFASKLPWKETLSFRSCPSDPALVVDYIVATLGEDHRRLGEVYARYCSEMSRLSLEIMEVLGESLGVGRAHYRRFFEGNDSIMRLNYYPPCQRPLETLGTGPHCDPTSLTILHQDNVGGLQVHTEGRWRSIRPRADAFVVNIGDTFMALSNGRYKSCLHRAVVNSRVPRKSLAFFLCPEMDKVVAPPGTLVDAANPRAYPDFTWRSLLDFTQKHYRADMKTLEVFSSWIVQQQQPQPART

SEQ ID NO: 30837 - protein, 315 aa, Triticum aestivum
MLSGDPAAAAEVTRLVGEACERHGFFQVVNHGIDAELLADAHRCVDNFFTMPLPEKQRALRHPGESCGYASSFTGRFASKLPWKETLSFRSCPSDPALVVDYIVATLGEDHRRLGEVYARYCSEMSRLSLEIMEVLGESLGVGRAHYRRFFEGNDSIMRLNYYPPCQRPLETLGTGPHCDPTSLTILHQDNVGGLQVHTEGRWRSIRPRADAFVVNIGDTFMALSNGRYKSCLHRAVVNSRVPRKSLAFFLCPEMDKVVAPPGTLVDAANPRAYPDFTWRSLLDFTQKHYRADMKTLEVFSSWIVQQQQPQPART
